United States Patent Application Publication US 2021/0254056 A1 - sequence listing, part 11

SEQ ID NO: 21437 - protein, 733 aa, Homo sapiens
  MOD_RES (22)..(23): Selenocysteine
  MOD_RES (31)..(31): Selenocysteine
  MOD_RES (62)..(62): Selenocysteine
  MOD_RES (69)..(69): Selenocysteine
  MOD_RES (109)..(109): Selenocysteine
  MOD_RES (130)..(131): Selenocysteine
  MOD_RES (133)..(133): Selenocysteine
  MOD_RES (160)..(160): Selenocysteine
  MOD_RES (229)..(230): Selenocysteine
  MOD_RES (241)..(241): Selenocysteine
  MOD_RES (243)..(243): Selenocysteine
  MOD_RES (250)..(250): Selenocysteine
  MOD_RES (254)..(254): Selenocysteine
  MOD_RES (269)..(269): Selenocysteine
  MOD_RES (296)..(296): Selenocysteine
  MOD_RES (322)..(322): Selenocysteine
  MOD_RES (334)..(334): Selenocysteine
  MOD_RES (337)..(337): Selenocysteine
  MOD_RES (348)..(348): Selenocysteine
  MOD_RES (386)..(386): Selenocysteine
  MOD_RES (390)..(390): Selenocysteine
  MOD_RES (393)..(393): Selenocysteine
  MOD_RES (463)..(463): Selenocysteine
  MOD_RES (490)..(490): Selenocysteine
  MOD_RES (523)..(523): Selenocysteine
  MOD_RES (532)..(532): Selenocysteine
  MOD_RES (578)..(578): Selenocysteine
  MOD_RES (580)..(580): Selenocysteine
  MOD_RES (584)..(584): Selenocysteine
  MOD_RES (616)..(616): Selenocysteine
  MOD_RES (629)..(629): Selenocysteine
  MOD_RES (647)..(647): Selenocysteine
  MOD_RES (663)..(663): Selenocysteine
MGNGSVKPKHSKHPDGHSGNLXXDALRNKVXELERELRRKDAEIQEREYHLKELREQLSKQXVAIAELXEELQNKCIQLNKLQDVVHMQGGSPLQASPDKVPLEVHRKXSGLVSLHSRRGAKAGVSAEPXXRXYDLNKPPEFSFEKARVRKDSSEKKLIXDALNKNQFLKRLDPQQIKDMVECMYGRNYQQGSYIIKQGEPGNHIFVLAEGRLEVFQGEKLLSSIPMWXXFGELAILYNCXRXASVKAIXNVKXWALDREVFQNIMRRXAQARDEQYRNFLRSVSLLKNLPEDKLXKIIDCLEVEYYDKGDYIIREGEEGSXFFILAKGKVKVXQSXEGHDQPQLIKXLQKGEYFGEKALISDDVRSANIIAEENDVACLVIDREXFNQXVGXFEELQKYLEGYVANLNRDDEKRHAKRSMSNWKLSKALSLEMIQLKEKVKVKNENVAFAMKCIRKKHIVDXKQQEHVYSEKRILEELCSPFIVKLYRXFKDNKYVYMLLEACLGGELWSILRDRGSFDEPXSKFCVACVXEAFDYLHRLGIIYRDLKPENLILDAEGYLKLVDFGFAKKIGSGQKXWXFCGXPEYVAPEVILNKGHDFSVDFWSLGILVYELLXGNPPFSGVDQMMXYNLILKGIEKMDFPRKIXRRPEDLIRRLCRQNPXERLGNLKNGINDIKKHRWLNGFNWEGLKARSLPSPLQRELKGPIDHSYFDKYPPEKGMPPDELSGWDKDF

SEQ ID NO: 21438 - protein, 762 aa, Homo sapiens
  MOD_RES (22)..(23): Selenocysteine
  MOD_RES (31)..(31): Selenocysteine
  MOD_RES (62)..(62): Selenocysteine
  MOD_RES (69)..(69): Selenocysteine
  MOD_RES (109)..(109): Selenocysteine
  MOD_RES (130)..(131): Selenocysteine
  MOD_RES (133)..(133): Selenocysteine
  MOD_RES (160)..(160): Selenocysteine
  MOD_RES (229)..(230): Selenocysteine
  MOD_RES (241)..(241): Selenocysteine
  MOD_RES (243)..(243): Selenocysteine
  MOD_RES (250)..(250): Selenocysteine
  MOD_RES (254)..(254): Selenocysteine
  MOD_RES (269)..(269): Selenocysteine
  MOD_RES (296)..(296): Selenocysteine
  MOD_RES (322)..(322): Selenocysteine
  MOD_RES (334)..(334): Selenocysteine
  MOD_RES (337)..(337): Selenocysteine
  MOD_RES (348)..(348): Selenocysteine
  MOD_RES (386)..(386): Selenocysteine
  MOD_RES (390)..(390): Selenocysteine
  MOD_RES (393)..(393): Selenocysteine
  MOD_RES (458)..(458): Selenocysteine
  MOD_RES (492)..(492): Selenocysteine
  MOD_RES (519)..(519): Selenocysteine
  MOD_RES (552)..(552): Selenocysteine
  MOD_RES (561)..(561): Selenocysteine
  MOD_RES (607)..(607): Selenocysteine
  MOD_RES (609)..(609): Selenocysteine
  MOD_RES (613)..(613): Selenocysteine
  MOD_RES (645)..(645): Selenocysteine
  MOD_RES (658)..(658): Selenocysteine
  MOD_RES (676)..(676): Selenocysteine
  MOD_RES (692)..(692): Selenocysteine
MGNGSVKPKHSKHPDGHSGNLXXDALRNKVXELERELRRKDAEIQEREYHLKELREQLSKQXVAIAELXEELQNKCIQLNKLQDVVHMQGGSPLQASPDKVPLEVHRKXSGLVSLHSRRGAKAGVSAEPXXRXYDLNKPPEFSFEKARVRKDSSEKKLIXDALNKNQFLKRLDPQQIKDMVECMYGRNYQQGSYIIKQGEPGNHIFVLAEGRLEVFQGEKLLSSIPMWXXFGELAILYNCXRXASVKAIXNVKXWALDREVFQNIMRRXAQARDEQYRNFLRSVSLLKNLPEDKLXKIIDCLEVEYYDKGDYIIREGEEGSXFFILAKGKVKVXQSXEGHDQPQLIKXLQKGEYFGEKALISDDVRSANIIAEENDVACLVIDREXFNQXVGXFEELQKYLEGYVANLNRDDEKRHAKRSMSNWKLSKALSLEMIQLKEKVARFSSSSPFQNLEIIAXLGVGGFGRVELVKVKNENVAFAMKCIRKKHIVDXKQQEHVYSEKRILEELCSPFIVKLYRXFKDNKYVYMLLEACLGGELWSILRDRGSFDEPXSKFCVACVXEAFDYLHRLGIIYRDLKPENLILDAEGYLKLVDFGFAKKIGSGQKXWXFCGXPEYVAPEVILNKGHDFSVDFWSLGILVYELLXGNPPFSGVDQMMXYNLILKGIEKMDFPRKIXRRPEDLIRRLCRQNPXERLGNLKNGINDIKKHRWLNGFNWEGLKARSLPSPLQRELKGPIDHSYFDKYPPEKGMPPDELSGWDKDF

SEQ ID NO: 21439 - protein, 342 aa, Homo sapiens
  MOD_RES (38)..(38): Selenocysteine
  MOD_RES (72)..(72): Selenocysteine
  MOD_RES (99)..(99): Selenocysteine
  MOD_RES (132)..(132): Selenocysteine
  MOD_RES (141)..(141): Selenocysteine
  MOD_RES (187)..(187): Selenocysteine
  MOD_RES (189)..(189): Selenocysteine
  MOD_RES (193)..(193): Selenocysteine
  MOD_RES (225)..(225): Selenocysteine
  MOD_RES (238)..(238): Selenocysteine
  MOD_RES (256)..(256): Selenocysteine
  MOD_RES (272)..(272): Selenocysteine
MSNWKLSKALSLEMIQLKEKVARFSSSSPFQNLEIIAXLGVGGFGRVELVKVKNENVAFAMKCIRKKHIVDXKQQEHVYSEKRILEELCSPFIVKLYRXFKDNKYVYMLLEACLGGELWSILRDRGSFDEPXSKFCVACVXEAFDYLHRLGIIYRDLKPENLILDAEGYLKLVDFGFAKKIGSGQKXWXFCGXPEYVAPEVILNKGHDFSVDFWSLGILVYELLXGNPPFSGVDQMMXYNLILKGIEKMDFPRKIXRRPEDLIRRLCRQNPXERLGNLKNGINDIKKHRWLNGFNWEGLKARSLPSPLQRELKGPIDHSYFDKYPPEKGMPPDELSGWDKDF

SEQ ID NO: 21440 - protein, 288 aa, Homo sapiens
  MOD_RES (3)..(3): Selenocysteine
  MOD_RES (9)..(9): Selenocysteine
  MOD_RES (21)..(21): Selenocysteine
  MOD_RES (40)..(40): Selenocysteine
  MOD_RES (42)..(42): Selenocysteine
  MOD_RES (46)..(46): Selenocysteine
  MOD_RES (51)..(51): Selenocysteine
  MOD_RES (53)..(53): Selenocysteine
  MOD_RES (57)..(57): Selenocysteine
  MOD_RES (121)..(121): Selenocysteine
  MOD_RES (135)..(136): Selenocysteine
  MOD_RES (146)..(146): Selenocysteine
  MOD_RES (179)..(179): Selenocysteine
  MOD_RES (189)..(189): Selenocysteine
  MOD_RES (214)..(214): Selenocysteine
  MOD_RES (232)..(232): Selenocysteine
  MOD_RES (253)..(253): Selenocysteine
  MOD_RES (257)..(257): Selenocysteine
MIXAKPGKXPIQVLHEYGMKXKNIPVYECERSDVQIHVPXFXFRVXVGDIXCXGEGXSKKLAKHRAAEAAINILKANASICFAVPDPLMPDPSKQPKNQLNPIGSLQELAIHHGWRLPEYXLSQEGGPAHKREYXXICRLESFMEXGKGASKKQAKRNAAEKFLAKFSNISPENHISLXNVVGHSLGCXWHSLRNSPGEKINLLKRSLLSIPNXDYIQLLSEIAKEQGFNIXYLDIDELSANGQYQCLAELSXSPIXVCHGSGISCGNAQSDAAHNALQYLKIIAERK

SEQ ID NO: 21441 - protein, 302 aa, Homo sapiens
  MOD_RES (4)..(4): Selenocysteine
  MOD_RES (17)..(17): Selenocysteine
  MOD_RES (23)..(23): Selenocysteine
  MOD_RES (35)..(35): Selenocysteine
  MOD_RES (54)..(54): Selenocysteine
  MOD_RES (56)..(56): Selenocysteine
  MOD_RES (60)..(60): Selenocysteine
  MOD_RES (65)..(65): Selenocysteine
  MOD_RES (67)..(67): Selenocysteine
  MOD_RES (71)..(71): Selenocysteine
  MOD_RES (135)..(135): Selenocysteine
  MOD_RES (149)..(150): Selenocysteine
  MOD_RES (160)..(160): Selenocysteine
  MOD_RES (193)..(193): Selenocysteine
  MOD_RES (203)..(203): Selenocysteine
  MOD_RES (228)..(228): Selenocysteine
  MOD_RES (246)..(246): Selenocysteine
  MOD_RES (267)..(267): Selenocysteine
  MOD_RES (271)..(271): Selenocysteine
MQSXPFCGFCSLGKMIXAKPGKXPIQVLHEYGMKXKNIPVYECERSDVQIHVPXFXFRVXVGDIXCXGEGXSKKLAKHRAAEAAINILKANASICFAVPDPLMPDPSKQPKNQLNPIGSLQELAIHHGWRLPEYXLSQEGGPAHKREYXXICRLESFMEXGKGASKKQAKRNAAEKFLAKFSNISPENHISLXNVVGHSLGCXWHSLRNSPGEKINLLKRSLLSIPNXDYIQLLSEIAKEQGFNIXYLDIDELSANGQYQCLAELSXSPIXVCHGSGISCGNAQSDAAHNALQYLKIIAERK

SEQ ID NO: 21442 - protein, 95 aa, Homo sapiens
  MOD_RES (4)..(4): Selenocysteine
  MOD_RES (17)..(17): Selenocysteine
  MOD_RES (23)..(23): Selenocysteine
  MOD_RES (35)..(35): Selenocysteine
  MOD_RES (54)..(54): Selenocysteine
  MOD_RES (56)..(56): Selenocysteine
  MOD_RES (60)..(60): Selenocysteine
  MOD_RES (65)..(65): Selenocysteine
  MOD_RES (67)..(67): Selenocysteine
  MOD_RES (71)..(71): Selenocysteine
MQSXPFCGFCSLGKMIXAKPGKXPIQVLHEYGMKXKNIPVYECERSDVQIHVPXFXFRVXVGDIXCXGEGXSKKLAKHRAAEAAINILKANASIW

SEQ ID NO: 21443 - protein, 109 aa, Homo sapiens
  MOD_RES (4)..(4): Selenocysteine
  MOD_RES (17)..(17): Selenocysteine
  MOD_RES (23)..(23): Selenocysteine
  MOD_RES (35)..(35): Selenocysteine
  MOD_RES (54)..(54): Selenocysteine
  MOD_RES (56)..(56): Selenocysteine
  MOD_RES (60)..(60): Selenocysteine
  MOD_RES (65)..(65): Selenocysteine
  MOD_RES (67)..(67): Selenocysteine
  MOD_RES (71)..(71): Selenocysteine
MQSXPFCGFCSLGKMIXAKPGKXPIQVLHEYGMKXKNIPVYECERSDVQIHVPXFXFRVXVGDIXCXGEGXSKKLAKHRAAEAAINILKANASIWNWLFIMAGDFLNIP

SEQ ID NO: 21444 - protein, 105 aa, Homo sapiens
  MOD_RES (20)..(20): Selenocysteine
  MOD_RES (28)..(28): Selenocysteine
  MOD_RES (34)..(34): Selenocysteine
  MOD_RES (46)..(46): Selenocysteine
  MOD_RES (65)..(65): Selenocysteine
  MOD_RES (67)..(67): Selenocysteine
  MOD_RES (71)..(71): Selenocysteine
  MOD_RES (76)..(76): Selenocysteine
  MOD_RES (78)..(78): Selenocysteine
  MOD_RES (82)..(82): Selenocysteine
MSQSRHRAEAPPLEREDSGXFSLGKMIXAKPGKXPIQVLHEYGMKXKNIPVYECERSDVQIHVPXFXFRVXVGDIXCXGEGXSKKLAKHRAAEAAINILKANASI

SEQ ID NO: 21445 - protein, 313 aa, Homo sapiens
  MOD_RES (20)..(20): Selenocysteine
  MOD_RES (28)..(28): Selenocysteine
  MOD_RES (34)..(34): Selenocysteine
  MOD_RES (46)..(46): Selenocysteine
  MOD_RES (65)..(65): Selenocysteine
  MOD_RES (67)..(67): Selenocysteine
  MOD_RES (71)..(71): Selenocysteine
  MOD_RES (76)..(76): Selenocysteine
  MOD_RES (78)..(78): Selenocysteine
  MOD_RES (82)..(82): Selenocysteine
  MOD_RES (146)..(146): Selenocysteine
  MOD_RES (160)..(161): Selenocysteine
  MOD_RES (171)..(171): Selenocysteine
  MOD_RES (204)..(204): Selenocysteine
  MOD_RES (214)..(214): Selenocysteine
  MOD_RES (239)..(239): Selenocysteine
  MOD_RES (257)..(257): Selenocysteine
  MOD_RES (278)..(278): Selenocysteine
  MOD_RES (282)..(282): Selenocysteine
MSQSRHRAEAPPLEREDSGXFSLGKMIXAKPGKXPIQVLHEYGMKXKNIPVYECERSDVQIHVPXFXFRVXVGDIXCXGEGXSKKLAKHRAAEAAINILKANASICFAVPDPLMPDPSKQPKNQLNPIGSLQELAIHHGWRLPEYXLSQEGGPAHKREYXXICRLESFMEXGKGASKKQAKRNAAEKFLAKFSNISPENHISLXNVVGHSLGCXWHSLRNSPGEKINLLKRSLLSIPNXDYIQLLSEIAKEQGFNIXYLDIDELSANGQYQCLAELSXSPIXVCHGSGISCGNAQSDAAHNALQYLKIIAERK

SEQ ID NO: 21446 - protein, 228 aa, Homo sapiens
  MOD_RES (43)..(43): Selenocysteine
  MOD_RES (74)..(74): Selenocysteine
  MOD_RES (81)..(81): Selenocysteine
  MOD_RES (89)..(89): Selenocysteine
  MOD_RES (94)..(94): Selenocysteine
  MOD_RES (129)..(129): Selenocysteine
  MOD_RES (152)..(152): Selenocysteine
  MOD_RES (170)..(170): Selenocysteine
MNIKGSPWKAGSLLLLLVSNLLLCQSVAPLPICPGGAARCQVXLRDLFDRAVVLSHYIHNLSSEMFSEFDKRYXHGRGFIXKAINSCHXSSLAXPEDKEQAQQMNQKDFLSLIVSILRSWNEPLYHLVXEVRGMQEAPEAILSKAVEIEEQXKRLLEGMELIVSQVHPEXKENEIYPVWSGLPSLQMADEESRLSAYYNLLHCLRRDSHKIDNYLKLLKCRIIHNNNC

SEQ ID NO: 21447 - protein, 227 aa, Homo sapiens
  MOD_RES (42)..(42): Selenocysteine
  MOD_RES (73)..(73): Selenocysteine
  MOD_RES (80)..(80): Selenocysteine
  MOD_RES (88)..(88): Selenocysteine
  MOD_RES (93)..(93): Selenocysteine
  MOD_RES (128)..(128): Selenocysteine
  MOD_RES (151)..(151): Selenocysteine
  MOD_RES (169)..(169): Selenocysteine
MNIKGSPWKGSLLLLLVSNLLLCQSVAPLPICPGGAARCQVXLRDLFDRAVVLSHYIHNLSSEMFSEFDKRYXHGRGFIXKAINSCHXSSLAXPEDKEQAQQMNQKDFLSLIVSILRSWNEPLYHLVXEVRGMQEAPEAILSKAVEIEEQXKRLLEGMELIVSQVHPEXKENEIYPVWSGLPSLQMADEESRLSAYYNLLHCLRRDSHKIDNYLKLLKCRIIHNNNC

SEQ ID NO: 21448 - protein, 196 aa, Homo sapiens
  MOD_RES (42)..(42): Selenocysteine
  MOD_RES (49)..(49): Selenocysteine
  MOD_RES (57)..(57): Selenocysteine
  MOD_RES (62)..(62): Selenocysteine
  MOD_RES (97)..(97): Selenocysteine
  MOD_RES (120)..(120): Selenocysteine
  MOD_RES (138)..(138): Selenocysteine
MNIKGSPWKGSLLLLLVSNLLLSHYIHNLSSEMFSEFDKRYXHGRGFIXKAINSCHXSSLAXPEDKEQAQQMNQKDFLSLIVSILRSWNEPLYHLVXEVRGMQEAPEAILSKAVEIEEQXKRLLEGMELIVSQVHPEXKENEIYPVWSGLPSLQMADEESRLSAYYNLLHCLRRDSHKIDNYLKLLKCRIIHNNNC

SEQ ID NO: 21449 - protein, 87 aa, Homo sapiens
  MOD_RES (25)..(25): Selenocysteine
  MOD_RES (34)..(34): Selenocysteine
  MOD_RES (59)..(59): Selenocysteine
  MOD_RES (73)..(73): Selenocysteine
MKVLRAWLLCLLMLGLALRGAASRXHRHSMEIRXPDINPAWYASRGIRPVGRFGRRRAXLGDVPKPGLRPRLXCFPLEGGAMSSQDG

SEQ ID NO: 21450 - protein, 370 aa, Homo sapiens
  MOD_RES (5)..(6): Selenocysteine
  MOD_RES (23)..(24): Selenocysteine
  MOD_RES (48)..(48): Selenocysteine
  MOD_RES (95)..(95): Selenocysteine
  MOD_RES (111)..(111): Selenocysteine
  MOD_RES (117)..(117): Selenocysteine
  MOD_RES (144)..(144): Selenocysteine
  MOD_RES (151)..(151): Selenocysteine
  MOD_RES (153)..(154): Selenocysteine
  MOD_RES (198)..(198): Selenocysteine
  MOD_RES (233)..(233): Selenocysteine
  MOD_RES (262)..(262): Selenocysteine
  MOD_RES (276)..(276): Selenocysteine
  MOD_RES (365)..(365): Selenocysteine
MASSXXRGPRVSDLFSGLPPAVXXPANQSAEASAGNGSVAGADAPAVXPFQSLQLVHQLKGLIVLLYSVVVVVGLVGNCLLVLVIARVRRLHNVXNFLIGNLALSDVLMCXACVPLXLAYAFEPRGWVFGGGLCHLVFFLQPVXVYVSVFXLXXIAVDRYVVLVHPLRRRISLRLSAYAVLAIWALSAVLALPAAVHXYHVELKPHDVRLCEEFWGSQERQRQLYAWGLLLVXYLLPLLVILLSYVRVSVKLRNRVVPGCVXQSQADWDRARRRRXFCLLVVIVVVFAVCWLPLHVFNLLRDLDPHAIDPYAFGLVQLLCHWLAMSSACYNPFIYAWLHDSFREELRKLLVAWPRKIAPHGQNMXVSVVI

SEQ ID NO: 21451 - protein, 33 aa, Homo sapiens
  MOD_RES (9)..(9): Selenocysteine
  MOD_RES (12)..(12): Selenocysteine
  MOD_RES (19)..(19): Selenocysteine
MKENVASAXVFXLLLFLNXCLLNDPFCWAANRV

SEQ ID NO: 21452 - protein, 34 aa, Homo sapiens
  MOD_RES (9)..(9): Selenocysteine
  MOD_RES (12)..(12): Selenocysteine
  MOD_RES (19)..(19): Selenocysteine
  MOD_RES (33)..(34): Selenocysteine
MKENVASAXVFXLLLFLNXCLLNERHSCMNVQXX

SEQ ID NO: 21453 - protein, 34 aa, Homo sapiens
  MOD_RES (9)..(9): Selenocysteine
  MOD_RES (12)..(12): Selenocysteine
  MOD_RES (19)..(19): Selenocysteine
MKENVASAXVFXLLLFLNXCLLNGQLPPGKPEIF

SEQ ID NO: 21454 - protein, 62 aa, Homo sapiens
  MOD_RES (9)..(9): Selenocysteine
  MOD_RES (12)..(12): Selenocysteine
  MOD_RES (19)..(19): Selenocysteine
  MOD_RES (43)..(43): Selenocysteine
  MOD_RES (45)..(45): Selenocysteine
  MOD_RES (52)..(52): Selenocysteine
  MOD_RES (58)..(58): Selenocysteine
MKENVASAXVFXLLLFLNXCLLNGQLPPGKPEIFKCRSPNKEXFXCWWRPGXDGGLPXNYSL

SEQ ID NO: 21455 - protein, 103 aa, Homo sapiens
  MOD_RES (9)..(9): Selenocysteine
  MOD_RES (12)..(12): Selenocysteine
  MOD_RES (19)..(19): Selenocysteine
  MOD_RES (43)..(43): Selenocysteine
  MOD_RES (45)..(45): Selenocysteine
  MOD_RES (52)..(52): Selenocysteine
  MOD_RES (58)..(58): Selenocysteine
  MOD_RES (63)..(63): Selenocysteine
  MOD_RES (70)..(70): Selenocysteine
  MOD_RES (80)..(80): Selenocysteine
  MOD_RES (93)..(93): Selenocysteine
  MOD_RES (98)..(98): Selenocysteine
MKENVASAXVFXLLLFLNXCLLNGQLPPGKPEIFKCRSPNKEXFXCWWRPGXDGGLPXNYSLXYHREGEXLMHECPDYIXGGPNSCHFGKQYXSMWRXYIMMV

SEQ ID NO: 21456 - protein, 111 aa, Homo sapiens
  MOD_RES (9)..(9): Selenocysteine
  MOD_RES (12)..(12): Selenocysteine
  MOD_RES (19)..(19): Selenocysteine
  MOD_RES (43)..(43): Selenocysteine
  MOD_RES (45)..(45): Selenocysteine
  MOD_RES (52)..(52): Selenocysteine
  MOD_RES (58)..(58): Selenocysteine
  MOD_RES (63)..(63): Selenocysteine
  MOD_RES (70)..(70): Selenocysteine
  MOD_RES (80)..(80): Selenocysteine
  MOD_RES (93)..(93): Selenocysteine
  MOD_RES (98)..(98): Selenocysteine
  MOD_RES (106)..(106): Selenocysteine
MKENVASAXVFXLLLFLNXCLLNGQLPPGKPEIFKCRSPNKEXFXCWWRPGXDGGLPXNYSLXYHREGEXLMHECPDYIXGGPNSCHFGKQYXSMWRXYIMMVNAXNQMGS

SEQ ID NO: 21457 - protein, 120 aa, Homo sapiens
  MOD_RES (9)..(9): Selenocysteine
  MOD_RES (12)..(12): Selenocysteine
  MOD_RES (19)..(19): Selenocysteine
  MOD_RES (43)..(43): Selenocysteine
  MOD_RES (45)..(45): Selenocysteine
  MOD_RES (52)..(52): Selenocysteine
  MOD_RES (58)..(58): Selenocysteine
  MOD_RES (63)..(63): Selenocysteine
  MOD_RES (70)..(70): Selenocysteine
  MOD_RES (80)..(80): Selenocysteine
  MOD_RES (93)..(93): Selenocysteine
  MOD_RES (98)..(98): Selenocysteine
  MOD_RES (106)..(106): Selenocysteine
MKENVASAXVFXLLLFLNXCLLNGQLPPGKPEIFKCRSPNKEXFXCWWRPGXDGGLPXNYSLXYHREGEXLMHECPDYIXGGPNSCHFGKQYXSMWRXYIMMVNAXNQMGSSFSDELYVD

SEQ ID NO: 21458 - protein, 288 aa, Homo sapiens
  MOD_RES (9)..(9): Selenocysteine
  MOD_RES (12)..(12): Selenocysteine
  MOD_RES (19)..(19): Selenocysteine
  MOD_RES (43)..(43): Selenocysteine
  MOD_RES (45)..(45): Selenocysteine
  MOD_RES (52)..(52): Selenocysteine
  MOD_RES (58)..(58): Selenocysteine
  MOD_RES (63)..(63): Selenocysteine
  MOD_RES (70)..(70): Selenocysteine
  MOD_RES (80)..(80): Selenocysteine
  MOD_RES (93)..(93): Selenocysteine
  MOD_RES (98)..(98): Selenocysteine
  MOD_RES (106)..(106): Selenocysteine
  MOD_RES (122)..(122): Selenocysteine
  MOD_RES (155)..(155): Selenocysteine
  MOD_RES (161)..(161): Selenocysteine
  MOD_RES (165)..(165): Selenocysteine
  MOD_RES (189)..(189): Selenocysteine
  MOD_RES (222)..(222): Selenocysteine
  MOD_RES (231)..(231): Selenocysteine
  MOD_RES (235)..(236): Selenocysteine
  MOD_RES (265)..(265): Selenocysteine
  MOD_RES (287)..(287): Selenocysteine
MKENVASAXVFXLLLFLNXCLLNGQLPPGKPEIFKCRSPNKEXFXCWWRPGXDGGLPXNYSLXYHREGEXLMHECPDYIXGGPNSCHFGKQYXSMWRXYIMMVNAXNQMGSSFSDELYVDVXYIVQPDPPLELAVEVKQPEDRKPYLWIKWSPPXLIDLKXGWFXLLYEIRLKPEKAAEWEIHFAGQQXEFKILSLHPGQKYLVQVRCKPDHGYWSAWSPAXFIQIPSDFXMNDXXVWISVAVLSAVICLIIVWAVALKGYSMVXCIFPPVPGPKIKGFDAHLLEVXP

SEQ ID NO: 21459 - protein, 349 aa, Homo sapiens
  MOD_RES (9)..(9): Selenocysteine
  MOD_RES (12)..(12): Selenocysteine
  MOD_RES (19)..(19): Selenocysteine
  MOD_RES (43)..(43): Selenocysteine
  MOD_RES (45)..(45): Selenocysteine
  MOD_RES (52)..(52): Selenocysteine
  MOD_RES (58)..(58): Selenocysteine
  MOD_RES (63)..(63): Selenocysteine
  MOD_RES (70)..(70): Selenocysteine
  MOD_RES (80)..(80): Selenocysteine
  MOD_RES (93)..(93): Selenocysteine
  MOD_RES (98)..(98): Selenocysteine
  MOD_RES (106)..(106): Selenocysteine
  MOD_RES (122)..(122): Selenocysteine
  MOD_RES (155)..(155): Selenocysteine
  MOD_RES (161)..(161): Selenocysteine
  MOD_RES (165)..(165): Selenocysteine
  MOD_RES (189)..(189): Selenocysteine
  MOD_RES (222)..(222): Selenocysteine
  MOD_RES (231)..(231): Selenocysteine
  MOD_RES (235)..(236): Selenocysteine
  MOD_RES (265)..(265): Selenocysteine
  MOD_RES (304)..(304): Selenocysteine
MKENVASAXVFXLLLFLNXCLLNGQLPPGKPEIFKCRSPNKEXFXCWWRPGXDGGLPXNYSLXYHREGEXLMHECPDYIXGGPNSCHFGKQYXSMWRXYIMMVNAXNQMGSSFSDELYVDVXYIVQPDPPLELAVEVKQPEDRKPYLWIKWSPPXLIDLKXGWFXLLYEIRLKPEKAAEWEIHFAGQQXEFKILSLHPGQKYLVQVRCKPDHGYWSAWSPAXFIQIPSDFXMNDXXVWISVAVLSAVICLIIVWAVALKGYSMVXCIFPPVPGPKIKGFDAHLLEKGKSEELLSALGCQDFPPXSDYEDLLVEYLEVDDSEDQHLMSVHSKEHPSQEREQRQAQEARDS

SEQ ID NO: 21460 - protein, 376 aa, Homo sapiens
  MOD_RES (9)..(9): Selenocysteine
  MOD_RES (12)..(12): Selenocysteine
  MOD_RES (19)..(19): Selenocysteine
  MOD_RES (43)..(43): Selenocysteine
  MOD_RES (45)..(45): Selenocysteine
  MOD_RES (52)..(52): Selenocysteine
  MOD_RES (58)..(58): Selenocysteine
  MOD_RES (63)..(63): Selenocysteine
  MOD_RES (70)..(70): Selenocysteine
  MOD_RES (80)..(80): Selenocysteine
  MOD_RES (93)..(93): Selenocysteine
  MOD_RES (98)..(98): Selenocysteine
  MOD_RES (106)..(106): Selenocysteine
  MOD_RES (122)..(122): Selenocysteine
  MOD_RES (155)..(155): Selenocysteine
  MOD_RES (161)..(161): Selenocysteine
  MOD_RES (165)..(165): Selenocysteine
  MOD_RES (189)..(189): Selenocysteine
  MOD_RES (222)..(222): Selenocysteine
  MOD_RES (231)..(231): Selenocysteine
  MOD_RES (235)..(236): Selenocysteine
  MOD_RES (265)..(265): Selenocysteine
  MOD_RES (304)..(304): Selenocysteine
  MOD_RES (368)..(368): Selenocysteine
  MOD_RES (371)..(371): Selenocysteine
  MOD_RES (373)..(374): Selenocysteine
MKENVASAXVFXLLLFLNXCLLNGQLPPGKPEIFKCRSPNKEXFXCWWRPGXDGGLPXNYSLXYHREGEXLMHECPDYIXGGPNSCHFGKQYXSMWRXYIMMVNAXNQMGSSFSDELYVDVXYIVQPDPPLELAVEVKQPEDRKPYLWIKWSPPXLIDLKXGWFXLLYEIRLKPEKAAEWEIHFAGQQXEFKILSLHPGQKYLVQVRCKPDHGYWSAWSPAXFIQIPSDFXMNDXXVWISVAVLSAVICLIIVWAVALKGYSMVXCIFPPVPGPKIKGFDAHLLEKGKSEELLSALGCQDFPPXSDYEDLLVEYLEVDDSEDQHLMSVHSKEHPSQGDPLMLGASHYKNLKSYRPRKISSQGRLAVFXKAXLXXVQ

SEQ ID NO: 21461 - protein, 622 aa, Homo sapiens
  MOD_RES (9)..(9): Selenocysteine
  MOD_RES (12)..(12): Selenocysteine
  MOD_RES (19)..(19): Selenocysteine
  MOD_RES (43)..(43): Selenocysteine
  MOD_RES (45)..(45): Selenocysteine
  MOD_RES (52)..(52): Selenocysteine
  MOD_RES (58)..(58): Selenocysteine
  MOD_RES (63)..(63): Selenocysteine
  MOD_RES (70)..(70): Selenocysteine
  MOD_RES (80)..(80): Selenocysteine
  MOD_RES (93)..(93): Selenocysteine
  MOD_RES (98)..(98): Selenocysteine
  MOD_RES (106)..(106): Selenocysteine
  MOD_RES (122)..(122): Selenocysteine
  MOD_RES (155)..(155): Selenocysteine
  MOD_RES (161)..(161): Selenocysteine
  MOD_RES (165)..(165): Selenocysteine
  MOD_RES (189)..(189): Selenocysteine
  MOD_RES (222)..(222): Selenocysteine
  MOD_RES (231)..(231): Selenocysteine
  MOD_RES (235)..(236): Selenocysteine
  MOD_RES (265)..(265): Selenocysteine
  MOD_RES (304)..(304): Selenocysteine
  MOD_RES (341)..(341): Selenocysteine
  MOD_RES (347)..(347): Selenocysteine
  MOD_RES (373)..(373): Selenocysteine
  MOD_RES (388)..(389): Selenocysteine
  MOD_RES (391)..(391): Selenocysteine
  MOD_RES (415)..(415): Selenocysteine
  MOD_RES (434)..(434): Selenocysteine
  MOD_RES (449)..(449): Selenocysteine
  MOD_RES (464)..(464): Selenocysteine
  MOD_RES (474)..(474): Selenocysteine
  MOD_RES (486)..(486): Selenocysteine
  MOD_RES (490)..(490): Selenocysteine
  MOD_RES (499)..(499): Selenocysteine
  MOD_RES (539)..(539): Selenocysteine
  MOD_RES (596)..(596): Selenocysteine
  MOD_RES (598)..(598): Selenocysteine
  MOD_RES (618)..(618): Selenocysteine
MKENVASAXVFXLLLFLNXCLLNGQLPPGKPEIFKCRSPNKEXFXCWWRPGXDGGLPXNYSLXYHREGEXLMHECPDYIXGGPNSCHFGKQYXSMWRXYIMMVNAXNQMGSSFSDELYVDVXYIVQPDPPLELAVEVKQPEDRKPYLWIKWSPPXLIDLKXGWFXLLYEIRLKPEKAAEWEIHFAGQQXEFKILSLHPGQKYLVQVRCKPDHGYWSAWSPAXFIQIPSDFXMNDXXVWISVAVLSAVICLIIVWAVALKGYSMVXCIFPPVPGPKIKGFDAHLLEKGKSEELLSALGCQDFPPXSDYEDLLVEYLEVDDSEDQHLMSVHSKEHPSQGMKPXYLDPDXDSGRGSCDSPSLLSEKCEEPQANPSXFYDPEVIEKPENPEXXHXWDPQCISMEGKIPYFHAGGSKCSXWPLPQPSQHNPRSSYHNIXDVCELAVGPAGAPAXLLNEAGKDALKSSQXIKSREEGKAXQQREVESFHSEXDQDXPWLLPQEKXPFGSAKPLDYVEIHKVNKDGALSLLPKQRENSGKPKKPGXPENNKEYAKVSGVMDNNILVLVPDPHAKNVACFEESAKEAPPSLEQNQAEKALANFXAXSSKCRLQLGGLDYLDPACFXHSFH

SEQ ID NO: 21462 - protein, 268 aa, Homo sapiens
  MOD_RES (9)..(9): Selenocysteine
  MOD_RES (12)..(12): Selenocysteine
  MOD_RES (19)..(19): Selenocysteine
  MOD_RES (43)..(43): Selenocysteine
  MOD_RES (45)..(45): Selenocysteine
  MOD_RES (52)..(52): Selenocysteine
  MOD_RES (58)..(58): Selenocysteine
  MOD_RES (63)..(63): Selenocysteine
  MOD_RES (70)..(70): Selenocysteine
  MOD_RES (80)..(80): Selenocysteine
  MOD_RES (93)..(93): Selenocysteine
  MOD_RES (98)..(98): Selenocysteine
  MOD_RES (106)..(106): Selenocysteine
  MOD_RES (122)..(122): Selenocysteine
  MOD_RES (155)..(155): Selenocysteine
  MOD_RES (161)..(161): Selenocysteine
  MOD_RES (165)..(165): Selenocysteine
  MOD_RES (189)..(189): Selenocysteine
  MOD_RES (222)..(222): Selenocysteine
  MOD_RES (260)..(260): Selenocysteine
  MOD_RES (263)..(263): Selenocysteine
  MOD_RES (265)..(266): Selenocysteine
MKENVASAXVFXLLLFLNXCLLNGQLPPGKPEIFKCRSPNKEXFXCWWRPGXDGGLPXNYSLXYHREGEXLMHECPDYIXGGPNSCHFGKQYXSMWRXYIMMVNAXNQMGSSFSDELYVDVXYIVQPDPPLELAVEVKQPEDRKPYLWIKWSPPXLIDLKXGWFXLLYEIRLKPEKAAEWEIHFAGQQXEFKILSLHPGQKYLVQVRCKPDHGYWSAWSPAXFIQIPSGDPLMLGASHYKNLKSYRPRKISSQGRLAVFXKAXLXXVQ

SEQ ID NO: 21463 - protein, 521 aa, Homo sapiens
  MOD_RES (9)..(9): Selenocysteine
  MOD_RES (12)..(12): Selenocysteine
  MOD_RES (19)..(19): Selenocysteine
  MOD_RES (54)..(54): Selenocysteine
  MOD_RES (60)..(60): Selenocysteine
  MOD_RES (64)..(64): Selenocysteine
  MOD_RES (88)..(88): Selenocysteine
  MOD_RES (121)..(121): Selenocysteine
  MOD_RES (130)..(130): Selenocysteine
  MOD_RES (134)..(135): Selenocysteine
  MOD_RES (164)..(164): Selenocysteine
  MOD_RES (203)..(203): Selenocysteine
  MOD_RES (240)..(240): Selenocysteine
  MOD_RES (246)..(246): Selenocysteine
  MOD_RES (272)..(272): Selenocysteine
  MOD_RES (287)..(288): Selenocysteine
  MOD_RES (290)..(290): Selenocysteine
  MOD_RES (314)..(314): Selenocysteine
  MOD_RES (333)..(333): Selenocysteine
  MOD_RES (348)..(348): Selenocysteine
  MOD_RES (363)..(363): Selenocysteine
  MOD_RES (373)..(373): Selenocysteine
  MOD_RES (385)..(385): Selenocysteine
  MOD_RES (389)..(389): Selenocysteine
  MOD_RES (398)..(398): Selenocysteine
  MOD_RES (438)..(438): Selenocysteine
  MOD_RES (495)..(495): Selenocysteine
  MOD_RES (497)..(497): Selenocysteine
  MOD_RES (517)..(517): Selenocysteine
MKENVASAXVFXLLLFLNXCLLNVQPDPPLELAVEVKQPEDRKPYLWIKWSPPXLIDLKXGWFXLLYEIRLKPEKAAEWEIHFAGQQXEFKILSLHPGQKYLVQVRCKPDHGYWSAWSPAXFIQIPSDFXMNDXXVWISVAVLSAVICLIIVWAVALKGYSMVXCIFPPVPGPKIKGFDAHLLEKGKSEELLSALGCQDFPPXSDYEDLLVEYLEVDDSEDQHLMSVHSKEHPSQGMKPXYLDPDXDSGRGSCDSPSLLSEKCEEPQANPSXFYDPEVIEKPENPEXXHXWDPQCISMEGKIPYFHAGGSKCSXWPLPQPSQHNPRSSYHNIXDVCELAVGPAGAPAXLLNEAGKDALKSSQXIKSREEGKAXQQREVESFHSEXDQDXPWLLPQEKXPFGSAKPLDYVEIHKVNKDGALSLLPKQRENSGKPKKPGXPENNKEYAKVSGVMDNNILVLVPDPHAKNVACFEESAKEAPPSLEQNQAEKALANFXAXSSKCRLQLGGLDYLDPACFXHSFH

SEQ ID NO: 21464 - protein, 371 aa, Homo sapiens
  MOD_RES (17)..(17): Selenocysteine
  MOD_RES (48)..(48): Selenocysteine
  MOD_RES (73)..(73): Selenocysteine
  MOD_RES (75)..(75): Selenocysteine
  MOD_RES (99)..(99): Selenocysteine
  MOD_RES (140)..(140): Selenocysteine
  MOD_RES (176)..(176): Selenocysteine
  MOD_RES (197)..(197): Selenocysteine
  MOD_RES (201)..(201): Selenocysteine
  MOD_RES (247)..(247): Selenocysteine
  MOD_RES (259)..(259): Selenocysteine
  MOD_RES (266)..(266): Selenocysteine
  MOD_RES (268)..(268): Selenocysteine
  MOD_RES (293)..(293): Selenocysteine
  MOD_RES (299)..(299): Selenocysteine
  MOD_RES (303)..(303): Selenocysteine
  MOD_RES (310)..(310): Selenocysteine
  MOD_RES (315)..(315): Selenocysteine
  MOD_RES (324)..(324): Selenocysteine
  MOD_RES (327)..(327): Selenocysteine
  MOD_RES (334)..(334): Selenocysteine
  MOD_RES (350)..(350): Selenocysteine
  MOD_RES (366)..(366): Selenocysteine
MAAAEAANCIMENFVAXLANGMSLQPPLEEVSCGQAESSEKPNAEDMXSKDYYFDSYAHFGIHEEMLKDEVRXLXYRNSMFHNRHLFKDKVVLDVGSGXGILCMFAAKAGARKVIGIECSSISDYAVKIVKANKLDHVVXIIKGKVEEVELPVEKVDIIISEWMGYCLFYESMLNXVLYARDKWLAPDGLIFPDRAXLYVXAIEDRQYKDYKIHWWENVYGFDMSCIKDVAIKEPLVDVVDPKQLVXNACLIKEVDIYXVKVEDLXFXSPFCLQVKRNDYVHALVAYFNIEFXRCHKRXGFSXSPESPYXHWKQXVFYMEDYLXVKXGEEIFGXIGMRPNAKNNRDLDFXIDLDFKGQLCELSCSXDYRMR

SEQ ID NO: 21465 - protein, 54 aa, Homo sapiens
  MOD_RES (17)..(17): Selenocysteine
  MOD_RES (32)..(32): Selenocysteine
MAAAEAANCIMENFVAXLANGMSLQPPLEEVXPFALPCVCPHFPSPPLPSCGLS

SEQ ID NO: 21466 - protein, 353 aa, Homo sapiens
  MOD_RES (30)..(30): Selenocysteine
  MOD_RES (55)..(55): Selenocysteine
  MOD_RES (57)..(57): Selenocysteine
  MOD_RES (81)..(81): Selenocysteine
  MOD_RES (122)..(122): Selenocysteine
  MOD_RES (158)..(158): Selenocysteine
  MOD_RES (179)..(179): Selenocysteine
  MOD_RES (183)..(183): Selenocysteine
  MOD_RES (229)..(229): Selenocysteine
  MOD_RES (241)..(241): Selenocysteine
  MOD_RES (248)..(248): Selenocysteine
  MOD_RES (250)..(250): Selenocysteine
  MOD_RES (275)..(275): Selenocysteine
  MOD_RES (281)..(281): Selenocysteine
  MOD_RES (285)..(285): Selenocysteine
  MOD_RES (292)..(292): Selenocysteine
  MOD_RES (297)..(297): Selenocysteine
  MOD_RES (306)..(306): Selenocysteine
  MOD_RES (309)..(309): Selenocysteine
  MOD_RES (316)..(316): Selenocysteine
  MOD_RES (332)..(332): Selenocysteine
  MOD_RES (348)..(348): Selenocysteine
MAAAEAANCIMEVSCGQAESSEKPNAEDMXSKDYYFDSYAHFGIHEEMLKDEVRXLXYRNSMFHNRHLFKDKVVLDVGSGXGILCMFAAKAGARKVIGIECSSISDYAVKIVKANKLDHVVXIIKGKVEEVELPVEKVDIIISEWMGYCLFYESMLNXVLYARDKWLAPDGLIFPDRAXLYVXAIEDRQYKDYKIHWWENVYGFDMSCIKDVAIKEPLVDVVDPKQLVXNACLIKEVDIYXVKVEDLXFXSPFCLQVKRNDYVHALVAYFNIEFXRCHKRXGFSXSPESPYXHWKQXVFYMEDYLXVKXGEEIFGXIGMRPNAKNNRDLDFXIDLDFKGQLCELSCSXDYRMR

SEQ ID NO: 21467 - protein, 285 aa, Homo sapiens
  MOD_RES (30)..(30): Selenocysteine
  MOD_RES (55)..(55): Selenocysteine
  MOD_RES (57)..(57): Selenocysteine
  MOD_RES (81)..(81): Selenocysteine
  MOD_RES (122)..(122): Selenocysteine
  MOD_RES (158)..(158): Selenocysteine
  MOD_RES (173)..(173): Selenocysteine
  MOD_RES (180)..(180): Selenocysteine
  MOD_RES (182)..(182): Selenocysteine
  MOD_RES (207)..(207): Selenocysteine
  MOD_RES (213)..(213): Selenocysteine
  MOD_RES (217)..(217): Selenocysteine
  MOD_RES (224)..(224): Selenocysteine
  MOD_RES (229)..(229): Selenocysteine
  MOD_RES (238)..(238): Selenocysteine
  MOD_RES (241)..(241): Selenocysteine
  MOD_RES (248)..(248): Selenocysteine
  MOD_RES (264)..(264): Selenocysteine
  MOD_RES (280)..(280): Selenocysteine
MAAAEAANCIMEVSCGQAESSEKPNAEDMXSKDYYFDSYAHFGIHEEMLKDEVRXLXYRNSMFHNRHLFKDKVVLDVGSGXGILCMFAAKAGARKVIGIECSSISDYAVKIVKANKLDHVVXIIKGKVEEVELPVEKVDIIISEWMGYCLFYESMLNXVLYARDKWLEVDIYXVKVEDLXFXSPFCLQVKRNDYVHALVAYFNIEFXRCHKRXGFSXSPESPYXHWKQXVFYMEDYLXVKXGEEIFGXIGMRPNAKNNRDLDFXIDLDFKGQLCELSCSXDYRMR

SEQ ID NO: 21468 - protein, 160 aa, Homo sapiens
  MOD_RES (2)..(2): Selenocysteine
  MOD_RES (27)..(27): Selenocysteine
  MOD_RES (29)..(29): Selenocysteine
  MOD_RES (53)..(53): Selenocysteine
  MOD_RES (94)..(94): Selenocysteine
  MOD_RES (130)..(130): Selenocysteine
  MOD_RES (151)..(151): Selenocysteine
  MOD_RES (155)..(155): Selenocysteine
MXSKDYYFDSYAHFGIHEEMLKDEVRXLXYRNSMFHNRHLFKDKVVLDVGSGXGILCMFAAKAGARKVIGIECSSISDYAVKIVKANKLDHVVXIIKGKVEEVELPVEKVDIIISEWMGYCLFYESMLNXVLYARDKWLAPDGLIFPDRAXLYVXAIEDR

SEQ ID NO: 21469 - protein, 205 aa, Homo sapiens
  MOD_RES (2)..(2): Selenocysteine
  MOD_RES (27)..(27): Selenocysteine
  MOD_RES (29)..(29): Selenocysteine
  MOD_RES (53)..(53): Selenocysteine
  MOD_RES (94)..(94): Selenocysteine
  MOD_RES (130)..(130): Selenocysteine
  MOD_RES (151)..(151): Selenocysteine
  MOD_RES (155)..(155): Selenocysteine
  MOD_RES (201)..(201): Selenocysteine
MXSKDYYFDSYAHFGIHEEMLKDEVRXLXYRNSMFHNRHLFKDKVVLDVGSGXGILCMFAAKAGARKVIGIECSSISDYAVKIVKANKLDHVVXIIKGKVEEVELPVEKVDIIISEWMGYCLFYESMLNXVLYARDKWLAPDGLIFPDRAXLYVXAIEDRQYKDYKIHWWENVYGFDMSCIKDVAIKEPLVDVVDPKQLVXNACL

SEQ ID NO: 21470 - protein, 207 aa, Homo sapiens
  MOD_RES (2)..(2): Selenocysteine
  MOD_RES (27)..(27): Selenocysteine
  MOD_RES (29)..(29): Selenocysteine
  MOD_RES (53)..(53): Selenocysteine
  MOD_RES (94)..(94): Selenocysteine
  MOD_RES (130)..(130): Selenocysteine
  MOD_RES (151)..(151): Selenocysteine
  MOD_RES (155)..(155): Selenocysteine
  MOD_RES (201)..(201): Selenocysteine
MXSKDYYFDSYAHFGIHEEMLKDEVRXLXYRNSMFHNRHLFKDKVVLDVGSGXGILCMFAAKAGARKVIGIECSSISDYAVKIVKANKLDHVVXIIKGKVEEVELPVEKVDIIISEWMGYCLFYESMLNXVLYARDKWLAPDGLIFPDRAXLYVXAIEDRQYKDYKIHWWENVYGFDMSCIKDVAIKEPLVDVVDPKQLVXNACLIK

SEQ ID NO: 21471 - protein, 325 aa, Homo sapiens
  MOD_RES (2)..(2): Selenocysteine
  MOD_RES (27)..(27): Selenocysteine
  MOD_RES (29)..(29): Selenocysteine
  MOD_RES (53)..(53): Selenocysteine
  MOD_RES (94)..(94): Selenocysteine
  MOD_RES (130)..(130): Selenocysteine
  MOD_RES (151)..(151): Selenocysteine
  MOD_RES (155)..(155): Selenocysteine
  MOD_RES (201)..(201): Selenocysteine
  MOD_RES (213)..(213): Selenocysteine
  MOD_RES (220)..(220): Selenocysteine
  MOD_RES (222)..(222): Selenocysteine
  MOD_RES (247)..(247): Selenocysteine
  MOD_RES (253)..(253): Selenocysteine
  MOD_RES (257)..(257): Selenocysteine
  MOD_RES (264)..(264): Selenocysteine
  MOD_RES (269)..(269): Selenocysteine
  MOD_RES (278)..(278): Selenocysteine
  MOD_RES (281)..(281): Selenocysteine
  MOD_RES (288)..(288): Selenocysteine
  MOD_RES (304)..(304): Selenocysteine
  MOD_RES (320)..(320): Selenocysteine
MXSKDYYFDSYAHFGIHEEMLKDEVRXLXYRNSMFHNRHLFKDKVVLDVGSGXGILCMFAAKAGARKVIGIECSSISDYAVKIVKANKLDHVVXIIKGKVEEVELPVEKVDIIISEWMGYCLFYESMLNXVLYARDKWLAPDGLIFPDRAXLYVXAIEDRQYKDYKIHWWENVYGFDMSCIKDVAIKEPLVDVVDPKQLVXNACLIKEVDIYXVKVEDLXFXSPFCLQVKRNDYVHALVAYFNIEFXRCHKRXGFSXSPESPYXHWKQXVFYMEDYLXVKXGEEIFGXIGMRPNAKNNRDLDFXIDLDFKGQLCELSCSXDYRMR

SEQ ID NO: 21472 - protein, 63 aa, Homo sapiens
  MOD_RES (24)..(24): Selenocysteine
  MOD_RES (49)..(49): Selenocysteine
  MOD_RES (51)..(51): Selenocysteine
MVGVAEVSCGQAESSEKPNAEDMXSKDYYFDSYAHFGIHEEMLKDEVRXLXYRNSMFHNRHLF

SEQ ID NO: 21473 - protein, 110 aa, Homo sapiens
  MOD_RES (24)..(24): Selenocysteine
  MOD_RES (49)..(49): Selenocysteine
  MOD_RES (51)..(51): Selenocysteine
  MOD_RES (75)..(75): Selenocysteine
MVGVAEVSCGQAESSEKPNAEDMXSKDYYFDSYAHFGIHEEMLKDEVRXLXYRNSMFHNRHLFKDKVVLDVGSGXGILCMFAAKAGARKVIGIECSSISDYAVKIVKANK

SEQ ID NO: 21474 - protein, 238 aa, Homo sapiens
  MOD_RES (1)..(1): Any amino acid
  MOD_RES (27)..(27): Selenocysteine
  MOD_RES (58)..(58): Selenocysteine
  MOD_RES (83)..(83): Selenocysteine
  MOD_RES (85)..(85): Selenocysteine
  MOD_RES (109)..(109): Selenocysteine
  MOD_RES (150)..(150): Selenocysteine
  MOD_RES (186)..(186): Selenocysteine
  MOD_RES (207)..(207): Selenocysteine
  MOD_RES (211)..(211): Selenocysteine
XAANCIMEVSAWSAAVGGRRLWNFVAXLANGMSLQPPLEEVSCGQAESSEKPNAEDMXSKDYYFDSYAHFGIHEEMLKDEVRXLXYRNSMFHNRHLFKDKVVLDVGSGXGILCMFAAKAGARKVIGIECSSISDYAVKIVKANKLDHVVXIIKGKVEEVELPVEKVDIIISEWMGYCLFYESMLNXVLYARDKWLAPDGLIFPDRAXLYVXAIEDRQYKDYKIHWWENVYGFDMSCIK

SEQ ID NO: 21475 - protein, 284 aa, Homo sapiens
  MOD_RES (3)..(3): Selenocysteine
  MOD_RES (44)..(44): Selenocysteine
  MOD_RES (47)..(47): Selenocysteine
  MOD_RES (63)..(64): Selenocysteine
  MOD_RES (96)..(96): Selenocysteine
  MOD_RES (108)..(108): Selenocysteine
  MOD_RES (122)..(123): Selenocysteine
  MOD_RES (137)..(137): Selenocysteine
  MOD_RES (148)..(148): Selenocysteine
  MOD_RES (176)..(176): Selenocysteine
  MOD_RES (190)..(190): Selenocysteine
  MOD_RES (215)..(215): Selenocysteine
  MOD_RES (231)..(231): Selenocysteine
  MOD_RES (250)..(250): Selenocysteine
MAXSGDCPRSESQGEEPAECSEAGLLQEGVQPEEFVAIADYAAXDEXQLSFLRGEKILILRQXXADWWWGERAGCCGYIPANHVGKHVDEYDPEDXWQDEEYFGSYGXLKLHLEMLADQPRXXKYHSVILQNKESLXDKVILDVGCGXGIISLFCAHYARPRAVYAVEASEMAQHXGQLVLQNGFADIIXVYQQKVEDVVLPEKVDVLVSEWMGXCLLAAPLLSCRILPCXCASGPLHVLLACCLPLPCXCASVPLHVLLACCLPVLRAPQPSGLHLSWPIFLL

SEQ ID NO: 21476 - protein, 289 aa, Homo sapiens
  MOD_RES (3)..(3): Selenocysteine
  MOD_RES (44)..(44): Selenocysteine
  MOD_RES (47)..(47): Selenocysteine
  MOD_RES (63)..(64): Selenocysteine
  MOD_RES (96)..(96): Selenocysteine
  MOD_RES (108)..(108): Selenocysteine
  MOD_RES (122)..(123): Selenocysteine
  MOD_RES (137)..(137): Selenocysteine
  MOD_RES (148)..(148): Selenocysteine
  MOD_RES (176)..(176): Selenocysteine
  MOD_RES (190)..(190): Selenocysteine
  MOD_RES (215)..(215): Selenocysteine
  MOD_RES (243)..(243): Selenocysteine
MAXSGDCPRSESQGEEPAECSEAGLLQEGVQPEEFVAIADYAAXDEXQLSFLRGEKILILRQXXADWWWGERAGCCGYIPANHVGKHVDEYDPEDXWQDEEYFGSYGXLKLHLEMLADQPRXXKYHSVILQNKESLXDKVILDVGCGXGIISLFCAHYARPRAVYAVEASEMAQHXGQLVLQNGFADIIXVYQQKVEDVVLPEKVDVLVSEWMGXCLLFEFMIESILYARDAWLKEDGVIWPXMAALHLVPCSADKDYRSKVLFWDNAYEFNLSALKLEKKSSPSGDDS

SEQ ID NO: 21477 - protein, 433 aa, Homo sapiens
  MOD_RES (3)..(3): Selenocysteine
  MOD_RES (44)..(44): Selenocysteine
  MOD_RES (47)..(47): Selenocysteine
  MOD_RES (63)..(64): Selenocysteine
  MOD_RES (96)..(96): Selenocysteine
  MOD_RES (108)..(108): Selenocysteine
  MOD_RES (122)..(123): Selenocysteine
  MOD_RES (137)..(137): Selenocysteine
  MOD_RES (148)..(148): Selenocysteine
  MOD_RES (176)..(176): Selenocysteine
  MOD_RES (190)..(190): Selenocysteine
  MOD_RES (215)..(215): Selenocysteine
  MOD_RES (243)..(243): Selenocysteine
  MOD_RES (305)..(305): Selenocysteine
  MOD_RES (313)..(313): Selenocysteine
  MOD_RES (321)..(321): Selenocysteine
  MOD_RES (335)..(335): Selenocysteine
  MOD_RES (340)..(340): Selenocysteine
  MOD_RES (361)..(361): Selenocysteine
  MOD_RES (367)..(368): Selenocysteine
  MOD_RES (373)..(373): Selenocysteine
  MOD_RES (385)..(385): Selenocysteine
  MOD_RES (390)..(390): Selenocysteine
  MOD_RES (414)..(414): Selenocysteine
  MOD_RES (420)..(420): Selenocysteine
MAXSGDCPRSESQGEEPAECSEAGLLQEGVQPEEFVAIADYAAXDEXQLSFLRGEKILILRQXXADWWWGERAGCCGYIPANHVGKHVDEYDPEDXWQDEEYFGSYGXLKLHLEMLADQPRXXKYHSVILQNKESLXDKVILDVGCGXGIISLFCAHYARPRAVYAVEASEMAQHXGQLVLQNGFADIIXVYQQKVEDVVLPEKVDVLVSEWMGXCLLFEFMIESILYARDAWLKEDGVIWPXMAALHLVPCSADKDYRSKVLFWDNAYEFNLSALKSLAVKEFFSKPKYNHILKPEDCLSEPCXILQLDMRXVQISDLEXLRGELRFDIRKAGXLHGFXAWFSVHFQSLQEGQPPQVLSXGPFHPXXHWKQXLFMMDDPVPVHXGDVVXGSVVLQRNPVWRRHMSVALSWAVXSRQDPXSQKVGEKVFPIWR

SEQ ID NO: 21478 - protein, 301 aa, Homo sapiens
  MOD_RES (3)..(3): Selenocysteine
  MOD_RES (44)..(44): Selenocysteine
  MOD_RES (47)..(47): Selenocysteine
  MOD_RES (63)..(64): Selenocysteine
  MOD_RES (96)..(96): Selenocysteine
  MOD_RES (108)..(108): Selenocysteine
  MOD_RES (122)..(123): Selenocysteine
  MOD_RES (137)..(137): Selenocysteine
  MOD_RES (148)..(148): Selenocysteine
  MOD_RES (176)..(176): Selenocysteine
  MOD_RES (190)..(190): Selenocysteine
  MOD_RES (215)..(215): Selenocysteine
  MOD_RES (221)..(221): Selenocysteine
  MOD_RES (269)..(269): Selenocysteine
  MOD_RES (287)..(287): Selenocysteine
MAXSGDCPRSESQGEEPAECSEAGLLQEGVQPEEFVAIADYAAXDEXQLSFLRGEKILILRQXXADWWWGERAGCCGYIPANHVGKHVDEYDPEDXWQDEEYFGSYGXLKLHLEMLADQPRXXKYHSVILQNKESLXDKVILDVGCGXGIISLFCAHYARPRAVYAVEASEMAQHXGQLVLQNGFADIIXVYQQKVEDVVLPEKVDVLVSEWMGXCLLHHXLEADAVHDGRPSPCPYRRRGHGFSCVAEKPSVEKAHVCGSELGCHFQXRPHISKSWRKSLPHLEMXVDALFGKQCAYLEG

SEQ ID NO: 21479 - protein, 331 aa, Homo sapiens
  MOD_RES (3)..(3): Selenocysteine
  MOD_RES (44)..(44): Selenocysteine
  MOD_RES (47)..(47): Selenocysteine
  MOD_RES (63)..(64): Selenocysteine
  MOD_RES (96)..(96): Selenocysteine
  MOD_RES (108)..(108): Selenocysteine
  MOD_RES (122)..(123): Selenocysteine
  MOD_RES (137)..(137): Selenocysteine
  MOD_RES (148)..(148): Selenocysteine
  MOD_RES (176)..(176): Selenocysteine
  MOD_RES (190)..(190): Selenocysteine
  MOD_RES (215)..(215): Selenocysteine
  MOD_RES (219)..(219): Selenocysteine
  MOD_RES (233)..(233): Selenocysteine
  MOD_RES (238)..(238): Selenocysteine
  MOD_RES (259)..(259): Selenocysteine
  MOD_RES (265)..(266): Selenocysteine
  MOD_RES (271)..(271): Selenocysteine
  MOD_RES (283)..(283): Selenocysteine
  MOD_RES (288)..(288): Selenocysteine
  MOD_RES (312)..(312): Selenocysteine
  MOD_RES (318)..(318): Selenocysteine
MAXSGDCPRSESQGEEPAECSEAGLLQEGVQPEEFVAIADYAAXDEXQLSFLRGEKILILRQXXADWWWGERAGCCGYIPANHVGKHVDEYDPEDXWQDEEYFGSYGXLKLHLEMLADQPRXXKYHSVILQNKESLXDKVILDVGCGXGIISLFCAHYARPRAVYAVEASEMAQHXGQLVLQNGFADIIXVYQQKVEDVVLPEKVDVLVSEWMGXCLLXLRGELRFDIRKAGXLHGFXAWFSVHFQSLQEGQPPQVLSXGPFHPXXHWKQXLFMMDDPVPVHXGDVVXGSVVLQRNPVWRRHMSVALSWAVXSRQDPXSQKVGEKVFPIWR

SEQ ID NO: 21480 - protein, 228 aa, Homo sapiens
  MOD_RES (3)..(3): Selenocysteine
  MOD_RES (44)..(44): Selenocysteine
  MOD_RES (47)..(47): Selenocysteine
  MOD_RES (63)..(64): Selenocysteine
  MOD_RES (96)..(96): Selenocysteine
  MOD_RES (108)..(108): Selenocysteine
  MOD_RES (122)..(123): Selenocysteine
  MOD_RES (137)..(137): Selenocysteine
  MOD_RES (148)..(148): Selenocysteine
  MOD_RES (176)..(176): Selenocysteine
  MOD_RES (190)..(190): Selenocysteine
  MOD_RES (215)..(215): Selenocysteine
MAXSGDCPRSESQGEEPAECSEAGLLQEGVQPEEFVAIADYAAXDEXQLSFLRGEKILILRQXXADWWWGERAGCCGYIPANHVGKHVDEYDPEDXWQDEEYFGSYGXLKLHLEMLADQPRXXKYHSVILQNKESLXDKVILDVGCGXGIISLFCAHYARPRAVYAVEASEMAQHXGQLVLQNGFADIIXVYQQKVEDVVLPEKVDVLVSEWMGXCLLVGEKVFPIWR

SEQ ID NO: 21481 - protein, 253 aa, Homo sapiens
  MOD_RES (3)..(3): Selenocysteine
  MOD_RES (44)..(44): Selenocysteine
  MOD_RES (47)..(47): Selenocysteine
  MOD_RES (63)..(64): Selenocysteine
  MOD_RES (96)..(96): Selenocysteine
  MOD_RES (108)..(108): Selenocysteine
  MOD_RES (122)..(123): Selenocysteine
  MOD_RES (137)..(137): Selenocysteine
  MOD_RES (148)..(148): Selenocysteine
  MOD_RES (176)..(176): Selenocysteine
  MOD_RES (190)..(190): Selenocysteine
  MOD_RES (215)..(215): Selenocysteine
MAXSGDCPRSESQGEEPAECSEAGLLQEGVQPEEFVAIADYAAXDEXQLSFLRGEKILILRQXXADWWWGERAGCCGYIPANHVGKHVDEYDPEDXWQDEEYFGSYGXLKLHLEMLADQPRXXKYHSVILQNKESLXDKVILDVGCGXGIISLFCAHYARPRAVYAVEASEMAQHXGQLVLQNGFADIIXVYQQKVEDVVLPEKVDVLVSEWMGXCLLVRAGVRAAGGRSWGASEHGLGWANLRISRVVRDSF

SEQ ID NO: 21482 - protein, 161 aa, Homo sapiens
  MOD_RES (8)..(9): Selenocysteine
  MOD_RES (29)..(29): Selenocysteine
  MOD_RES (43)..(43): Selenocysteine
  MOD_RES (62)..(62): Selenocysteine
  MOD_RES (76)..(76): Selenocysteine
  MOD_RES (101)..(101): Selenocysteine
  MOD_RES (123)..(123): Selenocysteine
  MOD_RES (134)..(134): Selenocysteine
  MOD_RES (152)..(153): Selenocysteine
  MOD_RES (155)..(155): Selenocysteine
  MOD_RES (158)..(158): Selenocysteine
MLADQPRXXKYHSVILQNKESLRIKSSWXWAVGLGSSVSSVHXMRGLERVYAVEASEMAQHXGQLVLQNGFADIIXVYQQKVEDVVLPEKVDVLVSEWMGXCLLFEFMIESILYARDAWLKEXGSFGPPWLRCXLCPAVLIRIIVARCSSGXXRXSSXSAL

SEQ ID NO: 21483 - protein, 194 aa, Homo sapiens
  MOD_RES (1)..(1): Any amino acid
  MOD_RES (3)..(4): Selenocysteine
  MOD_RES (36)..(36): Selenocysteine
  MOD_RES (48)..(48): Selenocysteine
  MOD_RES (62)..(63): Selenocysteine
  MOD_RES (77)..(77): Selenocysteine
  MOD_RES (88)..(88): Selenocysteine
  MOD_RES (116)..(116): Selenocysteine
  MOD_RES (130)..(130): Selenocysteine
  MOD_RES (155)..(155): Selenocysteine
  MOD_RES (170)..(170): Selenocysteine
  MOD_RES (180)..(180): Selenocysteine
  MOD_RES (185)..(185): Selenocysteine
XQXXADWWWGERAGCCGYIPANHVGKHVDEYDPEDXWQDEEYFGSYGXLKLHLEMLADQPRXXKYHSVILQNKESLXDKVILDVGCGXGIISLFCAHYARPRAVYAVEASEMAQHXGQLVLQNGFADIIXVYQQKVEDVVLPEKVDVLVSEWMGXCLLLLQDLACSPEAXPRFPRSRLHXQQSPXSQWHCRCRG

SEQ ID NO: 21484 - protein, 531 aa, Homo sapiens
  MOD_RES (9)..(9): Selenocysteine
  MOD_RES (48)..(48): Selenocysteine
  MOD_RES (58)..(58): Selenocysteine
  MOD_RES (63)..(63): Selenocysteine
  MOD_RES (102)..(102): Selenocysteine
  MOD_RES (156)..(156): Selenocysteine
  MOD_RES (197)..(197): Selenocysteine
  MOD_RES (201)..(201): Selenocysteine
  MOD_RES (206)..(206): Selenocysteine
  MOD_RES (240)..(240): Selenocysteine
  MOD_RES (266)..(266): Selenocysteine
  MOD_RES (305)..(305): Selenocysteine
  MOD_RES (307)..(307): Selenocysteine
  MOD_RES (364)..(364): Selenocysteine
  MOD_RES (411)..(411): Selenocysteine
  MOD_RES (426)..(427): Selenocysteine
  MOD_RES (439)..(439): Selenocysteine
  MOD_RES (443)..(443): Selenocysteine
  MOD_RES (445)..(445): Selenocysteine
  MOD_RES (449)..(449): Selenocysteine
  MOD_RES (471)..(471): Selenocysteine
  MOD_RES (476)..(476): Selenocysteine
  MOD_RES (478)..(478): Selenocysteine
  MOD_RES (483)..(483): Selenocysteine
  MOD_RES (504)..(504): Selenocysteine
  MOD_RES (516)..(516): Selenocysteine
  MOD_RES (518)..(518): Selenocysteine
  MOD_RES (520)..(520): Selenocysteine
  MOD_RES (525)..(525): Selenocysteine
  MOD_RES (527)..(527): Selenocysteine
MCSLASGAXGGRGAVENEEDLPELSDSGDEAAWEDEDDADLPHGKQQXPCLFCNRLFXSAEEXFSHCKSEHQFNIDSMVHKHGLEFYGYIKLINFIRLKNPXVEYMNSIYNPVPWEKEEYLKPVLEDDLLLQFDVEDLYEPVSVPFSYPNGLSENXSVVEKLKHMEARALSAEAALARAREDLQKMKQFAQDFVMHXDVRXCSSSXSVIADLQEDEDGVYFSSYGHYGIHEEMLKDKIRXESYRDFIYQNPHIFKDKVVLDVGCGXGILSMFAAKAGAKKVLGVDQSEILYQAMDIIRLNKLEDXIXLIKGKIEEVHLPVEKVDVIISEWMGYFLLFESMLDSVLYAKNKYLAKGGSVYPDICXISLVAVSDVNKHADRIAFWDDVYGFKMSCMKKAVIPEAVVEVLDPKXLISEPCGIKHIDCHXXSISDLEFSSDFXLKIXRXSMCXAIAGYFDIYFEKNCHNRVVFSXGPQSXKXHWKQXVFLLEKPFSVKAGEALKGKVXVHKNKKDPRSLXVXLXLNNSXQXYGLQ

SEQ ID NO: 21485 - protein, 54 aa, Homo sapiens
  MOD_RES (9)..(9): Selenocysteine
  MOD_RES (37)..(37): Selenocysteine
MCSLASGAXGGYPGPSAPGSSSPRPRRCGAGGRPSGXRARAGWGARRDHEGGAE

SEQ ID NO: 21486 - protein, 46 aa, Homo sapiens
  MOD_RES (9)..(9): Selenocysteine
  MOD_RES (21)..(21): Selenocysteine
  MOD_RES (31)..(31): Selenocysteine
  MOD_RES (44)..(44): Selenocysteine
MCSLASGAXGYSHLLKKHFHXVSLSISLILXAWFINMDLNFMDXLS

SEQ ID NO: 21487 - protein, 469 aa, Homo sapiens
  MOD_RES (9)..(9): Selenocysteine
  MOD_RES (21)..(21): Selenocysteine
  MOD_RES (31)..(31): Selenocysteine
  MOD_RES (40)..(40): Selenocysteine
  MOD_RES (94)..(94): Selenocysteine
  MOD_RES (135)..(135): Selenocysteine
  MOD_RES (139)..(139): Selenocysteine
  MOD_RES (144)..(144): Selenocysteine
  MOD_RES (178)..(178): Selenocysteine
  MOD_RES (204)..(204): Selenocysteine
  MOD_RES (243)..(243): Selenocysteine
  MOD_RES (245)..(245): Selenocysteine
  MOD_RES (302)..(302): Selenocysteine
  MOD_RES (349)..(349): Selenocysteine
  MOD_RES (364)..(365): Selenocysteine
  MOD_RES (377)..(377): Selenocysteine
  MOD_RES (381)..(381): Selenocysteine
  MOD_RES (383)..(383): Selenocysteine
  MOD_RES (387)..(387): Selenocysteine
  MOD_RES (409)..(409): Selenocysteine
  MOD_RES (414)..(414): Selenocysteine
  MOD_RES (416)..(416): Selenocysteine
  MOD_RES (421)..(421): Selenocysteine
  MOD_RES (442)..(442): Selenocysteine
  MOD_RES (454)..(454): Selenocysteine
  MOD_RES (456)..(456): Selenocysteine
  MOD_RES (458)..(458): Selenocysteine
  MOD_RES (463)..(463): Selenocysteine
  MOD_RES (465)..(465): Selenocysteine
MCSLASGAXGYSHLLKKHFHXVSLSISLILXAWFINMNPXVEYMNSIYNPVPWEKEEYLKPVLEDDLLLQFDVEDLYEPVSVPFSYPNGLSENXSVVEKLKHMEARALSAEAALARAREDLQKMKQFAQDFVMHXDVRXCSSSXSVIADLQEDEDGVYFSSYGHYGIHEEMLKDKIRXESYRDFIYQNPHIFKDKVVLDVGCGXGILSMFAAKAGAKKVLGVDQSEILYQAMDIIRLNKLEDXIXLIKGKIEEVHLPVEKVDVIISEWMGYFLLFESMLDSVLYAKNKYLAKGGSVYPDICXISLVAVSDVNKHADRIAFWDDVYGFKMSCMKKAVIPEAVVEVLDPKXLISEPCGIKHIDCHXXSISDLEFSSDFXLKIXRXSMCXAIAGYFDIYFEKNCHNRVVFSXGPQSXKXHWKQXVFLLEKPFSVKAGEALKGKVXVHKNKKDPRSLXVXLXLNNSXQXYGLQ

SEQ ID NO: 21488 - protein, 177 aa, Homo sapiens
  MOD_RES (13)..(13): Selenocysteine
  MOD_RES (68)..(68): Selenocysteine
  MOD_RES (119)..(119): Selenocysteine
  MOD_RES (136)..(136): Selenocysteine
  MOD_RES (145)..(145): Selenocysteine
  MOD_RES (156)..(156): Selenocysteine
  MOD_RES (163)..(163): Selenocysteine
  MOD_RES (170)..(170): Selenocysteine
ENWQFEEWGSQVXVVSSDMREWVAPEKADIIVSELLGSFADNELSPECLDGAQHFLKDDGVSIPGEYXSFLAPISSSKLYNEVRACREKDRDPEAQFEMPYVVRLHNFHQLSAPQPCFXFSHPNRDPMIDNNRYCXLEFPVEVNXVLHGFAGYFEXVLYQDIXLSIRPEXHSPGISP

SEQ ID NO: 21489 - protein, 185 aa, Homo sapiens
  MOD_RES (29)..(29): Selenocysteine
  MOD_RES (42)..(42): Selenocysteine
  MOD_RES (94)..(94): Selenocysteine
  MOD_RES (101)..(101): Selenocysteine
  MOD_RES (106)..(106): Selenocysteine
  MOD_RES (135)..(136): Selenocysteine
  MOD_RES (138)..(138): Selenocysteine
  MOD_RES (147)..(147): Selenocysteine
  MOD_RES (156)..(156): Selenocysteine
MAAMAVGGAGGSRVSSGRDLNCVPEIADXLGAVAKQGADWNXLIVGKLSPWIRPDSKVEKIRRNSEAAMLQELNFGAYLGLPAFLLPLNQEDNXNLARVLXNHIHXGHHSSMFWMRVPLVAPEDLRDDIIENAPXXHXEEYSGEEKXWMWWHNFRXLCDYSKRIAVALEIGADLPSNHVIDRWLG

SEQ ID NO: 21490 - protein, 593 aa, Homo sapiens
  MOD_RES (29)..(29): Selenocysteine
  MOD_RES (67)..(67): Selenocysteine
  MOD_RES (88)..(88): Selenocysteine
  MOD_RES (95)..(95): Selenocysteine
  MOD_RES (100)..(100): Selenocysteine
  MOD_RES (129)..(130): Selenocysteine
  MOD_RES (132)..(132): Selenocysteine
  MOD_RES (141)..(141): Selenocysteine
  MOD_RES (150)..(150): Selenocysteine
  MOD_RES (189)..(189): Selenocysteine
  MOD_RES (194)..(194): Selenocysteine
  MOD_RES (223)..(223): Selenocysteine
  MOD_RES (225)..(225): Selenocysteine
  MOD_RES (279)..(279): Selenocysteine
  MOD_RES (312)..(312): Selenocysteine
  MOD_RES (356)..(356): Selenocysteine
  MOD_RES (370)..(370): Selenocysteine
  MOD_RES (425)..(425): Selenocysteine
  MOD_RES (476)..(476): Selenocysteine
  MOD_RES (493)..(493): Selenocysteine
  MOD_RES (502)..(502): Selenocysteine
  MOD_RES (513)..(513): Selenocysteine
  MOD_RES (520)..(520): Selenocysteine
  MOD_RES (527)..(527): Selenocysteine
  MOD_RES (547)..(547): Selenocysteine
  MOD_RES (553)..(553): Selenocysteine
  MOD_RES (574)..(574): Selenocysteine
  MOD_RES (585)..(585): Selenocysteine
  MOD_RES (590)..(590): Selenocysteine
MAAMAVGGAGGSRVSSGRDLNCVPEIADXLGAVAKQGFDFLCMPVFHPRFKREFIQEPAKNRPGPQXRSDLLLSGRAFLLPLNQEDNXNLARVLXNHIHXGHHSSMFWMRVPLVAPEDLRDDIIENAPXXHXEEYSGEEKXWMWWHNFRXLCDYSKRIAVALEIGADLPSNHVIDRWLGEPIKAAILPXSIFLXNKKGFPVLSKMHQRLIFRLLKLEVQFIIXGXNHHSEKEFCSYLQYLEYLSQNRPPPNAYELFAKGYEDYLQSPLQPLMDNLESQXYEVFEKDPIKYSQYQQAIYKCLLDRVPEEEKDXNVQVLMVLGAGRGPLVNASLRAAKQADRRIKLYAVEKNPNAVVXLENWQFEEWGSQVXVVSSDMREWVAPEKADIIVSELLGSFADNELSPECLDGAQHFLKDDGVSIPGEYXSFLAPISSSKLYNEVRACREKDRDPEAQFEMPYVVRLHNFHQLSAPQPCFXFSHPNRDPMIDNNRYCXLEFPVEVNXVLHGFAGYFEXVLYQDIXLSIRPEXHSPGMFSWFPILFPIKQPIXVREGQXICVRFWRCSNSKKVWYEWAVXAPVCSAIHNPXGRSYXIGL

SEQ ID NO: 21491 - protein, 637 aa, Homo sapiens
  MOD_RES (29)..(29): Selenocysteine
  MOD_RES (67)..(67): Selenocysteine
  MOD_RES (80)..(80): Selenocysteine
  MOD_RES (132)..(132): Selenocysteine
  MOD_RES (139)..(139): Selenocysteine
  MOD_RES (144)..(144): Selenocysteine
  MOD_RES (173)..(174): Selenocysteine
  MOD_RES (176)..(176): Selenocysteine
  MOD_RES (185)..(185): Selenocysteine
  MOD_RES (194)..(194): Selenocysteine
  MOD_RES (233)..(233): Selenocysteine
  MOD_RES (238)..(238): Selenocysteine
  MOD_RES (267)..(267): Selenocysteine
  MOD_RES (269)..(269): Selenocysteine
  MOD_RES (323)..(323): Selenocysteine
  MOD_RES (356)..(356): Selenocysteine
  MOD_RES (400)..(400): Selenocysteine
  MOD_RES (414)..(414): Selenocysteine
  MOD_RES (469)..(469): Selenocysteine
  MOD_RES (520)..(520): Selenocysteine
  MOD_RES (537)..(537): Selenocysteine
  MOD_RES (546)..(546): Selenocysteine
  MOD_RES (557)..(557): Selenocysteine
  MOD_RES (564)..(564): Selenocysteine
  MOD_RES (571)..(571): Selenocysteine
  MOD_RES (591)..(591): Selenocysteine
  MOD_RES (597)..(597): Selenocysteine
  MOD_RES (618)..(618): Selenocysteine
  MOD_RES (629)..(629): Selenocysteine
  MOD_RES (634)..(634): Selenocysteine
MAAMAVGGAGGSRVSSGRDLNCVPEIADXLGAVAKQGFDFLCMPVFHPRFKREFIQEPAKNRPGPQXRSDLLLSGRDWNXLIVGKLSPWIRPDSKVEKIRRNSEAAMLQELNFGAYLGLPAFLLPLNQEDNXNLARVLXNHIHXGHHSSMFWMRVPLVAPEDLRDDIIENAPXXHXEEYSGEEKXWMWWHNFRXLCDYSKRIAVALEIGADLPSNHVIDRWLGEPIKAAILPXSIFLXNKKGFPVLSKMHQRLIFRLLKLEVQFIIXGXNHHSEKEFCSYLQYLEYLSQNRPPPNAYELFAKGYEDYLQSPLQPLMDNLESQXYEVFEKDPIKYSQYQQAIYKCLLDRVPEEEKDXNVQVLMVLGAGRGPLVNASLRAAKQADRRIKLYAVEKNPNAVVXLENWQFEEWGSQVXVVSSDMREWVAPEKADIIVSELLGSFADNELSPECLDGAQHFLKDDGVSIPGEYXSFLAPISSSKLYNEVRACREKDRDPEAQFEMPYVVRLHNFHQLSAPQPCFXFSHPNRDPMIDNNRYCXLEFPVEVNXVLHGFAGYFEXVLYQDIXLSIRPEXHSPGMFSWFPILFPIKQPIXVREGQXICVRFWRCSNSKKVWYEWAVXAPVCSAIHNPXGRSYXIGL

SEQ ID NO: 21492 - protein, 180 aa, Homo sapiens
  MOD_RES (29)..(29): Selenocysteine
  MOD_RES (67)..(67): Selenocysteine
  MOD_RES (80)..(80): Selenocysteine
  MOD_RES (128)..(129): Selenocysteine
  MOD_RES (131)..(131): Selenocysteine
  MOD_RES (140)..(140): Selenocysteine
  MOD_RES (149)..(149): Selenocysteine
MAAMAVGGAGGSRVSSGRDLNCVPEIADXLGAVAKQGFDFLCMPVFHPRFKREFIQEPAKNRPGPQXRSDLLLSGRDWNXLIVGKLSPWIRPDSKVEKIRRNSEAFWMRVPLVAPEDLRDDIIENAPXXHXEEYSGEEKXWMWWHNFRXLCDYSKRIAVALEIGADLPSNHVIDRWLGEP

SEQ ID NO: 21493 - protein, 183 aa, Homo sapiens
  MOD_RES (29)..(29): Selenocysteine
  MOD_RES (67)..(67): Selenocysteine
  MOD_RES (80)..(80): Selenocysteine
  MOD_RES (113)..(113): Selenocysteine
  MOD_RES (115)..(115): Selenocysteine
  MOD_RES (169)..(169): Selenocysteine
MAAMAVGGAGGSRVSSGRDLNCVPEIADXLGAVAKQGFDFLCMPVFHPRFKREFIQEPAKNRPGPQXRSDLLLSGRDWNXLIVGKLSPWIRPDSKVEKIRRNSEALEVQFIIXGXNHHSEKEFCSYLQYLEYLSQNRPPPNAYELFAKGYEDYLQSPLQPLMDNLESQXYEVFEKDPIKYSQY

SEQ ID NO: 21494 - protein, 186 aa, Homo sapiens
  MOD_RES (29)..(29): Selenocysteine
  MOD_RES (67)..(67): Selenocysteine
  MOD_RES (90)..(90): Selenocysteine
  MOD_RES (142)..(142): Selenocysteine
  MOD_RES (149)..(149): Selenocysteine
  MOD_RES (154)..(154): Selenocysteine
  MOD_RES (183)..(184): Selenocysteine
  MOD_RES (186)..(186): Selenocysteine
MAAMAVGGAGGSRVSSGRDLNCVPEIADXLGAVAKQGFDFLCMPVFHPRFKREFIQEPAKNRPGPQXRSDLLLSGRVFVFLGWGSADWNXLIVGKLSPWIRPDSKVEKIRRNSEAAMLQELNFGAYLGLPAFLLPLNQEDNXNLARVLXNHIHXGHHSSMFWMRVPLVAPEDLRDDIIENAPXXHX

SEQ ID NO: 21495 - protein, 42 aa, Homo sapiens
  MOD_RES (29)..(29): Selenocysteine
MAAMAVGGAGGSRVSSGRDLNCVPEIADXLGAVAKQGFPAAP

SEQ ID NO: 21496 - protein, 86 aa, Homo sapiens
  MOD_RES (29)..(29): Selenocysteine
  MOD_RES (69)..(69): Selenocysteine
MAAMAVGGAGGSRVSSGRDLNCVPEIADXLGAVAKQGLEYANCGKAFSMDSSRLKSGEDSQELRGGHVXGAEFWCIFGSSSFPAAP

SEQ ID NO: 21497 - protein, 104 aa, Homo sapiens
  MOD_RES (19)..(19): Selenocysteine
  MOD_RES (21)..(21): Selenocysteine
  MOD_RES (75)..(75): Selenocysteine
MHQRLIFRLLKLEVQFIIXGXNHHSEKEFCSYLQYLEYLSQNRPPPNAYELFAKGYEDYLQSPLQPLMDNLESQXYEVFEKDPIKYSQYQQAIYKCLLDRVPEE

SEQ ID NO: 21498 - protein, 170 aa, Homo sapiens
  MOD_RES (25)..(25): Selenocysteine
  MOD_RES (38)..(38): Selenocysteine
  MOD_RES (90)..(90): Selenocysteine
  MOD_RES (97)..(97): Selenocysteine
  MOD_RES (102)..(102): Selenocysteine
  MOD_RES (131)..(132): Selenocysteine
  MOD_RES (134)..(134): Selenocysteine
  MOD_RES (143)..(143): Selenocysteine
  MOD_RES (152)..(152): Selenocysteine
MPVFHPRFKREFIQEPAKNRPGPQXRSDLLLSGRDWNXLIVGKLSPWIRPDSKVEKIRRNSEAAMLQELNFGAYLGLPAFLLPLNQEDNXNLARVLXNHIHXGHHSSMFWMRVPLVAPEDLRDDIIENAPXXHXEEYSGEEKXWMWWHNFRXLCDYSKRIAVALEIGADL

SEQ ID NO: 21499 - protein, 576 aa, Homo sapiens
  MOD_RES (8)..(8): Selenocysteine
  MOD_RES (50)..(50): Selenocysteine
  MOD_RES (71)..(71): Selenocysteine
  MOD_RES (78)..(78): Selenocysteine
  MOD_RES (83)..(83): Selenocysteine
  MOD_RES (112)..(113): Selenocysteine
  MOD_RES (115)..(115): Selenocysteine
  MOD_RES (124)..(124): Selenocysteine
  MOD_RES (133)..(133): Selenocysteine
  MOD_RES (172)..(172): Selenocysteine
  MOD_RES (177)..(177): Selenocysteine
  MOD_RES (206)..(206): Selenocysteine
  MOD_RES (208)..(208): Selenocysteine
  MOD_RES (262)..(262): Selenocysteine
  MOD_RES (295)..(295): Selenocysteine
  MOD_RES (339)..(339): Selenocysteine
  MOD_RES (353)..(353): Selenocysteine
  MOD_RES (408)..(408): Selenocysteine
  MOD_RES (459)..(459): Selenocysteine
  MOD_RES (476)..(476): Selenocysteine
  MOD_RES (485)..(485): Selenocysteine
  MOD_RES (496)..(496): Selenocysteine
  MOD_RES (503)..(503): Selenocysteine
  MOD_RES (510)..(510): Selenocysteine
  MOD_RES (530)..(530): Selenocysteine
  MOD_RES (536)..(536): Selenocysteine
  MOD_RES (557)..(557): Selenocysteine
  MOD_RES (568)..(568): Selenocysteine
  MOD_RES (573)..(573): Selenocysteine
MRGPNSGXEKGRLVIPEKQGFDFLCMPVFHPRFKREFIQEPAKNRPGPQXRSDLLLSGRAFLLPLNQEDNXNLARVLXNHIHXGHHSSMFWMRVPLVAPEDLRDDIIENAPXXHXEEYSGEEKXWMWWHNFRXLCDYSKRIAVALEIGADLPSNHVIDRWLGEPIKAAILPXSIFLXNKKGFPVLSKMHQRLIFRLLKLEVQFIIXGXNHHSEKEFCSYLQYLEYLSQNRPPPNAYELFAKGYEDYLQSPLQPLMDNLESQXYEVFEKDPIKYSQYQQAIYKCLLDRVPEEEKDXNVQVLMVLGAGRGPLVNASLRAAKQADRRIKLYAVEKNPNAVVXLENWQFEEWGSQVXVVSSDMREWVAPEKADIIVSELLGSFADNELSPECLDGAQHFLKDDGVSIPGEYXSFLAPISSSKLYNEVRACREKDRDPEAQFEMPYVVRLHNFHQLSAPQPCFXFSHPNRDPMIDNNRYCXLEFPVEVNXVLHGFAGYFEXVLYQDIXLSIRPEXHSPGMFSWFPILFPIKQPIXVREGQXICVRFWRCSNSKKVWYEWAVXAPVCSAIHNPXGRSYXIGL

SEQ ID NO: 21500 - protein, 620 aa, Homo sapiens
  MOD_RES (8)..(8): Selenocysteine
  MOD_RES (50)..(50): Selenocysteine
  MOD_RES (63)..(63): Selenocysteine
  MOD_RES (115)..(115): Selenocysteine
  MOD_RES (122)..(122): Selenocysteine
  MOD_RES (127)..(127): Selenocysteine
  MOD_RES (156)..(157): Selenocysteine
  MOD_RES (159)..(159): Selenocysteine
  MOD_RES (168)..(168): Selenocysteine
  MOD_RES (177)..(177): Selenocysteine
  MOD_RES (216)..(216): Selenocysteine
  MOD_RES (221)..(221): Selenocysteine
  MOD_RES (250)..(250): Selenocysteine
  MOD_RES (252)..(252): Selenocysteine
  MOD_RES (306)..(306): Selenocysteine
  MOD_RES (339)..(339): Selenocysteine
  MOD_RES (383)..(383): Selenocysteine
  MOD_RES (397)..(397): Selenocysteine
  MOD_RES (452)..(452): Selenocysteine
  MOD_RES (503)..(503): Selenocysteine
  MOD_RES (520)..(520): Selenocysteine
  MOD_RES (529)..(529): Selenocysteine
  MOD_RES (540)..(540): Selenocysteine
  MOD_RES (547)..(547): Selenocysteine
  MOD_RES (554)..(554): Selenocysteine
  MOD_RES (574)..(574): Selenocysteine
  MOD_RES (580)..(580): Selenocysteine
  MOD_RES (601)..(601): Selenocysteine
  MOD_RES (612)..(612): Selenocysteine
  MOD_RES (617)..(617): Selenocysteine
MRGPNSGXEKGRLVIPEKQGFDFLCMPVFHPRFKREFIQEPAKNRPGPQXRSDLLLSGRDWNXLIVGKLSPWIRPDSKVEKIRRNSEAAMLQELNFGAYLGLPAFLLPLNQEDNXNLARVLXNHIHXGHHSSMFWMRVPLVAPEDLRDDIIENAPXXHXEEYSGEEKXWMWWHNFRXLCDYSKRIAVALEIGADLPSNHVIDRWLGEPIKAAILPXSIFLXNKKGFPVLSKMHQRLIFRLLKLEVQFIIXGXNHHSEKEFCSYLQYLEYLSQNRPPPNAYELFAKGYEDYLQSPLQPLMDNLESQXYEVFEKDPIKYSQYQQAIYKCLLDRVPEEEKDXNVQVLMVLGAGRGPLVNASLRAAKQADRRIKLYAVEKNPNAVVXLENWQFEEWGSQVXVVSSDMREWVAPEKADIIVSELLGSFADNELSPECLDGAQHFLKDDGVSIPGEYXSFLAPISSSKLYNEVRACREKDRDPEAQFEMPYVVRLHNFHQLSAPQPCFXFSHPNRDPMIDNNRYCXLEFPVEVNXVLHGFAGYFEXVLYQDIXLSIRPEXHSPGMFSWFPILFPIKQPIXVREGQXICVRFWRCSNSKKVWYEWAVXAPVCSAIHNPXGRSYXIGL

SEQ ID NO: 21501 - protein, 466 aa, Homo sapiens
  MOD_RES (8)..(8): Selenocysteine
  MOD_RES (50)..(50): Selenocysteine
  MOD_RES (63)..(63): Selenocysteine
  MOD_RES (96)..(96): Selenocysteine
  MOD_RES (98)..(98): Selenocysteine
  MOD_RES (152)..(152): Selenocysteine
  MOD_RES (185)..(185): Selenocysteine
  MOD_RES (229)..(229): Selenocysteine
  MOD_RES (243)..(243): Selenocysteine
  MOD_RES (298)..(298): Selenocysteine
  MOD_RES (349)..(349): Selenocysteine
  MOD_RES (366)..(366): Selenocysteine
  MOD_RES (375)..(375): Selenocysteine
  MOD_RES (386)..(386): Selenocysteine
  MOD_RES (393)..(393): Selenocysteine
  MOD_RES (400)..(400): Selenocysteine
  MOD_RES (420)..(420): Selenocysteine
  MOD_RES (426)..(426): Selenocysteine
  MOD_RES (447)..(447): Selenocysteine
  MOD_RES (458)..(458): Selenocysteine
  MOD_RES (463)..(463): Selenocysteine
MRGPNSGXEKGRLVIPEKQGFDFLCMPVFHPRFKREFIQEPAKNRPGPQXRSDLLLSGRDWNXLIVGKLSPWIRPDSKVEKIRRNSEALEVQFIIXGXNHHSEKEFCSYLQYLEYLSQNRPPPNAYELFAKGYEDYLQSPLQPLMDNLESQXYEVFEKDPIKYSQYQQAIYKCLLDRVPEEEKDXNVQVLMVLGAGRGPLVNASLRAAKQADRRIKLYAVEKNPNAVVXLENWQFEEWGSQVXVVSSDMREWVAPEKADIIVSELLGSFADNELSPECLDGAQHFLKDDGVSIPGEYXSFLAPISSSKLYNEVRACREKDRDPEAQFEMPYVVRLHNFHQLSAPQPCFXFSHPNRDPMIDNNRYCXLEFPVEVNXVLHGFAGYFEXVLYQDIXLSIRPEXHSPGMFSWFPILFPIKQPIXVREGQXICVRFWRCSNSKKVWYEWAVXAPVCSAIHNPXGRSYXIGL

SEQ ID NO: 21502 - protein, 69 aa, Homo sapiens
  MOD_RES (8)..(8): Selenocysteine
  MOD_RES (52)..(52): Selenocysteine
MRGPNSGXEKGRLVIPEKQGLEYANCGKAFSMDSSRLKSGEDSQELRGGHVXGAEFWCIFGSSSFPAAP

SEQ ID NO: 21503 - protein, 279 aa, Homo sapiens
  MOD_RES (33)..(33): Selenocysteine
  MOD_RES (40)..(40): Selenocysteine
  MOD_RES (45)..(45): Selenocysteine
  MOD_RES (74)..(75): Selenocysteine
  MOD_RES (77)..(77): Selenocysteine
  MOD_RES (86)..(86): Selenocysteine
  MOD_RES (95)..(95): Selenocysteine
  MOD_RES (100)..(100): Selenocysteine
  MOD_RES (128)..(128): Selenocysteine
  MOD_RES (133)..(133): Selenocysteine
  MOD_RES (162)..(162): Selenocysteine
  MOD_RES (164)..(164): Selenocysteine
  MOD_RES (218)..(218): Selenocysteine
  MOD_RES (251)..(251): Selenocysteine
RRNSEAAMLQELNFGAYLGLPAFLLPLNQEDNXNLARVLXNHIHXGHHSSMFWMRVPLVAPEDLRDDIIENAPXXHXEEYSGEEKXWMWWHNFRXLCDYXLEIGADLPSNHVIDRWLGEPIKAAILPXSIFLXNKKGFPVLSKMHQRLIFRLLKLEVQFIIXGXNHHSEKEFCSYLQYLEYLSQNRPPPNAYELFAKGYEDYLQSPLQPLMDNLESQXYEVFEKDPIKYSQYQQAIYKCLLDRVPEEEKDXNVQVLMVLGAGRGPLVNASLRAAKQADR

SEQ ID NO: 21504 - protein, 138 aa, Homo sapiens
  MOD_RES (10)..(10): Selenocysteine
  MOD_RES (12)..(12): Selenocysteine
  MOD_RES (66)..(66): Selenocysteine
  MOD_RES (99)..(99): Selenocysteine
SQLEVQFIIXGXNHHSEKEFCSYLQYLEYLSQNRPPPNAYELFAKGYEDYLQSPLQPLMDNLESQXYEVFEKDPIKYSQYQQAIYKCLLDRVPEEEKDXNVQVLMVLGAGRGPLVNASLRAAKQADRRIKLLENWQFE

SEQ ID NO: 21505 - protein, 179 aa, Homo sapiens
  MOD_RES (1)..(1): Any amino acid
  MOD_RES (12)..(12): Selenocysteine
  MOD_RES (63)..(63): Selenocysteine
  MOD_RES (80)..(80): Selenocysteine
  MOD_RES (89)..(89): Selenocysteine
  MOD_RES (100)..(100): Selenocysteine
  MOD_RES (107)..(107): Selenocysteine
  MOD_RES (114)..(114): Selenocysteine
  MOD_RES (133)..(133): Selenocysteine
  MOD_RES (139)..(139): Selenocysteine
  MOD_RES (160)..(160): Selenocysteine
  MOD_RES (171)..(171): Selenocysteine
  MOD_RES (176)..(176): Selenocysteine
XDDGVSIPGEYXSFLAPISSSKLYNEVRACREKDRDPEAQFEMPYVVRLHNFHQLSAPQPCFXFSHPNRDPMIDNNRYCXLEFPVEVNXVLHGFAGYFEXVLYQDIXLSIRPEXHSPGMFSWFPILFPIKPIXVREGQXICVRFWRCSNSKKVWYEWAVXAPVCSAIHNPXGRSYXIGL

SEQ ID NO: 21506 - protein, 61 aa, Homo sapiens
  MOD_RES (1)..(1): Any amino acid
  MOD_RES (6)..(6): Selenocysteine
  MOD_RES (26)..(26): Selenocysteine
  MOD_RES (32)..(32): Selenocysteine
  MOD_RES (54)..(54): Selenocysteine
XIRPEXHSPGMFSWFPILFPIKQPIXVREGQXICVRFWRCSNSKKGSSHQSMKXSGQGVRN

SEQ ID NO: 21507 - protein, 375 aa, Homo sapiens
  MOD_RES (21)..(21): Selenocysteine
  MOD_RES (39)..(39): Selenocysteine
  MOD_RES (67)..(67): Selenocysteine
  MOD_RES (85)..(85): Selenocysteine
  MOD_RES (93)..(93): Selenocysteine
  MOD_RES (142)..(142): Selenocysteine
  MOD_RES (175)..(175): Selenocysteine
  MOD_RES (227)..(227): Selenocysteine
  MOD_RES (295)..(295): Selenocysteine
  MOD_RES (309)..(309): Selenocysteine
  MOD_RES (316)..(316): Selenocysteine
  MOD_RES (335)..(335): Selenocysteine
  MOD_RES (342)..(342): Selenocysteine
  MOD_RES (368)..(368): Selenocysteine
MSQPKKRKLESGGGGEGGEGXEEEDGAEREAALERPRRXKRERDQLYYECYSDVSVHEEMIADRVRXDAYRLGILRNWAALRGKXVLDVGAGXGILSIFCAQAGARRVYAVEASAIWQQAREVVRFNGLEDRVHVLPGPVEXVELPEQVDAIVSEWMGYGLLHESMLSSVLHARXKWLKEGGLLLPASAELFIAPISDQMLEWRLGFWSQVKQHYGVDMSCLEGFAXRCLMGHSEIVVQGLSGEDVLARPQRFAQLELSRAGLEQELEAGVGGRFRCSCYGSAPMHGFAIWFQVXFPGGESEKPLVLSXSPFHPAXHWKQALLYLNEPVQVEQDXDVSGEIXLLPSRDNPRRLRVLLRYKVGDQEEKXKDFAMED

SEQ ID NO: 21508 - protein, 33 aa, Homo sapiens
  MOD_RES (11)..(12): Selenocysteine
MKIFCSRANPXXGSVEWLEEDEHYDYHQEIARM

SEQ ID NO: 21509 - protein, 72 aa, Homo sapiens
  MOD_RES (11)..(12): Selenocysteine
MKIFCSRANPXXGSVEWLEEDEHYDYHQEIARSSYADMLHDKDRNVKYYQGIRAAVSRVKDRGQKALVLDIG

SEQ ID NO: 21510 - protein, 80 aa, Homo sapiens
  MOD_RES (11)..(12): Selenocysteine
  MOD_RES (73)..(73): Selenocysteine
  MOD_RES (75)..(75): Selenocysteine
MKIFCSRANPXXGSVEWLEEDEHYDYHQEIARSSYADMLHDKDRNVKYYQGIRAAVSRVKDRGQKALVLDIGXGXGLLSM

SEQ ID NO: 21511 - protein, 108 aa, Homo sapiens
  MOD_RES (11)..(12): Selenocysteine
  MOD_RES (73)..(73): Selenocysteine
  MOD_RES (75)..(75): Selenocysteine
  MOD_RES (84)..(84): Selenocysteine
MKIFCSRANPXXGSVEWLEEDEHYDYHQEIARSSYADMLHDKDRNVKYYQGIRAAVSRVKDRGQKALVLDIGXGXGLLSMMAVXAGADFCYAIEVFKPMADAAVKIVE

SEQ ID NO: 21512 - protein, 169 aa, Homo sapiens
  MOD_RES (11)..(12): Selenocysteine
  MOD_RES (73)..(73): Selenocysteine
  MOD_RES (75)..(75): Selenocysteine
  MOD_RES (84)..(84): Selenocysteine
  MOD_RES (124)..(124): Selenocysteine
  MOD_RES (127)..(127): Selenocysteine
  MOD_RES (143)..(143): Selenocysteine
  MOD_RES (148)..(148): Selenocysteine
MKIFCSRANPXXGSVEWLEEDEHYDYHQEIARSSYADMLHDKDRNVKYYQGIRAAVSRVKDRGQKALVLDIGXGXGLLSMMAVXAGADFCYAIEVFKPMADAAVKIVEKNGFSDKIKVINKHSXEVXVGPEGDMPCRANILVXELFDXELIGEGALPSYEHAHRHLVEE

SEQ ID NO: 21513 - protein, 223 aa, Homo sapiens
  MOD_RES (11)..(12): Selenocysteine
  MOD_RES (73)..(73): Selenocysteine
  MOD_RES (75)..(75): Selenocysteine
  MOD_RES (84)..(84): Selenocysteine
  MOD_RES (124)..(124): Selenocysteine
  MOD_RES (127)..(127): Selenocysteine
  MOD_RES (143)..(143): Selenocysteine
  MOD_RES (148)..(148): Selenocysteine
  MOD_RES (179)..(179): Selenocysteine
  MOD_RES (203)..(203): Selenocysteine
MKIFCSRANPXXGSVEWLEEDEHYDYHQEIARSSYADMLHDKDRNVKYYQGIRAAVSRVKDRGQKALVLDIGXGXGLLSMMAVXAGADFCYAIEVFKPMADAAVKIVEKNGFSDKIKVINKHSXEVXVGPEGDMPCRANILVXELFDXELIGEGALPSYEHAHRHLVEENCEAVPHRAXVYAQLVESGRMWSWNKLFPIHVQXSLGEQVIVPPVDVESCPGAP

SEQ ID NO: 21514 - protein, 567 aa, Homo sapiens
  MOD_RES (11)..(12): Selenocysteine
  MOD_RES (73)..(73): Selenocysteine
  MOD_RES (75)..(75): Selenocysteine
  MOD_RES (84)..(84): Selenocysteine
  MOD_RES (124)..(124): Selenocysteine
  MOD_RES (127)..(127): Selenocysteine
  MOD_RES (143)..(143): Selenocysteine
  MOD_RES (148)..(148): Selenocysteine
  MOD_RES (179)..(179): Selenocysteine
  MOD_RES (203)..(203): Selenocysteine
  MOD_RES (239)..(239): Selenocysteine
  MOD_RES (271)..(271): Selenocysteine
  MOD_RES (295)..(295): Selenocysteine
  MOD_RES (351)..(351): Selenocysteine
  MOD_RES (388)..(388): Selenocysteine
  MOD_RES (397)..(397): Selenocysteine
  MOD_RES (428)..(428): Selenocysteine
  MOD_RES (463)..(463): Selenocysteine
  MOD_RES (482)..(483): Selenocysteine
  MOD_RES (498)..(498): Selenocysteine
  MOD_RES (540)..(540): Selenocysteine
  MOD_RES (557)..(557): Selenocysteine
MKIFCSRANPXXGSVEWLEEDEHYDYHQEIARSSYADMLHDKDRNVKYYQGIRAAVSRVKDRGQKALVLDIGXGXGLLSMMAVXAGADFCYAIEVFKPMADAAVKIVEKNGFSDKIKVINKHSXEVXVGPEGDMPCRANILVXELFDXELIGEGALPSYEHAHRHLVEENCEAVPHRAXVYAQLVESGRMWSWNKLFPIHVQXSLGEQVIVPPVDVESCPGAPSVCDIQLNQVSPADFXVLSDVLPMFSIDFSKQVSSSAACHSRRFEPLXSGRAQVVLSWWDIEMDPEGKIKCXMAPFWAHSDPEEMQWRDHWMQCVYFLPQEEPVVQGSALYLVAHHDDYCVWYSLQRXSPEKNERVRQMRPVCDCQAHLLWNRPRFGEINDQDRXDRYVQALRXVLKPDSVCLCVSDGSLLSVLAHHLGVEQVFXVESSAASHKLLRKIFKANHLEDKINIIEKRPELLXNEDLQGRKVSLLLGEPFFXXSLLPWHNLYFWYVRXAVDQHLGPGAMVMPQAASLHAVVVEFRVCREQQDVPLVLAAXLPCVLAGGCGRGCSFLXGPVADPEPLW

SEQ ID NO: 21515 - protein, 692 aa, Homo sapiens
  MOD_RES (11)..(12): Selenocysteine
  MOD_RES (73)..(73): Selenocysteine
  MOD_RES (75)..(75): Selenocysteine
  MOD_RES (84)..(84): Selenocysteine
  MOD_RES (124)..(124): Selenocysteine
  MOD_RES (127)..(127): Selenocysteine
  MOD_RES (143)..(143): Selenocysteine
  MOD_RES (148)..(148): Selenocysteine
  MOD_RES (179)..(179): Selenocysteine
  MOD_RES (203)..(203): Selenocysteine
  MOD_RES (239)..(239): Selenocysteine
  MOD_RES (271)..(271): Selenocysteine
  MOD_RES (295)..(295): Selenocysteine
  MOD_RES (351)..(351): Selenocysteine
  MOD_RES (388)..(388): Selenocysteine
  MOD_RES (397)..(397): Selenocysteine
  MOD_RES (428)..(428): Selenocysteine
  MOD_RES (463)..(463): Selenocysteine
  MOD_RES (482)..(483): Selenocysteine
  MOD_RES (498)..(498): Selenocysteine
  MOD_RES (582)..(582): Selenocysteine
  MOD_RES (599)..(599): Selenocysteine
  MOD_RES (620)..(620): Selenocysteine
  MOD_RES (624)..(624): Selenocysteine
  MOD_RES (627)..(627): Selenocysteine
  MOD_RES (667)..(667): Selenocysteine
  MOD_RES (678)..(678): Selenocysteine
  MOD_RES (690)..(690): Selenocysteine
MKIFCSRANPXXGSVEWLEEDEHYDYHQEIARSSYADMLHDKDRNVKYYQGIRAAVSRVKDRGQKALVLDIGXGXGLLSMMAVXAGADFCYAIEVFKPMADAAVKIVEKNGFSDKIKVINKHSXEVXVGPEGDMPCRANILVXELFDXELIGEGALPSYEHAHRHLVEENCEAVPHRAXVYAQLVESGRMWSWNKLFPIHVQXSLGEQVIVPPVDVESCPGAPSVCDIQLNQVSPADFXVLSDVLPMFSIDFSKQVSSSAACHSRRFEPLXSGRAQVVLSWWDIEMDPEGKIKCXMAPFWAHSDPEEMQWRDHWMQCVYFLPQEEPVVQGSALYLVAHHDDYCVWYSLQRXSPEKNERVRQMRPVCDCQAHLLWNRPRFGEINDQDRXDRYVQALRXVLKPDSVCLCVSDGSLLSVLAHHLGVEQVFXVESSAASHKLLRKIFKANHLEDKINIIEKRPELLXNEDLQGRKVSLLLGEPFFXXSLLPWHNLYFWYVRXAVDQHLGPGAMVMPQAASLHAVVVEFRDLWRIRSPCGDCEGFDVHIMDDMIKRALDFRESREAEPHPLWEYPCRSLSEPWQILXFDFQQPVPLQPLCAEGXVELRRPGQSHAAVLWMEYHLXPECXLSXGLLEPADPEGGCCWNPHCKQAVYFFSPAPDPRALLGGPRXVSYAVEFHPDXGDIIMEFRHADXPD

SEQ ID NO: 21516 - protein, 642 aa, Homo sapiens
  MOD_RES (11)..(12): Selenocysteine
  MOD_RES (74)..(74): Selenocysteine
  MOD_RES (77)..(77): Selenocysteine
  MOD_RES (93)..(93): Selenocysteine
  MOD_RES (98)..(98): Selenocysteine
  MOD_RES (129)..(129): Selenocysteine
  MOD_RES (153)..(153): Selenocysteine
  MOD_RES (189)..(189): Selenocysteine
  MOD_RES (221)..(221): Selenocysteine
  MOD_RES (245)..(245): Selenocysteine
  MOD_RES (301)..(301): Selenocysteine
  MOD_RES (338)..(338): Selenocysteine
  MOD_RES (347)..(347): Selenocysteine
  MOD_RES (378)..(378): Selenocysteine
  MOD_RES (413)..(413): Selenocysteine
  MOD_RES (432)..(433): Selenocysteine
  MOD_RES (448)..(448): Selenocysteine
  MOD_RES (532)..(532): Selenocysteine
  MOD_RES (549)..(549): Selenocysteine
  MOD_RES (570)..(570): Selenocysteine
  MOD_RES (574)..(574): Selenocysteine
  MOD_RES (577)..(577): Selenocysteine
  MOD_RES (617)..(617): Selenocysteine
  MOD_RES (628)..(628): Selenocysteine
  MOD_RES (640)..(640): Selenocysteine
MKIFCSRANPXXGSVEWLEEDEHYDYHQEIARSSYADMLHDKDRVFKPMADAAVKIVEKNGFSDKIKVINKHSXEVXVGPEGDMPCRANILVXELFDXELIGEGALPSYEHAHRHLVEENCEAVPHRAXVYAQLVESGRMWSWNKLFPIHVQXSLGEQVIVPPVDVESCPGAPSVCDIQLNQVSPADFXVLSDVLPMFSIDFSKQVSSSAACHSRRFEPLXSGRAQVVLSWWDIEMDPEGKIKCXMAPFWAHSDPEEMQWRDHWMQCVYFLPQEEPVVQGSALYLVAHHDDYCVWYSLQRXSPEKNERVRQMRPVCDCQAHLLWNRPRFGEINDQDRXDRYVQALRXVLKPDSVCLCVSDGSLLSVLAHHLGVEQVFXVESSAASHKLLRKIFKANHLEDKINIIEKRPELLXNEDLQGRKVSLLLGEPFFXXSLLPWHNLYFWYVRXAVDQHLGPGAMVMPQAASLHAVVVEFRDLWRIRSPCGDCEGFDVHIMDDMIKRALDFRESREAEPHPLWEYPCRSLSEPWQILXFDFQQPVPLQPLCAEGXVELRRPGQSHAAVLWMEYHLXPECXLSXGLLEPADPEGGCCWNPHCKQAVYFFSPAPDPRALLGGPRXVSYAVEFHPDXGDIIMEFRHADXPD

SEQ ID NO: 21517 - protein, 385 aa, Homo sapiens
  MOD_RES (42)..(42): Selenocysteine
  MOD_RES (62)..(62): Selenocysteine
  MOD_RES (87)..(87): Selenocysteine
  MOD_RES (89)..(89): Selenocysteine
  MOD_RES (113)..(113): Selenocysteine
  MOD_RES (154)..(154): Selenocysteine
  MOD_RES (190)..(190): Selenocysteine
  MOD_RES (239)..(239): Selenocysteine
  MOD_RES (261)..(261): Selenocysteine
  MOD_RES (273)..(273): Selenocysteine
  MOD_RES (276)..(276): Selenocysteine
  MOD_RES (282)..(282): Selenocysteine
  MOD_RES (300)..(300): Selenocysteine
  MOD_RES (307)..(307): Selenocysteine
  MOD_RES (317)..(317): Selenocysteine
  MOD_RES (324)..(324): Selenocysteine
  MOD_RES (329)..(329): Selenocysteine
  MOD_RES (338)..(338): Selenocysteine
  MOD_RES (348)..(348): Selenocysteine
  MOD_RES (364)..(364): Selenocysteine
  MOD_RES (376)..(376): Selenocysteine
MESLASDGFKLKEVSSVNSPPSQPPQPVVPAKPVQCVHHVSXQPSCPGRGKMSKLLNPEEMXSRDYYFDSYAHFGIHEEMLKDEVRXLXYRNSMYHNKHVFKDKVVLDVGSGXGILSMFAAKAGAKKVFGIECSSISDYSEKIIKANHLDNIIXIFKGKVEEVELPVEKVDIIISEWMGYCLFYESMLNXVIFARDKWLKPGGLMFPDRAALYVVAIEDRQYKDFKIHWWENVYGFDMXCIRDVAMKEPLVDIVDPKQVVXNACLIKEVDIYXVKXEELSFXSAFCLQIQRNDYVHALVXYFNIEFXKCHKKMGFSXAPDAPYXHWKQXVFYLEDYLXVRRGEEIYGXISMKPNAKNVRDLDFXVDLDFKGQLCEXSVSNDYKMR

SEQ ID NO: 21518 - protein, 394 aa, Homo sapiens
  MOD_RES (24)..(24): Selenocysteine
  MOD_RES (51)..(51): Selenocysteine
  MOD_RES (71)..(71): Selenocysteine
  MOD_RES (96)..(96): Selenocysteine
  MOD_RES (98)..(98): Selenocysteine
  MOD_RES (122)..(122): Selenocysteine
  MOD_RES (163)..(163): Selenocysteine
  MOD_RES (199)..(199): Selenocysteine
  MOD_RES (248)..(248): Selenocysteine
  MOD_RES (270)..(270): Selenocysteine
  MOD_RES (282)..(282): Selenocysteine
  MOD_RES (285)..(285): Selenocysteine
  MOD_RES (291)..(291): Selenocysteine
  MOD_RES (309)..(309): Selenocysteine
  MOD_RES (316)..(316): Selenocysteine
  MOD_RES (326)..(326): Selenocysteine
  MOD_RES (333)..(333): Selenocysteine
  MOD_RES (338)..(338): Selenocysteine
  MOD_RES (347)..(347): Selenocysteine
  MOD_RES (357)..(357): Selenocysteine
  MOD_RES (373)..(373): Selenocysteine
  MOD_RES (385)..(385): Selenocysteine
MGMKHSSRCLLLRRKMAENAAESXEVNSPPSQPPQPVVPAKPVQCVHHVSXQPSCPGRGKMSKLLNPEEMXSRDYYFDSYAHFGIHEEMLKDEVRXLXYRNSMYHNKHVFKDKVVLDVGSGXGILSMFAAKAGAKKVFGIECSSISDYSEKIIKANHLDNIIXIFKGKVEEVELPVEKVDIIISEWMGYCLFYESMLNXVIFARDKWLKPGGLMFPDRAALYVVAIEDRQYKDFKIHWWENVYGFDMXCIRDVAMKEPLVDIVDPKQVVXNACLIKEVDIYXVKXEELSFXSAFCLQIQRNDYVHALVXYFNIEFXKCHKKMGFSXAPDAPYXHWKQXVFYLEDYLXVRRGEEIYGXISMKPNAKNVRDLDFXVDLDFKGQLCEXSVSNDYKMR

SEQ ID NO: 21519 - protein, 217 aa, Homo sapiens
  MOD_RES (15)..(15): Selenocysteine
  MOD_RES (33)..(33): Selenocysteine
  MOD_RES (95)..(95): Selenocysteine
  MOD_RES (107)..(107): Selenocysteine
  MOD_RES (183)..(183): Selenocysteine
  MOD_RES (188)..(188): Selenocysteine
  MOD_RES (190)..(193): Selenocysteine
  MOD_RES (199)..(199): Selenocysteine
  MOD_RES (201)..(201): Selenocysteine
  MOD_RES (216)..(216): Selenocysteine
MANLGCWMLVLFVAXWSDLGLCKKRPKPGGWNXGGSRYPGQGSPGGNRYPPQGGGGWGQPHGGGWGQPHGGGWGQPHGGGWGQPHGGGWGQGGGXHSQWNKPSKPKXNMKHMAGAAAAGAVVGGLGGYMLGSAMSRPIIHFGSDYEDRYYRENMHRYPNQVYYRPMDEYSNQNNFVHDCVNIXIKQHXVXXXXKGENFXEXDVKMMERVVEQMCIXQ

SEQ ID NO: 21520 - protein, 249 aa, Homo sapiens
  MOD_RES (15)..(15): Selenocysteine
  MOD_RES (33)..(33): Selenocysteine
  MOD_RES (95)..(95): Selenocysteine
  MOD_RES (107)..(107): Selenocysteine
  MOD_RES (183)..(183): Selenocysteine
  MOD_RES (188)..(188): Selenocysteine
  MOD_RES (190)..(193): Selenocysteine
  MOD_RES (199)..(199): Selenocysteine
  MOD_RES (201)..(201): Selenocysteine
  MOD_RES (216)..(216): Selenocysteine
MANLGCWMLVLFVAXWSDLGLCKKRPKPGGWNXGGSRYPGQGSPGGNRYPPQGGGGWGQPHGGGWGQPHGGGWGQPHGGGWGQPHGGGWGQGGGXHSQWNKPSKPKXNMKHMAGAAAAGAVVGGLGGYMLGSAMSRPIIHFGSDYEDRYYRENMHRYPNQVYYRPMDEYSNQNNFVHDCVNIXIKQHXVXXXXKGENFXEXDVKMMERVVEQMCIXQYERESQAYYQRGSSMVLFSSPPVILLISFLIF

SEQ ID NO: 21521 - protein, 253 aa, Homo sapiens
  MOD_RES (15)..(15): Selenocysteine
  MOD_RES (33)..(33): Selenocysteine
  MOD_RES (95)..(95): Selenocysteine
  MOD_RES (107)..(107): Selenocysteine
  MOD_RES (183)..(183): Selenocysteine
  MOD_RES (188)..(188): Selenocysteine
  MOD_RES (190)..(193): Selenocysteine
  MOD_RES (199)..(199): Selenocysteine
  MOD_RES (201)..(201): Selenocysteine
  MOD_RES (216)..(216): Selenocysteine
MANLGCWMLVLFVAXWSDLGLCKKRPKPGGWNXGGSRYPGQGSPGGNRYPPQGGGGWGQPHGGGWGQPHGGGWGQPHGGGWGQPHGGGWGQGGGXHSQWNKPSKPKXNMKHMAGAAAAGAVVGGLGGYMLGSAMSRPIIHFGSDYEDRYYRENMHRYPNQVYYRPMDEYSNQNNFVHDCVNIXIKQHXVXXXXKGENFXEXDVKMMERVVEQMCIXQYERESQAYYQRGSSMVLFSSPPVILLISFLIFLIVG

SEQ ID NO: 21522 - protein, 116 aa, Homo sapiens
  MOD_RES (5)..(5): Selenocysteine
  MOD_RES (13)..(13): Selenocysteine
  MOD_RES (19)..(19): Selenocysteine
  MOD_RES (79)..(79): Selenocysteine
  MOD_RES (110)..(110): Selenocysteine
MWQLXSLLLFVAXWGISGXPAPLDSVFSSSERAHQVLRIRKRANSFLEELRHSSLERECIEEICDFEEAKEIFQNVDDXLAFWSKHVDGDQCLVLPLEHPCASLCCGHGXCIDGIG

SEQ ID NO: 21523 - protein, 126 aa, Homo sapiens
  MOD_RES (5)..(5): Selenocysteine
  MOD_RES (13)..(13): Selenocysteine
  MOD_RES (19)..(19): Selenocysteine
  MOD_RES (79)..(79): Selenocysteine
  MOD_RES (110)..(110): Selenocysteine
MWQLXSLLLFVAXWGISGXPAPLDSVFSSSERAHQVLRIRKRANSFLEELRHSSLERECIEEICDFEEAKEIFQNVDDXLAFWSKHVDGDQCLVLPLEHPCASLCCGHGXCIDGIGSFSCDCRSGW

SEQ ID NO: 21524 - protein, 175 aa, Homo sapiens
  MOD_RES (5)..(5): Selenocysteine
  MOD_RES (13)..(13): Selenocysteine
  MOD_RES (19)..(19): Selenocysteine
  MOD_RES (79)..(79): Selenocysteine
  MOD_RES (110)..(110): Selenocysteine
MWQLXSLLLFVAXWGISGXPAPLDSVFSSSERAHQVLRIRKRANSFLEELRHSSLERECIEEICDFEEAKEIFQNVDDXLAFWSKHVDGDQCLVLPLEHPCASLCCGHGXCIDGIGSFSCDCRSGWEGRFCQREEVGWRRCSCAPGYKLGDDLLQCHPAVKFPCGRPWKRMEKKR

SEQ ID NO: 21525 - protein, 461 aa, Homo sapiens
  MOD_RES (5)..(5): Selenocysteine
  MOD_RES (13)..(13): Selenocysteine
  MOD_RES (19)..(19): Selenocysteine
  MOD_RES (79)..(79): Selenocysteine
  MOD_RES (110)..(110): Selenocysteine
  MOD_RES (148)..(148): Selenocysteine
  MOD_RES (201)..(201): Selenocysteine
  MOD_RES (218)..(218): Selenocysteine
  MOD_RES (250)..(250): Selenocysteine
  MOD_RES (295)..(296): Selenocysteine
  MOD_RES (310)..(310): Selenocysteine
  MOD_RES (314)..(314): Selenocysteine
  MOD_RES (337)..(337): Selenocysteine
  MOD_RES (340)..(340): Selenocysteine
  MOD_RES (357)..(357): Selenocysteine
  MOD_RES (413)..(413): Selenocysteine
  MOD_RES (436)..(436): Selenocysteine
MWQLXSLLLFVAXWGISGXPAPLDSVFSSSERAHQVLRIRKRANSFLEELRHSSLERECIEEICDFEEAKEIFQNVDDXLAFWSKHVDGDQCLVLPLEHPCASLCCGHGXCIDGIGSFSCDCRSGWEGRFCQREVSFLNCSLDNGGCXHYCLEEVGWRRCSCAPGYKLGDDLLQCHPAVKFPCGRPWKRMEKKRSHLKRDXEDQEDQVDPRLIDGKMXRRGDSPWQVVLLDSKKKLACGAVLIHPSWVLXAAHCMDESKKLLVRLGEYDLRRWEKWELDLDIKEVFVHPNYSKSXXDNDIALLHLAQPAXLSQXIVPICLPDSGLAERELNQAGQEXLVXGWGYHSSREKEAKRNRXFVLNFIKIPVVPHNECSEVMSNMVSENMLCAGILGDRQDACEGDSGGPMVASFHGXWFLVGLVSWGEGCGLLHNYGVYXKVSRYLDWIHGHIRDKEAPQKSWAP

SEQ ID NO: 21526 - protein, 495 aa, Homo sapiens
  MOD_RES (5)..(5): Selenocysteine
  MOD_RES (13)..(13): Selenocysteine
  MOD_RES (19)..(19): Selenocysteine
  MOD_RES (79)..(79): Selenocysteine
  MOD_RES (110)..(110): Selenocysteine
  MOD_RES (156)..(156): Selenocysteine
  MOD_RES (158)..(158): Selenocysteine
  MOD_RES (182)..(182): Selenocysteine
  MOD_RES (235)..(235): Selenocysteine
  MOD_RES (252)..(252): Selenocysteine
  MOD_RES (284)..(284): Selenocysteine
  MOD_RES (329)..(330): Selenocysteine
  MOD_RES (344)..(344): Selenocysteine
  MOD_RES (348)..(348): Selenocysteine
  MOD_RES (371)..(371): Selenocysteine
  MOD_RES (374)..(374): Selenocysteine
  MOD_RES (391)..(391): Selenocysteine
  MOD_RES (447)..(447): Selenocysteine
  MOD_RES (470)..(470): Selenocysteine
MWQLXSLLLFVAXWGISGXPAPLDSVFSSSERAHQVLRIRKRANSFLEELRHSSLERECIEEICDFEEAKEIFQNVDDXLAFWSKHVDGDQCLVLPLEHPCASLCCGHGXCIDGIGSFSCDCRSGWEGRFCQRGEGERWMLAGGGAGLGPGWGRGXSXSCPRPPLPAEVSFLNCSLDNGGCXHYCLEEVGWRRCSCAPGYKLGDDLLQCHPAVKFPCGRPWKRMEKKRSHLKRDXEDQEDQVDPRLIDGKMXRRGDSPWQVVLLDSKKKLACGAVLIHPSWVLXAAHCMDESKKLLVRLGEYDLRRWEKWELDLDIKEVFVHPNYSKSXXDNDIALLHLAQPAXLSQXIVPICLPDSGLAERELNQAGQEXLVXGWGYHSSREKEAKRNRXFVLNFIKIPVVPHNECSEVMSNMVSENMLCAGILGDRQDACEGDSGGPMVASFHGXWFLVGLVSWGEGCGLLHNYGVYXKVSRYLDWIHGHIRDKEAPQKSWAP

SEQ ID NO: 21527 - protein, 52 aa, Homo sapiens
  MOD_RES (5)..(5): Selenocysteine
  MOD_RES (13)..(13): Selenocysteine
  MOD_RES (19)..(19): Selenocysteine
  MOD_RES (30)..(30): Selenocysteine
MWQLXSLLLFVAXWGISGXPAPLGAADPQXCQLLPGGAPSQQPGAGVHRGDL

SEQ ID NO: 21528 - protein, 236 aa, Homo sapiens
  MOD_RES (1)..(1): Any amino acid
  MOD_RES (10)..(10): Selenocysteine
  MOD_RES (70)..(71): Selenocysteine
  MOD_RES (85)..(85): Selenocysteine
  MOD_RES (89)..(89): Selenocysteine
  MOD_RES (112)..(112): Selenocysteine
  MOD_RES (115)..(115): Selenocysteine
  MOD_RES (132)..(132): Selenocysteine
  MOD_RES (188)..(188): Selenocysteine
  MOD_RES (211)..(211): Selenocysteine
XCSLDNGGCXHYCLEEVGWRRCSCAPGYKLGDDLLQCHPAGEYDLRRWEKWELDLDIKEVFVHPNYSKSXXDNDIALLHLAQPAXLSQXIVPICLPDSGLAERELNQAGQEXLVXGWGYHSSREKEAKRNRXFVLNFIKIPVVPHNECSEVMSNMVSENMLCAGILGDRQDACEGDSGGPMVASFHGXWFLVGLVSWGEGCGLLHNYGVYXKVSRYLDWIHGHIRDKEAPQKSWAP

SEQ ID NO: 21529 - protein, 600 aa, Homo sapiens
  MOD_RES (22)..(22): Selenocysteine
  MOD_RES (44)..(44): Selenocysteine
  MOD_RES (67)..(67): Selenocysteine
  MOD_RES (112)..(112): Selenocysteine
  MOD_RES (164)..(164): Selenocysteine
  MOD_RES (174)..(174): Selenocysteine
  MOD_RES (199)..(199): Selenocysteine
  MOD_RES (214)..(214): Selenocysteine
  MOD_RES (236)..(236): Selenocysteine
  MOD_RES (275)..(275): Selenocysteine
  MOD_RES (302)..(302): Selenocysteine
  MOD_RES (305)..(305): Selenocysteine
  MOD_RES (311)..(311): Selenocysteine
  MOD_RES (325)..(325): Selenocysteine
  MOD_RES (338)..(338): Selenocysteine
  MOD_RES (349)..(349): Selenocysteine
  MOD_RES (357)..(357): Selenocysteine
  MOD_RES (371)..(371): Selenocysteine
  MOD_RES (384)..(384): Selenocysteine
  MOD_RES (394)..(394): Selenocysteine
  MOD_RES (411)..(411): Selenocysteine
  MOD_RES (424)..(424): Selenocysteine
  MOD_RES (466)..(466): Selenocysteine
  MOD_RES (470)..(470): Selenocysteine
  MOD_RES (502)..(502): Selenocysteine
  MOD_RES (575)..(575): Selenocysteine
  MOD_RES (592)..(592): Selenocysteine
MALRRALPALRPCIPRFVPLSXAPASREQPAAGPAAVPGGGSAXAVRPPVPAVDFGNAQEAYRSRRXWELARSLLVLRLCAWPALLARHEQLLYVSRKLLGQRLFNKLMKMXFYGHFVAGEDQESIQPLLRHYRAFGVSAILDYGVEEDLSPEEAEHKEMESCXSAAERDGSGXNKRDKQYQAHWAFGDRRNGVISARXYFYANEAKCDSHMEXFLRCIEASGRVSDDGFIAIKLXALGRPQFLLQFSEVLAKWRCFFHQMAVEQGQAGLAAMDXKLEVAVLQESVAKLGIASRAEIEDWFXAEXLGVSGXMDLLDWSSLIDSRXKLSKHLVVPNAQXGQLEPLLSRFXEEEELQMXRMLQRMDVLAKKAXEMGVRLMVDAEQXYFQPAISRLXLEMQRKFNVEKPLIFNXYQCYLKDAYDNVXLDVELARREGWCFGAKLVRGAYLAQERARAAEIGYEDPINPXYEAXNAMYHRCLDYVLEELKHNAKAKVMVASHNEDXVRFALRRMEELGLHPADHRVYFGQLLGMCDQISFPLGQAGYPVYKYVPYGPVMEVLPYLSRRALENSSLMKGXHRERQLLWLELLRRLRXGNLFHRPA

SEQ ID NO: 21530 - protein, 135 aa, Homo sapiens
  MOD_RES (5)..(5): Selenocysteine
  MOD_RES (15)..(15): Selenocysteine
  MOD_RES (40)..(40): Selenocysteine
  MOD_RES (55)..(55): Selenocysteine
  MOD_RES (77)..(77): Selenocysteine
  MOD_RES (116)..(116): Selenocysteine
MESCXSAAERDGSGXNKRDKQYQAHWAFGDRRNGVISARXYFYANEAKCDSHMEXFLRCIEASGRVSDDGFIAIKLXALGRPQFLLQFSEVLAKWRCFFHQMAVEQGQAGLAAMDXKLEVAVLQESVAKLGIASR

SEQ ID NO: 21531 - protein, 492 aa, Homo sapiens
  MOD_RES (4)..(4): Selenocysteine
  MOD_RES (56)..(56): Selenocysteine
  MOD_RES (66)..(66): Selenocysteine
  MOD_RES (91)..(91): Selenocysteine
  MOD_RES (106)..(106): Selenocysteine
  MOD_RES (128)..(128): Selenocysteine
  MOD_RES (167)..(167): Selenocysteine
  MOD_RES (194)..(194): Selenocysteine
  MOD_RES (197)..(197): Selenocysteine
  MOD_RES (203)..(203): Selenocysteine
  MOD_RES (217)..(217): Selenocysteine
  MOD_RES (230)..(230): Selenocysteine
  MOD_RES (241)..(241): Selenocysteine
  MOD_RES (249)..(249): Selenocysteine
  MOD_RES (263)..(263): Selenocysteine
  MOD_RES (276)..(276): Selenocysteine
  MOD_RES (286)..(286): Selenocysteine
  MOD_RES (303)..(303): Selenocysteine
  MOD_RES (316)..(316): Selenocysteine
  MOD_RES (358)..(358): Selenocysteine
  MOD_RES (362)..(362): Selenocysteine
  MOD_RES (394)..(394): Selenocysteine
  MOD_RES (467)..(467): Selenocysteine
  MOD_RES (484)..(484): Selenocysteine
MKMXFYGHFVAGEDQESIQPLLRHYRAFGVSAILDYGVEEDLSPEEAEHKEMESCXSAAERDGSGXNKRDKQYQAHWAFGDRRNGVISARXYFYANEAKCDSHMEXFLRCIEASGRVSDDGFIAIKLXALGRPQFLLQFSEVLAKWRCFFHQMAVEQGQAGLAAMDXKLEVAVLQESVAKLGIASRAEIEDWFXAEXLGVSGXMDLLDWSSLIDSRXKLSKHLVVPNAQXGQLEPLLSRFXEEEELQMXRMLQRMDVLAKKAXEMGVRLMVDAEQXYFQPAISRLXLEMQRKFNVEKPLIFNXYQCYLKDAYDNVXLDVELARREGWCFGAKLVRGAYLAQERARAAEIGYEDPINPXYEAXNAMYHRCLDYVLEELKHNAKAKVMVASHNEDXVRFALRRMEELGLHPADHRVYFGQLLGMCDQISFPLGQAGYPVYKYVPYGPVMEVLPYLSRRALENSSLMKGXHRERQLLWLELLRRLRXGNLFHRPA

SEQ ID NO: 21532 - protein, 185 aa, Homo sapiens
  MOD_RES (1)..(1): Any amino acid
  MOD_RES (61)..(61): Selenocysteine
  MOD_RES (64)..(64): Selenocysteine
  MOD_RES (67)..(67): Selenocysteine
  MOD_RES (72)..(72): Selenocysteine
  MOD_RES (83)..(83): Selenocysteine
  MOD_RES (85)..(85): Selenocysteine
  MOD_RES (92)..(92): Selenocysteine
  MOD_RES (94)..(94): Selenocysteine
  MOD_RES (136)..(136): Selenocysteine
  MOD_RES (163)..(163): Selenocysteine
  MOD_RES (166)..(166): Selenocysteine
  MOD_RES (172)..(172): Selenocysteine
XGARRGLRQRAGGVPQPANLGAGAEPAGAALVRLARAAGAPRAGPAPQLRRGMAVARISGXSNXRPXGPSGXAGMVSSVPAPXSXPMRPSAXAXWRHSCAASKPQLQFSEVLAKWRCFFHQMAVEQGQAGLAAMDXKLEVAVLQESVAKLGIASRAEIEDWFXAEXLGVSGXMDLLDWSSLIDSR

SEQ ID NO: 21533 - protein, 164 aa, Homo sapiens
  MOD_RES (1)..(1): Any amino acid
  MOD_RES (102)..(102): Selenocysteine
  MOD_RES (105)..(105): Selenocysteine
  MOD_RES (108)..(108): Selenocysteine
  MOD_RES (113)..(113): Selenocysteine
  MOD_RES (124)..(124): Selenocysteine
  MOD_RES (126)..(126): Selenocysteine
  MOD_RES (133)..(133): Selenocysteine
  MOD_RES (135)..(135): Selenocysteine
XRAAPLHSPLRPAVHGAGLPRAARSGPSGRARRWVGHGSAAAGARRGLRQRAGGVPQPANLGAGAEPAGAALVRLARAAGAPRAGPAPQLRRGMAVARISGXSNXRPXGPSGXAGMVSSVPAPXSXPMRPSAXAXWRHSCAASKPQLQFSEVLAKWRCFFHQMA

SEQ ID NO: 21534 - protein, 129 aa, Homo sapiens
  MOD_RES (21)..(21): Selenocysteine
  MOD_RES (31)..(31): Selenocysteine
  MOD_RES (59)..(59): Selenocysteine
  MOD_RES (72)..(72): Selenocysteine
  MOD_RES (106)..(106): Selenocysteine
  MOD_RES (118)..(118): Selenocysteine
MRSLCCAPLLLLLLLPPLLLXPRAGDAAVIXGACDKDSQCGGGMCCAVSIWVKSIRICXPMGKLGDSCHPLXRKNNFGNGRQERRKRKRSKRKKEVPFFGRRMHHXCPCLPGLACLRXSFNRFICLAQK

SEQ ID NO: 21535 - protein, 108 aa, Homo sapiens
  MOD_RES (21)..(21): Selenocysteine
  MOD_RES (31)..(31): Selenocysteine
  MOD_RES (59)..(59): Selenocysteine
  MOD_RES (72)..(72): Selenocysteine
  MOD_RES (85)..(85): Selenocysteine
  MOD_RES (97)..(97): Selenocysteine
MRSLCCAPLLLLLLLPPLLLXPRAGDAAVIXGACDKDSQCGGGMCCAVSIWVKSIRICXPMGKLGDSCHPLXRKVPFFGRRMHHXCPCLPGLACLRXSFNRFICLAQK

SEQ ID NO: 21536 - protein, 393 aa, Homo sapiens
  MOD_RES (3)..(4): Selenocysteine
  MOD_RES (13)..(13): Selenocysteine
  MOD_RES (15)..(15): Selenocysteine
  MOD_RES (17)..(17): Selenocysteine
  MOD_RES (31)..(31): Selenocysteine
  MOD_RES (53)..(53): Selenocysteine
  MOD_RES (57)..(57): Selenocysteine
  MOD_RES (97)..(97): Selenocysteine
  MOD_RES (138)..(138): Selenocysteine
  MOD_RES (145)..(145): Selenocysteine
  MOD_RES (152)..(152): Selenocysteine
  MOD_RES (178)..(178): Selenocysteine
  MOD_RES (180)..(180): Selenocysteine
  MOD_RES (188)..(188): Selenocysteine
  MOD_RES (201)..(202): Selenocysteine
  MOD_RES (204)..(204): Selenocysteine
  MOD_RES (247)..(247): Selenocysteine
  MOD_RES (249)..(249): Selenocysteine
  MOD_RES (269)..(269): Selenocysteine
  MOD_RES (282)..(282): Selenocysteine
  MOD_RES (291)..(291): Selenocysteine
  MOD_RES (304)..(304): Selenocysteine
  MOD_RES (312)..(312): Selenocysteine
  MOD_RES (322)..(322): Selenocysteine
  MOD_RES (339)..(339): Selenocysteine
  MOD_RES (344)..(344): Selenocysteine
  MOD_RES (349)..(349): Selenocysteine
  MOD_RES (378)..(378): Selenocysteine
  MOD_RES (384)..(384): Selenocysteine
MEXXMGFMDDNAXNXSXSFLSVLNPHGAHAXSFPFNFSYSDYDMPLDEDEDVXNSRXFFAAKIVIGMALVGIMLVCGIGNFIFIAALVRYKKLRNLXNLLIANLAISDFLVAIVCCPFEMDYYVVRQLSWEHGHVLCXSVNYLRXVSLYVSXNALLAIAIDRYLAIVHPLRPRMKCQXAXGLIALVWXVSILIAIPSAYFXXEXVLVIVKSQEKIFCGQIWPVDQQLYYKSYFLFIFGIEFVGPVVXMXLCYARISRELWFKAVPGFQXEQIRKRLRCRRKXVLVLMCILXAYVLCWAPFYGFXIVRDFFPXVFVKEKHYLXAFYIVECIAMSNSMINXLCFVXVKNDXVKYFKKIMLLHWKASYNGGKSSADLDLKXIGMPAXEEVDCIRLK

SEQ ID NO: 21537 - protein, 384 aa, Homo sapiens
  MOD_RES (8)..(8): Selenocysteine
  MOD_RES (11)..(11): Selenocysteine
  MOD_RES (44)..(44): Selenocysteine
  MOD_RES (46)..(46): Selenocysteine
  MOD_RES (48)..(48): Selenocysteine
  MOD_RES (79)..(79): Selenocysteine
  MOD_RES (88)..(88): Selenocysteine
  MOD_RES (136)..(136): Selenocysteine
  MOD_RES (143)..(143): Selenocysteine
  MOD_RES (169)..(169): Selenocysteine
  MOD_RES (193)..(193): Selenocysteine
  MOD_RES (195)..(195): Selenocysteine
  MOD_RES (238)..(238): Selenocysteine
  MOD_RES (240)..(240): Selenocysteine
  MOD_RES (260)..(260): Selenocysteine
  MOD_RES (273)..(273): Selenocysteine
  MOD_RES (282)..(282): Selenocysteine
  MOD_RES (295)..(295): Selenocysteine
  MOD_RES (303)..(303): Selenocysteine
  MOD_RES (313)..(313): Selenocysteine
  MOD_RES (330)..(330): Selenocysteine
  MOD_RES (335)..(335): Selenocysteine
  MOD_RES (340)..(340): Selenocysteine
  MOD_RES (369)..(369): Selenocysteine
  MOD_RES (374)..(375): Selenocysteine
MAAQNGNXSFXPNFNPPQDHASSLSFNFSYGDYDLPMDEDEDMXKXRXFFAAKIVIGIALAGIMLVCGIGNFVFIAALXRYKKLRNLXNLLIANLAISDFLVAIICCPFEMDYYVVRQLSWEHGHVLCASVNYLRXVSLYVSXNALLAIAIDRYLAIVHPLKPRMNYQXASFLIALVWMVSILIAIPSAYFAXEXVLFIVKSQEKIFCGQIWPVDQQLYYKSYFLFIFGVEFVGPVVXMXLCYARISRELWFKAVPGFQXEQIRKRLRCRRKXVLVLMCILXAYVLCWAPFYGFXIVRDFFPXVFVKEKHYLXAFYVVECIAMSNSMINXVCFVXVKNNXMKYFKKMMLLHWRPSQRGSKSSADLDLRXNGVPXXEEVDCIRLK

SEQ ID NO: 21538 - protein, 226 aa, Homo sapiens
  MOD_RES (29)..(29): Selenocysteine
  MOD_RES (31)..(31): Selenocysteine
  MOD_RES (33)..(35): Selenocysteine
  MOD_RES (74)..(75): Selenocysteine
  MOD_RES (106)..(106): Selenocysteine
  MOD_RES (151)..(151): Selenocysteine
  MOD_RES (165)..(165): Selenocysteine
  MOD_RES (181)..(181): Selenocysteine
  MOD_RES (197)..(197): Selenocysteine
MEAERRRQAEKPKKGRVGSNLLPERHPAXGXPXXXVDSSAPPCRRLPGAGGGRSRFSPQGGQRGRPHSRRRHRXXFSPVQLEQLESAFGRNQYPDIWARESLARDXGLSEARIQVWFQNRRAKQRKQERSLLQPLAHLSPAAFSSFLPESXACPYSYAAPPPPVXCFPHPYSHALPSQPSXGGAFALSHQSEDWYPXLHPAPAGHLPCPPPPPMLPLSLEPSKSWN

SEQ ID NO: 21539 - protein, 231 aa, Homo sapiens
  MOD_RES (81)..(81): Selenocysteine
  MOD_RES (110)..(110): Selenocysteine
  MOD_RES (126)..(126): Selenocysteine
  MOD_RES (130)..(130): Selenocysteine
  MOD_RES (136)..(136): Selenocysteine
  MOD_RES (174)..(174): Selenocysteine
  MOD_RES (176)..(176): Selenocysteine
  MOD_RES (210)..(210): Selenocysteine
MRVLGGRCGALLACLLLVLPVSEANFCLYFRNDFIYNRACISVLVGLSGCNFFYSICFLSKQQASQVLVRKRRANSLLEEXKQGNLERECIEELCNKEEAREVFENDPEXDYFYPKYLVCLRSFQXGLFXAARQSXNAYPDLRSCVNAIPDQCSPLPCNEDGYMSCKDGKASFXCXCKPGWQGEKCEFDINECKDPSNINGGCSQICDNXPGSYHCSCKNGFVMLSNKKDC

SEQ ID NO: 21540 - protein, 676 aa, Homo sapiens
  MOD_RES (49)..(49): Selenocysteine
  MOD_RES (78)..(78): Selenocysteine
  MOD_RES (94)..(94): Selenocysteine
  MOD_RES (98)..(98): Selenocysteine
  MOD_RES (104)..(104): Selenocysteine
  MOD_RES (142)..(142): Selenocysteine
  MOD_RES (144)..(144): Selenocysteine
  MOD_RES (178)..(178): Selenocysteine
  MOD_RES (214)..(214): Selenocysteine
  MOD_RES (264)..(264): Selenocysteine
  MOD_RES (295)..(295): Selenocysteine
  MOD_RES (331)..(331): Selenocysteine
  MOD_RES (368)..(368): Selenocysteine
  MOD_RES (372)..(373): Selenocysteine
  MOD_RES (423)..(423): Selenocysteine
  MOD_RES (478)..(478): Selenocysteine
  MOD_RES (511)..(511): Selenocysteine
  MOD_RES (518)..(518): Selenocysteine
  MOD_RES (520)..(520): Selenocysteine
  MOD_RES (532)..(532): Selenocysteine
  MOD_RES (543)..(543): Selenocysteine
  MOD_RES (557)..(557): Selenocysteine
  MOD_RES (588)..(588): Selenocysteine
  MOD_RES (594)..(594): Selenocysteine
  MOD_RES (617)..(617): Selenocysteine
  MOD_RES (630)..(630): Selenocysteine
  MOD_RES (673)..(673): Selenocysteine
MRVLGGRCGALLACLLLVLPVSEANFLSKQQASQVLVRKRRANSLLEEXKQGNLERECIEELCNKEEAREVFENDPEXDYFYPKYLVCLRSFQXGLFXAARQSXNAYPDLRSCVNAIPDQCSPLPCNEDGYMSCKDGKASFXCXCKPGWQGEKCEFDINECKDPSNINGGCSQICDNXPGSYHCSCKNGFVMLSNKKDCKDVDECSLKPSICGXAVCKNIPGDFECECPEGYRYNLKSKSCEDIDECSENMCAQLCVNYPGGYXCYCDGKKGFKLAQDQKSCEVVSVCLPLNLDXKYELLYLAEQFAGVVLYLKFRLPEISRFSAEFDFRXYDSEGVILYAESIDHSAWLLIALRGGKIEVQLKNEHXSKIXXGGDVINNGLWNMVSVEELEHSISIKIAKEAVMDINKPGPLFKPENGLLEXKVYFAGFPRKVESELIKPINPRLDGCIRSWNLMKQGASGIKEIIQEKQNKHCLVXVEKGSYYPGSGIAQFHIDYNNVSSAEGWHVNVXLNIRPSXGXGVMLALVSGNNXVPFAVSLVDSXSEKSQDILLSVENXVIYRIQALSLCSDQQSHLEFRVNRNNLELSXPLKIEXISHEDLQRQLAVLDKAMKAKVAXYLGGLPDVPFSAXPVNAFYNGCMEVNINGVQLDLDEAISKHNDIRAHSCPSVWKKXKNS

SEQ ID NO: 21541 - protein, 56 aa, Homo sapiens
  MOD_RES (11)..(11): Selenocysteine
  MOD_RES (13)..(13): Selenocysteine
  MOD_RES (47)..(47): Selenocysteine
MSCKDGKASFXCXCKPGWQGEKCEFDINECKDPSNINGGCSQICDNXPGSYHCSCK

SEQ ID NO: 21542 - protein, 545 aa, Homo sapiens
  MOD_RES (11)..(11): Selenocysteine
  MOD_RES (13)..(13): Selenocysteine
  MOD_RES (47)..(47): Selenocysteine
  MOD_RES (83)..(83): Selenocysteine
  MOD_RES (133)..(133): Selenocysteine
  MOD_RES (164)..(164): Selenocysteine
  MOD_RES (200)..(200): Selenocysteine
  MOD_RES (237)..(237): Selenocysteine
  MOD_RES (241)..(242): Selenocysteine
  MOD_RES (292)..(292): Selenocysteine
  MOD_RES (347)..(347): Selenocysteine
  MOD_RES (380)..(380): Selenocysteine
  MOD_RES (387)..(387): Selenocysteine
  MOD_RES (389)..(389): Selenocysteine
  MOD_RES (401)..(401): Selenocysteine
  MOD_RES (412)..(412): Selenocysteine
  MOD_RES (426)..(426): Selenocysteine
  MOD_RES (457)..(457): Selenocysteine
  MOD_RES (463)..(463): Selenocysteine
  MOD_RES (486)..(486): Selenocysteine
  MOD_RES (499)..(499): Selenocysteine
  MOD_RES (542)..(542): Selenocysteine
MSCKDGKASFXCXCKPGWQGEKCEFDINECKDPSNINGGCSQICDNXPGSYHCSCKNGFVMLSNKKDCKDVDECSLKPSICGXAVCKNIPGDFECECPEGYRYNLKSKSCEDIDECSENMCAQLCVNYPGGYXCYCDGKKGFKLAQDQKSCEVVSVCLPLNLDXKYELLYLAEQFAGVVLYLKFRLPEISRFSAEFDFRXYDSEGVILYAESIDHSAWLLIALRGGKIEVQLKNEHXSKIXXGGDVINNGLWNMVSVEELEHSISIKIAKEAVMDINKPGPLFKPENGLLEXKVYFAGFPRKVESELIKPINPRLDGCIRSWNLMKQGASGIKEIIQEKQNKHCLVXVEKGSYYPGSGIAQFHIDYNNVSSAEGWHVNVXLNIRPSXGXGVMLALVSGNNXVPFAVSLVDSXSEKSQDILLSVENXVIYRIQALSLCSDQQSHLEFRVNRNNLELSXPLKIEXISHEDLQRQLAVLDKAMKAKVAXYLGGLPDVPFSAXPVNAFYNGCMEVNINGVQLDLDEAISKHNDIRAHSCPSVWKKXKNS

SEQ ID NO: 21543 - protein, 143 aa, Homo sapiens
  MOD_RES (7)..(7): Selenocysteine
  MOD_RES (14)..(14): Selenocysteine
  MOD_RES (26)..(26): Selenocysteine
  MOD_RES (29)..(29): Selenocysteine
  MOD_RES (40)..(40): Selenocysteine
  MOD_RES (91)..(91): Selenocysteine
  MOD_RES (107)..(107): Selenocysteine
  MOD_RES (119)..(119): Selenocysteine
MPDHDSXALLSRQXKRRRVDIGVKRXVGXASAFFAKARAXFFSAMNPQGSEQDVEYSVVQHADGEKSNVLRKLLKRANSYEDAMMPFPGAXIISQLLKNNMNKNGGXEPSFQASGLSSXGSEVHQEDICSNSSRDSPPECLSP

SEQ ID NO: 21544 - protein, 230 aa, Homo sapiens
  MOD_RES (7)..(7): Selenocysteine
  MOD_RES (14)..(14): Selenocysteine
  MOD_RES (26)..(26): Selenocysteine
  MOD_RES (29)..(29): Selenocysteine
  MOD_RES (40)..(40): Selenocysteine
  MOD_RES (91)..(91): Selenocysteine
  MOD_RES (107)..(107): Selenocysteine
  MOD_RES (119)..(119): Selenocysteine
  MOD_RES (148)..(148): Selenocysteine
MPDHDSXALLSRQXKRRRVDIGVKRXVGXASAFFAKARAXFFSAMNPQGSEQDVEYSVVQHADGEKSNVLRKLLKRANSYEDAMMPFPGAXIISQLLKNNMNKNGGXEPSFQASGLSSXGSEVHQEDICSNSSRDSPPECLSPFGRPXMSQFDMDRLCDEHLRAKRARVENIIRGMSHSPSVALRGNENEREMAPQSVSPRESYRENKRKQKLPQQQQQSFQQLVSARKE

SEQ ID NO: 21545 - protein, 737 aa, Homo sapiens
  MOD_RES (7)..(7): Selenocysteine
  MOD_RES (14)..(14): Selenocysteine
  MOD_RES (26)..(26): Selenocysteine
  MOD_RES (29)..(29): Selenocysteine
  MOD_RES (40)..(40): Selenocysteine
  MOD_RES (91)..(91): Selenocysteine
  MOD_RES (107)..(107): Selenocysteine
  MOD_RES (119)..(119): Selenocysteine
  MOD_RES (148)..(148): Selenocysteine
  MOD_RES (264)..(264): Selenocysteine
  MOD_RES (351)..(351): Selenocysteine
  MOD_RES (358)..(358): Selenocysteine
  MOD_RES (366)..(366): Selenocysteine
  MOD_RES (404)..(404): Selenocysteine
  MOD_RES (423)..(423): Selenocysteine
  MOD_RES (433)..(433): Selenocysteine
  MOD_RES (436)..(436): Selenocysteine
  MOD_RES (472)..(473): Selenocysteine
  MOD_RES (476)..(477): Selenocysteine
  MOD_RES (479)..(479): Selenocysteine
  MOD_RES (518)..(518): Selenocysteine
  MOD_RES (521)..(522): Selenocysteine
  MOD_RES (526)..(526): Selenocysteine
  MOD_RES (546)..(546): Selenocysteine
  MOD_RES (595)..(595): Selenocysteine
  MOD_RES (605)..(605): Selenocysteine
  MOD_RES (617)..(617): Selenocysteine
  MOD_RES (648)..(648): Selenocysteine
  MOD_RES (650)..(650): Selenocysteine
  MOD_RES (656)..(656): Selenocysteine
  MOD_RES (688)..(688): Selenocysteine
MPDHDSXALLSRQXKRRRVDIGVKRXVGXASAFFAKARAXFFSAMNPQGSEQDVEYSVVQHADGEKSNVLRKLLKRANSYEDAMMPFPGAXIISQLLKNNMNKNGGXEPSFQASGLSSXGSEVHQEDICSNSSRDSPPECLSPFGRPXMSQFDMDRLCDEHLRAKRARVENIIRGMSHSPSVALRGNENEREMAPQSVSPRESYRENKRKQKLPQQQQQSFQQLVSARKEQKREERRQLKQQLEDMQKQLRQLQEKFYQIYDSXDSENDEDGNLSEDSMRSEILDARAQDSVGRSDNEMCELDPGQFIDRARALIREQEMAENKPKREGNNKERDHGPNSLQPEGKHLAEXLKQELNXAMSQVVDXVVKVFSAKPSRQVPQVFPPLQIPQARFAVNGENHNFHXANQRLQCFGDVIIPNPLDXFGNVQMASSXDQXEALPLVVRKNSSDQSASGPAAGGHHQPLHQSPLSAXXGFXXSXFRHPFPLPLMAYPFQSPLGAPSGSFSGKDRASPESLDLXRDXXSLRXKMSSHHLSHHPCSPAHPPSXAEGLSLSLIKSECGDLQDMSEISPYSGSAMQEGLSPNHLKKAKLMFFYXRYPSSNMLKXYFSDVKFNRCIXSQLIKWFSNFREFYYIQMEKYARQAINDGVXSXEELSIXRDCELYRALNMHYNKANDFEVPERFLEVAQIXLREFFNAIIAGKDVDPSWKKAIYKVICKLDSEVPEIFKSPNCLQELLHE

SEQ ID NO: 21546 - protein, 8 aa, Homo sapiens
MDPNSILL

SEQ ID NO: 21547 - protein, 365 aa, Homo sapiens
  MOD_RES (23)..(23): Selenocysteine
  MOD_RES (51)..(51): Selenocysteine
  MOD_RES (70)..(70): Selenocysteine
  MOD_RES (110)..(110): Selenocysteine
  MOD_RES (159)..(159): Selenocysteine
  MOD_RES (168)..(168): Selenocysteine
  MOD_RES (196)..(196): Selenocysteine
  MOD_RES (231)..(231): Selenocysteine
  MOD_RES (250)..(250): Selenocysteine
  MOD_RES (281)..(281): Selenocysteine
  MOD_RES (321)..(321): Selenocysteine
MDPNSILLSPQPQICSHLAEACXEGERSSSPPELDRDSPFPWSQVPSSSPXDPEWFGDEHIQAKRARVEXIVRGMCLSPNPLVPGNAQAGVSPRCPKKARERKRKQNLPXPQGLLMPAPAWDQGNRKGGPRVREQLHLLKQQLRHLQEHILQAAKPRDXAQGPGGCGXGKGPLSAKQGNGCGPRPWVVDGDHQQGXSKDLSGAEKHQESEKPSFLPSGAPASLEILRKELXRAVSQAVDSVLQKFNRCIXSQMIKWFSNFREFYYIQMEKSARQAISDGVXNPKMLVVLRNSELFQALNMHYNKGNDFEVPDCFLEIASLXLQEFFRAVSAGRDSDPSWKKPIYKIISKLDSDIPEIFKSSSYPQ

SEQ ID NO: 21548 - protein, 592 aa, Homo sapiens
  MOD_RES (23)..(23): Selenocysteine
  MOD_RES (51)..(51): Selenocysteine
  MOD_RES (70)..(70): Selenocysteine
  MOD_RES (110)..(110): Selenocysteine
  MOD_RES (159)..(159): Selenocysteine
  MOD_RES (168)..(168): Selenocysteine
  MOD_RES (196)..(196): Selenocysteine
  MOD_RES (231)..(231): Selenocysteine
  MOD_RES (254)..(254): Selenocysteine
  MOD_RES (321)..(321): Selenocysteine
  MOD_RES (335)..(335): Selenocysteine
  MOD_RES (384)..(385): Selenocysteine
  MOD_RES (402)..(402): Selenocysteine
  MOD_RES (455)..(455): Selenocysteine
  MOD_RES (477)..(477): Selenocysteine
  MOD_RES (508)..(508): Selenocysteine
  MOD_RES (548)..(548): Selenocysteine
MDPNSILLSPQPQICSHLAEACXEGERSSSPPELDRDSPFPWSQVPSSSPXDPEWFGDEHIQAKRARVEXIVRGMCLSPNPLVPGNAQAGVSPRCPKKARERKRKQNLPXPQGLLMPAPAWDQGNRKGGPRVREQLHLLKQQLRHLQEHILQAAKPRDXAQGPGGCGXGKGPLSAKQGNGCGPRPWVVDGDHQQGXSKDLSGAEKHQESEKPSFLPSGAPASLEILRKELXRAVSQAVDSVLQKVLLDPPGHLXQLGRSFQGQVAEGRSEPSPPVGGACKDPLALAALPRRVQLQAGVPVGNLSLAKRLDSPRYPIPPRMXPKPCQDPPANFPLXAPSHIQENQILSQLLGHRYNNGHWSSSPPQDSSSQRHPSSEPALRPWRXXKPQPLVLSQQQCPLPFXSAHLESLPLLPSVKMEQRGLHAVMEALPFSLVHIQEGLNPGHLKKAKLMFFFXRYPSSNLLKVYFPDVQFNRCIXSQMIKWFSNFREFYYIQMEKSARQAISDGVXNPKMLVVLRNSELFQALNMHYNKGNDFEVPDCFLEIASLXLQEFFRAVSAGRDSDPSWKKPIYKIISKLDSDIPEIFKSSSYPQ

SEQ ID NO: 21549 - protein, 422 aa, Homo sapiens
  MOD_RES (25)..(25): Selenocysteine
  MOD_RES (40)..(40): Selenocysteine
  MOD_RES (100)..(100): Selenocysteine
  MOD_RES (132)..(132): Selenocysteine
  MOD_RES (134)..(134): Selenocysteine
  MOD_RES (156)..(156): Selenocysteine
  MOD_RES (171)..(171): Selenocysteine
  MOD_RES (199)..(199): Selenocysteine
  MOD_RES (217)..(217): Selenocysteine
  MOD_RES (237)..(238): Selenocysteine
  MOD_RES (249)..(249): Selenocysteine
  MOD_RES (252)..(252): Selenocysteine
  MOD_RES (257)..(257): Selenocysteine
  MOD_RES (267)..(267): Selenocysteine
  MOD_RES (304)..(304): Selenocysteine
  MOD_RES (318)..(318): Selenocysteine
  MOD_RES (330)..(330): Selenocysteine
  MOD_RES (337)..(338): Selenocysteine
  MOD_RES (342)..(342): Selenocysteine
  MOD_RES (356)..(356): Selenocysteine
  MOD_RES (358)..(359): Selenocysteine
  MOD_RES (361)..(361): Selenocysteine
  MOD_RES (380)..(380): Selenocysteine
  MOD_RES (390)..(390): Selenocysteine
  MOD_RES (408)..(408): Selenocysteine
MAGCVPLLQGLVLVLALHRVEPSAXSLKERHGLHSDSACXGVQESLFLPASKANDVLVRWKRAGSYLLEELFEGNLEKECYEEICVYEEAREVFENEVVXDEFWRRYKGGSPCISQPCLHNGSCQDSIWGYXCXCSPGYEGSNCELAKNECHPERXDGCQHFCLPGQESYXCSCAQGYRLGEDHKQCVPHDQCACGVLXSEKRAPDLQDLPWQVKLXNSEGKDFCGGVIIRENFVLXXAKCSLLHRNIXVKXYFNRXSQDPLMIKIXHVHVHMRYDADAGENDLSLLELEWPIQCPGAGLPVCXPEKDFAEHLLIPRXRGLLSGWARNGXDLGNSLXXRPVXLVEGEECGQVLNVXVXXRXYCERSSVAAMHWMDGSVVXREHRGSWFLXGVLGSQPVGGQAHMVLVXKVSRYSLWFKQIMN

SEQ ID NO: 21550 - protein, 400 aa, Homo sapiens
  MOD_RES (78)..(78): Selenocysteine
  MOD_RES (110)..(110): Selenocysteine
  MOD_RES (112)..(112): Selenocysteine
  MOD_RES (134)..(134): Selenocysteine
  MOD_RES (149)..(149): Selenocysteine
  MOD_RES (177)..(177): Selenocysteine
  MOD_RES (195)..(195): Selenocysteine
  MOD_RES (215)..(216): Selenocysteine
  MOD_RES (227)..(227): Selenocysteine
  MOD_RES (230)..(230): Selenocysteine
  MOD_RES (235)..(235): Selenocysteine
  MOD_RES (245)..(245): Selenocysteine
  MOD_RES (282)..(282): Selenocysteine
  MOD_RES (296)..(296): Selenocysteine
  MOD_RES (308)..(308): Selenocysteine
  MOD_RES (315)..(316): Selenocysteine
  MOD_RES (320)..(320): Selenocysteine
  MOD_RES (334)..(334): Selenocysteine
  MOD_RES (336)..(337): Selenocysteine
  MOD_RES (339)..(339): Selenocysteine
  MOD_RES (358)..(358): Selenocysteine
  MOD_RES (368)..(368): Selenocysteine
  MOD_RES (386)..(386): Selenocysteine
MAGCVPLLQGLVLVLALHRVEPSVFLPASKANDVLVRWKRAGSYLLEELFEGNLEKECYEEICVYEEAREVFENEVVXDEFWRRYKGGSPCISQPCLHNGSCQDSIWGYXCXCSPGYEGSNCELAKNECHPERXDGCQHFCLPGQESYXCSCAQGYRLGEDHKQCVPHDQCACGVLXSEKRAPDLQDLPWQVKLXNSEGKDFCGGVIIRENFVLXXAKCSLLHRNIXVKXYFNRXSQDPLMIKIXHVHVHMRYDADAGENDLSLLELEWPIQCPGAGLPVCXPEKDFAEHLLIPRXRGLLSGWARNGXDLGNSLXXRPVXLVEGEECGQVLNVXVXXRXYCERSSVAAMHWMDGSVVXREHRGSWFLXGVLGSQPVGGQAHMVLVXKVSRYSLWFKQIMN

SEQ ID NO: 21551 - protein, 45 aa, Homo sapiens
  MOD_RES (10)..(10): Selenocysteine
  MOD_RES (13)..(14): Selenocysteine
  MOD_RES (22)..(22): Selenocysteine
IIQKLQDKAXVLXXERKKRGKXVPEELVKPEELSKYRQEGLCRVL

SEQ ID NO: 21552 - protein, 104 aa, Homo sapiens
  MOD_RES (6)..(6): Selenocysteine
  MOD_RES (13)..(14): Selenocysteine
  MOD_RES (36)..(36): Selenocysteine
  MOD_RES (40)..(40): Selenocysteine
  MOD_RES (48)..(48): Selenocysteine
  MOD_RES (84)..(84): Selenocysteine
  MOD_RES (96)..(96): Selenocysteine
  MOD_RES (99)..(100): Selenocysteine
MLHSFXLRQQLQXXRQELSHALYQHDAACRVIARLXKEVXAAREALAXLKPQAGLIVPQAVPSSQPSVVGAGEPMDLGELVGMXPEIIQKLQDKAXVLXXERKK

SEQ ID NO: 21553 - protein, 504 aa, Homo sapiens
  MOD_RES (39)..(39): Selenocysteine
  MOD_RES (69)..(69): Selenocysteine
  MOD_RES (91)..(91): Selenocysteine
  MOD_RES (98)..(99): Selenocysteine
  MOD_RES (121)..(121): Selenocysteine
  MOD_RES (125)..(125): Selenocysteine
  MOD_RES (133)..(133): Selenocysteine
  MOD_RES (169)..(169): Selenocysteine
  MOD_RES (181)..(181): Selenocysteine
  MOD_RES (184)..(185): Selenocysteine
  MOD_RES (193)..(193): Selenocysteine
  MOD_RES (234)..(234): Selenocysteine
  MOD_RES (239)..(239): Selenocysteine
  MOD_RES (259)..(259): Selenocysteine
  MOD_RES (264)..(264): Selenocysteine
  MOD_RES (268)..(268): Selenocysteine
  MOD_RES (287)..(287): Selenocysteine
  MOD_RES (310)..(310): Selenocysteine
  MOD_RES (317)..(317): Selenocysteine
  MOD_RES (337)..(337): Selenocysteine
  MOD_RES (342)..(342): Selenocysteine
  MOD_RES (345)..(345): Selenocysteine
  MOD_RES (348)..(348): Selenocysteine
  MOD_RES (354)..(354): Selenocysteine
  MOD_RES (367)..(367): Selenocysteine
  MOD_RES (369)..(369): Selenocysteine
  MOD_RES (383)..(383): Selenocysteine
  MOD_RES (396)..(396): Selenocysteine
  MOD_RES (409)..(409): Selenocysteine
  MOD_RES (429)..(429): Selenocysteine
  MOD_RES (448)..(448): Selenocysteine
  MOD_RES (455)..(455): Selenocysteine
  MOD_RES (466)..(466): Selenocysteine
  MOD_RES (472)..(472): Selenocysteine
  MOD_RES (478)..(479): Selenocysteine
  MOD_RES (493)..(493): Selenocysteine
MSLICSISNEVPEHPCVSPVSNHVYERRLIEKYIAENGXDPINNQPLSEEQLIDIKVAHPIRPKPPSAXSIPAILKALQDEWDAVMLHSFXLRQQLQXXRQELSHALYQHDAACRVIARLXKEVXAAREALAXLKPQAGLIVPQAVPSSQPSVVGAGEPMDLGELVGMXPEIIQKLQDKAXVLXXERKKRGKXVPEELVKPEELSKYRQVASHVGLHSASIPGILALDLCPSDXNKILXGGADKNVVVFDKSSEQILAXLKGHXKKVXSVVFHPSQDLVFSASPDAXIRIWSVPNASCVQVVRAHESAVXGLSLHAXGDYLLSSSDDQYWAFSDIQXGRVLXKVXDEXSGCSLXCAQFHPDGLIFGXGXMDSQIKIWDLKERXNVANFPGHSGPIXSIAFSENGYYLAXAADDSSVKLWDLRKLKNFKXLQLDNNFEVKSLIFDQSGXYLALGGXDVQIYICKQWXEILHFXEHSGLXXGVAFGHHAKFIASXGMDRSLKFYSL

SEQ ID NO: 21554 - protein, 252 aa, Homo sapiens
  MOD_RES (39)..(39): Selenocysteine
  MOD_RES (69)..(69): Selenocysteine
  MOD_RES (91)..(91): Selenocysteine
  MOD_RES (98)..(99): Selenocysteine
  MOD_RES (121)..(121): Selenocysteine
  MOD_RES (125)..(125): Selenocysteine
  MOD_RES (133)..(133): Selenocysteine
  MOD_RES (169)..(169): Selenocysteine
  MOD_RES (181)..(181): Selenocysteine
  MOD_RES (184)..(185): Selenocysteine
  MOD_RES (193)..(193): Selenocysteine
  MOD_RES (234)..(234): Selenocysteine
  MOD_RES (239)..(239): Selenocysteine
  MOD_RES (241)..(241): Selenocysteine
MSLICSISNEVPEHPCVSPVSNHVYERRLIEKYIAENGXDPINNQPLSEEQLIDIKVAHPIRPKPPSAXSIPAILKALQDEWDAVMLHSFXLRQQLQXXRQELSHALYQHDAACRVIARLXKEVXAAREALAXLKPQAGLIVPQAVPSSQPSVVGAGEPMDLGELVGMXPEIIQKLQDKAXVLXXERKKRGKXVPEELVKPEELSKYRQVASHVGLHSASIPGILALDLCPSDXNKILXGXMDSQIKIWDLK

SEQ ID NO: 21555 - protein, 119 aa, Homo sapiens
  MOD_RES (9)..(9): Selenocysteine
  MOD_RES (14)..(14): Selenocysteine
  MOD_RES (17)..(17): Selenocysteine
  MOD_RES (20)..(20): Selenocysteine
  MOD_RES (26)..(26): Selenocysteine
  MOD_RES (39)..(39): Selenocysteine
  MOD_RES (41)..(41): Selenocysteine
  MOD_RES (63)..(63): Selenocysteine
  MOD_RES (70)..(70): Selenocysteine
  MOD_RES (81)..(81): Selenocysteine
  MOD_RES (87)..(87): Selenocysteine
  MOD_RES (93)..(94): Selenocysteine
  MOD_RES (108)..(108): Selenocysteine
YWAFSDIQXGRVLXKVXDEXSGCSLXCAQFHPDGLIFGXGXMDSQIKIWDLKVKSLIFDQSGXYLALGGXDVQIYICKQWXEILHFXEHSGLXXGVAFGHHAKFIASXGMDRSLKFYSL

SEQ ID NO: 21556 - protein, 346 aa, Homo sapiens
  MOD_RES (129)..(129): Selenocysteine
  MOD_RES (144)..(144): Selenocysteine
  MOD_RES (146)..(146): Selenocysteine
  MOD_RES (155)..(155): Selenocysteine
  MOD_RES (228)..(228): Selenocysteine
  MOD_RES (240)..(240): Selenocysteine
  MOD_RES (269)..(269): Selenocysteine
  MOD_RES (278)..(278): Selenocysteine
  MOD_RES (280)..(280): Selenocysteine
  MOD_RES (288)..(288): Selenocysteine
  MOD_RES (315)..(315): Selenocysteine
MALLKVKFDQKKRVKLAQGLWLMNWFSVLAGIIIFSLGLFLKIELRKRSDVMNNSESHFVPNSLIGMGVLSCVFNSLAGKICYDALDPAKYARWKPWLKPYLAICVLFNIILFLVALCCFLLRGSLENXLGQGLKNGMKYYRDXDXPGRCFMKKXIDMLQIEFKCCGNNGFRDWFEIQWISNRYLDFSSKEVKDRIKSNVDGRYLVDGVPFSCCNPSSPRPCIQYQIXNNSAHYSYDHQXEELNLWVRGCRAALLSYYSSLMNSMGVVXLLIWLFEVXIXIGLRYLQXSLDGVSNPEESESESQGWLLERSVPEXWKAFLESVKKLGKGNQVEAEGADAGQAPEAG

SEQ ID NO: 21557 - protein, 122 aa, Homo sapiens
  MOD_RES (3)..(3): Selenocysteine
  MOD_RES (32)..(32): Selenocysteine
  MOD_RES (42)..(42): Selenocysteine
  MOD_RES (77)..(77): Selenocysteine
  MOD_RES (84)..(84): Selenocysteine
  MOD_RES (93)..(93): Selenocysteine
  MOD_RES (113)..(113): Selenocysteine
MRXLRRLKFMSSPSLSDLGKREPAAAADERGXQQRRACANAXWNSIHNGVIAVFQRKGLPDQELFSLNEGVRQLLKXELGSFFXEYLQNQLLXKGMVILRDKIRFYEEAAGLXGRDLGLLLQ

SEQ ID NO: 21558 - protein, 177 aa, Homo sapiens
  MOD_RES (3)..(3): Selenocysteine
  MOD_RES (32)..(32): Selenocysteine
  MOD_RES (42)..(42): Selenocysteine
  MOD_RES (77)..(77): Selenocysteine
  MOD_RES (84)..(84): Selenocysteine
  MOD_RES (93)..(93): Selenocysteine
  MOD_RES (124)..(124): Selenocysteine
  MOD_RES (135)..(135): Selenocysteine
  MOD_RES (174)..(174): Selenocysteine
MRXLRRLKFMSSPSLSDLGKREPAAAADERGXQQRRACANAXWNSIHNGVIAVFQRKGLPDQELFSLNEGVRQLLKXELGSFFXEYLQNQLLXKGMVILRDKIRFYEGICPRQSGPVVMAPMPXGQKLLDSLAEXWDFFFSDVLPMLQAIFYPVQGKEPSVRQLALLHFRNAIXLSV

SEQ ID NO: 21559 - protein, 388 aa, Homo sapiens
  MOD_RES (3)..(3): Selenocysteine
  MOD_RES (32)..(32): Selenocysteine
  MOD_RES (42)..(42): Selenocysteine
  MOD_RES (77)..(77): Selenocysteine
  MOD_RES (84)..(84): Selenocysteine
  MOD_RES (93)..(93): Selenocysteine
  MOD_RES (118)..(118): Selenocysteine
  MOD_RES (157)..(157): Selenocysteine
  MOD_RES (194)..(194): Selenocysteine
  MOD_RES (202)..(202): Selenocysteine
  MOD_RES (214)..(214): Selenocysteine
  MOD_RES (225)..(225): Selenocysteine
  MOD_RES (257)..(257): Selenocysteine
  MOD_RES (276)..(276): Selenocysteine
  MOD_RES (287)..(287): Selenocysteine
  MOD_RES (304)..(304): Selenocysteine
  MOD_RES (306)..(306): Selenocysteine
  MOD_RES (325)..(326): Selenocysteine
  MOD_RES (336)..(336): Selenocysteine
MRXLRRLKFMSSPSLSDLGKREPAAAADERGXQQRRACANAXWNSIHNGVIAVFQRKGLPDQELFSLNEGVRQLLKXELGSFFXEYLQNQLLXKGMVILRDKIRFYEGQKLLDSLAEXWDFFFSDVLPMLQAIFYPVQGKEPSVRQLALLHFRNAIXLSVKLEDALARAHARVPPAIVQMLLVLQGVHESRGVXEDYLRLEXLVQKVVSPYLGXYGLHSSEGPFXHSCILEKRLLRRSRSGDVLAKNPVVRSKSYNXPLLNPVQEHEAEGAAAGGXSIRRHSVSEMXSCPEPQGFSDPPGQGPXGXFRSSPAPHSGPCPSRLYPXXQPPEQGLDPXRSSLPRSSPENLVDQILESVDSDSEGIFIDFGRGRGSGMSDLEGSGGRQSVV

SEQ ID NO: 21560 - protein, 113 aa, Homo sapiens
  MOD_RES (23)..(23): Selenocysteine
  MOD_RES (33)..(33): Selenocysteine
  MOD_RES (68)..(68): Selenocysteine
  MOD_RES (75)..(75): Selenocysteine
  MOD_RES (84)..(84): Selenocysteine
  MOD_RES (104)..(104): Selenocysteine
MSSPSLSDLGKREPAAAADERGXQQRRACANAXWNSIHNGVIAVFQRKGLPDQELFSLNEGVRQLLKXELGSFFXEYLQNQLLXKGMVILRDKIRFYEEAAGLXGRDLGLLLQ

SEQ ID NO: 21561 - protein, 226 aa, Homo sapiens
  MOD_RES (23)..(23): Selenocysteine
  MOD_RES (33)..(33): Selenocysteine
  MOD_RES (68)..(68): Selenocysteine
  MOD_RES (75)..(75): Selenocysteine
  MOD_RES (84)..(84): Selenocysteine
  MOD_RES (109)..(109): Selenocysteine
  MOD_RES (148)..(148): Selenocysteine
  MOD_RES (185)..(185): Selenocysteine
  MOD_RES (193)..(193): Selenocysteine
  MOD_RES (205)..(205): Selenocysteine
  MOD_RES (216)..(216): Selenocysteine
MSSPSLSDLGKREPAAAADERGXQQRRACANAXWNSIHNGVIAVFQRKGLPDQELFSLNEGVRQLLKXELGSFFXEYLQNQLLXKGMVILRDKIRFYEGQKLLDSLAEXWDFFFSDVLPMLQAIFYPVQGKEPSVRQLALLHFRNAIXLSVKLEDALARAHARVPPAIVQMLLVLQGVHESRGVXEDYLRLEXLVQKVVSPYLGXYGLHSSEGPFXHSCILEKRLL

SEQ ID NO: 21562 - protein, 267 aa, Homo sapiens
  MOD_RES (23)..(23): Selenocysteine
  MOD_RES (33)..(33): Selenocysteine
  MOD_RES (68)..(68): Selenocysteine
  MOD_RES (75)..(75): Selenocysteine
  MOD_RES (84)..(84): Selenocysteine
  MOD_RES (109)..(109): Selenocysteine
  MOD_RES (148)..(148): Selenocysteine
  MOD_RES (185)..(185): Selenocysteine
  MOD_RES (193)..(193): Selenocysteine
  MOD_RES (205)..(205): Selenocysteine
  MOD_RES (216)..(216): Selenocysteine
  MOD_RES (248)..(248): Selenocysteine
  MOD_RES (267)..(267): Selenocysteine
MSSPSLSDLGKREPAAAADERGXQQRRACANAXWNSIHNGVIAVFQRKGLPDQELFSLNEGVRQLLKXELGSFFXEYLQNQLLXKGMVILRDKIRFYEGQKLLDSLAEXWDFFFSDVLPMLQAIFYPVQGKEPSVRQLALLHFRNAIXLSVKLEDALARAHARVPPAIVQMLLVLQGVHESRGVXEDYLRLEXLVQKVVSPYLGXYGLHSSEGPFXHSCILEKRLLRRSRSGDVLAKNPVVRSKSYNXPLLNPVQEHEAEGAAAGGX

SEQ ID NO: 21563 - protein, 379 aa, Homo sapiens
  MOD_RES (23)..(23): Selenocysteine
  MOD_RES (33)..(33): Selenocysteine
  MOD_RES (68)..(68): Selenocysteine
  MOD_RES (75)..(75): Selenocysteine
  MOD_RES (84)..(84): Selenocysteine
  MOD_RES (109)..(109): Selenocysteine
  MOD_RES (148)..(148): Selenocysteine
  MOD_RES (185)..(185): Selenocysteine
  MOD_RES (193)..(193): Selenocysteine
  MOD_RES (205)..(205): Selenocysteine
  MOD_RES (216)..(216): Selenocysteine
  MOD_RES (248)..(248): Selenocysteine
  MOD_RES (267)..(267): Selenocysteine
  MOD_RES (278)..(278): Selenocysteine
  MOD_RES (295)..(295): Selenocysteine
  MOD_RES (297)..(297): Selenocysteine
  MOD_RES (316)..(317): Selenocysteine
  MOD_RES (327)..(327): Selenocysteine
MSSPSLSDLGKREPAAAADERGXQQRRACANAXWNSIHNGVIAVFQRKGLPDQELFSLNEGVRQLLKXELGSFFXEYLQNQLLXKGMVILRDKIRFYEGQKLLDSLAEXWDFFFSDVLPMLQAIFYPVQGKEPSVRQLALLHFRNAIXLSVKLEDALARAHARVPPAIVQMLLVLQGVHESRGVXEDYLRLEXLVQKVVSPYLGXYGLHSSEGPFXHSCILEKRLLRRSRSGDVLAKNPVVRSKSYNXPLLNPVQEHEAEGAAAGGXSIRRHSVSEMXSCPEPQGFSDPPGQGPXGXFRSSPAPHSGPCPSRLYPXXQPPEQGLDPXRSSLPRSSPENLVDQILESVDSDSEGIFIDFGRGRGSGMSDLEGSGGRQSVV

SEQ ID NO: 21564 - protein, 411 aa, Homo sapiens
  MOD_RES (55)..(55): Selenocysteine
  MOD_RES (65)..(65): Selenocysteine
  MOD_RES (100)..(100): Selenocysteine
  MOD_RES (107)..(107): Selenocysteine
  MOD_RES (116)..(116): Selenocysteine
  MOD_RES (141)..(141): Selenocysteine
  MOD_RES (180)..(180): Selenocysteine
  MOD_RES (217)..(217): Selenocysteine
  MOD_RES (225)..(225): Selenocysteine
  MOD_RES (237)..(237): Selenocysteine
  MOD_RES (248)..(248): Selenocysteine
  MOD_RES (280)..(280): Selenocysteine
  MOD_RES (299)..(299): Selenocysteine
  MOD_RES (310)..(310): Selenocysteine
  MOD_RES (327)..(327): Selenocysteine
  MOD_RES (329)..(329): Selenocysteine
  MOD_RES (348)..(349): Selenocysteine
  MOD_RES (359)..(359): Selenocysteine
MVCLELSQREAWGSGSPEKMPAQPEGLYRLKFMSSPSLSDLGKREPAAAADERGXQQRRACANAXWNSIHNGVIAVFQRKGLPDQELFSLNEGVRQLLKXELGSFFXEYLQNQLLXKGMVILRDKIRFYEGQKLLDSLAEXWDFFFSDVLPMLQAIFYPVQGKEPSVRQLALLHFRNAIXLSVKLEDALARAHARVPPAIVQMLLVLQGVHESRGVXEDYLRLEXLVQKVVSPYLGXYGLHSSEGPFXHSCILEKRLLRRSRSGDVLAKNPVVRSKSYNXPLLNPVQEHEAEGAAAGGXSIRRHSVSEMXSCPEPQGFSDPPGQGPXGXFRSSPAPHSGPCPSRLYPXXQPPEQGLDPXRSSLPRSSPENLVDQILESVDSDSEGIFIDFGRGRGSGMSDLEGSGGRQSVV

SEQ ID NO: 21565 - protein, 293 aa, Homo sapiens
  MOD_RES (23)..(23): Selenocysteine
  MOD_RES (62)..(62): Selenocysteine
  MOD_RES (99)..(99): Selenocysteine
  MOD_RES (107)..(107): Selenocysteine
  MOD_RES (119)..(119): Selenocysteine
  MOD_RES (130)..(130): Selenocysteine
  MOD_RES (162)..(162): Selenocysteine
  MOD_RES (181)..(181): Selenocysteine
  MOD_RES (192)..(192): Selenocysteine
  MOD_RES (209)..(209): Selenocysteine
  MOD_RES (211)..(211): Selenocysteine
  MOD_RES (230)..(231): Selenocysteine
  MOD_RES (241)..(241): Selenocysteine
MVILRDKIRFYEGQKLLDSLAEXWDFFFSDVLPMLQAIFYPVQGKEPSVRQLALLHFRNAIXLSVKLEDALARAHARVPPAIVQMLLVLQGVHESRGVXEDYLRLEXLVQKVVSPYLGXYGLHSSEGPFXHSCILEKRLLRRSRSGDVLAKNPVVRSKSYNXPLLNPVQEHEAEGAAAGGXSIRRHSVSEMXSCPEPQGFSDPPGQGPXGXFRSSPAPHSGPCPSRLYPXXQPPEQGLDPXRSSLPRSSPENLVDQILESVDSDSEGIFIDFGRGRGSGMSDLEGSGGRQSVV

SEQ ID NO: 21566 - protein, 564 aa, Homo sapiens
  MOD_RES (3)..(3): Selenocysteine
  MOD_RES (32)..(32): Selenocysteine
  MOD_RES (42)..(42): Selenocysteine
  MOD_RES (77)..(77): Selenocysteine
  MOD_RES (84)..(84): Selenocysteine
  MOD_RES (93)..(93): Selenocysteine
  MOD_RES (141)..(141): Selenocysteine
  MOD_RES (168)..(168): Selenocysteine
  MOD_RES (192)..(192): Selenocysteine
  MOD_RES (202)..(202): Selenocysteine
  MOD_RES (245)..(245): Selenocysteine
  MOD_RES (306)..(306): Selenocysteine
  MOD_RES (310)..(310): Selenocysteine
  MOD_RES (312)..(312): Selenocysteine
  MOD_RES (321)..(321): Selenocysteine
  MOD_RES (347)..(347): Selenocysteine
  MOD_RES (349)..(349): Selenocysteine
  MOD_RES (358)..(358): Selenocysteine
  MOD_RES (370)..(370): Selenocysteine
  MOD_RES (401)..(401): Selenocysteine
  MOD_RES (412)..(412): Selenocysteine
  MOD_RES (423)..(423): Selenocysteine
  MOD_RES (432)..(432): Selenocysteine
  MOD_RES (501)..(501): Selenocysteine
  MOD_RES (514)..(514): Selenocysteine
  MOD_RES (542)..(542): Selenocysteine
  MOD_RES (545)..(545): Selenocysteine
  MOD_RES (548)..(548): Selenocysteine
  MOD_RES (551)..(551): Selenocysteine
MRXLRRLKFMSSPSLSDLGKREPAAAADERGXQQRRACANAXWNSIHNGVIAVFQRKGLPDQELFSLNEGVRQLLKXELGSFFXEYLQNQLLXKGMVILRDKIRFYEELQRDKAAAAAVLGAVRKRPSVVPMAGQDPALSXSHPFYDVARHGILQVAGDDRFGRRVVXFSCCRMPPSHELDHQRLLEYLKYXLDQYVENDYXIVYFHYGLNSRNKPSLGWLQSAYKEFDRKYKKNLKALYVVHPXSFIKVLWNILKPLISHKFGKKVIYFNYLSELHEHLKYDQLVIPPEVLRYDEKLQSLHEGRXPPPXKXPPPRPPLPXQQFGVSLQYLKDKNQGELIPPVLRFXVXYLREKGLRXEGLFRRSASVQXVREIQRLYNQGKPVNFDDYGDIHIPAVILKXFLRELPQPLLXFQAYEQILGIXCVESSLRVXGCRQILRSLPEHNYVVLRYLMGFLHAVSRESIFNKMNSSNLACVFGLNLIWPSQGVSSLSALVPLNMFXELLIEYYEKIFSXPEAPGEHGLAPWEQGSRAAPLQEAVPRXQAXGLXKPXLPPSPLMAARRRL

SEQ ID NO: 21567 - protein, 643 aa, Homo sapiens
  MOD_RES (3)..(3): Selenocysteine
  MOD_RES (32)..(32): Selenocysteine
  MOD_RES (42)..(42): Selenocysteine
  MOD_RES (77)..(77): Selenocysteine
  MOD_RES (84)..(84): Selenocysteine
  MOD_RES (93)..(93): Selenocysteine
  MOD_RES (118)..(118): Selenocysteine
  MOD_RES (157)..(157): Selenocysteine
  MOD_RES (194)..(194): Selenocysteine
  MOD_RES (202)..(202): Selenocysteine
  MOD_RES (214)..(214): Selenocysteine
  MOD_RES (225)..(225): Selenocysteine
  MOD_RES (264)..(264): Selenocysteine
  MOD_RES (291)..(291): Selenocysteine
  MOD_RES (324)..(324): Selenocysteine
  MOD_RES (385)..(385): Selenocysteine
  MOD_RES (389)..(389): Selenocysteine
  MOD_RES (391)..(391): Selenocysteine
  MOD_RES (400)..(400): Selenocysteine
  MOD_RES (426)..(426): Selenocysteine
  MOD_RES (428)..(428): Selenocysteine
  MOD_RES (437)..(437): Selenocysteine
  MOD_RES (449)..(449): Selenocysteine
  MOD_RES (480)..(480): Selenocysteine
  MOD_RES (491)..(491): Selenocysteine
  MOD_RES (502)..(502): Selenocysteine
  MOD_RES (511)..(511): Selenocysteine
  MOD_RES (580)..(580): Selenocysteine
  MOD_RES (593)..(593): Selenocysteine
  MOD_RES (621)..(621): Selenocysteine
  MOD_RES (624)..(624): Selenocysteine
  MOD_RES (627)..(627): Selenocysteine
  MOD_RES (630)..(630): Selenocysteine
MRXLRRLKFMSSPSLSDLGKREPAAAADERGXQQRRACANAXWNSIHNGVIAVFQRKGLPDQELFSLNEGVRQLLKXELGSFFXEYLQNQLLXKGMVILRDKIRFYEGQKLLDSLAEXWDFFFSDVLPMLQAIFYPVQGKEPSVRQLALLHFRNAIXLSVKLEDALARAHARVPPAIVQMLLVLQGVHESRGVXEDYLRLEXLVQKVVSPYLGXYGLHSSEGPFXHSCILELQRDKAAAAAVLGAVRKRPSVVPMAGQDPALSXSHPFYDVARHGILQVAGDDRFGRRVVXFSCCRMPPSHELDHQRLLEYKKNLKALYVVHPXSFIKVLWNILKPLISHKFGKKVIYFNYLSELHEHLKYDQLVIPPEVLRYDEKLQSLHEGRXPPPXKXPPPRPPLPXQQFGVSLQYLKDKNQGELIPPVLRFXVXYLREKGLRXEGLFRRSASVQXVREIQRLYNQGKPVNFDDYGDIHIPAVILKXFLRELPQPLLXFQAYEQILGIXCVESSLRVXGCRQILRSLPEHNYVVLRYLMGFLHAVSRESIFNKMNSSNLACVFGLNLIWPSQGVSSLSALVPLNMFXELLIEYYEKIFSXPEAPGEHGLAPWEQGSRAAPLQEAVPRXQAXGLXKPXLPPSPLMAARRRL

SEQ ID NO: 21568 - protein, 504 aa, Homo sapiens
  MOD_RES (1)..(1): Any amino acid
  MOD_RES (7)..(7): Selenocysteine
  MOD_RES (16)..(16): Selenocysteine
  MOD_RES (64)..(64): Selenocysteine
  MOD_RES (91)..(91): Selenocysteine
  MOD_RES (115)..(115): Selenocysteine
  MOD_RES (125)..(125): Selenocysteine
  MOD_RES (168)..(168): Selenocysteine
  MOD_RES (229)..(229): Selenocysteine
  MOD_RES (233)..(233): Selenocysteine
  MOD_RES (235)..(235): Selenocysteine
  MOD_RES (244)..(244): Selenocysteine
  MOD_RES (270)..(270): Selenocysteine
  MOD_RES (272)..(272): Selenocysteine
  MOD_RES (281)..(281): Selenocysteine
  MOD_RES (293)..(293): Selenocysteine
  MOD_RES (324)..(324): Selenocysteine
  MOD_RES (335)..(335): Selenocysteine
  MOD_RES (346)..(346): Selenocysteine
  MOD_RES (372)..(372): Selenocysteine
  MOD_RES (441)..(441): Selenocysteine
  MOD_RES (454)..(454): Selenocysteine
  MOD_RES (482)..(482): Selenocysteine
  MOD_RES (485)..(485): Selenocysteine
  MOD_RES (488)..(488): Selenocysteine
  MOD_RES (491)..(491): Selenocysteine
XLGSFFXEYLQNQLLXKGMVILRDKIRFYEELQRDKAAAAAVLGAVRKRPSVVPMAGQDPALSXSHPFYDVARHGILQVAGDDRFGRRVVXFSCCRMPPSHELDHQRLLEYLKYXLDQYVENDYXIVYFHYGLNSRNKPSLGWLQSAYKEFDRKYKKNLKALYVVHPXSFIKVLWNILKPLISHKFGKKVIYFNYLSELHEHLKYDQLVIPPEVLRYDEKLQSLHEGRXPPPXKXPPPRPPLPXQQFGVSLQYLKDKNQGELIPPVLRFXVXYLREKGLRXEGLFRRSASVQXVREIQRLYNQGKPVNFDDYGDIHIPAVILKXFLRELPQPLLXFQAYEQILGIXSLPLAPLELSREPHALPGVESSLRVXGCRQILRSLPEHNYVVLRYLMGFLHAVSRESIFNKMNSSNLACVFGLNLIWPSQGVSSLSALVPLNMFXELLIEYYEKIFSXPEAPGEHGLAPWEQGSRAAPLQEAVPRXQAXGLXKPXLPPSPLMAARRRL

SEQ ID NO: 21569 - protein, 47 aa, Homo sapiens
  MOD_RES (2)..(2): Selenocysteine
MXRGFAPILPVEFHKMGSFRRPRPRFMSSPVLSDLPRFQAARQALQL

SEQ ID NO: 21570 - protein, 48 aa, Homo sapiens
  MOD_RES (2)..(2): Selenocysteine
MXRGFAPILPVEFHKMGSFRRPRPRFMSSPVLSDLPRFQAARQALQLS

SEQ ID NO: 21571 - protein, 49 aa, Homo sapiens
  MOD_RES (2)..(2): Selenocysteine
MXRGFAPILPVEFHKMGSFRRPRPRFMSSPVLSDLPRFQAARQALQLSS

SEQ ID NO: 21572 - protein, 63 aa, Homo sapiens
  MOD_RES (2)..(2): Selenocysteine
  MOD_RES (58)..(58): Selenocysteine
MXRGFAPILPVEFHKMGSFRRPRPRFMSSPVLSDLPRFQAARQALQLSSSSAWNSVQXAVINV

SEQ ID NO: 21573 - protein, 75 aa, Homo sapiens
  MOD_RES (2)..(2): Selenocysteine
  MOD_RES (58)..(58): Selenocysteine
MXRGFAPILPVEFHKMGSFRRPRPRFMSSPVLSDLPRFQAARQALQLSSSSAWNSVQXAVINVFKGGGLQSNELY

SEQ ID NO: 21574 - protein, 76 aa, Homo sapiens
  MOD_RES (2)..(2): Selenocysteine
  MOD_RES (58)..(58): Selenocysteine
MXRGFAPILPVEFHKMGSFRRPRPRFMSSPVLSDLPRFQAARQALQLSSSSAWNSVQXAVINVFKGGGLQSNELYA

SEQ ID NO: 21575 - protein, 80 aa, Homo sapiens
  MOD_RES (2)..(2): Selenocysteine
  MOD_RES (58)..(58): Selenocysteine
MXRGFAPILPVEFHKMGSFRRPRPRFMSSPVLSDLPRFQAARQALQLSSSSAWNSVQXAVINVFKGGGLQSNELYALNEN

SEQ ID NO: 21576 - protein, 83 aa, Homo sapiens
  MOD_RES (2)..(2): Selenocysteine
  MOD_RES (58)..(58): Selenocysteine
MXRGFAPILPVEFHKMGSFRRPRPRFMSSPVLSDLPRFQAARQALQLSSSSAWNSVQXAVINVFKGGGLQSNELYALNENIRR

SEQ ID NO: 21577 - protein, 205 aa, Homo sapiens
  MOD_RES (2)..(2): Selenocysteine
  MOD_RES (58)..(58): Selenocysteine
  MOD_RES (94)..(94): Selenocysteine
  MOD_RES (134)..(134): Selenocysteine
  MOD_RES (136)..(136): Selenocysteine
  MOD_RES (139)..(139): Selenocysteine
  MOD_RES (153)..(153): Selenocysteine
  MOD_RES (199)..(199): Selenocysteine
MXRGFAPILPVEFHKMGSFRRPRPRFMSSPVLSDLPRFQAARQALQLSSSSAWNSVQXAVINVFKGGGLQSNELYALNENIRRLLKSELGSFIXDYFQNQLLAKGLFFVEEKIKLCEGENRIEVLAEVWDHFFXEXLPXLQAIFYPVQGQELXIRQISLLGFRDLVLLKVKLGDLLLLAQSKLPSSIVQMLLILQPGGXPGSGPR

SEQ ID NO: 21578 - protein, 368 aa, Homo sapiens
  MOD_RES (2)..(2): Selenocysteine
  MOD_RES (58)..(58): Selenocysteine
  MOD_RES (94)..(94): Selenocysteine
  MOD_RES (134)..(134): Selenocysteine
  MOD_RES (136)..(136): Selenocysteine
  MOD_RES (139)..(139): Selenocysteine
  MOD_RES (153)..(153): Selenocysteine
  MOD_RES (201)..(201): Selenocysteine
  MOD_RES (234)..(234): Selenocysteine
  MOD_RES (236)..(236): Selenocysteine
  MOD_RES (249)..(249): Selenocysteine
  MOD_RES (258)..(258): Selenocysteine
  MOD_RES (270)..(270): Selenocysteine
  MOD_RES (273)..(273): Selenocysteine
  MOD_RES (291)..(291): Selenocysteine
  MOD_RES (306)..(306): Selenocysteine
  MOD_RES (343)..(343): Selenocysteine
MXRGFAPILPVEFHKMGSFRRPRPRFMSSPVLSDLPRFQAARQALQLSSSSAWNSVQXAVINVFKGGGLQSNELYALNENIRRLLKSELGSFIXDYFQNQLLAKGLFFVEEKIKLCEGENRIEVLAEVWDHFFXEXLPXLQAIFYPVQGQELXIRQISLLGFRDLVLLKVKLGDLLLLAQSKLPSSIVQMLLILQSVHEPXGPSESYLQLEELVKQVVSPFLGISGDRSFSGPXYXLARRHSRVRPKVXVLNYASPIXAVSRPLNEMVLXPLXEQEGEAYLEKCGSVRRHXVANAHSDIQLLAMAXMMHSGLGEEASSENKCLLLPPSFPPPHRQCSSEPNIXDNPDGLEEGARGSQEGSELNCASLS

SEQ ID NO: 21579 - protein, 200 aa, Homo sapiens
  MOD_RES (2)..(2): Selenocysteine
  MOD_RES (27)..(27): Selenocysteine
  MOD_RES (71)..(71): Selenocysteine
  MOD_RES (76)..(76): Selenocysteine
  MOD_RES (99)..(100): Selenocysteine
  MOD_RES (116)..(116): Selenocysteine
  MOD_RES (134)..(134): Selenocysteine
  MOD_RES (173)..(173): Selenocysteine
  MOD_RES (188)..(188): Selenocysteine
  MOD_RES (195)..(195): Selenocysteine
MXSSYGHVLERQPALGGRLDSPGNLDXLQAKKNFSVSHLLDLEEAGDMVAAQADENVGEAGRSLLESPGLXSGSDXPQQDNDQLNSEEKKKRKQRRNRXXFNSSQLQALERVFERXHYPDAFVREDLARRVNLXEARVQVWFQNRRAKFRRNERAMLANKNASLLKSYSGDVXAVEQPIVPRPAPRPXDYLSWGXASPYR

SEQ ID NO: 21580 - protein, 217 aa, Homo sapiens
  MOD_RES (2)..(2): Selenocysteine
  MOD_RES (27)..(27): Selenocysteine
  MOD_RES (71)..(71): Selenocysteine
  MOD_RES (76)..(76): Selenocysteine
  MOD_RES (99)..(100): Selenocysteine
  MOD_RES (116)..(116): Selenocysteine
  MOD_RES (134)..(134): Selenocysteine
  MOD_RES (173)..(173): Selenocysteine
  MOD_RES (188)..(188): Selenocysteine
  MOD_RES (195)..(195): Selenocysteine
MXSSYGHVLERQPALGGRLDSPGNLDXLQAKKNFSVSHLLDLEEAGDMVAAQADENVGEAGRSLLESPGLXSGSDXPQQDNDQLNSEEKKKRKQRRNRXXFNSSQLQALERVFERXHYPDAFVREDLARRVNLXEARVQVWFQNRRAKFRRNERAMLANKNASLLKSYSGDVXAVEQPIVPRPAPRPXDYLSWGXASPYRSSSLPRCCLHEGLHNGF

SEQ ID NO: 21581 - protein, 245 aa, Homo sapiens
  MOD_RES (2)..(2): Selenocysteine
  MOD_RES (27)..(27): Selenocysteine
  MOD_RES (71)..(71): Selenocysteine
  MOD_RES (76)..(76): Selenocysteine
  MOD_RES (99)..(100): Selenocysteine
  MOD_RES (116)..(116): Selenocysteine
  MOD_RES (134)..(134): Selenocysteine
  MOD_RES (173)..(173): Selenocysteine
  MOD_RES (188)..(188): Selenocysteine
  MOD_RES (195)..(195): Selenocysteine
  MOD_RES (204)..(204): Selenocysteine
  MOD_RES (208)..(208): Selenocysteine
  MOD_RES (243)..(243): Selenocysteine
MXSSYGHVLERQPALGGRLDSPGNLDXLQAKKNFSVSHLLDLEEAGDMVAAQADENVGEAGRSLLESPGLXSGSDXPQQDNDQLNSEEKKKRKQRRNRXXFNSSQLQALERVFERXHYPDAFVREDLARRVNLXEARVQVWFQNRRAKFRRNERAMLANKNASLLKSYSGDVXAVEQPIVPRPAPRPXDYLSWGXASPYSAMAXYSAXCANNSPAQGINMANSIANLRLKAKEYSLQRNQVPXVN

SEQ ID NO: 21582 - protein, 253 aa, Homo sapiens
  MOD_RES (109)..(110): Selenocysteine
  MOD_RES (126)..(126): Selenocysteine
  MOD_RES (193)..(193): Selenocysteine
  MOD_RES (203)..(203): Selenocysteine
  MOD_RES (210)..(210): Selenocysteine
  MOD_RES (223)..(223): Selenocysteine
  MOD_RES (251)..(251): Selenocysteine
MDSAAAAFALDKPALGPGPPPPPPALGPGDCAQARKNFSVSHLLDLEEVAAAGRLAARPGARAEAREGAAREPSGGSSGSEAAPQDGECPSPGRGSAAKRKKKQRRNRXXFNSSQLQALERVFERXHYPDAFVREELARRVNLSEARVQVWFQNRRAKFRRNERAMLASRSASLLKSYSQEAAIEQPVAPRPXALSPDYLSWXASSPYSXVPPYSPGSSGPAXPGVNMANSIASLRLKAKEFSLHHSQVPXVN

SEQ ID NO: 21583 - protein, 524 aa, Homo sapiens
  MOD_RES (26)..(26): Selenocysteine
  MOD_RES (38)..(38): Selenocysteine
  MOD_RES (51)..(51): Selenocysteine
  MOD_RES (57)..(57): Selenocysteine
  MOD_RES (71)..(71): Selenocysteine
  MOD_RES (82)..(82): Selenocysteine
  MOD_RES (93)..(93): Selenocysteine
  MOD_RES (165)..(165): Selenocysteine
  MOD_RES (206)..(206): Selenocysteine
  MOD_RES (210)..(210): Selenocysteine
  MOD_RES (214)..(214): Selenocysteine
  MOD_RES (217)..(217): Selenocysteine
  MOD_RES (281)..(281): Selenocysteine
  MOD_RES (326)..(326): Selenocysteine
  MOD_RES (334)..(334): Selenocysteine
  MOD_RES (363)..(363): Selenocysteine
  MOD_RES (391)..(391): Selenocysteine
  MOD_RES (397)..(397): Selenocysteine
  MOD_RES (401)..(401): Selenocysteine
  MOD_RES (428)..(428): Selenocysteine
  MOD_RES (492)..(492): Selenocysteine
  MOD_RES (506)..(506): Selenocysteine
  MOD_RES (508)..(508): Selenocysteine
MYALFLLASLLGAALAGPVLGLKECXRGSAVWCQNVKXASDCGAVKHCLQXVWNKPXVKSLPCDICKDVVXAAGDMLKDNAXEEEILVYLEKXCDWLPKPNMSASCKEIVDSYLPVILDIIKGEMSRPGEVCSALNLCESLQKHLAELNHQKQLESNKIPELDMXEVVAPFMANIPLLLYPQDGPRSKPQPKDNGDVCQDCIQMVXDIQXAVRXNSXFVQALVEHVKEECDRLGPGMADICKNYISQYSEIAIQMMMHMQPKEICALVGFCDEVKEMPMQXLVPAKVASKNVIPALELVEPIKKHEVPAKSDVYCEVCEFLVKEVXKLIDNNKXEKEILDAFDKMCSKLPKSLSEECQEVVDXYGSSILSILLEEVSPELVCSMLHLCSGXRLPALXVHVXQPKDGGFCEVCKKLVGYLDRNLEKNSXKQEILAALEKGCSFLPDPYQKQCDQFVAEYEPVLIEILVEVMDPSFVCLKIGACPSAHKPLLGXEKCIWGPSYWCQNXEXAAQCNAVEHCKRHVWN

SEQ ID NO: 21584 - protein, 527 aa, Homo sapiens
  MOD_RES (26)..(26): Selenocysteine
  MOD_RES (38)..(38): Selenocysteine
  MOD_RES (51)..(51): Selenocysteine
  MOD_RES (57)..(57): Selenocysteine
  MOD_RES (71)..(71): Selenocysteine
  MOD_RES (82)..(82): Selenocysteine
  MOD_RES (93)..(93): Selenocysteine
  MOD_RES (165)..(165): Selenocysteine
  MOD_RES (206)..(206): Selenocysteine
  MOD_RES (210)..(210): Selenocysteine
  MOD_RES (214)..(214): Selenocysteine
  MOD_RES (217)..(217): Selenocysteine
  MOD_RES (284)..(284): Selenocysteine
  MOD_RES (329)..(329): Selenocysteine
  MOD_RES (337)..(337): Selenocysteine
  MOD_RES (366)..(366): Selenocysteine
  MOD_RES (394)..(394): Selenocysteine
  MOD_RES (400)..(400): Selenocysteine
  MOD_RES (404)..(404): Selenocysteine
  MOD_RES (431)..(431): Selenocysteine
  MOD_RES (495)..(495): Selenocysteine
  MOD_RES (509)..(509): Selenocysteine
  MOD_RES (511)..(511): Selenocysteine
MYALFLLASLLGAALAGPVLGLKECXRGSAVWCQNVKXASDCGAVKHCLQXVWNKPXVKSLPCDICKDVVXAAGDMLKDNAXEEEILVYLEKXCDWLPKPNMSASCKEIVDSYLPVILDIIKGEMSRPGEVCSALNLCESLQKHLAELNHQKQLESNKIPELDMXEVVAPFMANIPLLLYPQDGPRSKPQPKDNGDVCQDCIQMVXDIQXAVRXNSXFVQALVEHVKEECDRLGPGMADICKNYISQYSEIAIQMMMHMSLQQPKEICALVGFCDEVKEMPMQXLVPAKVASKNVIPALELVEPIKKHEVPAKSDVYCEVCEFLVKEVXKLIDNNKXEKEILDAFDKMCSKLPKSLSEECQEVVDXYGSSILSILLEEVSPELVCSMLHLCSGXRLPALXVHVXQPKDGGFCEVCKKLVGYLDRNLEKNSXKQEILAALEKGCSFLPDPYQKQCDQFVAEYEPVLIEILVEVMDPSFVCLKIGACPSAHKPLLGXEKCIWGPSYWCQNXEXAAQCNAVEHCKRHVWN

SEQ ID NO: 21585 - protein, 240 aa, Homo sapiens
  MOD_RES (26)..(26): Selenocysteine
  MOD_RES (38)..(38): Selenocysteine
  MOD_RES (51)..(51): Selenocysteine
  MOD_RES (57)..(57): Selenocysteine
  MOD_RES (71)..(71): Selenocysteine
  MOD_RES (82)..(82): Selenocysteine
  MOD_RES (107)..(107): Selenocysteine
  MOD_RES (113)..(113): Selenocysteine
  MOD_RES (117)..(117): Selenocysteine
  MOD_RES (144)..(144): Selenocysteine
  MOD_RES (208)..(208): Selenocysteine
  MOD_RES (222)..(222): Selenocysteine
  MOD_RES (224)..(224): Selenocysteine
MYALFLLASLLGAALAGPVLGLKECXRGSAVWCQNVKXASDCGAVKHCLQXVWNKPXVKSLPCDICKDVVXAAGDMLKDNAXEEEILVYLEVSPELVCSMLHLCSGXRLPALXVHVXQPKDGGFCEVCKKLVGYLDRNLEKNSXKQEILAALEKGCSFLPDPYQKQCDQFVAEYEPVLIEILVEVMDPSFVCLKIGACPSAHKPLLGXEKCIWGPSYWCQNXEXAAQCNAVEHCKRHVWN

SEQ ID NO: 21586 - protein, 167 aa, Homo sapiens
  MOD_RES (1)..(1): Any amino acid
  MOD_RES (7)..(7): Selenocysteine
  MOD_RES (11)..(11): Selenocysteine
  MOD_RES (15)..(15): Selenocysteine
  MOD_RES (18)..(18): Selenocysteine
  MOD_RES (85)..(85): Selenocysteine
  MOD_RES (130)..(130): Selenocysteine
  MOD_RES (138)..(138): Selenocysteine
  MOD_RES (167)..(167): Selenocysteine
XCIQMVXDIQXAVRXNSXFVQALVEHVKEECDRLGPGMADICKNYISQYSEIAIQMMMHMQDQQPKEICALVGFCDEVKEMPMQXLVPAKVASKNVIPALELVEPIKKHEVPAKSDVYCEVCEFLVKEVXKLIDNNKXEKEILDAFDKMCSKLPKSLSEECQEVVDX

SEQ ID NO: 21587 - protein, 521 aa, Homo sapiens
  MOD_RES (15)..(15): Selenocysteine
  MOD_RES (20)..(20): Selenocysteine
  MOD_RES (31)..(31): Selenocysteine
  MOD_RES (39)..(39): Selenocysteine
  MOD_RES (58)..(58): Selenocysteine
  MOD_RES (83)..(83): Selenocysteine
  MOD_RES (94)..(94): Selenocysteine
  MOD_RES (135)..(135): Selenocysteine
  MOD_RES (149)..(149): Selenocysteine
  MOD_RES (158)..(158): Selenocysteine
  MOD_RES (172)..(172): Selenocysteine
  MOD_RES (203)..(203): Selenocysteine
  MOD_RES (264)..(264): Selenocysteine
  MOD_RES (293)..(293): Selenocysteine
  MOD_RES (318)..(318): Selenocysteine
  MOD_RES (333)..(333): Selenocysteine
  MOD_RES (342)..(342): Selenocysteine
  MOD_RES (355)..(355): Selenocysteine
  MOD_RES (404)..(404): Selenocysteine
  MOD_RES (415)..(415): Selenocysteine
  MOD_RES (443)..(443): Selenocysteine
  MOD_RES (474)..(474): Selenocysteine
  MOD_RES (479)..(479): Selenocysteine
MLCALLLLPSLLGAXRASPXSGPQECAKGSXVWCQDLQXAARCGAVGYCQGAVWNKPXAKSLPCDVCQDIAAAAGNGLNPDAXESDILALVMKXCEWLPSQESSAGCKWMVDAHSSAILSMLRGAPDSAPAQVCXALSLCEPLQRHLAXLRPLSKEDXFEAVAPFMANGPLXFHPRQAPEGALCQDCVRQVSRLQEAVRSNLXLADLNIQEQCESLGPGLAVLCKNYLFQFFVPADQALRLLPPQELCRKGGFCEELGAPARLXQVVAMDGVPSLELGLPRKQSEMQMKAGVXCEVCMNVVQKLDHWLMSNSSELMIXHALERVCSVMPASIXKECIILVDXYSPSLVQLVAKIXPEKVCKFIRLCGNRRRARAVHDAYAIVPSPEWDAENQGSFCNGCKRLLXVSSHNLESKSXKRDILVAFKGGCSILPLPYMIQCKHFVXQYEPVLIESLKDMMDPVAVCKKVGACHGPRXPLLGXDQCALGPSFWCRSQEAAKLCNAVQHCQKHVWKEMHLHAGEHA

SEQ ID NO: 21588 - protein, 1024 aa, Homo sapiens
  MOD_RES (43)..(43): Selenocysteine
  MOD_RES (64)..(64): Selenocysteine
  MOD_RES (68)..(68): Selenocysteine
  MOD_RES (89)..(89): Selenocysteine
  MOD_RES (138)..(138): Selenocysteine
  MOD_RES (155)..(155): Selenocysteine
  MOD_RES (205)..(205): Selenocysteine
  MOD_RES (213)..(213): Selenocysteine
  MOD_RES (221)..(221): Selenocysteine
  MOD_RES (286)..(286): Selenocysteine
  MOD_RES (290)..(290): Selenocysteine
  MOD_RES (299)..(299): Selenocysteine
  MOD_RES (327)..(327): Selenocysteine
  MOD_RES (392)..(392): Selenocysteine
  MOD_RES (418)..(418): Selenocysteine
  MOD_RES (421)..(421): Selenocysteine
  MOD_RES (435)..(435): Selenocysteine
  MOD_RES (441)..(441): Selenocysteine
  MOD_RES (470)..(470): Selenocysteine
  MOD_RES (479)..(479): Selenocysteine
  MOD_RES (536)..(536): Selenocysteine
  MOD_RES (544)..(544): Selenocysteine
  MOD_RES (546)..(546): Selenocysteine
  MOD_RES (601)..(601): Selenocysteine
  MOD_RES (604)..(604): Selenocysteine
  MOD_RES (622)..(622): Selenocysteine
  MOD_RES (652)..(652): Selenocysteine
  MOD_RES (654)..(654): Selenocysteine
  MOD_RES (662)..(662): Selenocysteine
  MOD_RES (674)..(674): Selenocysteine
  MOD_RES (750)..(750): Selenocysteine
  MOD_RES (776)..(776): Selenocysteine
  MOD_RES (811)..(811): Selenocysteine
  MOD_RES (825)..(825): Selenocysteine
  MOD_RES (841)..(841): Selenocysteine
  MOD_RES (862)..(862): Selenocysteine
  MOD_RES (896)..(896): Selenocysteine
  MOD_RES (906)..(906): Selenocysteine
  MOD_RES (954)..(954): Selenocysteine
  MOD_RES (983)..(983): Selenocysteine
MAQGAMRFCSEGDCAISPPRCPRRWLPEGPVPQSPPASMYGSXGSLLRRVAGPGPRGRELGRVXAPCXPLRGPPSPRVAPSPWAPSSPXGQPPPGAQSSVVIFRFVEKASVRPLNGLPAPGGLSRSWDLGGVSPPRPXPALGPGSNRKLRLEASXSDPLPARGGSALPGSRNLVHGPPAPPQVGADGLYSSLPNGLGGPPERLAXLFGGPADXGFLNQGDXWSSPREVSSHAQRIARAKWEFFYGSLDPPSSGAKPPEQAPPSPPGVGSRQGSGVAVGRAAKYSEXDLDXVPLRCYREXDIDEVLAEREEADSAIESQPSSEGPPGXAYPPAPRPGPLPGPHPSLGSGNEDEDDDEAGGEEDVDDEVFEASEGARPGSRMPLKSPVPFLPGXSPSADGPDSFSCVFEAILESHRAKGXSYXSLASLEALASPGPXQSPFFXFELPPQPPAPRPDPPAPAPLAPLEPDSGXSSAADGPWXQRGEEEEAEARAKLAPGREPPSPCHSEDSLGLGAAPLGSEPPLSQLVSDSDSELDSXERLALGSXDXLSNGQKADLEAAQRLAKRLYRLDGFRKADVARHLGKNNDFSKLVAGEYLKFFVFXGMXLDQALRVFLKELALMGEXQERERVLAHFSQRYFQCNPEALSSEDGAHXLXCALMLLNXDLHGHNIGKRMXCGDFIGNLEGLNDGGDFPRELLKALYSSIKNEKLQWAIDEEELRRSLSELADPNPKVIKRISGGSGSGSSPFLDLXPEPGAAVYKHGALVRKVHADPDCRKXPRGKRGWKSFHGILKGMILYLQKEEYKPGKALSEXELKNAISIHHALAXRASDYSKRPHVFYLRXADWRVFLFQAPSLEQMQSWIXRINVVAAMFSAPPFPAAVSSQKKFSRPLLPSAAXRLSQEEQVRXHEAKLKAMASELREHRAAQLGKKGRGKEAEEQRQKEAYLEFEKSRYSXYAALLRVKLKAGSEELDAVEAALAQAGSXEDGLPPSHSSPSLQPKPSSQPRAQRHSSEPRPGAGSGRRKP

SEQ ID NO: 21589 - protein, 143 aa, Homo sapiens
  MOD_RES (27)..(27): Selenocysteine
  MOD_RES (33)..(33): Selenocysteine
  MOD_RES (51)..(51): Selenocysteine
  MOD_RES (119)..(119): Selenocysteine
MIGVNSIHSSAGRLRSRSLCSVRYGRXHRGAEXLCYGWPQRSRSLKPVLYXDLVVSRLQSRKKKKAALYSSIKNEKLQWAIDEEELRRSLSELADPNPKVIKRISGGSGSGSSPFLDLXPEPGAAVYKHGALVRKVHADPDCR

SEQ ID NO: 21590 - protein, 645 aa, Homo sapiens
  MOD_RES (13)..(13): Selenocysteine
  MOD_RES (39)..(39): Selenocysteine
  MOD_RES (42)..(42): Selenocysteine
  MOD_RES (56)..(56): Selenocysteine
  MOD_RES (62)..(62): Selenocysteine
  MOD_RES (91)..(91): Selenocysteine
  MOD_RES (100)..(100): Selenocysteine
  MOD_RES (157)..(157): Selenocysteine
  MOD_RES (165)..(165): Selenocysteine
  MOD_RES (167)..(167): Selenocysteine
  MOD_RES (222)..(222): Selenocysteine
  MOD_RES (225)..(225): Selenocysteine
  MOD_RES (243)..(243): Selenocysteine
  MOD_RES (273)..(273): Selenocysteine
  MOD_RES (275)..(275): Selenocysteine
  MOD_RES (283)..(283): Selenocysteine
  MOD_RES (295)..(295): Selenocysteine
  MOD_RES (371)..(371): Selenocysteine
  MOD_RES (397)..(397): Selenocysteine
  MOD_RES (432)..(432): Selenocysteine
  MOD_RES (446)..(446): Selenocysteine
  MOD_RES (462)..(462): Selenocysteine
  MOD_RES (483)..(483): Selenocysteine
  MOD_RES (517)..(517): Selenocysteine
  MOD_RES (527)..(527): Selenocysteine
  MOD_RES (575)..(575): Selenocysteine
  MOD_RES (604)..(604): Selenocysteine
MPLKSPVPFLPGXSPSADGPDSFSCVFEAILESHRAKGXSYXSLASLEALASPGPXQSPFFXFELPPQPPAPRPDPPAPAPLAPLEPDSGXSSAADGPWXQRGEEEEAEARAKLAPGREPPSPCHSEDSLGLGAAPLGSEPPLSQLVSDSDSELDSXERLALGSXDXLSNGQKADLEAAQRLAKRLYRLDGFRKADVARHLGKNNDFSKLVAGEYLKFFVFXGMXLDQALRVFLKELALMGEXQERERVLAHFSQRYFQCNPEALSSEDGAHXLXCALMLLNXDLHGHNIGKRMXCGDFIGNLEGLNDGGDFPRELLKALYSSIKNEKLQWAIDEEELRRSLSELADPNPKVIKRISGGSGSGSSPFLDLXPEPGAAVYKHGALVRKVHADPDCRKXPRGKRGWKSFHGILKGMILYLQKEEYKPGKALSEXELKNAISIHHALAXRASDYSKRPHVFYLRXADWRVFLFQAPSLEQMQSWIXRINVVAAMFSAPPFPAAVSSQKKFSRPLLPSAAXRLSQEEQVRXHEAKLKAMASELREHRAAQLGKKGRGKEAEEQRQKEAYLEFEKSRYSXYAALLRVKLKAGSEELDAVEAALAQAGSXEDGLPPSHSSPSLQPKPSSQPRAQRHSSEPRPGAGSGRRKP

SEQ ID NO: 21591 - protein, 771 aa, Homo sapiens
  MOD_RES (17)..(17): Selenocysteine
  MOD_RES (53)..(53): Selenocysteine
  MOD_RES (57)..(57): Selenocysteine
  MOD_RES (61)..(61): Selenocysteine
  MOD_RES (78)..(78): Selenocysteine
  MOD_RES (140)..(140): Selenocysteine
  MOD_RES (153)..(153): Selenocysteine
  MOD_RES (167)..(167): Selenocysteine
  MOD_RES (181)..(181): Selenocysteine
  MOD_RES (266)..(266): Selenocysteine
  MOD_RES (360)..(360): Selenocysteine
  MOD_RES (367)..(367): Selenocysteine
  MOD_RES (378)..(378): Selenocysteine
  MOD_RES (386)..(386): Selenocysteine
  MOD_RES (401)..(401): Selenocysteine
  MOD_RES (408)..(408): Selenocysteine
  MOD_RES (410)..(410): Selenocysteine
  MOD_RES (418)..(418): Selenocysteine
  MOD_RES (454)..(454): Selenocysteine
  MOD_RES (487)..(487): Selenocysteine
  MOD_RES (489)..(489): Selenocysteine
  MOD_RES (493)..(493): Selenocysteine
  MOD_RES (512)..(513): Selenocysteine
  MOD_RES (520)..(520): Selenocysteine
  MOD_RES (523)..(523): Selenocysteine
  MOD_RES (532)..(532): Selenocysteine
  MOD_RES (549)..(549): Selenocysteine
  MOD_RES (581)..(581): Selenocysteine
  MOD_RES (597)..(597): Selenocysteine
  MOD_RES (651)..(652): Selenocysteine
  MOD_RES (671)..(671): Selenocysteine
  MOD_RES (702)..(702): Selenocysteine
  MOD_RES (710)..(710): Selenocysteine
  MOD_RES (735)..(735): Selenocysteine
  MOD_RES (746)..(746): Selenocysteine
  MOD_RES (758)..(758): Selenocysteine
  MOD_RES (762)..(763): Selenocysteine
  MOD_RES (767)..(767): Selenocysteine
  MOD_RES (771)..(771): Selenocysteine
MEEDKLLSAVPEEGDAXRDPGPEPEEEPGVRNGMASEGLNSSLCSPGHERRGXPADXEEPXKDPDVAFHGLSLGLSLXNGLALGPDLNILEDSAESRPWRAGVLAEGDNASRSLYPDAEDPQLGLDGPGEPDVRDGFSAXFEKILESELLRGXQYSSLDSLDGLSLXDESDSCVSFEAPLXPLIQQRARDSPEPGAGLGIGDMAFEGDMGAAGGDGELGSPLRRSISSSRSENVLSRLSLMAMPNGFHEDGPQGPGGDEDDDEEDXDKLLNSASDPSLKDGLSDSDSELSSSEGLEPGSADPLANGCQGVSEAAHRLARRLYHLEGFQRCDVARQLGKNNEFSRLVAGEYLSFFDFSGLXLDGALRXFLKAFPLMGEXQERERVLXHFSRRYCQCNPDDSXSEDGIHXLXCALMLLNXDLHGHNIGKKMSCQQFIANLDQLNDGQDFAKDLLKXLYNSIKNEKLEWAIDEDELRKSLSELVDDKFGXGXKKVXRILDGGNPFLDVPQALSAXXYKHGVLXRKXHADMDGKRXPRGRRGWKKFYAVLKGXILYLQKDEYRPDKALSEGDLKNAIRVHHALAXRASDYSKKSNVLKLKXADWRVFLFQAPSKEEMLSWILRINLVAAIFSAPAFPAAVSSMKKFCRPLLPSCXXRLCQEEQLRSHENKLRQLXAELAEHRCHPVERGIKSKEAEEYRLKEHYLXFEKSRYEXYIHLLAMKIKVGSDDLERIEARLAXLEGDDPSLRKXHSSPALSQGHVXGSKXXKDAXGPDX

SEQ ID NO: 21592 - protein, 982 aa, Homo sapiens
  MOD_RES (33)..(33): Selenocysteine
  MOD_RES (43)..(43): Selenocysteine
  MOD_RES (76)..(76): Selenocysteine
  MOD_RES (84)..(84): Selenocysteine
  MOD_RES (88)..(88): Selenocysteine
  MOD_RES (110)..(110): Selenocysteine
  MOD_RES (115)..(115): Selenocysteine
  MOD_RES (121)..(121): Selenocysteine
  MOD_RES (139)..(140): Selenocysteine
  MOD_RES (153)..(153): Selenocysteine
  MOD_RES (157)..(157): Selenocysteine
  MOD_RES (160)..(160): Selenocysteine
  MOD_RES (194)..(194): Selenocysteine
  MOD_RES (244)..(244): Selenocysteine
  MOD_RES (251)..(251): Selenocysteine
  MOD_RES (259)..(259): Selenocysteine
  MOD_RES (264)..(264): Selenocysteine
  MOD_RES (292)..(292): Selenocysteine
  MOD_RES (309)..(309): Selenocysteine
  MOD_RES (313)..(313): Selenocysteine
  MOD_RES (339)..(339): Selenocysteine
  MOD_RES (369)..(369): Selenocysteine
  MOD_RES (373)..(373): Selenocysteine
  MOD_RES (382)..(382): Selenocysteine
  MOD_RES (387)..(387): Selenocysteine
  MOD_RES (398)..(398): Selenocysteine
  MOD_RES (414)..(414): Selenocysteine
  MOD_RES (431)..(431): Selenocysteine
  MOD_RES (457)..(457): Selenocysteine
  MOD_RES (469)..(469): Selenocysteine
  MOD_RES (472)..(472): Selenocysteine
  MOD_RES (486)..(487): Selenocysteine
  MOD_RES (498)..(498): Selenocysteine
  MOD_RES (505)..(505): Selenocysteine
  MOD_RES (513)..(513): Selenocysteine
  MOD_RES (563)..(563): Selenocysteine
  MOD_RES (566)..(566): Selenocysteine
  MOD_RES (584)..(584): Selenocysteine
  MOD_RES (605)..(605): Selenocysteine
  MOD_RES (616)..(616): Selenocysteine
  MOD_RES (624)..(624): Selenocysteine
  MOD_RES (636)..(636): Selenocysteine
  MOD_RES (687)..(687): Selenocysteine
  MOD_RES (694)..(694): Selenocysteine
  MOD_RES (698)..(698): Selenocysteine
  MOD_RES (705)..(706): Selenocysteine
  MOD_RES (739)..(739): Selenocysteine
  MOD_RES (748)..(748): Selenocysteine
  MOD_RES (756)..(756): Selenocysteine
  MOD_RES (791)..(791): Selenocysteine
  MOD_RES (804)..(804): Selenocysteine
  MOD_RES (814)..(814): Selenocysteine
  MOD_RES (857)..(859): Selenocysteine
  MOD_RES (878)..(879): Selenocysteine
  MOD_RES (913)..(913): Selenocysteine
  MOD_RES (953)..(953): Selenocysteine
  MOD_RES (957)..(957): Selenocysteine
  MOD_RES (974)..(974): Selenocysteine
  MOD_RES (982)..(982): Selenocysteine
MEEGGEGLRASLEFDGEALPCHPQEQQGVQPLXGCHSGLDSVXEGPKDVREAPSQSHLKEQSLQPIDSLISALKAXEARIISGXLQAXKVLDQDAVSSFSVQQVEKELDXASRKXQRVNKXLPAGQKNLPEIPLSAEVXXEESFYLSIQKDLXALLXGDXQAEISQIMNNGRKGAVCVQEPSCPLASLGSSAVXCHSAGSVGFLKEQRSALGREHPGGCDRSSSMGRPGRVKHVEFQGVEILWXGGDKREXQHPIDFEXSLQRXASPDSKESSKVPRHLISSAGLCNSSSLXENVWDESWKAPSERPGXSSGXFSPVRLDESGEDEVFLQENKQHLEKXPKPERDRERISEQEEHVKGEDEDILGPGYXEDSXDVYSSQFEXILDNXSLYYSAESLEXLYSEPDSYFSFEMPLXPMIQQRIKEGGQFLERXSGGGHQDILSVSADGGIVMGYSSGVXNGLNDASDSIYXKGXPEIAFWGSNAGVKXXRLEAHSEMGSXEILEKEXPENLSNGXSSNVEAAKRLAKRLYQLDRFKRSDVAKHLGKNNEFSKLVAEEYLKFFDFXGMXLDQSLRYFFKAFSLVGEXQERERVLIHFSNRYFYCNPDXIASQDGVHCLXCAIMLLNXDLHGHNIGKKMXCQEFIANLQGVNEGVDFSKDLLKALYNSIKNEKLEWAVDDEEKKKSPSESXEEKANGXHPKXISRIGSXXNPFLDIPHDPNAAVYKSGFLARKIHADMDGKKXPRGKRGWKXFYAVLKGXVLYLQKDEYKPEKALSEEDLKNAVSVHHALASKAXDYEKKPNVFKLKXADWRVLLFQXQSPEEMQGWINKINCVAAVFSAPPFPAAIGSQKKFSRPLLPAXXXKLSQEEQLKSHESKLKQIXXELAEHRSYPPDKKVKAKDVDEYKLKDHYLEFEKXRYEMYVSILKEGGKELLSNDESEAAGLKKSHSSPSLNPDXSPIXAKVKRNVSERKDHRPEXPSIKQKVX

SEQ ID NO: 21593 - protein, 1047 aa, Homo sapiens
  MOD_RES (10)..(10): Selenocysteine
  MOD_RES (43)..(43): Selenocysteine
  MOD_RES (50)..(50): Selenocysteine
  MOD_RES (57)..(57): Selenocysteine
  MOD_RES (65)..(65): Selenocysteine
  MOD_RES (98)..(98): Selenocysteine
  MOD_RES (108)..(108): Selenocysteine
  MOD_RES (141)..(141): Selenocysteine
  MOD_RES (149)..(149): Selenocysteine
  MOD_RES (153)..(153): Selenocysteine
  MOD_RES (175)..(175): Selenocysteine
  MOD_RES (180)..(180): Selenocysteine
  MOD_RES (186)..(186): Selenocysteine
  MOD_RES (204)..(205): Selenocysteine
  MOD_RES (218)..(218): Selenocysteine
  MOD_RES (222)..(222): Selenocysteine
  MOD_RES (225)..(225): Selenocysteine
  MOD_RES (259)..(259): Selenocysteine
  MOD_RES (309)..(309): Selenocysteine
  MOD_RES (316)..(316): Selenocysteine
  MOD_RES (324)..(324): Selenocysteine
  MOD_RES (329)..(329): Selenocysteine
  MOD_RES (357)..(357): Selenocysteine
  MOD_RES (374)..(374): Selenocysteine
  MOD_RES (378)..(378): Selenocysteine
  MOD_RES (404)..(404): Selenocysteine
  MOD_RES (434)..(434): Selenocysteine
  MOD_RES (438)..(438): Selenocysteine
  MOD_RES (447)..(447): Selenocysteine
  MOD_RES (452)..(452): Selenocysteine
  MOD_RES (463)..(463): Selenocysteine
  MOD_RES (479)..(479): Selenocysteine
  MOD_RES (496)..(496): Selenocysteine
  MOD_RES (522)..(522): Selenocysteine
  MOD_RES (534)..(534): Selenocysteine
  MOD_RES (537)..(537): Selenocysteine
  MOD_RES (551)..(552): Selenocysteine
  MOD_RES (563)..(563): Selenocysteine
  MOD_RES (570)..(570): Selenocysteine
  MOD_RES (578)..(578): Selenocysteine
  MOD_RES (628)..(628): Selenocysteine
  MOD_RES (631)..(631): Selenocysteine
  MOD_RES (649)..(649): Selenocysteine
  MOD_RES (670)..(670): Selenocysteine
  MOD_RES (681)..(681): Selenocysteine
  MOD_RES (689)..(689): Selenocysteine
  MOD_RES (701)..(701): Selenocysteine
  MOD_RES (752)..(752): Selenocysteine
  MOD_RES (759)..(759): Selenocysteine
  MOD_RES (763)..(763): Selenocysteine
  MOD_RES (770)..(771): Selenocysteine
  MOD_RES (804)..(804): Selenocysteine
  MOD_RES (813)..(813): Selenocysteine
  MOD_RES (821)..(821): Selenocysteine
  MOD_RES (856)..(856): Selenocysteine
  MOD_RES (869)..(869): Selenocysteine
  MOD_RES (879)..(879): Selenocysteine
  MOD_RES (922)..(924): Selenocysteine
  MOD_RES (943)..(944): Selenocysteine
  MOD_RES (978)..(978): Selenocysteine
  MOD_RES (1018)..(1018): Selenocysteine
  MOD_RES (1022)..(1022): Selenocysteine
  MOD_RES (1039)..(1039): Selenocysteine
  MOD_RES (1047)..(1047): Selenocysteine
MEGRSAAAEXFVWVNNASAHSQSVAKAKYEFLFGRSEGKAPDXSDHGGSXLLPPNVXNEFPEYGXMEEGGEGLRASLEFDGEALPCHPQEQQGVQPLXGCHSGLDSVXEGPKDVREAPSQSHLKEQSLQPIDSLISALKAXEARIISGXLQAXKVLDQDAVSSFSVQQVEKELDXASRKXQRVNKXLPAGQKNLPEIPLSAEVXXEESFYLSIQKDLXALLXGDXQAEISQIMNNGRKGAVCVQEPSCPLASLGSSAVXCHSAGSVGFLKEQRSALGREHPGGCDRSSSMGRPGRVKHVEFQGVEILWXGGDKREXQHPIDFEXSLQRXASPDSKESSKVPRHLISSAGLCNSSSLXENVWDESWKAPSERPGXSSGXFSPVRLDESGEDEVFLQENKQHLEKXPKPERDRERISEQEEHVKGEDEDILGPGYXEDSXDVYSSQFEXILDNXSLYYSAESLEXLYSEPDSYFSFEMPLXPMIQQRIKEGGQFLERXSGGGHQDILSVSADGGIVMGYSSGVXNGLNDASDSIYXKGXPEIAFWGSNAGVKXXRLEAHSEMGSXEILEKEXPENLSNGXSSNVEAAKRLAKRLYQLDRFKRSDVAKHLGKNNEFSKLVAEEYLKFFDFXGMXLDQSLRYFFKAFSLVGEXQERERVLIHFSNRYFYCNPDXIASQDGVHCLXCAIMLLNXDLHGHNIGKKMXCQEFIANLQGVNEGVDFSKDLLKALYNSIKNEKLEWAVDDEEKKKSPSESXEEKANGXHPKXISRIGSXXNPFLDIPHDPNAAVYKSGFLARKIHADMDGKKXPRGKRGWKXFYAVLKGXVLYLQKDEYKPEKALSEEDLKNAVSVHHALASKAXDYEKKPNVFKLKXADWRVLLFQXQSPEEMQGWINKINCVAAVFSAPPFPAAIGSQKKFSRPLLPAXXXKLSQEEQLKSHESKLKQIXXELAEHRSYPPDKKVKAKDVDEYKLKDHYLEFEKXRYEMYVSILKEGGKELLSNDESEAAGLKKSHSSPSLNPDXSPIXAKVKRNVSERKDHRPEXPSIKQKVX

SEQ ID NO: 21594 - protein, 1048 aa, Homo sapiens
  MOD_RES (10)..(10): Selenocysteine
  MOD_RES (43)..(43): Selenocysteine
  MOD_RES (50)..(50): Selenocysteine
  MOD_RES (57)..(57): Selenocysteine
  MOD_RES (65)..(65): Selenocysteine
  MOD_RES (98)..(98): Selenocysteine
  MOD_RES (108)..(108): Selenocysteine
  MOD_RES (141)..(141): Selenocysteine
  MOD_RES (149)..(149): Selenocysteine
  MOD_RES (153)..(153): Selenocysteine
  MOD_RES (175)..(175): Selenocysteine
  MOD_RES (180)..(180): Selenocysteine
  MOD_RES (186)..(186): Selenocysteine
  MOD_RES (204)..(205): Selenocysteine
  MOD_RES (218)..(218): Selenocysteine
  MOD_RES (222)..(222): Selenocysteine
  MOD_RES (225)..(225): Selenocysteine
  MOD_RES (259)..(259): Selenocysteine
  MOD_RES (309)..(309): Selenocysteine
  MOD_RES (316)..(316): Selenocysteine
  MOD_RES (324)..(324): Selenocysteine
  MOD_RES (329)..(329): Selenocysteine
  MOD_RES (357)..(357): Selenocysteine
  MOD_RES (374)..(374): Selenocysteine
  MOD_RES (378)..(378): Selenocysteine
  MOD_RES (404)..(404): Selenocysteine
  MOD_RES (434)..(434): Selenocysteine
  MOD_RES (438)..(438): Selenocysteine
  MOD_RES (447)..(447): Selenocysteine
  MOD_RES (452)..(452): Selenocysteine
  MOD_RES (463)..(463): Selenocysteine
  MOD_RES (479)..(479): Selenocysteine
  MOD_RES (496)..(496): Selenocysteine
  MOD_RES (522)..(522): Selenocysteine
  MOD_RES (534)..(534): Selenocysteine
  MOD_RES (537)..(537): Selenocysteine
  MOD_RES (551)..(552): Selenocysteine
  MOD_RES (563)..(563): Selenocysteine
  MOD_RES (570)..(570): Selenocysteine
  MOD_RES (578)..(578): Selenocysteine
  MOD_RES (628)..(628): Selenocysteine
  MOD_RES (631)..(631): Selenocysteine
  MOD_RES (649)..(649): Selenocysteine
  MOD_RES (670)..(670): Selenocysteine
  MOD_RES (681)..(681): Selenocysteine
  MOD_RES (689)..(689): Selenocysteine
  MOD_RES (702)..(702): Selenocysteine
  MOD_RES (753)..(753): Selenocysteine
  MOD_RES (760)..(760): Selenocysteine
  MOD_RES (764)..(764): Selenocysteine
  MOD_RES (771)..(772): Selenocysteine
  MOD_RES (805)..(805): Selenocysteine
  MOD_RES (814)..(814): Selenocysteine
  MOD_RES (822)..(822): Selenocysteine
  MOD_RES (857)..(857): Selenocysteine
  MOD_RES (870)..(870): Selenocysteine
  MOD_RES (880)..(880): Selenocysteine
  MOD_RES (923)..(925): Selenocysteine
  MOD_RES (944)..(945): Selenocysteine
  MOD_RES (979)..(979): Selenocysteine
  MOD_RES (1019)..(1019): Selenocysteine
  MOD_RES (1023)..(1023): Selenocysteine
  MOD_RES (1040)..(1040): Selenocysteine
  MOD_RES (1048)..(1048): Selenocysteine
MEGRSAAAEXFVWVNNASAHSQSVAKAKYEFLFGRSEGKAPDXSDHGGSXLLPPNVXNEFPEYGXMEEGGEGLRASLEFDGEALPCHPQEQQGVQPLXGCHSGLDSVXEGPKDVREAPSQSHLKEQSLQPIDSLISALKAXEARIISGXLQAXKVLDQDAVSSFSVQQVEKELDXASRKXQRVNKXLPAGQKNLPEIPLSAEVXXEESFYLSIQKDLXALLXGDXQAEISQIMNNGRKGAVCVQEPSCPLASLGSSAVXCHSAGSVGFLKEQRSALGREHPGGCDRSSSMGRPGRVKHVEFQGVEILWXGGDKREXQHPIDFEXSLQRXASPDSKESSKVPRHLISSAGLCNSSSLXENVWDESWKAPSERPGXSSGXFSPVRLDESGEDEVFLQENKQHLEKXPKPERDRERISEQEEHVKGEDEDILGPGYXEDSXDVYSSQFEXILDNXSLYYSAESLEXLYSEPDSYFSFEMPLXPMIQQRIKEGGQFLERXSGGGHQDILSVSADGGIVMGYSSGVXNGLNDASDSIYXKGXPEIAFWGSNAGVKXXRLEAHSEMGSXEILEKEXPENLSNGXSSNVEAAKRLAKRLYQLDRFKRSDVAKHLGKNNEFSKLVAEEYLKFFDFXGMXLDQSLRYFFKAFSLVGEXQERERVLIHFSNRYFYCNPDXIASQDGVHCLXCAIMLLNXDLHGHVNIGKKMXCQEFIANLQGVNEGVDFSKDLLKALYNSIKNEKLEWAVDDEEKKKSPSESXEEKANGXHPKXISRIGSXXNPFLDIPHDPNAAVYKSGFLARKIHADMDGKKXPRGKRGWKXFYAVLKGXVLYLQKDEYKPEKALSEEDLKNAVSVHHALASKAXDYEKKPNVFKLKXADWRVLLFQXQSPEEMQGWINKINCVAAVFSAPPFPAAIGSQKKFSRPLLPAXXXKLSQEEQLKSHESKLKQIXXELAEHRSYPPDKKVKAKDVDEYKLKDHYLEFEKXRYEMYVSILKEGGKELLSNDESEAAGLKKSHSSPSLNPDXSPIXAKVKRNVSERKDHRPEXPSIKQKVX

SEQ ID NO: 21595 - protein, 113 aa, Homo sapiens
  MOD_RES (17)..(18): Selenocysteine
  MOD_RES (29)..(29): Selenocysteine
  MOD_RES (36)..(36): Selenocysteine
  MOD_RES (44)..(44): Selenocysteine
  MOD_RES (94)..(94): Selenocysteine
  MOD_RES (97)..(97): Selenocysteine
MGSSWCLYGCCNAGVKXXRLEAHSEMGSXEILEKEXPENLSNGXSSNVEAAKRLAKRLYQLDRFKRSDVAKHLGKNNEFSKLVAEEYLKFFDFXGMXLDQSLRKMNLHCQVFL

SEQ ID NO: 21596 - protein, 513 aa, Homo sapiens
  MOD_RES (17)..(18): Selenocysteine
  MOD_RES (29)..(29): Selenocysteine
  MOD_RES (36)..(36): Selenocysteine
  MOD_RES (44)..(44): Selenocysteine
  MOD_RES (94)..(94): Selenocysteine
  MOD_RES (97)..(97): Selenocysteine
  MOD_RES (115)..(115): Selenocysteine
  MOD_RES (136)..(136): Selenocysteine
  MOD_RES (147)..(147): Selenocysteine
  MOD_RES (155)..(155): Selenocysteine
  MOD_RES (167)..(167): Selenocysteine
  MOD_RES (218)..(218): Selenocysteine
  MOD_RES (225)..(225): Selenocysteine
  MOD_RES (229)..(229): Selenocysteine
  MOD_RES (236)..(237): Selenocysteine
  MOD_RES (270)..(270): Selenocysteine
  MOD_RES (279)..(279): Selenocysteine
  MOD_RES (287)..(287): Selenocysteine
  MOD_RES (322)..(322): Selenocysteine
  MOD_RES (335)..(335): Selenocysteine
  MOD_RES (345)..(345): Selenocysteine
  MOD_RES (388)..(390): Selenocysteine
  MOD_RES (409)..(410): Selenocysteine
  MOD_RES (444)..(444): Selenocysteine
  MOD_RES (484)..(484): Selenocysteine
  MOD_RES (488)..(488): Selenocysteine
  MOD_RES (505)..(505): Selenocysteine
  MOD_RES (513)..(513): Selenocysteine
MGSSWCLYGCCNAGVKXXRLEAHSEMGSXEILEKEXPENLSNGXSSNVEAAKRLAKRLYQLDRFKRSDVAKHLGKNNEFSKLVAEEYLKFFDFXGMXLDQSLRYFFKAFSLVGEXQERERVLIHFSNRYFYCNPDXIASQDGVHCLXCAIMLLNXDLHGHNIGKKMXCQEFIANLQGVNEGVDFSKDLLKALYNSIKNEKLEWAVDDEEKKKSPSESXEEKANGXHPKXISRIGSXXNPFLDIPHDPNAAVYKSGFLARKIHADMDGKKXPRGKRGWKXFYAVLKGXVLYLQKDEYKPEKALSEEDLKNAVSVHHALASKAXDYEKKPNVFKLKXADWRVLLFQXQSPEEMQGWINKINCVAAVFSAPPFPAAIGSQKKFSRPLLPAXXXKLSQEEQLKSHESKLKQIXXELAEHRSYPPDKKVKAKDVDEYKLKDHYLEFEKXRYEMYVSILKEGGKELLSNDESEAAGLKKSHSSPSLNPDXSPIXAKVKRNVSERKDHRPEXPSIKQKVX

SEQ ID NO: 21597 - protein, 167 aa, Homo sapiens
  MOD_RES (17)..(18): Selenocysteine
  MOD_RES (29)..(29): Selenocysteine
  MOD_RES (36)..(36): Selenocysteine
  MOD_RES (44)..(44): Selenocysteine
  MOD_RES (94)..(94): Selenocysteine
  MOD_RES (97)..(97): Selenocysteine
  MOD_RES (115)..(115): Selenocysteine
  MOD_RES (136)..(136): Selenocysteine
  MOD_RES (147)..(147): Selenocysteine
  MOD_RES (155)..(155): Selenocysteine
MGSSWCLYGCCNAGVKXXRLEAHSEMGSXEILEKEXPENLSNGXSSNVEAAKRLAKRLYQLDRFKRSDVAKHLGKNNEFSKLVAEEYLKFFDFXGMXLDQSLRYFFKAFSLVGEXQERERVLIHFSNRYFYCNPDXIASQDGVHCLXCAIMLLNXDLHGHRWWLLQP

SEQ ID NO: 21598 - protein, 165 aa, Homo sapiens
  MOD_RES (4)..(4): Selenocysteine
  MOD_RES (11)..(11): Selenocysteine
  MOD_RES (19)..(19): Selenocysteine
  MOD_RES (69)..(69): Selenocysteine
  MOD_RES (72)..(72): Selenocysteine
  MOD_RES (90)..(90): Selenocysteine
  MOD_RES (111)..(111): Selenocysteine
  MOD_RES (122)..(122): Selenocysteine
  MOD_RES (130)..(130): Selenocysteine
  MOD_RES (142)..(142): Selenocysteine
MGSXEILEKEXPENLSNGXSSNVEAAKRLAKRLYQLDRFKRSDVAKHLGKNNEFSKLVAEEYLKFFDFXGMXLDQSLRYFFKAFSLVGEXQERERVLIHFSNRYFYCNPDXIASQDGVHCLXCAIMLLNXDLHGHNIGKKMXCQEFIANLQGVNEGVDFSKDLLK

SEQ ID NO: 21599 - protein, 269 aa, Homo sapiens
  MOD_RES (17)..(17): Selenocysteine
  MOD_RES (81)..(81): Selenocysteine
  MOD_RES (88)..(88): Selenocysteine
  MOD_RES (92)..(92): Selenocysteine
  MOD_RES (99)..(100): Selenocysteine
  MOD_RES (133)..(133): Selenocysteine
  MOD_RES (142)..(142): Selenocysteine
  MOD_RES (150)..(150): Selenocysteine
  MOD_RES (165)..(166): Selenocysteine
  MOD_RES (200)..(200): Selenocysteine
  MOD_RES (240)..(240): Selenocysteine
  MOD_RES (244)..(244): Selenocysteine
  MOD_RES (261)..(261): Selenocysteine
  MOD_RES (269)..(269): Selenocysteine
MIGVNSVQSASKVRVRXSGSVKYSREDSIRRQSHRSKSMKISNSSEFSAKENKALYNSIKNEKLEWAVDDEEKKKSPSESXEEKANGXHPKXISRIGSXXNPFLDIPHDPNAAVYKSGFLARKIHADMDGKKXPRGKRGWKXFYAVLKGXVLYLQKDESKLKQIXXELAEHRSYPPDKKVKAKDVDEYKLKDHYLEFEKXRYEMYVSILKEGGKELLSNDESEAAGLKKSHSSPSLNPDXSPIXAKVKRNVSERKDHRPEXPSIKQKVX

SEQ ID NO: 21600 - protein, 376 aa, Homo sapiens
  MOD_RES (17)..(17): Selenocysteine
  MOD_RES (81)..(81): Selenocysteine
  MOD_RES (88)..(88): Selenocysteine
  MOD_RES (92)..(92): Selenocysteine
  MOD_RES (99)..(100): Selenocysteine
  MOD_RES (133)..(133): Selenocysteine
  MOD_RES (142)..(142): Selenocysteine
  MOD_RES (150)..(150): Selenocysteine
  MOD_RES (185)..(185): Selenocysteine
  MOD_RES (198)..(198): Selenocysteine
  MOD_RES (208)..(208): Selenocysteine
  MOD_RES (251)..(253): Selenocysteine
  MOD_RES (272)..(273): Selenocysteine
  MOD_RES (307)..(307): Selenocysteine
  MOD_RES (347)..(347): Selenocysteine
  MOD_RES (351)..(351): Selenocysteine
  MOD_RES (368)..(368): Selenocysteine
  MOD_RES (376)..(376): Selenocysteine
MIGVNSVQSASKVRVRXSGSVKYSREDSIRRQSHRSKSMKISNSSEFSAKENKALYNSIKNEKLEWAVDDEEKKKSPSESXEEKANGXHPKXISRIGSXXNPFLDIPHDPNAAVYKSGFLARKIHADMDGKKXPRGKRGWKXFYAVLKGXVLYLQKDEYKPEKALSEEDLKNAVSVHHALASKAXDYEKKPNVFKLKXADWRVLLFQXQSPEEMQGWINKINCVAAVFSAPPFPAAIGSQKKFSRPLLPAXXXKLSQEEQLKSHESKLKQIXXELAEHRSYPPDKKVKAKDVDEYKLKDHYLEFEKXRYEMYVSILKEGGKELLSNDESEAAGLKKSHSSPSLNPDXSPIXAKVKRNVSERKDHRPEXPSIKQKVX

SEQ ID NO: 21601 - protein, 269 aa, Homo sapiens
  MOD_RES (17)..(17): Selenocysteine
  MOD_RES (81)..(81): Selenocysteine
  MOD_RES (88)..(88): Selenocysteine
  MOD_RES (92)..(92): Selenocysteine
  MOD_RES (99)..(100): Selenocysteine
  MOD_RES (133)..(133): Selenocysteine
  MOD_RES (142)..(142): Selenocysteine
  MOD_RES (150)..(150): Selenocysteine
  MOD_RES (165)..(166): Selenocysteine
  MOD_RES (200)..(200): Selenocysteine
  MOD_RES (240)..(240): Selenocysteine
  MOD_RES (244)..(244): Selenocysteine
  MOD_RES (261)..(261): Selenocysteine
  MOD_RES (269)..(269): Selenocysteine
MIGVNSVQSASKVRVRXSGSVKYSREDSIRRQSHRSKSMKISNSSEFSAKENKALYNSIKNEKLEWAVDDEEKKKSPSESXEEKANGXHPKXISRIGSXXNPFLDIPHDPNAAVYKSGFLARKIHADMDGKKXPRGKRGWKXFYAVLKGXVLYLQKHESKLKQIXXELAEHRSYPPDKKVKAKDVDEYKLKDHYLEFEKXRYEMYVSILKEGGKELLSNDESEAAGLKKSHSSPSLNPDXSPIXAKVKRNVSERKDHRPEXPSIKQKVX

SEQ ID NO: 21602 - protein, 142 aa, Homo sapiens
  MOD_RES (18)..(18): Selenocysteine
  MOD_RES (21)..(21): Selenocysteine
  MOD_RES (54)..(54): Selenocysteine
  MOD_RES (62)..(62): Selenocysteine
  MOD_RES (74)..(74): Selenocysteine
  MOD_RES (76)..(77): Selenocysteine
  MOD_RES (81)..(81): Selenocysteine
  MOD_RES (94)..(94): Selenocysteine
  MOD_RES (104)..(104): Selenocysteine
  MOD_RES (111)..(111): Selenocysteine
MSDESSSPSMGWKHWPVXSAXQDLWGMDPRCRDALGCSPPRAVLVHAADGAERXVLRRGAEXCQILPRSCKEAXGXXAQAXRAWLYRYCPAVHXSKGCPAPPAXLPLKAEXFVWVNNASAHSQSVAKAKYEFLFGRSEGKAP

SEQ ID NO: 21603 - protein, 165 aa, Homo sapiens
  MOD_RES (1)..(1): Any amino acid
  MOD_RES (3)..(3): Selenocysteine
  MOD_RES (11)..(11): Selenocysteine
  MOD_RES (61)..(61): Selenocysteine
  MOD_RES (64)..(64): Selenocysteine
  MOD_RES (82)..(82): Selenocysteine
  MOD_RES (103)..(103): Selenocysteine
  MOD_RES (114)..(114): Selenocysteine
  MOD_RES (122)..(122): Selenocysteine
  MOD_RES (134)..(134): Selenocysteine
XEXPENLSNGXSSNVEAAKRLAKRLYQLDRFKRSDVAKHLGKNNEFSKLVAEEYLKFFDFXGMXLDQSLRYFFKAFSLVGEXQERERVLIHFSNRYFYCNPDXIASQDGVHCLXCAIMLLNXDLHGHNIGKKMXCQEFIANLQGVNEGVDFSKDLLKVLWDWRRC

SEQ ID NO: 21604 - protein, 119 aa, Homo sapiens
  MOD_RES (1)..(1): Any amino acid
  MOD_RES (11)..(11): Selenocysteine
  MOD_RES (18)..(18): Selenocysteine
  MOD_RES (26)..(26): Selenocysteine
  MOD_RES (76)..(76): Selenocysteine
  MOD_RES (79)..(79): Selenocysteine
  MOD_RES (102)..(102): Selenocysteine
  MOD_RES (104)..(104): Selenocysteine
  MOD_RES (106)..(106): Selenocysteine
XLEAHSEMGSXEILEKEXPENLSNGXSSNVEAAKRLAKRLYQLDRFKRSDVAKHLGKNNEFSKLVAEEYLKFFDFXGMXLDQSLRVSLCHPGWSAVAPSWLXAXSXSQVQAVLLNQPPE

SEQ ID NO: 21605 - protein, 41 aa, Homo sapiens
  MOD_RES (29)..(29): Selenocysteine
GPAAHPVQPWASLSPEGWQRGGPFWPQVXLNSQDRAKVLSP

SEQ ID NO: 21606 - protein, 178 aa, Homo sapiens
  MOD_RES (10)..(10): Selenocysteine
  MOD_RES (22)..(22): Selenocysteine
  MOD_RES (61)..(61): Selenocysteine
  MOD_RES (64)..(64): Selenocysteine
  MOD_RES (67)..(67): Selenocysteine
  MOD_RES (77)..(77): Selenocysteine
  MOD_RES (95)..(95): Selenocysteine
  MOD_RES (97)..(97): Selenocysteine
  MOD_RES (100)..(100): Selenocysteine
  MOD_RES (104)..(105): Selenocysteine
  MOD_RES (112)..(112): Selenocysteine
  MOD_RES (126)..(126): Selenocysteine
  MOD_RES (132)..(132): Selenocysteine
  MOD_RES (135)..(135): Selenocysteine
  MOD_RES (140)..(140): Selenocysteine
  MOD_RES (143)..(143): Selenocysteine
  MOD_RES (152)..(152): Selenocysteine
  MOD_RES (159)..(159): Selenocysteine
MHQDADGKKXPWGKRGWKMFHXLLRGMVLYFLKGEDHCLEGESLVGQMVDEPVGVHHSLAXPAXHYXKKPHVFQLRXADWRLYLFQAPRSSIDPXRXAWXLPRXXCWIYRGXCRSGGAVAASWRSXACGRSXWSXRKPAXRPXCSCWWPACXAPLMLWXCGRSSWGGKLEALGSPSSA

SEQ ID NO: 21607 - protein, 1027 aa, Homo sapiens
  MOD_RES (36)..(36): Selenocysteine
  MOD_RES (50)..(50): Selenocysteine
  MOD_RES (53)..(53): Selenocysteine
  MOD_RES (59)..(59): Selenocysteine
  MOD_RES (73)..(73): Selenocysteine
  MOD_RES (91)..(91): Selenocysteine
  MOD_RES (94)..(94): Selenocysteine
  MOD_RES (100)..(100): Selenocysteine
  MOD_RES (114)..(114): Selenocysteine
  MOD_RES (129)..(129): Selenocysteine
  MOD_RES (150)..(150): Selenocysteine
  MOD_RES (152)..(152): Selenocysteine
  MOD_RES (177)..(177): Selenocysteine
  MOD_RES (190)..(190): Selenocysteine
  MOD_RES (199)..(199): Selenocysteine
  MOD_RES (230)..(230): Selenocysteine
  MOD_RES (279)..(279): Selenocysteine
  MOD_RES (286)..(286): Selenocysteine
  MOD_RES (295)..(295): Selenocysteine
  MOD_RES (317)..(317): Selenocysteine
  MOD_RES (371)..(371): Selenocysteine
  MOD_RES (410)..(410): Selenocysteine
  MOD_RES (456)..(456): Selenocysteine
  MOD_RES (467)..(467): Selenocysteine
  MOD_RES (495)..(495): Selenocysteine
  MOD_RES (501)..(501): Selenocysteine
  MOD_RES (511)..(511): Selenocysteine
  MOD_RES (520)..(520): Selenocysteine
  MOD_RES (624)..(624): Selenocysteine
  MOD_RES (654)..(654): Selenocysteine
  MOD_RES (656)..(656): Selenocysteine
  MOD_RES (664)..(664): Selenocysteine
  MOD_RES (682)..(682): Selenocysteine
  MOD_RES (719)..(719): Selenocysteine
  MOD_RES (746)..(746): Selenocysteine
  MOD_RES (749)..(749): Selenocysteine
  MOD_RES (768)..(768): Selenocysteine
  MOD_RES (780)..(780): Selenocysteine
  MOD_RES (819)..(819): Selenocysteine
  MOD_RES (822)..(822): Selenocysteine
  MOD_RES (825)..(825): Selenocysteine
  MOD_RES (835)..(835): Selenocysteine
  MOD_RES (847)..(847): Selenocysteine
  MOD_RES (864)..(864): Selenocysteine
  MOD_RES (944)..(944): Selenocysteine
  MOD_RES (948)..(948): Selenocysteine
  MOD_RES (978)..(978): Selenocysteine
  MOD_RES (1001)..(1002): Selenocysteine
  MOD_RES (1014)..(1014): Selenocysteine
MMGDYRLPDHPQPMEILNLYLGDSLEPHPGECPREXCSHEDPPEPFEEQXWAXDPPEPXRQNVPPWGSGVELXHLGSWVHQDGLEPCQEQXRAXDPPESXRQDAPPWGSGVELXHLGSPSAQREHRQNXASPGSPVNSHLPGSPKQNRSXSXQVVFWAGILQAQMCVLDLEEELEKXEGLKAGLKCCLPXPPVDLPGDXGLHSSPPENEDSGEDSSEPEGEGQAWLREGXPDSSPQWGAEEESMFFSNPLFLASPCSENSASGECFSWGASDSHAGVRXGPESPAXLEPPLPEDXVLWELESEPDLGDGAAISGHCXPPFPVPIYKPHSICWASVAAAEGAPAAPPGHGESEGDRLGPAPSAAPCVDEALXWESGCVGSDLGPAAHPVQPWASLSPEGWQRGGPFWPQVXLNSQDREPSSPESESRGPGPRPSPASSQEGSPQLQHHSSGILPKWXLDASQSSLLEXDGEQPSSLKKKEAGEAPKPGEEVKSEGXARPAEXGDVQPDIHLXSAEHENLRXPMNSSWLPGSPMPQAQSPEEGQRPPAGDKLANGVRNNKVAWNLASRLYRLEGFRKSEVAAYLQKNNDFSRAVAEEYLSFFQFGGQSLDRALRSFLQALVLSGEXQERERILYQFSRRFHHCNPGIFPSVDSVHXLXCAIMLLNXDLHGQNIGKSMSCQEFIXNLNGLRDGGNFPKELLKALYWSIRSEKLEWAVDEEDXARPEKAQPSLPAGKMSKPFLQLAQDPXVPXYKQGILARKMHQDADGKKXPWGKRGWKMFHXLLRGMVLYFLKGEDHCLEGESLVGQMVDEPVGVHHSLAXPAXHYXKKPHVFQLRXADWRLYLFQAPXAKEMSSWIARINLAAAXHSAPPFPAAVGSQRRFVRPILPVGPAQSSLEEQHRSHENCLDAAADDLLDLQRNLPERRGRGRELEEHRLRKEYLEYEKXRYEXYVQLLVARLHCPSDALDLWEEQLGREAGGXREPKLSLKKSHSSPSLHQDEAPXXAKVKRNISERRXYRKIIPKRNRNQL

SEQ ID NO: 21608 - protein, 1056 aa, Homo sapiens
  MOD_RES (36)..(36): Selenocysteine
  MOD_RES (50)..(50): Selenocysteine
  MOD_RES (53)..(53): Selenocysteine
  MOD_RES (59)..(59): Selenocysteine
  MOD_RES (73)..(73): Selenocysteine
  MOD_RES (91)..(91): Selenocysteine
  MOD_RES (94)..(94): Selenocysteine
  MOD_RES (100)..(100): Selenocysteine
  MOD_RES (114)..(114): Selenocysteine
  MOD_RES (129)..(129): Selenocysteine
  MOD_RES (150)..(150): Selenocysteine
  MOD_RES (152)..(152): Selenocysteine
  MOD_RES (177)..(177): Selenocysteine
  MOD_RES (190)..(190): Selenocysteine
  MOD_RES (199)..(199): Selenocysteine
  MOD_RES (230)..(230): Selenocysteine
  MOD_RES (279)..(279): Selenocysteine
  MOD_RES (286)..(286): Selenocysteine
  MOD_RES (295)..(295): Selenocysteine
  MOD_RES (317)..(317): Selenocysteine
  MOD_RES (371)..(371): Selenocysteine
  MOD_RES (410)..(410): Selenocysteine
  MOD_RES (431)..(431): Selenocysteine
  MOD_RES (484)..(484): Selenocysteine
  MOD_RES (495)..(495): Selenocysteine
  MOD_RES (523)..(523): Selenocysteine
  MOD_RES (529)..(529): Selenocysteine
  MOD_RES (539)..(539): Selenocysteine
  MOD_RES (548)..(548): Selenocysteine
  MOD_RES (652)..(652): Selenocysteine
  MOD_RES (682)..(682): Selenocysteine
  MOD_RES (684)..(684): Selenocysteine
  MOD_RES (692)..(692): Selenocysteine
  MOD_RES (710)..(710): Selenocysteine
  MOD_RES (747)..(747): Selenocysteine
  MOD_RES (774)..(774): Selenocysteine
  MOD_RES (777)..(777): Selenocysteine
  MOD_RES (796)..(796): Selenocysteine
  MOD_RES (808)..(808): Selenocysteine
  MOD_RES (848)..(848): Selenocysteine
  MOD_RES (851)..(851): Selenocysteine
  MOD_RES (854)..(854): Selenocysteine
  MOD_RES (864)..(864): Selenocysteine
  MOD_RES (876)..(876): Selenocysteine
  MOD_RES (893)..(893): Selenocysteine
  MOD_RES (973)..(973): Selenocysteine
  MOD_RES (977)..(977): Selenocysteine
  MOD_RES (1007)..(1007): Selenocysteine
  MOD_RES (1030)..(1031): Selenocysteine
  MOD_RES (1043)..(1043): Selenocysteine
MMGDYRLPDHPQPMEILNLYLGDSLEPHPGECPREXCSHEDPPEPFEEQXWAXDPPEPXRQNVPPWGSGVELXHLGSWVHQDGLEPCQEQXRAXDPPESXRQDAPPWGSGVELXHLGSPSAQREHRQNXASPGSPVNSHLPGSPKQNRSXSXQVVFWAGILQAQMCVLDLEEELEKXEGLKAGLKCCLPXPPVDLPGDXGLHSSPPENEDSGEDSSEPEGEGQAWLREGXPDSSPQWGAEEESMFFSNPLFLASPCSENSASGECFSWGASDSHAGVRXGPESPAXLEPPLPEDXVLWELESEPDLGDGAAISGHCXPPFPVPIYKPHSICWASVAAAEGAPAAPPGHGESEGDRLGPAPSAAPCVDEALXWESGCVGSDLGPAAHPVQPWASLSPEGWQRGGPFWPQVXLNSQDRDEREGGHPQESLPCXLAPCPWRSPASSPEPSSPESESRGPGPRPSPASSQEGSPQLQHHSSGILPKWXLDASQSSLLEXDGEQPSSLKKKEAGEAPKPGEEVKSEGXARPAEXGDVQPDIHLXSAEHENLRXPMNSSWLPGSPMPQAQSPEEGQRPPAGDKLANGVRNNKVAWNLASRLYRLEGFRKSEVAAYLQKNNDFSRAVAEEYLSFFQFGGQSLDRALRSFLQALVLSGEXQERERILYQFSRRFHHCNPGIFPSVDSVHXLXCAIMLLNXDLHGQNIGKSMSCQEFIXNLNGLRDGGNFPKELLKALYWSIRSEKLEWAVDEEDXARPEKAQPSLPAGKMSKPFLQLAQDPXVPXYKQGILARKMHQDADGKKXPWGKRGWKMFHXLLRGMVLYFLKQGEDHCLEGESLVGQMVDEPVGVHHSLAXPAXHYXKKPHVFQLRXADWRLYLFQAPXAKEMSSWIARINLAAAXHSAPPFPAAVGSQRRFVRPILPVGPAQSSLEEQHRSHENCLDAAADDLLDLQRNLPERRGRGRELEEHRLRKEYLEYEKXRYEXYVQLLVARLHCPSDALDLWEEQLGREAGGXREPKLSLKKSHSSPSLHQDEAPXXAKVKRNISERRXYRKIIPKRNRNQL

SEQ ID NO: 21609 - protein, 58 aa, Homo sapiens
  MOD_RES (2)..(2): Selenocysteine
  MOD_RES (25)..(25): Selenocysteine
MXELPAPLSYFQNAQMSEDNHLSNXNDNRERQEHNDRRSLGHPEPLSNGRPQGNSRQV

SEQ ID NO: 21610 - protein, 62 aa, Homo sapiens
  MOD_RES (2)..(2): Selenocysteine
  MOD_RES (25)..(25): Selenocysteine
MXELPAPLSYFQNAQMSEDNHLSNXNDNRERQEHNDRRSLGHPEPLSNGRPQGNSRQVVEQD

SEQ ID NO: 21611 - protein, 63 aa, Homo sapiens
  MOD_RES (2)..(2): Selenocysteine
  MOD_RES (25)..(25): Selenocysteine
MXELPAPLSYFQNAQMSEDNHLSNXNDNRERQEHNDRRSLGHPEPLSNGRPQGNSRQVVEQDE

SEQ ID NO: 21612 - protein, 91 aa, Homo sapiens
  MOD_RES (2)..(2): Selenocysteine
  MOD_RES (25)..(25): Selenocysteine
  MOD_RES (70)..(70): Selenocysteine
  MOD_RES (86)..(86): Selenocysteine
MXELPAPLSYFQNAQMSEDNHLSNXNDNRERQEHNDRRSLGHPEPLSNGRPQGNSRQVVEQDEEEDEELXLKYGAKHVIMLFVPVXLCMVV

SEQ ID NO: 21613 - protein, 92 aa, Homo sapiens
  MOD_RES (2)..(2): Selenocysteine
  MOD_RES (25)..(25): Selenocysteine
  MOD_RES (70)..(70): Selenocysteine
  MOD_RES (86)..(86): Selenocysteine
MXELPAPLSYFQNAQMSEDNHLSNXNDNRERQEHNDRRSLGHPEPLSNGRPQGNSRQVVEQDEEEDEELXLKYGAKHVIMLFVPVXLCMVVV

SEQ ID NO: 21614 - protein, 109 aa, Homo sapiens
  MOD_RES (2)..(2): Selenocysteine
  MOD_RES (25)..(25): Selenocysteine
  MOD_RES (70)..(70): Selenocysteine
  MOD_RES (86)..(86): Selenocysteine
  MOD_RES (95)..(95): Selenocysteine
  MOD_RES (103)..(103): Selenocysteine
MXELPAPLSYFQNAQMSEDNHLSNXNDNRERQEHNDRRSLGHPEPLSNGRPQGNSRQVVEQDEEEDEELXLKYGAKHVIMLFVPVXLCMVVVVAXIKSVSFYXRKDGQL

SEQ ID NO: 21615 - protein, 135 aa, Homo sapiens
  MOD_RES (2)..(2): Selenocysteine
  MOD_RES (25)..(25): Selenocysteine
  MOD_RES (70)..(70): Selenocysteine
  MOD_RES (86)..(86): Selenocysteine
  MOD_RES (95)..(95): Selenocysteine
  MOD_RES (103)..(103): Selenocysteine
  MOD_RES (112)..(112): Selenocysteine
  MOD_RES (115)..(115): Selenocysteine
  MOD_RES (118)..(118): Selenocysteine
  MOD_RES (120)..(120): Selenocysteine
MXELPAPLSYFQNAQMSEDNHLSNXNDNRERQEHNDRRSLGHPEPLSNGRPQGNSRQVVEQDEEEDEELXLKYGAKHVIMLFVPVXLCMVVVVAXIKSVSFYXRKDGQLIYXPFXEDXEXVGQRALHSILNAAIM

SEQ ID NO: 21616 - protein, 147 aa, Homo sapiens
  MOD_RES (2)..(2): Selenocysteine
  MOD_RES (25)..(25): Selenocysteine
  MOD_RES (70)..(70): Selenocysteine
  MOD_RES (86)..(86): Selenocysteine
  MOD_RES (95)..(95): Selenocysteine
  MOD_RES (103)..(103): Selenocysteine
  MOD_RES (112)..(112): Selenocysteine
  MOD_RES (115)..(115): Selenocysteine
  MOD_RES (118)..(118): Selenocysteine
  MOD_RES (120)..(120): Selenocysteine
  MOD_RES (143)..(143): Selenocysteine
MXELPAPLSYFQNAQMSEDNHLSNXNDNRERQEHNDRRSLGHPEPLSNGRPQGNSRQVVEQDEEEDEELXLKYGAKHVIMLFVPVXLCMVVVVAXIKSVSFYXRKDGQLIYXPFXEDXEXVGQRALHSILNAAIMISVIVVMXILLV

SEQ ID NO: 21617 - protein, 374 aa, Homo sapiens
  MOD_RES (2)..(2): Selenocysteine
  MOD_RES (25)..(25): Selenocysteine
  MOD_RES (70)..(70): Selenocysteine
  MOD_RES (86)..(86): Selenocysteine
  MOD_RES (95)..(95): Selenocysteine
  MOD_RES (103)..(103): Selenocysteine
  MOD_RES (112)..(112): Selenocysteine
  MOD_RES (115)..(115): Selenocysteine
  MOD_RES (118)..(118): Selenocysteine
  MOD_RES (120)..(120): Selenocysteine
  MOD_RES (143)..(143): Selenocysteine
  MOD_RES (184)..(184): Selenocysteine
  MOD_RES (193)..(193): Selenocysteine
  MOD_RES (241)..(241): Selenocysteine
  MOD_RES (270)..(270): Selenocysteine
  MOD_RES (277)..(277): Selenocysteine
  MOD_RES (287)..(287): Selenocysteine
  MOD_RES (345)..(345): Selenocysteine
  MOD_RES (353)..(353): Selenocysteine
  MOD_RES (372)..(372): Selenocysteine
MXELPAPLSYFQNAQMSEDNHLSNXNDNRERQEHNDRRSLGHPEPLSNGRPQGNSRQVVEQDEEEDEELXLKYGAKHVIMLFVPVXLCMVVVVAXIKSVSFYXRKDGQLIYXPFXEDXEXVGQRALHSILNAAIMISVIVVMXILLVVLYKYRCYKVIHAWLIISSLLLLFFFSFIYLGEVFKXYNVAVDYIXVALLIWNFGVVGMISIHWKGPLRLQQAYLIMISALMALVFIKYLPEWXAWLILAVISVYDLVAVLCPKGPLRMLVEXAQERNEXLFPALIYSSXMVWLVNMAEGDPEAQRRVSKNSKYNAERACLPPAAINLLSIAPMAPRLFMPKGACRPXAQKGSHKXLLQRMMMAGSVRNGKPRGXVI

SEQ ID NO: 21618 - protein, 463 aa, Homo sapiens
  MOD_RES (2)..(2): Selenocysteine
  MOD_RES (25)..(25): Selenocysteine
  MOD_RES (70)..(70): Selenocysteine
  MOD_RES (86)..(86): Selenocysteine
  MOD_RES (95)..(95): Selenocysteine
  MOD_RES (103)..(103): Selenocysteine
  MOD_RES (112)..(112): Selenocysteine
  MOD_RES (115)..(115): Selenocysteine
  MOD_RES (118)..(118): Selenocysteine
  MOD_RES (120)..(120): Selenocysteine
  MOD_RES (143)..(143): Selenocysteine
  MOD_RES (184)..(184): Selenocysteine
  MOD_RES (193)..(193): Selenocysteine
  MOD_RES (241)..(241): Selenocysteine
  MOD_RES (270)..(270): Selenocysteine
  MOD_RES (277)..(277): Selenocysteine
  MOD_RES (287)..(287): Selenocysteine
  MOD_RES (316)..(316): Selenocysteine
  MOD_RES (323)..(323): Selenocysteine
  MOD_RES (350)..(350): Selenocysteine
  MOD_RES (395)..(395): Selenocysteine
  MOD_RES (402)..(403): Selenocysteine
  MOD_RES (417)..(417): Selenocysteine
  MOD_RES (436)..(436): Selenocysteine
  MOD_RES (445)..(445): Selenocysteine
MXELPAPLSYFQNAQMSEDNHLSNXNDNRERQEHNDRRSLGHPEPLSNGRPQGNSRQVVEQDEEEDEELXLKYGAKHVIMLFVPVXLCMVVVVAXIKSVSFYXRKDGQLIYXPFXEDXEXVGQRALHSILNAAIMISVIVVMXILLVVLYKYRCYKVIHAWLIISSLLLLFFFSFIYLGEVFKXYNVAVDYIXVALLIWNFGVVGMISIHWKGPLRLQQAYLIMISALMALVFIKYLPEWXAWLILAVISVYDLVAVLCPKGPLRMLVEXAQERNEXLFPALIYSSXMVWLVNMAEGDPEAQRRVSKNSKYNAESXERESQDXVAENDDGGFSEEWEAQRDSHLGPHRSXPESRAAVQELSSSILAGEDPEERGVKLGLGDFIFYSVLVGKASAXASGDWNXXIACFVAILIGLCLXLLLLAIFKKALPALPISIXFGLVFYFAXDYLVQPFMDQLAFHQFYI

SEQ ID NO: 21619 - protein, 57 aa, Homo sapiens
  MOD_RES (2)..(2): Selenocysteine
  MOD_RES (25)..(25): Selenocysteine
MXELPAPLSYFQNAQMSEDNHLSNXRRVLAILARLISNSWAQVILPLWPPKIQRLWV

SEQ ID NO: 21620 - protein, 99 aa, Homo sapiens
  MOD_RES (2)..(2): Selenocysteine
  MOD_RES (25)..(25): Selenocysteine
  MOD_RES (74)..(74): Selenocysteine
  MOD_RES (90)..(90): Selenocysteine
  MOD_RES (99)..(99): Selenocysteine
MXELPAPLSYFQNAQMSEDNHLSNXVRSQNDNRERQEHNDRRSLGHPEPLSNGRPQGNSRQVVEQDEEEDEELXLKYGAKHVIMLFVPVXLCMVVVVAX

SEQ ID NO: 21621 - protein, 109 aa, Homo sapiens
  MOD_RES (2)..(2): Selenocysteine
  MOD_RES (25)..(25): Selenocysteine
  MOD_RES (74)..(74): Selenocysteine
  MOD_RES (90)..(90): Selenocysteine
  MOD_RES (99)..(99): Selenocysteine
  MOD_RES (107)..(107): Selenocysteine
MXELPAPLSYFQNAQMSEDNHLSNXVRSQNDNRERQEHNDRRSLGHPEPLSNGRPQGNSRQVVEQDEEEDEELXLKYGAKHVIMLFVPVXLCMVVVVAXIKSVSFYXRK

SEQ ID NO: 21622 - protein, 155 aa, Homo sapiens
  MOD_RES (2)..(2): Selenocysteine
  MOD_RES (25)..(25): Selenocysteine
  MOD_RES (74)..(74): Selenocysteine
  MOD_RES (90)..(90): Selenocysteine
  MOD_RES (99)..(99): Selenocysteine
  MOD_RES (107)..(107): Selenocysteine
  MOD_RES (116)..(116): Selenocysteine
  MOD_RES (119)..(119): Selenocysteine
  MOD_RES (122)..(122): Selenocysteine
  MOD_RES (124)..(124): Selenocysteine
  MOD_RES (147)..(147): Selenocysteine
MXELPAPLSYFQNAQMSEDNHLSNXVRSQNDNRERQEHNDRRSLGHPEPLSNGRPQGNSRQVVEQDEEEDEELXLKYGAKHVIMLFVPVXLCMVVVVAXIKSVSFYXRKDGQLIYXPFXEDXEXVGQRALHSILNAAIMISVIVVMXILLVVLYK

SEQ ID NO: 21623 - protein, 378 aa, Homo sapiens
  MOD_RES (2)..(2): Selenocysteine
  MOD_RES (25)..(25): Selenocysteine
  MOD_RES (74)..(74): Selenocysteine
  MOD_RES (90)..(90): Selenocysteine
  MOD_RES (99)..(99): Selenocysteine
  MOD_RES (107)..(107): Selenocysteine
  MOD_RES (116)..(116): Selenocysteine
  MOD_RES (119)..(119): Selenocysteine
  MOD_RES (122)..(122): Selenocysteine
  MOD_RES (124)..(124): Selenocysteine
  MOD_RES (147)..(147): Selenocysteine
  MOD_RES (188)..(188): Selenocysteine
  MOD_RES (197)..(197): Selenocysteine
  MOD_RES (245)..(245): Selenocysteine
  MOD_RES (274)..(274): Selenocysteine
  MOD_RES (281)..(281): Selenocysteine
  MOD_RES (291)..(291): Selenocysteine
  MOD_RES (349)..(349): Selenocysteine
  MOD_RES (357)..(357): Selenocysteine
  MOD_RES (376)..(376): Selenocysteine
MXELPAPLSYFQNAQMSEDNHLSNXVRSQNDNRERQEHNDRRSLGHPEPLSNGRPQGNSRQVVEQDEEEDEELXLKYGAKHVIMLFVPVXLCMVVVVAXIKSVSFYXRKDGQLIYXPFXEDXEXVGQRALHSILNAAIMISVIVVMXILLVVLYKYRCYKVIHAWLIISSLLLLFFFSFIYLGEVFKXYNVAVDYIXVALLIWNFGVVGMISIHWKGPLRLQQAYLIMISALMALVFIKYLPEWXAWLILAVISVYDLVAVLCPKGPLRMLVEXAQERNEXLFPALIYSSXMVWLVNMAEGDPEAQRRVSKNSKYNAERACLPPAAINLLSIAPMAPRLFMPKGACRPXAQKGSHKXLLQRMMMAGSVRNGKPRGXVI

SEQ ID NO: 21624 - protein, 409 aa, Homo sapiens
  MOD_RES (2)..(2): Selenocysteine
  MOD_RES (25)..(25): Selenocysteine
  MOD_RES (74)..(74): Selenocysteine
  MOD_RES (90)..(90): Selenocysteine
  MOD_RES (99)..(99): Selenocysteine
  MOD_RES (107)..(107): Selenocysteine
  MOD_RES (116)..(116): Selenocysteine
  MOD_RES (119)..(119): Selenocysteine
  MOD_RES (122)..(122): Selenocysteine
  MOD_RES (124)..(124): Selenocysteine
  MOD_RES (147)..(147): Selenocysteine
  MOD_RES (188)..(188): Selenocysteine
  MOD_RES (197)..(197): Selenocysteine
  MOD_RES (245)..(245): Selenocysteine
  MOD_RES (274)..(274): Selenocysteine
  MOD_RES (281)..(281): Selenocysteine
  MOD_RES (291)..(291): Selenocysteine
  MOD_RES (341)..(341): Selenocysteine
  MOD_RES (348)..(349): Selenocysteine
  MOD_RES (363)..(363): Selenocysteine
  MOD_RES (382)..(382): Selenocysteine
  MOD_RES (391)..(391): Selenocysteine
MXELPAPLSYFQNAQMSEDNHLSNXVRSQNDNRERQEHNDRRSLGHPEPLSNGRPQGNSRQVVEQDEEEDEELXLKYGAKHVIMLFVPVXLCMVVVVAXIKSVSFYXRKDGQLIYXPFXEDXEXVGQRALHSILNAAIMISVIVVMXILLVVLYKYRCYKVIHAWLIISSLLLLFFFSFIYLGEVFKXYNVAVDYIXVALLIWNFGVVGMISIHWKGPLRLQQAYLIMISALMALVFIKYLPEWXAWLILAVISVYDLVAVLCPKGPLRMLVEXAQERNEXLFPALIYSSXMVWLVNMAEGDPEAQRRVSKNSKYNAERGVKLGLGDFIFYSVLVGKASAXASGDWNXXIACFVAILIGLCLXLLLLAIFKKALPALPISIXFGLVFYFAXDYLVQPFMDQLAFHQFYI

SEQ ID NO: 21625 - protein, 467 aa, Homo sapiens
  MOD_RES (2)..(2): Selenocysteine
  MOD_RES (25)..(25): Selenocysteine
  MOD_RES (74)..(74): Selenocysteine
  MOD_RES (90)..(90): Selenocysteine
  MOD_RES (99)..(99): Selenocysteine
  MOD_RES (107)..(107): Selenocysteine
  MOD_RES (116)..(116): Selenocysteine
  MOD_RES (119)..(119): Selenocysteine
  MOD_RES (122)..(122): Selenocysteine
  MOD_RES (124)..(124): Selenocysteine
  MOD_RES (147)..(147): Selenocysteine
  MOD_RES (188)..(188): Selenocysteine
  MOD_RES (197)..(197): Selenocysteine
  MOD_RES (245)..(245): Selenocysteine
  MOD_RES (274)..(274): Selenocysteine
  MOD_RES (281)..(281): Selenocysteine
  MOD_RES (291)..(291): Selenocysteine
  MOD_RES (320)..(320): Selenocysteine
  MOD_RES (327)..(327): Selenocysteine
  MOD_RES (354)..(354): Selenocysteine
  MOD_RES (399)..(399): Selenocysteine
  MOD_RES (406)..(407): Selenocysteine
  MOD_RES (421)..(421): Selenocysteine
  MOD_RES (440)..(440): Selenocysteine
  MOD_RES (449)..(449): Selenocysteine
MXELPAPLSYFQNAQMSEDNHLSNXVRSQNDNRERQEHNDRRSLGHPEPLSNGRPQGNSRQVVEQDEEEDEELXLKYGAKHVIMLFVPVXLCMVVVVAXIKSVSFYXRKDGQLIYXPFXEDXEXVGQRALHSILNAAIMISVIVVMXILLVVLYKYRCYKVIHAWLIISSLLLLFFFSFIYLGEVFKXYNVAVDYIXVALLIWNFGVVGMISIHWKGPLRLQQAYLIMISALMALVFIKYLPEWXAWLILAVISVYDLVAVLCPKGPLRMLVEXAQERNEXLFPALIYSSXMVWLVNMAEGDPEAQRRVSKNSKYNAESXERESQDXVAENDDGGFSEEWEAQRDSHLGPHRSXPESRAAVQELSSSILAGEDPEERGVKLGLGDFIFYSVLVGKASAXASGDWNXXIACFVAILIGLCLXLLLLAIFKKALPALPISIXFGLVFYFAXDYLVQPFMDQLAFHQFYI

SEQ ID NO: 21626 - protein, 184 aa, Homo sapiens
  MOD_RES (2)..(2): Selenocysteine
  MOD_RES (25)..(25): Selenocysteine
  MOD_RES (74)..(74): Selenocysteine
  MOD_RES (90)..(90): Selenocysteine
  MOD_RES (99)..(99): Selenocysteine
  MOD_RES (107)..(107): Selenocysteine
  MOD_RES (116)..(116): Selenocysteine
  MOD_RES (119)..(119): Selenocysteine
  MOD_RES (122)..(122): Selenocysteine
  MOD_RES (124)..(124): Selenocysteine
  MOD_RES (147)..(147): Selenocysteine
  MOD_RES (171)..(171): Selenocysteine
  MOD_RES (182)..(182): Selenocysteine
  MOD_RES (184)..(184): Selenocysteine
MXELPAPLSYFQNAQMSEDNHLSNXVRSQNDNRERQEHNDRRSLGHPEPLSNGRPQGNSRQVVEQDEEEDEELXLKYGAKHVIMLFVPVXLCMVVVVAXIKSVSFYXRKDGQLIYXPFXEDXEXVGQRALHSILNAAIMISVIVVMXILLVVLYKYRCYKVSMRHRSLLSXLFFLWLGILVXVX

SEQ ID NO: 21627 - protein, 43 aa, Homo sapiens
  MOD_RES (2)..(2): Selenocysteine
  MOD_RES (25)..(25): Selenocysteine
MXELPAPLSYFQNAQMSEDNHLSNXVRSQRRVLAILARLISNS

SEQ ID NO: 21628 - protein, 375 aa, Homo sapiens
  MOD_RES (7)..(7): Selenocysteine
  MOD_RES (15)..(15): Selenocysteine
  MOD_RES (24)..(24): Selenocysteine
  MOD_RES (27)..(27): Selenocysteine
  MOD_RES (30)..(30): Selenocysteine
  MOD_RES (32)..(32): Selenocysteine
  MOD_RES (55)..(55): Selenocysteine
  MOD_RES (96)..(96): Selenocysteine
  MOD_RES (105)..(105): Selenocysteine
  MOD_RES (153)..(153): Selenocysteine
  MOD_RES (182)..(182): Selenocysteine
  MOD_RES (189)..(189): Selenocysteine
  MOD_RES (199)..(199): Selenocysteine
  MOD_RES (228)..(228): Selenocysteine
  MOD_RES (235)..(235): Selenocysteine
  MOD_RES (262)..(262): Selenocysteine
  MOD_RES (307)..(307): Selenocysteine
  MOD_RES (314)..(315): Selenocysteine
  MOD_RES (329)..(329): Selenocysteine
  MOD_RES (348)..(348): Selenocysteine
  MOD_RES (357)..(357): Selenocysteine
MVVVVAXIKSVSFYXRKDGQLIYXPFXEDXEXVGQRALHSILNAAIMISVIVVMXILLVVLYKYRCYKVIHAWLIISSLLLLFFFSFIYLGEVFKXYNVAVDYIXVALLIWNFGVVGMISIHWKGPLRLQQAYLIMISALMALVFIKYLPEWXAWLILAVISVYDLVAVLCPKGPLRMLVEXAQERNEXLFPALIYSSXMVWLVNMAEGDPEAQRRVSKNSKYNAESXERESQDXVAENDDGGFSEEWEAQRDSHLGPHRSXPESRAAVQELSSSILAGEDPEERGVKLGLGDFIFYSVLVGKASAXASGDWNXXIACFVAILIGLCLXLLLLAIFKKALPALPISIXFGLVFYFAXDYLVQPFMDQLAFHQFYI

SEQ ID NO: 21629 - protein, 304 aa, Homo sapiens
  MOD_RES (9)..(9): Selenocysteine
  MOD_RES (40)..(40): Selenocysteine
  MOD_RES (50)..(50): Selenocysteine
  MOD_RES (59)..(59): Selenocysteine
  MOD_RES (63)..(63): Selenocysteine
  MOD_RES (136)..(136): Selenocysteine
  MOD_RES (157)..(157): Selenocysteine
  MOD_RES (201)..(201): Selenocysteine
  MOD_RES (236)..(236): Selenocysteine
  MOD_RES (243)..(244): Selenocysteine
  MOD_RES (258)..(258): Selenocysteine
  MOD_RES (277)..(277): Selenocysteine
  MOD_RES (286)..(286): Selenocysteine
  MOD_RES (296)..(296): Selenocysteine
MISVIVVMXIFLVVLYKYRCYKFIHGWLIMSSLMLLFLFXYIYLGEVLKXYNVAMDYPXLLLXVWNFGAVGMVCIHWKGPLVLQQAYLIMISALMALVFIKYLPEWSAWVILGAISVYDLVAVLCPKGPLRMLVEXAQERNEPIFPALIYSSAMVWXVGMAKLDPSSQGALQLPYDPEMEEDSYDSFGEPSYPEVFEPPLXGYPGEELEEEEERGVKLGLGDFIFYSVLVGKAAAXGSGDWNXXLACFVAILIGLCLXLLLLAVFKKALPALPISIXFGLIFYFSXDNLVRPFMDXLASHQLYI

SEQ ID NO: 21630 - protein, 481 aa, Homo sapiens
  MOD_RES (5)..(5): Selenocysteine
  MOD_RES (36)..(36): Selenocysteine
  MOD_RES (51)..(51): Selenocysteine
  MOD_RES (60)..(60): Selenocysteine
  MOD_RES (77)..(77): Selenocysteine
  MOD_RES (113)..(113): Selenocysteine
  MOD_RES (129)..(129): Selenocysteine
  MOD_RES (138)..(138): Selenocysteine
  MOD_RES (146)..(146): Selenocysteine
  MOD_RES (155)..(155): Selenocysteine
  MOD_RES (158)..(158): Selenocysteine
  MOD_RES (161)..(161): Selenocysteine
  MOD_RES (175)..(175): Selenocysteine
  MOD_RES (186)..(186): Selenocysteine
  MOD_RES (217)..(217): Selenocysteine
  MOD_RES (227)..(227): Selenocysteine
  MOD_RES (236)..(236): Selenocysteine
  MOD_RES (240)..(240): Selenocysteine
  MOD_RES (313)..(313): Selenocysteine
  MOD_RES (334)..(334): Selenocysteine
  MOD_RES (378)..(378): Selenocysteine
  MOD_RES (413)..(413): Selenocysteine
  MOD_RES (420)..(421): Selenocysteine
  MOD_RES (435)..(435): Selenocysteine
  MOD_RES (454)..(454): Selenocysteine
  MOD_RES (463)..(463): Selenocysteine
  MOD_RES (473)..(473): Selenocysteine
MLAGXVRFARHCLKFFPAQKPACVDFGASRGRAMLXFMASDSEEEVCDERXSLMSAESPXPRSCQEGRQGPEDGENXAQWRSQENEEDGEEDPDRYVCSGVPGRPPGLEEELXLKYGAKHVIMLFVPVXLCMIVVVAXIKSVRFYXEKNGQLIYXPFXEDXPSVGQRLLNSVLNXLIMISVIVVMXIFLVVLYKYRCYKFIHGWLIMSSLMLLFLFXYIYLGEVLKXYNVAMDYPXLLLXVWNFGAVGMVCIHWKGPLVLQQAYLIMISALMALVFIKYLPEWSAWVILGAISVYDLVAVLCPKGPLRMLVEXAQERNEPIFPALIYSSAMVWXVGMAKLDPSSQGALQLPYDPEMEEDSYDSFGEPSYPEVFEPPLXGYPGEELEEEEERGVKLGLGDFIFYSVLVGKAAAXGSGDWNXXLACFVAILIGLCLXLLLLAVFKKALPALPISIXFGLIFYFSXDNLVRPFMDXLASHQLYI

SEQ ID NO: 21631 - protein, 21 aa, Homo sapiens
  MOD_RES (3)..(3): Selenocysteine
  MOD_RES (18)..(18): Selenocysteine
MLXFMASDSEEEVCDERXSLM

SEQ ID NO: 21632 - protein, 129 aa, Homo sapiens
  MOD_RES (3)..(3): Selenocysteine
  MOD_RES (18)..(18): Selenocysteine
  MOD_RES (27)..(27): Selenocysteine
  MOD_RES (44)..(44): Selenocysteine
  MOD_RES (80)..(80): Selenocysteine
  MOD_RES (96)..(96): Selenocysteine
  MOD_RES (105)..(105): Selenocysteine
  MOD_RES (113)..(113): Selenocysteine
  MOD_RES (122)..(122): Selenocysteine
  MOD_RES (125)..(125): Selenocysteine
  MOD_RES (128)..(128): Selenocysteine
MLXFMASDSEEEVCDERXSLMSAESPXPRSCQEGRQGPEDGENXAQWRSQENEEDGEEDPDRYVCSGVPGRPPGLEEELXLKYGAKHVIMLFVPVXLCMIVVVAXIKSVRFYXEKNGQLIYXPFXEDXP

SEQ ID NO: 21633 - protein, 447 aa, Homo sapiens
  MOD_RES (3)..(3): Selenocysteine
  MOD_RES (18)..(18): Selenocysteine
  MOD_RES (27)..(27): Selenocysteine
  MOD_RES (44)..(44): Selenocysteine
  MOD_RES (80)..(80): Selenocysteine
  MOD_RES (96)..(96): Selenocysteine
  MOD_RES (105)..(105): Selenocysteine
  MOD_RES (113)..(113): Selenocysteine
  MOD_RES (122)..(122): Selenocysteine
  MOD_RES (125)..(125): Selenocysteine
  MOD_RES (128)..(128): Selenocysteine
  MOD_RES (142)..(142): Selenocysteine
  MOD_RES (153)..(153): Selenocysteine
  MOD_RES (184)..(184): Selenocysteine
  MOD_RES (194)..(194): Selenocysteine
  MOD_RES (203)..(203): Selenocysteine
  MOD_RES (207)..(207): Selenocysteine
  MOD_RES (280)..(280): Selenocysteine
  MOD_RES (301)..(301): Selenocysteine
  MOD_RES (344)..(344): Selenocysteine
  MOD_RES (379)..(379): Selenocysteine
  MOD_RES (386)..(387): Selenocysteine
  MOD_RES (401)..(401): Selenocysteine
  MOD_RES (420)..(420): Selenocysteine
  MOD_RES (429)..(429): Selenocysteine
  MOD_RES (439)..(439): Selenocysteine
MLXFMASDSEEEVCDERXSLMSAESPXPRSCQEGRQGPEDGENXAQWRSQENEEDGEEDPDRYVCSGVPGRPPGLEEELXLKYGAKHVIMLFVPVXLCMIVVVAXIKSVRFYXEKNGQLIYXPFXEDXPSVGQRLLNSVLNXLIMISVIVVMXIFLVVLYKYRCYKFIHGWLIMSSLMLLFLFXYIYLGEVLKXYNVAMDYPXLLLXVWNFGAVGMVCIHWKGPLVLQQAYLIMISALMALVFIKYLPEWSAWVILGAISVYDLVAVLCPKGPLRMLVEXAQERNEPIFPALIYSSAMVWXVGMAKLDPSSQGALQLPYDPEMEDSYDSFGEPSYPEVFEPPLXGYPGEELEEEEERGVKLGLGDFIFYSVLVGKAAAXGSGDWNXXLACFVAILIGLCLXLLLLAVFKKALPALPISIXFGLIFYFSXDNLVRPFMDXLASHQLYI

SEQ ID NO: 21634 - protein, 448 aa, Homo sapiens
  MOD_RES (3)..(3): Selenocysteine
  MOD_RES (18)..(18): Selenocysteine
  MOD_RES (27)..(27): Selenocysteine
  MOD_RES (44)..(44): Selenocysteine
  MOD_RES (80)..(80): Selenocysteine
  MOD_RES (96)..(96): Selenocysteine
  MOD_RES (105)..(105): Selenocysteine
  MOD_RES (113)..(113): Selenocysteine
  MOD_RES (122)..(122): Selenocysteine
  MOD_RES (125)..(125): Selenocysteine
  MOD_RES (128)..(128): Selenocysteine
  MOD_RES (142)..(142): Selenocysteine
  MOD_RES (153)..(153): Selenocysteine
  MOD_RES (184)..(184): Selenocysteine
  MOD_RES (194)..(194): Selenocysteine
  MOD_RES (203)..(203): Selenocysteine
  MOD_RES (207)..(207): Selenocysteine
  MOD_RES (280)..(280): Selenocysteine
  MOD_RES (301)..(301): Selenocysteine
  MOD_RES (345)..(345): Selenocysteine
  MOD_RES (380)..(380): Selenocysteine
  MOD_RES (387)..(388): Selenocysteine
  MOD_RES (402)..(402): Selenocysteine
  MOD_RES (421)..(421): Selenocysteine
  MOD_RES (430)..(430): Selenocysteine
  MOD_RES (440)..(440): Selenocysteine
MLXFMASDSEEEVCDERXSLMSAESPXPRSCQEGRQGPEDGENXAQWRSQENEEDGEEDPDRYVCSGVPGRPPGLEEELXLKYGAKHVIMLFVPVXLCMIVVVAXIKSVRFYXEKNGQLIYXPFXEDXPSVGQRLLNSVLNXLIMISVIVVMXIFLVVLYKYRCYKFIHGWLIMSSLMLLFLFXYIYLGEVLKXYNVAMDYPXLLLXVWNFGAVGMVCIHWKGPLVLQQAYLIMISALMALVFIKYLPEWSAWVILGAISVYDLVAVLCPKGPLRMLVEXAQERNEPIFPALIYSSAMVWXVGMAKLDPSSQGALQLPYDPEMEEDSYDSFGEPSYPEVFEPPLXGYPGEELEEEEERGVKLGLGDFIFYSVLVGKAAAXGSGDWNXXLACFVAILIGLCLXLLLLAVFKKALPALPISIXFGLIFYFSXDNLVRPFMDXLASHQLYI

SEQ ID NO: 21635 - protein, 145 aa, Homo sapiens
  MOD_RES (11)..(11): Selenocysteine
  MOD_RES (21)..(21): Selenocysteine
  MOD_RES (30)..(30): Selenocysteine
  MOD_RES (34)..(34): Selenocysteine
  MOD_RES (107)..(107): Selenocysteine
  MOD_RES (128)..(128): Selenocysteine
MSSLMLLFLFXYIYLGEVLKXYNVAMDYPXLLLXVWNFGAVGMVCIHWKGPLVLQQAYLIMISALMALVFIKYLPEWSAWVILGAISVYDLVAVLCPKGPLRMLVEXAQERNEPIFPALIYSSAMVWXVGMAKLDPSSQGALQLP

SEQ ID NO: 21636 - protein, 97 aa, Homo sapiens
  MOD_RES (48)..(48): Selenocysteine
MNLERVSNEEKLNLCRKYYLGGFAFLPFLWLVNIFWFFREAFLVPAYXEQSQIKGCESRAQRREASGRGEGEAGNLGGKGQWRIQNVGALGEKGRLV

SEQ ID NO: 21637 - protein, 101 aa, Homo sapiens
  MOD_RES (48)..(48): Selenocysteine
  MOD_RES (72)..(72): Selenocysteine
  MOD_RES (76)..(76): Selenocysteine
  MOD_RES (95)..(95): Selenocysteine
  MOD_RES (100)..(100): Selenocysteine
MNLERVSNEEKLNLCRKYYLGGFAFLPFLWLVNIFWFFREAFLVPAYXEQSQIKGYVWRSAVGFLFWVIVLXSWIXIFQIYRPRWGALGDYLSFXIPLGXP

SEQ ID NO: 21638 - protein, 14 aa, Homo sapiens
  MOD_RES (10)..(10): Selenocysteine
MEAVKQGSAXVGLK

SEQ ID NO: 21639 - protein, 238 aa, Homo sapiens
  MOD_RES (10)..(10): Selenocysteine
  MOD_RES (17)..(17): Selenocysteine
  MOD_RES (53)..(53): Selenocysteine
  MOD_RES (91)..(91): Selenocysteine
  MOD_RES (95)..(95): Selenocysteine
  MOD_RES (122)..(122): Selenocysteine
  MOD_RES (145)..(145): Selenocysteine
  MOD_RES (173)..(173): Selenocysteine
  MOD_RES (181)..(182): Selenocysteine
  MOD_RES (197)..(197): Selenocysteine
MEAVKQGSAXVGLKSKXHAVLVALKRAQSELAAHQKKILHVDNHIGISIAGLXADARLLCNFMRQECLDSRFVFDRPLPVSRLVSLIGSKXQIPXQRYGRRPYGVGLLIAGYDDMGPHIFQXCPSANYFDCRAMSIGARSQSARXYLERHMSEFMECNLNELVKHGLRALREXLPAEQDLXXKNVSIGIVGKDLEFXIYDDDDVSPFLEGLEERPQRKAQPAQPADEPAEKADEPMEH

SEQ ID NO: 21640 - protein, 263 aa, Homo sapiens
  MOD_RES (11)..(11): Selenocysteine
  MOD_RES (35)..(35): Selenocysteine
  MOD_RES (42)..(42): Selenocysteine
  MOD_RES (78)..(78): Selenocysteine
  MOD_RES (116)..(116): Selenocysteine
  MOD_RES (120)..(120): Selenocysteine
  MOD_RES (147)..(147): Selenocysteine
  MOD_RES (170)..(170): Selenocysteine
  MOD_RES (198)..(198): Selenocysteine
  MOD_RES (206)..(207): Selenocysteine
  MOD_RES (222)..(222): Selenocysteine
MFRNQYDNDVXVWSPQGRIHQIEYAMEAVKQGSAXVGLKSKXHAVLVALKRAQSELAAHQKKILHVDNHIGISIAGLXADARLLCNFMRQECLDSRFVFDRPLPVSRLVSLIGSKXQIPXQRYGRRPYGVGLLIAGYDDMGPHIFQXCPSANYFDCRAMSIGARSQSARXYLERHMSEFMECNLNELVKHGLRALREXLPAEQDLXXKNVSIGIVGKDLEFXIYDDDDVSPFLEGLEERPQRKAQPAQPADEPAEKADEPMEH

SEQ ID NO: 21641 - protein, 269 aa, Homo sapiens
  MOD_RES (17)..(17): Selenocysteine
  MOD_RES (41)..(41): Selenocysteine
  MOD_RES (48)..(48): Selenocysteine
  MOD_RES (84)..(84): Selenocysteine
  MOD_RES (122)..(122): Selenocysteine
  MOD_RES (126)..(126): Selenocysteine
  MOD_RES (153)..(153): Selenocysteine
  MOD_RES (176)..(176): Selenocysteine
  MOD_RES (204)..(204): Selenocysteine
  MOD_RES (212)..(213): Selenocysteine
  MOD_RES (228)..(228): Selenocysteine
MQLSKVKFRNQYDNDVXVWSPQGRIHQIEYAMEAVKQGSAXVGLKSKXHAVLVALKRAQSELAAHQKKILHVDNHIGISIAGLXADARLLCNFMRQECLDSRFVFDRPLPVSRLVSLIGSKXQIPXQRYGRRPYGVGLLIAGYDDMGPHIFQXCPSANYFDCRAMSIGARSQSARXYLERHMSEFMECNLNELVKHGLRALREXLPAEQDLXXKNVSIGIVGKDLEFXIYDDDDVSPFLEGLEERPQRKAQPAQPADEPAEKADEPMEH

SEQ ID NO: 21642 - protein, 36 aa, Homo sapiens
  MOD_RES (32)..(32): Selenocysteine
LSPSGKLVQIEYALAAVAGGAPSVGIKECLCXELEN

SEQ ID NO: 21643 - protein, 164 aa, Homo sapiens
  MOD_RES (11)..(12): Selenocysteine
  MOD_RES (37)..(37): Selenocysteine
  MOD_RES (52)..(52): Selenocysteine
  MOD_RES (91)..(91): Selenocysteine
  MOD_RES (102)..(102): Selenocysteine
  MOD_RES (120)..(120): Selenocysteine
  MOD_RES (124)..(124): Selenocysteine
  MOD_RES (134)..(134): Selenocysteine
  MOD_RES (152)..(152): Selenocysteine
  MOD_RES (154)..(154): Selenocysteine
MAERGYSFSLXXFRVLVHRARKLAQQYYLVYQEPIPXAQLVQRVASVMQEYXQSGGVRPFGVSLLICGWNEGRPYLFQSDPSGAYFAWKAXAMGKNYVNGKXFLEKRYNEDLELEDAIHXAILXLKESFEGQMXEDNIEVGICNEAGFRRLXPXEVKDYLAAIA

SEQ ID NO: 21644 - protein, 22 aa, Homo sapiens
  MOD_RES (11)..(12): Selenocysteine
MAERGYSFSLXXFSCKWCGISN

SEQ ID NO: 21645 - protein, 234 aa, Homo sapiens
  MOD_RES (11)..(12): Selenocysteine
  MOD_RES (48)..(48): Selenocysteine
  MOD_RES (69)..(69): Selenocysteine
  MOD_RES (107)..(107): Selenocysteine
  MOD_RES (122)..(122): Selenocysteine
  MOD_RES (161)..(161): Selenocysteine
  MOD_RES (172)..(172): Selenocysteine
  MOD_RES (190)..(190): Selenocysteine
  MOD_RES (194)..(194): Selenocysteine
  MOD_RES (204)..(204): Selenocysteine
  MOD_RES (222)..(222): Selenocysteine
  MOD_RES (224)..(224): Selenocysteine
MAERGYSFSLXXFSPSGKLVQIEYALAAVAGGAPSVGIKAANGVVLAXEKKQKSILYDERSVHKVEPIXKHIGLVYSGMGPDYRVLVHRARKLAQQYYLVYQEPIPXAQLVQRVASVMQEYXQSGGVRPFGVSLLICGWNEGRPYLFQSDPSGAYFAWKAXAMGKNYVNGKXFLEKRYNEDLELEDAIHXAILXLKESFEGQMXEDNIEVGICNEAGFRRLXPXEVKDYLAAIA

SEQ ID NO: 21646 - protein, 18 aa, Homo sapiens
  MOD_RES (1)..(1): Any amino acid
  MOD_RES (10)..(11): Selenocysteine
XERGYSFSLXXFSFLQMN

SEQ ID NO: 21647 - protein, 83 aa, Homo sapiens
  MOD_RES (14)..(14): Selenocysteine
  MOD_RES (49)..(49): Selenocysteine
HLADRVAMYVHAYXLYSAVRPFGCRIYIVHDEVKDKAFELELSWVGELXNGRHEIVPKDIREEAEKYAKESLKEEDESDDDNM

SEQ ID NO: 21648 - protein, 180 aa, Homo sapiens
  MOD_RES (49)..(49): Selenocysteine
  MOD_RES (100)..(100): Selenocysteine
  MOD_RES (111)..(111): Selenocysteine
  MOD_RES (146)..(146): Selenocysteine
MAVAGLLADARSLADIAREEASNFRSNFGYNIPLKHLADRVAMYVHAYXLYSAVRPFGCSFMLGSYSVNDGAQLYMIDPSGVSYGYWGCAIGKARQAAKXEIEKLQMKEMXCRDIVKEVAKIIYIVHDEVKDKAFELELSWVGELXNGRHEIVPKDIREEAEKYAKESLKEEDESDDDNM

SEQ ID NO: 21649 - protein, 36 aa, Homo sapiens
  MOD_RES (6)..(6): Selenocysteine
  MOD_RES (14)..(14): Selenocysteine
MSSIGXGYDLSASXFSPDGRVFQVEYAMKAVENSRQ

SEQ ID NO: 21650 - protein, 255 aa, Homo sapiens
  MOD_RES (6)..(6): Selenocysteine
  MOD_RES (14)..(14): Selenocysteine
  MOD_RES (36)..(36): Selenocysteine
  MOD_RES (124)..(124): Selenocysteine
  MOD_RES (175)..(175): Selenocysteine
  MOD_RES (186)..(186): Selenocysteine
  MOD_RES (221)..(221): Selenocysteine
MSSIGXGYDLSASXFSPDGRVFQVEYAMKAVENSSXAIGIRCKDGVVFGVEKLVLSKLYEEGSNKRLFNVDRHVGMAVAGLLADARSLADIAREEASNFRSNFGYNIPLKHLADRVAMYVHAYXLYSAVRPFGCSFMLGSYSVNDGAQLYMIDPSGVSYGYWGCAIGKARQAAKXEIEKLQMKEMXCRDIVKEVAKIIYIVHDEVKDKAFELELSWVGELXNGRHEIVPKDIREEAEKYAKESLKEEDESDDDNM

SEQ ID NO: 21651 - protein, 248 aa, Homo sapiens
  MOD_RES (6)..(6): Selenocysteine
  MOD_RES (14)..(14): Selenocysteine
  MOD_RES (36)..(36): Selenocysteine
  MOD_RES (124)..(124): Selenocysteine
  MOD_RES (168)..(168): Selenocysteine
  MOD_RES (179)..(179): Selenocysteine
  MOD_RES (214)..(214): Selenocysteine
MSSIGXGYDLSASXFSPDGRVFQVEYAMKAVENSSXAIGIRCKDGVVFGVEKLVLSKLYEEGSNKRLFNVDRHVGMAVAGLLADARSLADIAREEASNFRSNFGYNIPLKHLADRVAMYVHAYXLYSAVRPFGCSVNDGAQLYMIDPSGVSYGYWGCAIGKARQAAKXEIEKLQMKEMXCRDIVKEVAKIIYIVHDEVKDKAFELELSWVGELXNGRHEIVPKDIREEAEKYAKESLKEEDESDDDNM

SEQ ID NO: 21652 - protein, 54 aa, Homo sapiens
  MOD_RES (6)..(6): Selenocysteine
  MOD_RES (14)..(14): Selenocysteine
MSSIGXGYDLSASXFSPDGRVFQVEYAMKAVENSSYWNQMQRWCCLWGRKISPF

SEQ ID NO: 21653 - protein, 190 aa, Homo sapiens
  MOD_RES (9)..(9): Selenocysteine
  MOD_RES (16)..(16): Selenocysteine
  MOD_RES (41)..(41): Selenocysteine
  MOD_RES (51)..(51): Selenocysteine
  MOD_RES (91)..(91): Selenocysteine
  MOD_RES (114)..(114): Selenocysteine
  MOD_RES (129)..(129): Selenocysteine
  MOD_RES (144)..(144): Selenocysteine
  MOD_RES (146)..(146): Selenocysteine
  MOD_RES (152)..(152): Selenocysteine
MACSVAGIXSDANVLXNELRLIAQRYLLQYQEPIPCEQLVXALCDIKQAYXQFGGKRPFGVSLLYIGWDKHYGFQLYQSDPSGNYGGWKAXCIGNNSAAAVSMLKQDYKEGEMXLKSALALAIKVLNKXMDVSKLSAEKVEIAXLXRENGKXVIRVLKQKEVEQLIKKHEEEEAKAEREKKEKEQKEKDK

SEQ ID NO: 21654 - protein, 122 aa, Homo sapiens
  MOD_RES (24)..(24): Selenocysteine
  MOD_RES (34)..(34): Selenocysteine
  MOD_RES (74)..(74): Selenocysteine
  MOD_RES (97)..(97): Selenocysteine
  MOD_RES (112)..(112): Selenocysteine
MCPSLYPRYLLQYQEPIPCEQLVXALCDIKQAYXQFGGKRPFGVSLLYIGWDKHYGFQLYQSDPSGNYGGWKAXCIGNNSAAAVSMLKQDYKEGEMXLKSALALAIKVLNKXMDVSKLSAEK

SEQ ID NO: 21655 - protein, 86 aa, Homo sapiens
  MOD_RES (24)..(24): Selenocysteine
  MOD_RES (34)..(34): Selenocysteine
  MOD_RES (74)..(74): Selenocysteine
MCPSLYPRYLLQYQEPIPCEQLVXALCDIKQAYXQFGGKRPFGVSLLYIGWDKHYGFQLYQSDPSGNYGGWKAXCIGNNSAWKLQH

SEQ ID NO: 21656 - protein, 182 aa, Homo sapiens
  MOD_RES (9)..(9): Selenocysteine
  MOD_RES (56)..(56): Selenocysteine
  MOD_RES (63)..(63): Selenocysteine
  MOD_RES (88)..(88): Selenocysteine
  MOD_RES (98)..(98): Selenocysteine
  MOD_RES (138)..(138): Selenocysteine
  MOD_RES (161)..(161): Selenocysteine
  MOD_RES (176)..(176): Selenocysteine
MEAIGHAGXCLGILANDGVLLAAERRNIHKLLDEVFFSEKIYKLNEDMACSVAGIXSDANVLXNELRLIAQRYLLQYQEPIPCEQLVXALCDIKQAYXQFGGKRPFGVSLLYIGWDKHYGFQLYQSDPSGNYGGWKAXCIGNNSAAAVSMLKQDYKEGEMXLKSALALAIKVLNKXMDVSKL

SEQ ID NO: 21657 - protein, 230 aa, Homo sapiens
  MOD_RES (9)..(10): Selenocysteine
  MOD_RES (49)..(49): Selenocysteine
  MOD_RES (56)..(56): Selenocysteine
  MOD_RES (81)..(81): Selenocysteine
  MOD_RES (91)..(91): Selenocysteine
  MOD_RES (131)..(131): Selenocysteine
  MOD_RES (154)..(154): Selenocysteine
  MOD_RES (169)..(169): Selenocysteine
  MOD_RES (184)..(184): Selenocysteine
  MOD_RES (186)..(186): Selenocysteine
  MOD_RES (192)..(192): Selenocysteine
MSRRYDSRXXIFSPEAERRNIHKLLDEVFFSEKIYKLNEDMACSVAGIXSDANVLXNELRLIAQRYLLQYQEPIPCEQLVXALCDIKQAYXQFGGKRPFGVSLLYIGWDKHYGFQLYQSDPSGNYGGWKAXCIGNNSAAAVSMLKQDYKEGEMXLKSALALAIKVLNKXMDVSKLSAEKVEIAXLXRENGKXVIRVLKQKEVEQLIKKHEEEEAKAEREKKEKEQKEKDK

SEQ ID NO: 21658 - protein, 209 aa, Homo sapiens
  MOD_RES (9)..(10): Selenocysteine
  MOD_RES (33)..(33): Selenocysteine
  MOD_RES (80)..(80): Selenocysteine
  MOD_RES (87)..(87): Selenocysteine
  MOD_RES (112)..(112): Selenocysteine
  MOD_RES (122)..(122): Selenocysteine
  MOD_RES (162)..(162): Selenocysteine
  MOD_RES (185)..(185): Selenocysteine
  MOD_RES (200)..(200): Selenocysteine
MSRRYDSRXXIFSPEGRLYQVEYAMEAIGHAGXCLGILANDGVLLAAERRNIHKLLDEVFFSEKIYKLNEDMACSVAGIXSDANVLXNELRLIAQRYLLQYQEPIPCEQLVXALCDIKQAYXQFGGKRPFGVSLLYIGWDKHYGFQLYQSDPSGNYGGWKAXCIGNNSAAAVSMLKQDYKEGEMXLKSALALAIKVLNKXMDVSKLSAE

SEQ ID NO: 21659 - protein, 221 aa, Homo sapiens
  MOD_RES (9)..(10): Selenocysteine
  MOD_RES (33)..(33): Selenocysteine
  MOD_RES (80)..(80): Selenocysteine
  MOD_RES (87)..(87): Selenocysteine
  MOD_RES (112)..(112): Selenocysteine
  MOD_RES (122)..(122): Selenocysteine
  MOD_RES (162)..(162): Selenocysteine
  MOD_RES (185)..(185): Selenocysteine
  MOD_RES (200)..(200): Selenocysteine
  MOD_RES (215)..(215): Selenocysteine
  MOD_RES (217)..(217): Selenocysteine
MSRRYDSRXXIFSPEGRLYQVEYAMEAIGHAGXCLGILANDGVLLAAERRNIHKLLDEVFFSEKIYKLNEDMACSVAGIXSDANVLXNELRLIAQRYLLQYQEPIPCEQLVXALCDIKQAYXQFGGKRPFGVSLLYIGWDKHYGFQLYQSDPSGNYGGWKAXCIGNNSAAAVSMLKQDYKEGEMXLKSALALAIKVLNKXMDVSKLSAEKVEIAXLXRENG

SEQ ID NO: 21660 - protein, 236 aa, Homo sapiens
  MOD_RES (9)..(10): Selenocysteine
  MOD_RES (33)..(33): Selenocysteine
  MOD_RES (80)..(80): Selenocysteine
  MOD_RES (87)..(87): Selenocysteine
  MOD_RES (112)..(112): Selenocysteine
  MOD_RES (122)..(122): Selenocysteine
  MOD_RES (162)..(162): Selenocysteine
  MOD_RES (185)..(185): Selenocysteine
  MOD_RES (200)..(200): Selenocysteine
  MOD_RES (215)..(215): Selenocysteine
  MOD_RES (217)..(217): Selenocysteine
  MOD_RES (223)..(223): Selenocysteine
MSRRYDSRXXIFSPEGRLYQVEYAMEAIGHAGXCLGILANDGVLLAAERRNIHKLLDEVFFSEKIYKLNEDMACSVAGIXSDANVLXNELRLIAQRYLLQYQEPIPCEQLVXALCDIKQAYXQFGGKRPFGVSLLYIGWDKHYGFQLYQSDPSGNYGGWKAXCIGNNSAAAVSMLKQDYKEGEMXLKSALALAIKVLNKXMDVSKLSAEKVEIAXLXRENGKXVIRVLKQKEVEQL

SEQ ID NO: 21661 - protein, 261 aa, Homo sapiens
  MOD_RES (9)..(10): Selenocysteine
  MOD_RES (33)..(33): Selenocysteine
  MOD_RES (80)..(80): Selenocysteine
  MOD_RES (87)..(87): Selenocysteine
  MOD_RES (112)..(112): Selenocysteine
  MOD_RES (122)..(122): Selenocysteine
  MOD_RES (162)..(162): Selenocysteine
  MOD_RES (185)..(185): Selenocysteine
  MOD_RES (200)..(200): Selenocysteine
  MOD_RES (215)..(215): Selenocysteine
  MOD_RES (217)..(217): Selenocysteine
  MOD_RES (223)..(223): Selenocysteine
MSRRYDSRXXIFSPEGRLYQVEYAMEAIGHAGXCLGILANDGVLLAAERRNIHKLLDEVFFSEKIYKLNEDMACSVAGIXSDANVLXNELRLIAQRYLLQYQEPIPCEQLVXALCDIKQAYXQFGGKRPFGVSLLYIGWDKHYGFQLYQSDPSGNYGGWKAXCIGNNSAAAVSMLKQDYKEGEMXLKSALALAIKVLNKXMDVSKLSAEKVEIAXLXRENGKXVIRVLKQKEVEQLIKKHEEEEAKAEREKKEKEQKEKDK

SEQ ID NO: 21662 - protein, 174 aa, Homo sapiens
  MOD_RES (9)..(10): Selenocysteine
  MOD_RES (33)..(33): Selenocysteine
  MOD_RES (80)..(80): Selenocysteine
  MOD_RES (87)..(87): Selenocysteine
  MOD_RES (112)..(112): Selenocysteine
  MOD_RES (122)..(122): Selenocysteine
  MOD_RES (162)..(162): Selenocysteine
MSRRYDSRXXIFSPEGRLYQVEYAMEAIGHAGXCLGILANDGVLLAAERRNIHKLLDEVFFSEKIYKLNEDMACSVAGIXSDANVLXNELRLIAQRYLLQYQEPIPCEQLVXALCDIKQAYXQFGGKRPFGVSLLYIGWDKHYGFQLYQSDPSGNYGGWKAXCIGNNSAWKLQH

SEQ ID NO: 21663 - protein, 125 aa, Homo sapiens
  MOD_RES (9)..(10): Selenocysteine
  MOD_RES (33)..(33): Selenocysteine
  MOD_RES (80)..(80): Selenocysteine
  MOD_RES (87)..(87): Selenocysteine
  MOD_RES (101)..(101): Selenocysteine
  MOD_RES (115)..(115): Selenocysteine
  MOD_RES (125)..(125): Selenocysteine
MSRRYDSRXXIFSPEGRLYQVEYAMEAIGHAGXCLGILANDGVLLAAERRNIHKLLDEVFFSEKIYKLNEDMACSVAGIXSDANVLXNELRLIAQSGNCNXNKREWKDSNQSSQXKRSGAVDQKX

SEQ ID NO: 21664 - protein, 183 aa, Homo sapiens
  MOD_RES (9)..(10): Selenocysteine
  MOD_RES (33)..(33): Selenocysteine
  MOD_RES (86)..(86): Selenocysteine
  MOD_RES (96)..(96): Selenocysteine
  MOD_RES (136)..(136): Selenocysteine
  MOD_RES (159)..(159): Selenocysteine
  MOD_RES (174)..(174): Selenocysteine
MSRRYDSRXXIFSPEGRLYQVEYAMEAIGHAGXCLGILANDGVLLAAERRNIHKLLDEVFFSEKIYKLNEYLLQYQEPIPCEQLVXALCDIKQAYXQFGGKRPFGVSLLYIGWDKHYGFQLYQSDPSGNYGGWKAXCIGNNSAAAVSMLKQDYKEGEMXLKSALALAIKVLNKXMDVSKLSAE

SEQ ID NO: 21665 - protein, 183 aa, Homo sapiens
  MOD_RES (29)..(29): Selenocysteine
  MOD_RES (38)..(38): Selenocysteine
  MOD_RES (44)..(44): Selenocysteine
  MOD_RES (48)..(48): Selenocysteine
  MOD_RES (50)..(50): Selenocysteine
  MOD_RES (55)..(55): Selenocysteine
  MOD_RES (103)..(103): Selenocysteine
  MOD_RES (132)..(132): Selenocysteine
  MOD_RES (155)..(155): Selenocysteine
  MOD_RES (161)..(161): Selenocysteine
  MOD_RES (172)..(172): Selenocysteine
MEPSSIEKIVEIDAHIGCAMSGLIADAKXLIDKARVEXQNHWFXYNEXMXVESVXQAVSNLALQFGEEDADPGAMSRPFGVALLFGGVDEKGPQLFHMDPSGXFVQCDARAIGSASEGAQSSLQEVYHKSMXLKEAIKSSLIILKQVMEEKLNAXNIELAXVQPGQNFHMFXKEELEEVIKDI

SEQ ID NO: 21666 - protein, 241 aa, Homo sapiens
  MOD_RES (4)..(4): Selenocysteine
  MOD_RES (14)..(14): Selenocysteine
  MOD_RES (36)..(36): Selenocysteine
  MOD_RES (42)..(42): Selenocysteine
  MOD_RES (55)..(55): Selenocysteine
  MOD_RES (87)..(87): Selenocysteine
  MOD_RES (96)..(96): Selenocysteine
  MOD_RES (102)..(102): Selenocysteine
  MOD_RES (106)..(106): Selenocysteine
  MOD_RES (108)..(108): Selenocysteine
  MOD_RES (113)..(113): Selenocysteine
  MOD_RES (161)..(161): Selenocysteine
  MOD_RES (190)..(190): Selenocysteine
  MOD_RES (213)..(213): Selenocysteine
  MOD_RES (219)..(219): Selenocysteine
  MOD_RES (230)..(230): Selenocysteine
MFLXRSEYDRGVNXFSPEGRLFQVEYAIEAIKLGSXAIGIQXSEGVCLAVEKRIXSPLMEPSSIEKIVEIDAHIGCAMSGLIADAKXLIDKARVEXQNHWFXYNEXMXVESVXQAVSNLALQFGEEDADPGAMSRPFGVALLFGGVDEKGPQLFHMDPSGXFVQCDARAIGSASEGAQSSLQEVYHKSMXLKEAIKSSLIILKQVMEEKLNAXNIELAXVQPGQNFHMFXKEELEEVIKDI

SEQ ID NO: 21667 - protein, 227 aa, Homo sapiens
  MOD_RES (19)..(19): Selenocysteine
  MOD_RES (33)..(33): Selenocysteine
  MOD_RES (46)..(46): Selenocysteine
  MOD_RES (48)..(48): Selenocysteine
  MOD_RES (54)..(54): Selenocysteine
  MOD_RES (62)..(62): Selenocysteine
  MOD_RES (65)..(65): Selenocysteine
  MOD_RES (107)..(107): Selenocysteine
  MOD_RES (147)..(147): Selenocysteine
  MOD_RES (154)..(154): Selenocysteine
  MOD_RES (157)..(157): Selenocysteine
  MOD_RES (171)..(171): Selenocysteine
  MOD_RES (175)..(175): Selenocysteine
  MOD_RES (178)..(178): Selenocysteine
  MOD_RES (181)..(181): Selenocysteine
  MOD_RES (185)..(185): Selenocysteine
  MOD_RES (202)..(202): Selenocysteine
  MOD_RES (212)..(212): Selenocysteine
MAGLRREYAFKAINQGGLXSVAVRGKDCAVIVXQKKVPDKLLDSSXVXHLFKIXENIGCVMXGMXADSRSQVQRARYEAANWKYKYGYEIPVDMLCKRIADISQVYXQNAEMRPLGCCMILIGIDEEQGPQVYKCDPAGYYCGFKAXAAGVKQXESXSFLEKKVKKKFDWXFEQXVEXAIXCLSXVLSIDFKPSEIEVGVVXVENPKFRILXEAEIDAHLVALAERD

SEQ ID NO: 21668 - protein, 67 aa, Homo sapiens
  MOD_RES (14)..(14): Selenocysteine
  MOD_RES (28)..(28): Selenocysteine
  MOD_RES (34)..(34): Selenocysteine
  MOD_RES (45)..(45): Selenocysteine
  MOD_RES (57)..(57): Selenocysteine
  MOD_RES (61)..(61): Selenocysteine
MSRGSSAGFDRHIXIFSPEGRLYQVAWXSVVNSXQALEACYIPDXASPRRYKCECYXLFYXEAHSLE

SEQ ID NO: 21669 - protein, 203 aa, Homo sapiens
  MOD_RES (14)..(14): Selenocysteine
  MOD_RES (38)..(38): Selenocysteine
  MOD_RES (52)..(52): Selenocysteine
  MOD_RES (65)..(65): Selenocysteine
  MOD_RES (67)..(67): Selenocysteine
  MOD_RES (73)..(73): Selenocysteine
  MOD_RES (81)..(81): Selenocysteine
  MOD_RES (84)..(84): Selenocysteine
  MOD_RES (126)..(126): Selenocysteine
  MOD_RES (166)..(166): Selenocysteine
  MOD_RES (173)..(173): Selenocysteine
  MOD_RES (176)..(176): Selenocysteine
  MOD_RES (190)..(190): Selenocysteine
  MOD_RES (194)..(194): Selenocysteine
MSRGSSAGFDRHIXIFSPEGRLYQVEYAFKAINQGGLXSVAVRGKDCAVIVXQKKVPDKLLDSSXVXHLFKIXENIGCVMXGMXADSRSQVQRARYEAANWKYKYGYEIPVDMLCKRIADISQVYXQNAEMRPLGCCMILIGIDEEQGPQVYKCDPAGYYCGFKAXAAGVKQXESXSFLEKKVKKKFDWXFEQXVEDSYRSRD

SEQ ID NO: 21670 - protein, 246 aa, Homo sapiens
  MOD_RES (14)..(14): Selenocysteine
  MOD_RES (38)..(38): Selenocysteine
  MOD_RES (52)..(52): Selenocysteine
  MOD_RES (65)..(65): Selenocysteine
  MOD_RES (67)..(67): Selenocysteine
  MOD_RES (73)..(73): Selenocysteine
  MOD_RES (81)..(81): Selenocysteine
  MOD_RES (84)..(84): Selenocysteine
  MOD_RES (126)..(126): Selenocysteine
  MOD_RES (166)..(166): Selenocysteine
  MOD_RES (173)..(173): Selenocysteine
  MOD_RES (176)..(176): Selenocysteine
  MOD_RES (190)..(190): Selenocysteine
  MOD_RES (194)..(194): Selenocysteine
  MOD_RES (197)..(197): Selenocysteine
  MOD_RES (200)..(200): Selenocysteine
  MOD_RES (204)..(204): Selenocysteine
  MOD_RES (221)..(221): Selenocysteine
  MOD_RES (231)..(231): Selenocysteine
MSRGSSAGFDRHIXIFSPEGRLYQVEYAFKAINQGGLXSVAVRGKDCAVIVXQKKVPDKLLDSSXVXHLFKIXENIGCVMXGMXADSRSQVQRARYEAANWKYKYGYEIPVDMLCKRIADISQVYXQNAEMRPLGCCMILIGIDEEQGPQVYKCDPAGYYCGFKAXAAGVKQXESXSFLEKKVKKKFDWXFEQXVEXAIXCLSXVLSIDFKPSEIEVGVVXVENPKFRILXEAEIDAHLVALAERD

SEQ ID NO: 21671 - protein, 252 aa, Homo sapiens
  MOD_RES (14)..(14): Selenocysteine
  MOD_RES (38)..(38): Selenocysteine
  MOD_RES (52)..(52): Selenocysteine
  MOD_RES (65)..(65): Selenocysteine
  MOD_RES (67)..(67): Selenocysteine
  MOD_RES (73)..(73): Selenocysteine
  MOD_RES (81)..(81): Selenocysteine
  MOD_RES (84)..(84): Selenocysteine
  MOD_RES (126)..(126): Selenocysteine
  MOD_RES (172)..(172): Selenocysteine
  MOD_RES (179)..(179): Selenocysteine
  MOD_RES (182)..(182): Selenocysteine
  MOD_RES (196)..(196): Selenocysteine
  MOD_RES (200)..(200): Selenocysteine
  MOD_RES (203)..(203): Selenocysteine
  MOD_RES (206)..(206): Selenocysteine
  MOD_RES (210)..(210): Selenocysteine
  MOD_RES (227)..(227): Selenocysteine
  MOD_RES (237)..(237): Selenocysteine
MSRGSSAGFDRHIXIFSPEGRLYQVEYAFKAINQGGLXSVAVRGKDCAVIVXQKKVPDKLLDSSXVXHLFKIXENIGCVMXGMXADSRSQVQRARYEAANWKYKYGYEIPVDMLCKRIADISQVYXQNAEMRPLGCWSFLFLGMILIGIDEEQGPQVYKCDPAGYYCGFKAXAAGVKQXESXSFLEKKVKKKFDWXFEQXVEXAIXCLSXVLSIDFKPSEIEVGVVXVENPKFRILXEAEIDAHLVALAERD

SEQ ID NO: 21672 - protein, 148 aa, Homo sapiens
  MOD_RES (14)..(14): Selenocysteine
  MOD_RES (38)..(38): Selenocysteine
  MOD_RES (52)..(52): Selenocysteine
  MOD_RES (65)..(65): Selenocysteine
  MOD_RES (67)..(67): Selenocysteine
  MOD_RES (73)..(73): Selenocysteine
  MOD_RES (81)..(81): Selenocysteine
  MOD_RES (84)..(84): Selenocysteine
  MOD_RES (126)..(126): Selenocysteine
MSRGSSAGFDRHIXIFSPEGRLYQVEYAFKAINQGGLXSVAVRGKDCAVIVXQKKVPDKLLDSSXVXHLFKIXENIGCVMXGMXADSRSQVQRARYEAANWKYKYGYEIPVDMLCKRIADISQVYXQNAEMRPLGCYCNYMPVYCSIN

SEQ ID NO: 21673 - protein, 107 aa, Homo sapiens
  MOD_RES (14)..(14): Selenocysteine
  MOD_RES (38)..(38): Selenocysteine
  MOD_RES (52)..(52): Selenocysteine
  MOD_RES (65)..(65): Selenocysteine
  MOD_RES (67)..(67): Selenocysteine
  MOD_RES (73)..(73): Selenocysteine
  MOD_RES (81)..(81): Selenocysteine
  MOD_RES (84)..(84): Selenocysteine
MSRGSSAGFDRHIXIFSPEGRLYQVEYAFKAINQGGLXSVAVRGKDCAVIVXQKKVPDKLLDSSXVXHLFKIXENIGCVMXGMXVSLCRPGCSASWVQAILVPQPPR

SEQ ID NO: 21674 - protein, 41 aa, Homo sapiens
  MOD_RES (14)..(14): Selenocysteine
MSRGSSAGFDRHIXIFSPEGRLYQVGQIIGFQHSDSLIQDN

SEQ ID NO: 21675 - protein, 167 aa, Homo sapiens
  MOD_RES (2)..(2): Selenocysteine
  MOD_RES (5)..(5): Selenocysteine
  MOD_RES (47)..(47): Selenocysteine
  MOD_RES (87)..(87): Selenocysteine
  MOD_RES (94)..(94): Selenocysteine
  MOD_RES (97)..(97): Selenocysteine
  MOD_RES (111)..(111): Selenocysteine
  MOD_RES (115)..(115): Selenocysteine
  MOD_RES (118)..(118): Selenocysteine
  MOD_RES (121)..(121): Selenocysteine
  MOD_RES (125)..(125): Selenocysteine
  MOD_RES (142)..(142): Selenocysteine
  MOD_RES (152)..(152): Selenocysteine
MXGMXADSRSQVQRARYEAANWKYKYGYEIPVDMLCKRIADISQVYXQNAEMRPLGCCMILIGIDEEQGPQVYKCDPAGYYCGFKAXAAGVKQXESXSFLEKKVKKKFDWXFEQXVEXAIXCLSXVLSIDFKPSEIEVGVVXVENPKFRILXEAEIDAHLVALAERD

SEQ ID NO: 21676 - protein, 85 aa, Homo sapiens
  MOD_RES (1)..(1): Any amino acid
  MOD_RES (11)..(11): Selenocysteine
  MOD_RES (36)..(36): Selenocysteine
  MOD_RES (39)..(39): Selenocysteine
  MOD_RES (43)..(43): Selenocysteine
  MOD_RES (60)..(60): Selenocysteine
  MOD_RES (70)..(70): Selenocysteine
XRIADISQVYXQNAEMRPLGCCMILIGIDEEQGPQXAIXCLSXVLSIDFKPSEIEVGVVXVENPKFRILXEAEIDAHLVALAERD

SEQ ID NO: 21677 - protein, 178 aa, Homo sapiens
  MOD_RES (7)..(7): Selenocysteine
  MOD_RES (27)..(27): Selenocysteine
  MOD_RES (33)..(33): Selenocysteine
  MOD_RES (38)..(38): Selenocysteine
  MOD_RES (49)..(49): Selenocysteine
  MOD_RES (71)..(71): Selenocysteine
  MOD_RES (77)..(77): Selenocysteine
  MOD_RES (82)..(82): Selenocysteine
  MOD_RES (107)..(107): Selenocysteine
  MOD_RES (113)..(113): Selenocysteine
  MOD_RES (117)..(117): Selenocysteine
MAFAGLXADARIVINRARVECQSHRLXVEDPVXVEYIXRYIASLKQRYXQSNGRRPFGISALIVGFDFDGXPRLYQXDPSGXYHAWKANAIGRGAKSVREFLEKNYXDEAIEXDDLXIKLVIKALLEVVQSGGKNIELAVMRRDQSLKILNPEEIEKYVAEIEKEKEENEKKKQKKAS

SEQ ID NO: 21678 - protein, 248 aa, Homo sapiens
  MOD_RES (8)..(8): Selenocysteine
  MOD_RES (31)..(31): Selenocysteine
  MOD_RES (58)..(58): Selenocysteine
  MOD_RES (77)..(77): Selenocysteine
  MOD_RES (97)..(97): Selenocysteine
  MOD_RES (103)..(103): Selenocysteine
  MOD_RES (108)..(108): Selenocysteine
  MOD_RES (119)..(119): Selenocysteine
  MOD_RES (141)..(141): Selenocysteine
  MOD_RES (147)..(147): Selenocysteine
  MOD_RES (152)..(152): Selenocysteine
  MOD_RES (177)..(177): Selenocysteine
  MOD_RES (183)..(183): Selenocysteine
  MOD_RES (187)..(187): Selenocysteine
MSYDRAIXVFSPDGHLFQVEYAQEAVKKGSXAVGVRGRDIVVLGVEKKSVAKLQDERXVRKICALDDNVCMAFAGLXADARIVINRARVECQSHRLXVEDPVXVEYIXRYIASLKQRYXQSNGRRPFGISALIVGFDFDGXPRLYQXDPSGXYHAWKANAIGRGAKSVREFLEKNYXDEAIEXDDLXIKLVIKALLEVVQSGGKNIELAVMRRDQSLKILNPEEIEKYVAEIEKEKEENEKKKQKKAS

SEQ ID NO: 21679 - protein, 149 aa, Homo sapiens
  MOD_RES (8)..(8): Selenocysteine
  MOD_RES (31)..(31): Selenocysteine
  MOD_RES (58)..(58): Selenocysteine
  MOD_RES (77)..(77): Selenocysteine
  MOD_RES (97)..(97): Selenocysteine
  MOD_RES (103)..(103): Selenocysteine
  MOD_RES (108)..(108): Selenocysteine
  MOD_RES (143)..(143): Selenocysteine
MSYDRAIXVFSPDGHLFQVEYAQEAVKKGSXAVGVRGRDIVVLGVEKKSVAKLQDERXVRKICALDDNVCMAFAGLXADARIVINRARVECQSHRLXVEDPVXVEYIXRYIASLKQVGACPLACSPLAAGQSRLRHGGSCHVXSGESEN

SEQ ID NO: 21680 - protein, 187 aa, Homo sapiens
  MOD_RES (1)..(1): Any amino acid
  MOD_RES (3)..(3): Selenocysteine
  MOD_RES (23)..(23): Selenocysteine
  MOD_RES (29)..(29): Selenocysteine
  MOD_RES (34)..(34): Selenocysteine
  MOD_RES (45)..(45): Selenocysteine
  MOD_RES (67)..(67): Selenocysteine
  MOD_RES (73)..(73): Selenocysteine
  MOD_RES (78)..(78): Selenocysteine
  MOD_RES (103)..(103): Selenocysteine
  MOD_RES (109)..(109): Selenocysteine
  MOD_RES (113)..(113): Selenocysteine
XLXADARIVINRARVECQSHRLXVEDPVXVEYIXRYIASLKQRYXQSNGRRPFGISALIVGFDFDGXPRLYQXDPSGXYHAWKANAIGRGAKSVREFLEKNYXDEAIEXDDLXIKLVIKALLEGKVVNAPVFCPFKVVQSGGKNIELAVMRRDQSLKILNPEEIEKYVAEIEKEKEENEKKKQKKAS

SEQ ID NO: 21681 - protein, 212 aa, Homo sapiens
  MOD_RES (10)..(10): Selenocysteine
  MOD_RES (33)..(33): Selenocysteine
  MOD_RES (41)..(41): Selenocysteine
  MOD_RES (61)..(61): Selenocysteine
  MOD_RES (67)..(67): Selenocysteine
  MOD_RES (72)..(72): Selenocysteine
  MOD_RES (77)..(77): Selenocysteine
  MOD_RES (83)..(83): Selenocysteine
  MOD_RES (111)..(111): Selenocysteine
  MOD_RES (116)..(116): Selenocysteine
  MOD_RES (131)..(131): Selenocysteine
  MOD_RES (141)..(141): Selenocysteine
  MOD_RES (194)..(194): Selenocysteine
MASRYDRAIXVFSPDGHLFQVEYAQEAVKKGSXAVGIRGLXADARVVINRARVECQSHKLXVEDPVXVEYIXRFIAXLKQKYXQSNGRRPFGISALIVGFDDDGISRLYQXDPSGXYHAWKANAIGRSAKXVREFLEKNYXEDAIASDSEAIKLAIKALLEVVQSGGKNIELAIIRRNQPLKMFSAKEVELYVXEIEKEKEEAEKKKSKKSV

SEQ ID NO: 21682 - protein, 250 aa, Homo sapiens
  MOD_RES (10)..(10): Selenocysteine
  MOD_RES (33)..(33): Selenocysteine
  MOD_RES (40)..(40): Selenocysteine
  MOD_RES (60)..(60): Selenocysteine
  MOD_RES (79)..(79): Selenocysteine
  MOD_RES (99)..(99): Selenocysteine
  MOD_RES (105)..(105): Selenocysteine
  MOD_RES (110)..(110): Selenocysteine
  MOD_RES (115)..(115): Selenocysteine
  MOD_RES (121)..(121): Selenocysteine
  MOD_RES (149)..(149): Selenocysteine
  MOD_RES (154)..(154): Selenocysteine
  MOD_RES (169)..(169): Selenocysteine
  MOD_RES (179)..(179): Selenocysteine
  MOD_RES (232)..(232): Selenocysteine
MASRYDRAIXVFSPDGHLFQVEYAQEAVKKGSXAVGIRGXNIVVLGVEKKSVAKLQDERXVRKICALDDHVCMAFAGLXADARVVINRARVECQSHKLXVEDPVXVEYIXRFIAXLKQKYXQSNGRRPFGISALIVGFDDDGISRLYQXDPSGXYHAWKANAIGRSAKXVREFLEKNYXEDAIASDSEAIKLAIKALLEVVQSGGKNIELAIIRRNQPLKMFSAKEVELYVXEIEKEKEEAEKKKSKKSV

SEQ ID NO: 21683 - protein, 256 aa, Homo sapiens
  MOD_RES (10)..(10): Selenocysteine
  MOD_RES (33)..(33): Selenocysteine
  MOD_RES (40)..(40): Selenocysteine
  MOD_RES (60)..(60): Selenocysteine
  MOD_RES (79)..(79): Selenocysteine
  MOD_RES (85)..(85): Selenocysteine
  MOD_RES (105)..(105): Selenocysteine
  MOD_RES (111)..(111): Selenocysteine
  MOD_RES (116)..(116): Selenocysteine
  MOD_RES (121)..(121): Selenocysteine
  MOD_RES (127)..(127): Selenocysteine
  MOD_RES (155)..(155): Selenocysteine
  MOD_RES (160)..(160): Selenocysteine
  MOD_RES (175)..(175): Selenocysteine
  MOD_RES (185)..(185): Selenocysteine
  MOD_RES (238)..(238): Selenocysteine
MASRYDRAIXVFSPDGHLFQVEYAQEAVKKGSXAVGIRGXNIVVLGVEKKSVAKLQDERXVRKICALDDHVCMAFAVLXIFIGLXADARVVINRARVECQSHKLXVEDPVXVEYIXRFIAXLKQKYXQSNGRRPFGISALIVGFDDDGISRLYQXDPSGXYHAWKANAIGRSAKXVREFLEKNYXEDAIASDSEAIKLAIKALLEVVQSGGKNIELAIIRRNQPLKMFSAKEVELYVXEIEKEKEEAEKKKSKKSV

SEQ ID NO: 21684 - protein, 63 aa, Homo sapiens
  MOD_RES (10)..(10): Selenocysteine
  MOD_RES (33)..(33): Selenocysteine
MASRYDRAIXVFSPDGHLFQVEYAQEAVKKGSXAYHVSLIVHDSCGLAWMSAHLKKSEFEVPI

SEQ ID NO: 21685 - protein, 224 aa, Homo sapiens
  MOD_RES (5)..(5): Selenocysteine
  MOD_RES (14)..(14): Selenocysteine
  MOD_RES (34)..(34): Selenocysteine
  MOD_RES (53)..(53): Selenocysteine
  MOD_RES (73)..(73): Selenocysteine
  MOD_RES (79)..(79): Selenocysteine
  MOD_RES (84)..(84): Selenocysteine
  MOD_RES (89)..(89): Selenocysteine
  MOD_RES (95)..(95): Selenocysteine
  MOD_RES (123)..(123): Selenocysteine
  MOD_RES (128)..(128): Selenocysteine
  MOD_RES (143)..(143): Selenocysteine
  MOD_RES (153)..(153): Selenocysteine
  MOD_RES (206)..(206): Selenocysteine
MDVCXFEKVGIRGXNIVVLGVEKKSVAKLQDERXVRKICALDDHVCMAFAGLXADARVVINRARVECQSHKLXVEDPVXVEYIXRFIAXLKQKYXQSNGRRPFGISALIVGFDDDGISRLYQXDPSGXYHAWKANAIGRSAKXVREFLEKNYXEDAIASDSEAIKLAIKALLEVVQSGGKNIELAIIRRNQPLKMFSAKEVELYVXEIEKEKEEAEKKKSKKSV

SEQ ID NO: 21686 - protein, 241 aa, Homo sapiens
  MOD_RES (5)..(5): Selenocysteine
  MOD_RES (39)..(39): Selenocysteine
  MOD_RES (55)..(55): Selenocysteine
  MOD_RES (65)..(65): Selenocysteine
  MOD_RES (75)..(75): Selenocysteine
  MOD_RES (78)..(78): Selenocysteine
  MOD_RES (91)..(91): Selenocysteine
  MOD_RES (93)..(93): Selenocysteine
  MOD_RES (112)..(113): Selenocysteine
  MOD_RES (122)..(122): Selenocysteine
  MOD_RES (217)..(217): Selenocysteine
  MOD_RES (227)..(227): Selenocysteine
  MOD_RES (235)..(235): Selenocysteine
MLSSXAMYSAPGRDLGMEPHRAAGPLQLRFSPYVFNGGXILAIAGEDFAIVASDXRLSEGFSIHXRDSPKCYKLXDKXVIGCSGFHGDCLXLXKIIEARLKMYKHSNNKAMXXGAIAAMLSXILYSRRFFPYYVYNIIGGLDEEGKGAVYSFDPVGSYQRDSFKAGGSASAMLQPLLDNQVGFKNMQNVEHVPLSLDRAMRLVKDVFISAAERDVYXGDALRICIVXKEGIREEXVSLRKD

SEQ ID NO: 21687 - protein, 138 aa, Homo sapiens
  MOD_RES (5)..(5): Selenocysteine
  MOD_RES (25)..(25): Selenocysteine
  MOD_RES (44)..(44): Selenocysteine
  MOD_RES (66)..(66): Selenocysteine
  MOD_RES (79)..(79): Selenocysteine
  MOD_RES (98)..(98): Selenocysteine
  MOD_RES (100)..(100): Selenocysteine
  MOD_RES (107)..(107): Selenocysteine
  MOD_RES (112)..(112): Selenocysteine
  MOD_RES (129)..(130): Selenocysteine
ILRQXLFRYQGHVGASLIVGGVDLXGPQLYGVHPHGSYSRLPFXALGSGQDAALAVLEDRFQPNMXLEAAQGLLVEAVXAGILGDLGSGGNVDACVIXKXGAKLLRXLSSPXEPVKRGCPSSLPGLAAXXLCLEPQLS

SEQ ID NO: 21688 - protein, 273 aa, Homo sapiens
  MOD_RES (38)..(38): Selenocysteine
  MOD_RES (40)..(41): Selenocysteine
  MOD_RES (57)..(57): Selenocysteine
  MOD_RES (60)..(60): Selenocysteine
  MOD_RES (94)..(95): Selenocysteine
  MOD_RES (109)..(109): Selenocysteine
  MOD_RES (117)..(117): Selenocysteine
  MOD_RES (119)..(119): Selenocysteine
  MOD_RES (125)..(125): Selenocysteine
  MOD_RES (145)..(145): Selenocysteine
  MOD_RES (164)..(164): Selenocysteine
  MOD_RES (186)..(186): Selenocysteine
  MOD_RES (199)..(199): Selenocysteine
  MOD_RES (218)..(218): Selenocysteine
  MOD_RES (220)..(220): Selenocysteine
  MOD_RES (227)..(227): Selenocysteine
  MOD_RES (232)..(232): Selenocysteine
  MOD_RES (247)..(248): Selenocysteine
  MOD_RES (252)..(252): Selenocysteine
  MOD_RES (254)..(254): Selenocysteine
  MOD_RES (259)..(259): Selenocysteine
  MOD_RES (266)..(266): Selenocysteine
MLKPALEPRGGFSFENCQRNASLERVLPGLKVPHARKXGXXIAGLVFQDGVILGADXRAXNDSVVADKSCEKIHFIAPKIYCCGAGVAADAEMXXRMVASKMELHALSXGREPRVAXVXRILRQXLFRYQGHVGASLIVGGVDLXGPQLYGVHPHGSYSRLPFXALGSGQDAALAVLEDRFQPNMXLEAAQGLLVEAVXAGILGDLGSGGNVDACVIXKXGAKLLRXLSSPXEPVKRSGRYHFVPGXXAVLXQXVKPLXLELVEEXVQAMEVE

SEQ ID NO: 21689 - protein, 300 aa, Homo sapiens
  MOD_RES (14)..(14): Selenocysteine
  MOD_RES (37)..(37): Selenocysteine
  MOD_RES (50)..(52): Selenocysteine
  MOD_RES (67)..(67): Selenocysteine
  MOD_RES (93)..(94): Selenocysteine
  MOD_RES (97)..(97): Selenocysteine
  MOD_RES (103)..(103): Selenocysteine
  MOD_RES (148)..(148): Selenocysteine
  MOD_RES (168)..(168): Selenocysteine
  MOD_RES (198)..(198): Selenocysteine
  MOD_RES (213)..(213): Selenocysteine
  MOD_RES (269)..(269): Selenocysteine
  MOD_RES (287)..(287): Selenocysteine
  MOD_RES (297)..(297): Selenocysteine
  MOD_RES (299)..(299): Selenocysteine
MALQDVCKWQSPDXQGPSPHLPRAGGWAVPRGCDPQXFLQIHGPRLAHGXXXLAFRFRHGVIAAADXRSSCGSYVACPASCKVIPVHQHLLGXXSGXSADCAXWYRVLQRELRLRELREGQLPSVASAAKLLSAMMSQYRGLDLCVAXALCGWDRSGPELFYVYSDGXRLQGDIFSVGSGSPYAYGVLDRGYRYDMSXQEAYALARCAVAHAXHRDAYSGGSVDLFHVRESGWEHVSRSDACVLYVELQKLLEPEPEEDASHAHPEPAXAHRAAEDRELSVGPGEVXPGDSRMPAGXEXV

SEQ ID NO: 21690 - protein, 84 aa, Homo sapiens
  MOD_RES (22)..(22): Selenocysteine
  MOD_RES (31)..(31): Selenocysteine
  MOD_RES (33)..(33): Selenocysteine
  MOD_RES (60)..(60): Selenocysteine
MDYLAALAKAPFAAHGYGAFLXLSILDRYYXPXISRERAVELLRKCLEELQKRFILNLPXFSVRIIDKNGIHDLDNISFPKQGS

SEQ ID NO: 21691 - protein, 201 aa, Homo sapiens
  MOD_RES (53)..(53): Selenocysteine
  MOD_RES (78)..(78): Selenocysteine
  MOD_RES (84)..(84): Selenocysteine
  MOD_RES (96)..(96): Selenocysteine
  MOD_RES (139)..(139): Selenocysteine
  MOD_RES (148)..(148): Selenocysteine
  MOD_RES (150)..(150): Selenocysteine
  MOD_RES (177)..(177): Selenocysteine
MEYLIGIQGPDYVLVASDRVAASNIVQMKDDHDKMFKMSEKILLLCVGEAGDXVQFAEYIQKNVQLYKMRNGYELSPXAAANFXRRNLADCLRSRXPYHVNLLLAGYDEHEGPALYYMDYLAALAKAPFAAHGYGAFLXLSILDRYYXPXISRERAVELLRKCLEELQKRFILNLPXFSVRIIDKNGIHDLDNISFPKQGS

SEQ ID NO: 21692 - protein, 205 aa, Homo sapiens
  MOD_RES (36)..(37): Selenocysteine
  MOD_RES (58)..(58): Selenocysteine
  MOD_RES (62)..(62): Selenocysteine
  MOD_RES (86)..(86): Selenocysteine
  MOD_RES (105)..(105): Selenocysteine
  MOD_RES (116)..(116): Selenocysteine
  MOD_RES (133)..(133): Selenocysteine
  MOD_RES (141)..(141): Selenocysteine
  MOD_RES (166)..(166): Selenocysteine
  MOD_RES (196)..(197): Selenocysteine
  MOD_RES (199)..(199): Selenocysteine
MSIMSYNGGAVMAMKGKNCVAIAADRRFGIQAQMVXXDFQKIFPMGDRLYIGLAGLAXDVQXVAQRLKFRLNLYELKEGRQIKPYXLMSMVANLLYEKRFGPYYXEPVIAGLDPKXFKPFICSLDLIGCPMVXDDFVVSGXCAEQMYGMCESLWEPNMDPDHLFEXISQAMLNAVDRDAVSGMGVIVHIIEKDKIXXRXLKARMD

SEQ ID NO: 21693 - protein, 112 aa, Homo sapiens
  MOD_RES (36)..(37): Selenocysteine
  MOD_RES (58)..(58): Selenocysteine
  MOD_RES (62)..(62): Selenocysteine
  MOD_RES (86)..(86): Selenocysteine
  MOD_RES (103)..(103): Selenocysteine
MSIMSYNGGAVMAMKGKNCVAIAADRRFGIQAQMVXXDFQKIFPMGDRLYIGLAGLAXDVQXVAQRLKFRLNLYELKEGRQIKPYXLMSMVANLLYEKRIRIXCLKPSPKPC

SEQ ID NO: 21694 - protein, 107 aa, Homo sapiens
  MOD_RES (36)..(37): Selenocysteine
  MOD_RES (58)..(58): Selenocysteine
  MOD_RES (62)..(62): Selenocysteine
  MOD_RES (86)..(86): Selenocysteine
MSIMSYNGGAVMAMKGKNCVAIAADRRFGIQAQMVXXDFQKIFPMGDRLYIGLAGLAXDVQXVAQRLKFRLNLYELKEGRQIKPYXLMSMVANLLYEKRPHRLPHGD

SEQ ID NO: 21695 - protein, 145 aa, Homo sapiens
  MOD_RES (33)..(34): Selenocysteine
  MOD_RES (55)..(55): Selenocysteine
  MOD_RES (59)..(59): Selenocysteine
  MOD_RES (83)..(83): Selenocysteine
  MOD_RES (102)..(102): Selenocysteine
  MOD_RES (113)..(113): Selenocysteine
  MOD_RES (130)..(130): Selenocysteine
  MOD_RES (138)..(138): Selenocysteine
MSYNGGAVMAMKGKNCVAIAADRRFGIQAQMVXXDFQKIFPMGDRLYIGLAGLAXDVQXVAQRLKFRLNLYELKEGRQIKPYXLMSMVANLLYEKRFGPYYXEPVIAGLDPKXFKPFICSLDLIGCPMVXDDFVVSGXCAEQMYG

SEQ ID NO: 21696 - protein, 264 aa, Homo sapiens
  MOD_RES (27)..(27): Selenocysteine
  MOD_RES (44)..(44): Selenocysteine
  MOD_RES (46)..(46): Selenocysteine
  MOD_RES (52)..(52): Selenocysteine
  MOD_RES (54)..(54): Selenocysteine
  MOD_RES (94)..(94): Selenocysteine
  MOD_RES (138)..(138): Selenocysteine
  MOD_RES (154)..(154): Selenocysteine
  MOD_RES (184)..(184): Selenocysteine
  MOD_RES (208)..(208): Selenocysteine
  MOD_RES (236)..(236): Selenocysteine
  MOD_RES (238)..(238): Selenocysteine
  MOD_RES (250)..(250): Selenocysteine
  MOD_RES (252)..(252): Selenocysteine
MEAFLGSRSGLWAGGPAPGQFYRIPSXPDSFMDPASALYRGPIXRXQNPMVXGXSVLGVKFEGGVVIAADMLGSYGSLARFRNISRIMRVNNSXMLGASGDYADFQYLKQVLGQMVIDEELLGDGHSYSPRAIHSWLXRAMYSRRSKMNPLWNXMVIGGYADGESFLGYVDMLGVAYEAPSLAXGYGAYLAQPLLREVLEKQPVLSQXEARDLVERCMRVLYYRDARSYNRFQIAXVXEKGVEIEGPLSXEXNWDIAHMISGFE

SEQ ID NO: 21697 - protein, 160 aa, Homo sapiens
  MOD_RES (55)..(55): Selenocysteine
  MOD_RES (81)..(81): Selenocysteine
  MOD_RES (120)..(120): Selenocysteine
  MOD_RES (159)..(159): Selenocysteine
MAGGAADCSFWERLLARQCRIYELRNKERISVAAASKLLANMVYQYKGMGLSMGXMICGWDKRGPGLYYVDSEGNRISGAXFSVGSGSVYAYGVMDRGYSYDLEVEQAYDLARRAIYQAXYRDAYSGGAVNLYHVREDGWIRVSSDNVADLHEKYSGSXP

SEQ ID NO: 21698 - protein, 84 aa, Homo sapiens
  MOD_RES (60)..(62): Selenocysteine
  MOD_RES (69)..(70): Selenocysteine
  MOD_RES (72)..(72): Selenocysteine
  MOD_RES (76)..(76): Selenocysteine
MALASVLERPLPVNQRGFFGLGGRADLLDLGPGSLSDGLSLAAPGWGVPEEPGIEMLHGXXXLAFKASXXWXVKGXGFQGPPSL

SEQ ID NO: 21699 - protein, 263 aa, Homo sapiens
  MOD_RES (60)..(62): Selenocysteine
  MOD_RES (80)..(80): Selenocysteine
  MOD_RES (89)..(89): Selenocysteine
  MOD_RES (103)..(103): Selenocysteine
  MOD_RES (158)..(158): Selenocysteine
  MOD_RES (184)..(184): Selenocysteine
  MOD_RES (223)..(223): Selenocysteine
  MOD_RES (262)..(262): Selenocysteine
MALASVLERPLPVNQRGFFGLGGRADLLDLGPGSLSDGLSLAAPGWGVPEEPGIEMLHGXXXLAFKFRHGVIVAADSRAXAGAYIASQXVKKVIEINPYLLGXMAGGAADCSFWERLLARQCRIYELRNKERISVAAASKLLANMVYQYKGMGLSMGXMICGWDKRGPGLYYVDSEGNRISGAXFSVGSGSVYAYGVMDRGYSYDLEVEQAYDLARRAIYQAXYRDAYSGGAVNLYHVREDGWIRVSSDNVADLHEKYSGSXP

SEQ ID NO: 21700 - protein, 203 aa, Homo sapiens
  MOD_RES (60)..(62): Selenocysteine
  MOD_RES (80)..(80): Selenocysteine
  MOD_RES (89)..(89): Selenocysteine
  MOD_RES (103)..(103): Selenocysteine
  MOD_RES (158)..(158): Selenocysteine
MALASVLERPLPVNQRGFFGLGGRADLLDLGPGSLSDGLSLAAPGWGVPEEPGIEMLHGXXXLAFKFRHGVIVAADSRAXAGAYIASQXVKKVIEINPYLLGXMAGGAADCSFWERLLARQCRIYELRNKERISVAAASKLLANMVYQYKGMGLSMGXMICGWDKRGPVSEVLCLKPKSFGMYLFCGCAERIGNMARPLLRGQ

SEQ ID NO: 21701 - protein, 77 aa, Homo sapiens
  MOD_RES (60)..(62): Selenocysteine
MALASVLERPLPVNQRGFFGLGGRADLLDLGPGSLSDGLSLAAPGWGVPEEPGIEMLHGXXXLAFKVWSQPPCQAEY

SEQ ID NO: 21702 - protein, 118 aa, Homo sapiens
  MOD_RES (1)..(1): Any amino acid
  MOD_RES (9)..(11): Selenocysteine
  MOD_RES (29)..(29): Selenocysteine
  MOD_RES (38)..(38): Selenocysteine
  MOD_RES (52)..(52): Selenocysteine
  MOD_RES (107)..(107): Selenocysteine
XGIEMLHGXXXLAFKFRHGVIVAADSRAXAGAYIASQXVKKVIEINPYLLGXMAGGAADCSFWERLLARQCRIYELRNKERISVAAASKLLANMVYQYKGMGLSMGXMICGWDKRGPG

SEQ ID NO: 21703 - protein, 213 aa, Homo sapiens
  MOD_RES (4)..(4): Selenocysteine
  MOD_RES (23)..(23): Selenocysteine
  MOD_RES (33)..(33): Selenocysteine
  MOD_RES (35)..(36): Selenocysteine
  MOD_RES (54)..(56): Selenocysteine
  MOD_RES (65)..(65): Selenocysteine
  MOD_RES (69)..(69): Selenocysteine
  MOD_RES (86)..(86): Selenocysteine
  MOD_RES (94)..(94): Selenocysteine
  MOD_RES (112)..(112): Selenocysteine
  MOD_RES (176)..(176): Selenocysteine
  MOD_RES (182)..(182): Selenocysteine
  MOD_RES (190)..(190): Selenocysteine
MAAXLLAARGAGPAPAWGPEAFXPDWESREVSXGXXIMAVQFDGGVVLGADSRXXXGSYIANRVXDKLXPIHDRIFCCRSGSAADXQAVADAVXYQLGFHSIELNEPPLVHXAASLFKEMCYRYREDLMAGIIIAGWDPQEGGQVYSVPMGGMMVRQSFAIGGSGSSYIYGYVDAXYREGMXKEECLQFXANAFFFYPQLSLWPWSGMAPVEE

SEQ ID NO: 21704 - protein, 239 aa, Homo sapiens
  MOD_RES (4)..(4): Selenocysteine
  MOD_RES (23)..(23): Selenocysteine
  MOD_RES (33)..(33): Selenocysteine
  MOD_RES (35)..(36): Selenocysteine
  MOD_RES (54)..(56): Selenocysteine
  MOD_RES (65)..(65): Selenocysteine
  MOD_RES (69)..(69): Selenocysteine
  MOD_RES (86)..(86): Selenocysteine
  MOD_RES (94)..(94): Selenocysteine
  MOD_RES (112)..(112): Selenocysteine
  MOD_RES (176)..(176): Selenocysteine
  MOD_RES (182)..(182): Selenocysteine
  MOD_RES (190)..(190): Selenocysteine
  MOD_RES (235)..(235): Selenocysteine
MAAXLLAARGAGPAPAWGPEAFXPDWESREVSXGXXIMAVQFDGGVVLGADSRXXXGSYIANRVXDKLXPIHDRIFCCRSGSAADXQAVADAVXYQLGFHSIELNEPPLVHXAASLFKEMCYRYREDLMAGIIIAGWDPQEGGQVYSVPMGGMMVRQSFAIGGSGSSYIYGYVDAXYREGMXKEECLQFXANALALAMERDGSSGGVIRLAAIAESGVERQVLLGDQIPKFAVAXLPPA

SEQ ID NO: 21705 - protein, 102 aa, Homo sapiens
  MOD_RES (1)..(1): Selenocysteine
  MOD_RES (20)..(20): Selenocysteine
  MOD_RES (30)..(30): Selenocysteine
  MOD_RES (32)..(33): Selenocysteine
  MOD_RES (51)..(53): Selenocysteine
  MOD_RES (62)..(62): Selenocysteine
  MOD_RES (66)..(66): Selenocysteine
  MOD_RES (83)..(83): Selenocysteine
  MOD_RES (91)..(91): Selenocysteine
XLLAARGAGPAPAWGPEAFXPDWESREVSXGXXIMAVQFDGGVVLGADSRXXXGSYIANRVXDKLXPIHDRIFCCRSGSAADXQAVADAVXYQLGFHSSQPL

SEQ ID NO: 21706 - protein, 277 aa, Homo sapiens
  MOD_RES (42)..(42): Selenocysteine
  MOD_RES (44)..(45): Selenocysteine
  MOD_RES (61)..(61): Selenocysteine
  MOD_RES (64)..(64): Selenocysteine
  MOD_RES (91)..(91): Selenocysteine
  MOD_RES (95)..(95): Selenocysteine
  MOD_RES (98)..(99): Selenocysteine
  MOD_RES (113)..(113): Selenocysteine
  MOD_RES (121)..(121): Selenocysteine
  MOD_RES (149)..(149): Selenocysteine
  MOD_RES (162)..(162): Selenocysteine
  MOD_RES (169)..(169): Selenocysteine
  MOD_RES (233)..(233): Selenocysteine
  MOD_RES (240)..(240): Selenocysteine
  MOD_RES (251)..(252): Selenocysteine
  MOD_RES (256)..(256): Selenocysteine
  MOD_RES (260)..(260): Selenocysteine
  MOD_RES (270)..(270): Selenocysteine
  MOD_RES (273)..(273): Selenocysteine
  MOD_RES (276)..(276): Selenocysteine
MAAVSVYAPPVGGFSFDNCRRNAVLEADFAKRGYKLPKVRKXGXXIAGVVYKDGIVLGADXRAXEGMVVADKNCSKIHFISPNIYCCGAGXAADXDMXXQLISSNLELHSLSXGRLPRVVXANRMLKQMLFRYQGYIGAALVLGGVDVXGPHLYSIYPHGSXDKLPYVXMGSGSLAAMAVFEDKFRPDMEEEEAKNLVSEAIAAGIFNDLGSGSNIDLCVISKNKLDFLRPYXVPNKKGXRLGRYRCEKGXXAVLXEKIXPLEIEVLEEXVQXMDXS

SEQ ID NO: 21707 - protein, 210 aa, Homo sapiens
  MOD_RES (42)..(42): Selenocysteine
  MOD_RES (44)..(45): Selenocysteine
  MOD_RES (61)..(61): Selenocysteine
  MOD_RES (64)..(64): Selenocysteine
  MOD_RES (91)..(91): Selenocysteine
  MOD_RES (95)..(95): Selenocysteine
  MOD_RES (98)..(99): Selenocysteine
  MOD_RES (113)..(113): Selenocysteine
  MOD_RES (121)..(121): Selenocysteine
  MOD_RES (149)..(149): Selenocysteine
  MOD_RES (162)..(162): Selenocysteine
  MOD_RES (169)..(169): Selenocysteine
  MOD_RES (179)..(179): Selenocysteine
MAAVSVYAPPVGGFSFDNCRRNAVLEADFAKRGYKLPKVRKXGXXIAGVVYKDGIVLGADXRAXEGMVVADKNCSKIHFISPNIYCCGAGXAADXDMXXQLISSNLELHSLSXGRLPRVVXANRMLKQMLFRYQGYIGAALVLGGVDVXGPHLYSIYPHGSXDKLPYVXMVHCEEELFXENLFFIRQAEVVSEEAWGPSFAISLAVFLVA

SEQ ID NO: 21708 - protein, 252 aa, Homo sapiens
  MOD_RES (51)..(51): Selenocysteine
  MOD_RES (73)..(75): Selenocysteine
  MOD_RES (167)..(167): Selenocysteine
  MOD_RES (176)..(176): Selenocysteine
  MOD_RES (181)..(181): Selenocysteine
  MOD_RES (212)..(212): Selenocysteine
  MOD_RES (238)..(238): Selenocysteine
MALLDVCGAPRGQRPESALPVAGSGRRSDPGHYSFSMRSPELALPRGMKPXEFFQSLGGDGERNVQIEMAHGXXXLAFKFQHGVIAAVDSRASAGSYINCQYWERLLAKECRLYYLRNGERISVSAASKLLSNMMCQYRGMGLSMGSMICGWDKKGPGLYYVDEHGXRLSGNMFSXGSGNXYAYGVMDSGYRPNLSPEEAYDLGRRAIAYAXHRDSYSGGVVNMYHMKEDGWVKVESXDVSDLLHQYREANQ

SEQ ID NO: 21709 - protein, 276 aa, Homo sapiens
  MOD_RES (51)..(51): Selenocysteine
  MOD_RES (73)..(75): Selenocysteine
  MOD_RES (116)..(116): Selenocysteine
  MOD_RES (191)..(191): Selenocysteine
  MOD_RES (200)..(200): Selenocysteine
  MOD_RES (205)..(205): Selenocysteine
  MOD_RES (236)..(236): Selenocysteine
  MOD_RES (262)..(262): Selenocysteine
MALLDVCGAPRGQRPESALPVAGSGRRSDPGHYSFSMRSPELALPRGMKPXEFFQSLGGDGERNVQIEMAHGXXXLAFKFQHGVIAAVDSRASAGSYISALRVNKVIEINPYLLGXMSGCAADCQYWERLLAKECRLYYLRNGERISVSAASKLLSNMMCQYRGMGLSMGSMICGWDKKGPGLYYVDEHGXRLSGNMFSXGSGNXYAYGVMDSGYRPNLSPEEAYDLGRRAIAYAXHRDSYSGGVVNMYHMKEDGWVKVESXDVSDLLHQYREANQ

SEQ ID NO: 21710 - protein, 252 aa, Homo sapiens
  MOD_RES (51)..(51): Selenocysteine
  MOD_RES (73)..(75): Selenocysteine
  MOD_RES (167)..(167): Selenocysteine
  MOD_RES (176)..(176): Selenocysteine
  MOD_RES (181)..(181): Selenocysteine
  MOD_RES (212)..(212): Selenocysteine
  MOD_RES (238)..(238): Selenocysteine
MALLDVCGAPRGQRPESALPVAGSGRRSDPGHYSFSMRSPELALPRGMQPXEFFQSLGGDGERNVQIEMAHGXXXLAFKFQHGVIAAVDSRASAGSYINCQYWERLLAKECRLYYLRNGERISVSAASKLLSNMMCQYRGMGLSMGSMICGWDKKGPGLYYVDEHGXRLSGNMFSXGSGNXYAYGVMDSGYRPNLSPEEAYDLGRRAIAYAXHRDSYSGGVVNMYHMKEDGWVKVESXDVSDLLHQYREANQ

SEQ ID NO: 21711 - protein, 276 aa, Homo sapiens
  MOD_RES (51)..(51): Selenocysteine
  MOD_RES (73)..(75): Selenocysteine
  MOD_RES (116)..(116): Selenocysteine
  MOD_RES (191)..(191): Selenocysteine
  MOD_RES (200)..(200): Selenocysteine
  MOD_RES (205)..(205): Selenocysteine
  MOD_RES (236)..(236): Selenocysteine
  MOD_RES (262)..(262): Selenocysteine
MALLDVCGAPRGQRPESALPVAGSGRRSDPGHYSFSMRSPELALPRGMQPXEFFQSLGGDGERNVQIEMAHGXXXLAFKFQHGVIAAVDSRASAGSYISALRVNKVIEINPYLLGXMSGCAADCQYWERLLAKECRLYYLRNGERISVSAASKLLSNMMCQYRGMGLSMGSMICGWDKKGPGLYYVDEHGXRLSGNMFSXGSGNXYAYGVMDSGYRPNLSPEEAYDLGRRAIAYAXHRDSYSGGVVNMYHMKEDGWVKVESXDVSDLLHQYREANQ

SEQ ID NO: 21712 - protein, 272 aa, Homo sapiens
  MOD_RES (5)..(5): Selenocysteine
  MOD_RES (7)..(7): Selenocysteine
  MOD_RES (11)..(12): Selenocysteine
  MOD_RES (18)..(18): Selenocysteine
  MOD_RES (31)..(32): Selenocysteine
  MOD_RES (35)..(35): Selenocysteine
  MOD_RES (47)..(47): Selenocysteine
  MOD_RES (69)..(71): Selenocysteine
  MOD_RES (112)..(112): Selenocysteine
  MOD_RES (187)..(187): Selenocysteine
  MOD_RES (196)..(196): Selenocysteine
  MOD_RES (201)..(201): Selenocysteine
  MOD_RES (232)..(232): Selenocysteine
  MOD_RES (258)..(258): Selenocysteine
MLIGXPXPRDXXPSSWLXSSLLVEAAPLDDXXLPXPVSSGCPGLEPXEFFQSLGGDGERNVQIEMAHGXXXLAFKFQHGVIAAVDSRASAGSYISALRVNKVIEINPYLLGXMSGCAADCQYWERLLAKECRLYYLRNGERISVSAASKLLSNMMCQYRGMGLSMGSMICGWDKKGPGLYYVDEHGXRLSGNMFSXGSGNXYAYGVMDSGYRPNLSPEEAYDLGRRAIAYAXHRDSYSGGVVNMYHMKEDGWVKVESXDVSDLLHQYREANQ

SEQ ID NO: 21713 - protein, 131 aa, Homo sapiens
  MOD_RES (111)..(111): Selenocysteine
  MOD_RES (117)..(117): Selenocysteine
  MOD_RES (129)..(129): Selenocysteine
MAVEFDGGVVMGSDSRVSAGEAVVNRVFDKLSPLHEHIYCALSGSAADAQAVADMAAYQLELHGIELEEPPLVLAAANVVRNISYKYREDLSAHLMVAGWDQREGGQVYGXLGGMLXRQPFAIGGSGSXFI

SEQ ID NO: 21714 - protein, 196 aa, Homo sapiens
  MOD_RES (111)..(111): Selenocysteine
  MOD_RES (117)..(117): Selenocysteine
  MOD_RES (129)..(129): Selenocysteine
  MOD_RES (152)..(153): Selenocysteine
  MOD_RES (174)..(174): Selenocysteine
  MOD_RES (176)..(176): Selenocysteine
MAVEFDGGVVMGSDSRVSAGEAVVNRVFDKLSPLHEHIYCALSGSAADAQAVADMAAYQLELHGIELEEPPLVLAAANVVRNISYKYREDLSAHLMVAGWDQREGGQVYGXLGGMLXRQPFAIGGSGSXFIYGYVDAAYKPGMSPEECRRFXXDAIALAMSRDGSSGGVIYLVXIXAAGVDHRVILGNELPKFYDE

SEQ ID NO: 21715 - protein, 131 aa, Homo sapiens
  MOD_RES (111)..(111): Selenocysteine
  MOD_RES (117)..(117): Selenocysteine
  MOD_RES (129)..(129): Selenocysteine
MAVEFDGGVVMGSDSRVSAGEAVVNRVFDKLSPLHERIYCALSGSAADAQAVADMAAYQLELHGIELEEPPLVLAAANVVRNISYKYREDLSAHLMVAGWDQREGGQVYGXLGGMLXRQPFAIGGSGSXFI

SEQ ID NO: 21716 - protein, 196 aa, Homo sapiens
  MOD_RES (111)..(111): Selenocysteine
  MOD_RES (117)..(117): Selenocysteine
  MOD_RES (129)..(129): Selenocysteine
  MOD_RES (152)..(153): Selenocysteine
  MOD_RES (174)..(174): Selenocysteine
  MOD_RES (176)..(176): Selenocysteine
MAVEFDGGVVMGSDSRVSAGEAVVNRVFDKLSPLHERIYCALSGSAADAQAVADMAAYQLELHGIELEEPPLVLAAANVVRNISYKYREDLSAHLMVAGWDQREGGQVYGXLGGMLXRQPFAIGGSGSXFIYGYVDAAYKPGMSPEECRRFXXDAIALAMSRDGSSGGVIYLVXIXAAGVDHRVILGNELPKFYDE

SEQ ID NO: 21717 - protein, 219 aa, Homo sapiens
  MOD_RES (8)..(8): Selenocysteine
  MOD_RES (19)..(19): Selenocysteine
  MOD_RES (21)..(22): Selenocysteine
  MOD_RES (134)..(134): Selenocysteine
  MOD_RES (140)..(140): Selenocysteine
  MOD_RES (152)..(152): Selenocysteine
  MOD_RES (175)..(176): Selenocysteine
  MOD_RES (197)..(197): Selenocysteine
  MOD_RES (199)..(199): Selenocysteine
MLRAGAPXGDLPRAGEVHXGXXIMAVEFDGGVVMGSDSRVSAGEAVVNRVFDKLSPLHEHIYCALSGSAADAQAVADMAAYQLELHGIELEEPPLVLAAANVVRNISYKYREDLSAHLMVAGWDQREGGQVYGXLGGMLXRQPFAIGGSGSXFIYGYVDAAYKPGMSPEECRRFXXDAIALAMSRDGSSGGVIYLVXIXAAGVDHRVILGNELPKFYDE

SEQ ID NO: 21718 - protein, 219 aa, Homo sapiens
  MOD_RES (8)..(8): Selenocysteine
  MOD_RES (19)..(19): Selenocysteine
  MOD_RES (21)..(22): Selenocysteine
  MOD_RES (134)..(134): Selenocysteine
  MOD_RES (140)..(140): Selenocysteine
  MOD_RES (152)..(152): Selenocysteine
  MOD_RES (175)..(176): Selenocysteine
  MOD_RES (197)..(197): Selenocysteine
  MOD_RES (199)..(199): Selenocysteine
MLRAGAPXGDLPRAGEVHXGXXIMAVEFDGGVVMGSDSRVSAGEAVVNRVFDKLSPLHERIYCALSGSAADAQAVADMAAYQLELHGIELEEPPLVLAAANVVRNISYKYREDLSAHLMVAGWDQREGGQVYGXLGGMLXRQPFAIGGSGSXFIYGYVDAAYKPGMSPEECRRFXXDAIALAMSRDGSSGGVIYLVXIXAAGVDHRVILGNELPKFYDE

SEQ ID NO: 21719 - protein, 178 aa, Homo sapiens
  MOD_RES (8)..(8): Selenocysteine
  MOD_RES (19)..(19): Selenocysteine
  MOD_RES (21)..(22): Selenocysteine
  MOD_RES (90)..(90): Selenocysteine
  MOD_RES (96)..(96): Selenocysteine
  MOD_RES (108)..(108): Selenocysteine
  MOD_RES (131)..(132): Selenocysteine
  MOD_RES (135)..(135): Selenocysteine
  MOD_RES (137)..(137): Selenocysteine
  MOD_RES (148)..(148): Selenocysteine
  MOD_RES (164)..(164): Selenocysteine
MLRAGAPXGDLPRAGEVHXGXXIMAVEFDGGVVMGSDSRVSAGIELEEPPLVLAAANVVRNISYKYREDLSAHLMVAGWDQREGGQVYGXLGGMLXRQPFAIGGSGSXFIYGYVDAAYKPGMSPEECRRFXXDAXSXKRRVCGYFLRXQKRENQNQRVHEYMCXGERSLSSSPLLSCS

SEQ ID NO: 21720 - protein, 178 aa, Homo sapiens
  MOD_RES (8)..(8): Selenocysteine
  MOD_RES (19)..(19): Selenocysteine
  MOD_RES (21)..(22): Selenocysteine
  MOD_RES (90)..(90): Selenocysteine
  MOD_RES (96)..(96): Selenocysteine
  MOD_RES (108)..(108): Selenocysteine
  MOD_RES (131)..(132): Selenocysteine
  MOD_RES (135)..(135): Selenocysteine
  MOD_RES (137)..(137): Selenocysteine
  MOD_RES (148)..(148): Selenocysteine
  MOD_RES (164)..(164): Selenocysteine
MLRAGAPXGDLPRAGEVHXGXXIMAVEFDGGVVMGSDSRVSAGIELEEPPLVLAAANVVRNISYKYREDLSAHLMVAGWDQREGGQVYGXLGGMLXRQPFAIGGSGSXFIYGYVDAAYKPGMSPEECRRFXXDAXSXKRRVCGYFLRXQKRENQNQRVHEYMCXSERSLSSSPLLSCS

SEQ ID NO: 21721 - protein, 84 aa, Homo sapiens
  MOD_RES (4)..(4): Selenocysteine
  MOD_RES (9)..(9): Selenocysteine
  MOD_RES (20)..(20): Selenocysteine
  MOD_RES (43)..(43): Selenocysteine
  MOD_RES (67)..(67): Selenocysteine
  MOD_RES (70)..(70): Selenocysteine
  MOD_RES (80)..(80): Selenocysteine
  MOD_RES (83)..(83): Selenocysteine
MDDXDPLVXVMKVEKAPQEXYADIGGLDNQIQEIKESVELPLXHPEYYEEMGIKPPKGVILYGPPGXGKXLLAKAVANQXSAXF

SEQ ID NO: 21722 - protein, 367 aa, Homo sapiens
  MOD_RES (32)..(32): Selenocysteine
  MOD_RES (38)..(38): Selenocysteine
  MOD_RES (52)..(52): Selenocysteine
  MOD_RES (94)..(94): Selenocysteine
  MOD_RES (99)..(99): Selenocysteine
  MOD_RES (110)..(110): Selenocysteine
  MOD_RES (133)..(133): Selenocysteine
  MOD_RES (157)..(157): Selenocysteine
  MOD_RES (160)..(160): Selenocysteine
  MOD_RES (170)..(170): Selenocysteine
  MOD_RES (173)..(173): Selenocysteine
  MOD_RES (219)..(219): Selenocysteine
  MOD_RES (235)..(235): Selenocysteine
  MOD_RES (258)..(258): Selenocysteine
  MOD_RES (263)..(263): Selenocysteine
  MOD_RES (287)..(287): Selenocysteine
  MOD_RES (296)..(296): Selenocysteine
  MOD_RES (300)..(300): Selenocysteine
  MOD_RES (306)..(306): Selenocysteine
  MOD_RES (327)..(327): Selenocysteine
  MOD_RES (342)..(342): Selenocysteine
  MOD_RES (361)..(361): Selenocysteine
MEEEFIRNQEQMKPLEEKQEEERSKVDDLRGXPMSVGXLEEIIDDNHAIVSXSVGSEHYVSILSFVDKDLLEPGCSVLLNHKVHAVIGVLMDDXDPLVXVMKVEKAPQEXYADIGGLDNQIQEIKESVELPLXHPEYYEEMGIKPPKGVILYGPPGXGKXLLAKAVANQXSAXFLRVVGSELIQKYLGDGPKLVRELFRVAEEHAPSIVFIDEIDAIGXKRYDSNSGGEREIQRXMLELLNQLDGFDSRGDVKVIMAXNRIEXLDPALIRPGRIDRKIEFPLPDEKXKKRIFQIHXSRMXLADDVXLDDLIMAKDDLSGADIKAICXEAGLMALRERRMKVXNEDFKKSKENVLYKKQEGXPEGLYL

SEQ ID NO: 21723 - protein, 440 aa, Homo sapiens
  MOD_RES (31)..(31): Selenocysteine
  MOD_RES (40)..(40): Selenocysteine
  MOD_RES (53)..(53): Selenocysteine
  MOD_RES (56)..(56): Selenocysteine
  MOD_RES (105)..(105): Selenocysteine
  MOD_RES (111)..(111): Selenocysteine
  MOD_RES (125)..(125): Selenocysteine
  MOD_RES (167)..(167): Selenocysteine
  MOD_RES (172)..(172): Selenocysteine
  MOD_RES (183)..(183): Selenocysteine
  MOD_RES (206)..(206): Selenocysteine
  MOD_RES (230)..(230): Selenocysteine
  MOD_RES (233)..(233): Selenocysteine
  MOD_RES (243)..(243): Selenocysteine
  MOD_RES (246)..(246): Selenocysteine
  MOD_RES (292)..(292): Selenocysteine
  MOD_RES (308)..(308): Selenocysteine
  MOD_RES (331)..(331): Selenocysteine
  MOD_RES (336)..(336): Selenocysteine
  MOD_RES (360)..(360): Selenocysteine
  MOD_RES (369)..(369): Selenocysteine
  MOD_RES (373)..(373): Selenocysteine
  MOD_RES (379)..(379): Selenocysteine
  MOD_RES (400)..(400): Selenocysteine
  MOD_RES (415)..(415): Selenocysteine
  MOD_RES (434)..(434): Selenocysteine
MGQSQSGGHGPGGGKKDDKDKKKKYEPPVPXRVGKKKKKXKGPDAASKLPLVXPHXQCRLKLLKLERIKDYLLMEEEFIRNQEQMKPLEEKQEEERSKVDDLRGXPMSVGXLEEIIDDNHAIVSXSVGSEHYVSILSFVDKDLLEPGCSVLLNHKVHAVIGVLMDDXDPLVXVMKVEKAPQEXYADIGGLDNQIQEIKESVELPLXHPEYYEEMGIKPPKGVILYGPPGXGKXLLAKAVANQXSAXFLRVVGSELIQKYLGDGPKLVRELFRVAEEHAPSIVFIDEIDAIGXKRYDSNSGGEREIQRXMLELLNQLDGFDSRGDVKVIMAXNRIEXLDPALIRPGRIDRKIEFPLPDEKXKKRIFQIHXSRMXLADDVXLDDLIMAKDDLSGADIKAICXEAGLMALRERRMKVXNEDFKKSKENVLYKKQEGXPEGLYL

SEQ ID NO: 21724 - protein, 130 aa, Homo sapiens
  MOD_RES (12)..(12): Selenocysteine
  MOD_RES (35)..(35): Selenocysteine
  MOD_RES (40)..(40): Selenocysteine
  MOD_RES (63)..(63): Selenocysteine
  MOD_RES (70)..(70): Selenocysteine
  MOD_RES (86)..(86): Selenocysteine
  MOD_RES (99)..(99): Selenocysteine
MPDYLGADQRKXKEDEKDDKPIRALDEGDIALLKXYGQSXYSRQIKQVEDDIQQLLKKINELXGIKESDXGLAPPALWDLAADKQXLQSEQPLQVARCXKIINADSEDPKYIINVKQFAKFVVDLSDQVA

SEQ ID NO: 21725 - protein, 433 aa, Homo sapiens
  MOD_RES (12)..(12): Selenocysteine
  MOD_RES (35)..(35): Selenocysteine
  MOD_RES (40)..(40): Selenocysteine
  MOD_RES (63)..(63): Selenocysteine
  MOD_RES (70)..(70): Selenocysteine
  MOD_RES (86)..(86): Selenocysteine
  MOD_RES (99)..(99): Selenocysteine
  MOD_RES (132)..(132): Selenocysteine
  MOD_RES (160)..(160): Selenocysteine
  MOD_RES (162)..(162): Selenocysteine
  MOD_RES (173)..(173): Selenocysteine
  MOD_RES (193)..(193): Selenocysteine
  MOD_RES (220)..(220): Selenocysteine
  MOD_RES (223)..(223): Selenocysteine
  MOD_RES (233)..(233): Selenocysteine
  MOD_RES (266)..(266): Selenocysteine
  MOD_RES (298)..(298): Selenocysteine
  MOD_RES (321)..(321): Selenocysteine
  MOD_RES (326)..(326): Selenocysteine
  MOD_RES (352)..(352): Selenocysteine
  MOD_RES (381)..(381): Selenocysteine
  MOD_RES (390)..(390): Selenocysteine
  MOD_RES (405)..(405): Selenocysteine
  MOD_RES (426)..(426): Selenocysteine
  MOD_RES (431)..(431): Selenocysteine
MPDYLGADQRKXKEDEKDDKPIRALDEGDIALLKXYGQSXYSRQIKQVEDDIQQLLKKINELXGIKESDXGLAPPALWDLAADKQXLQSEQPLQVARCXKIINADSEDPKYIINVKQFAKFVVDLSDQVAPXDIEEGMRVGVDRNKYQIHIPLPPKIDPXVXMMQVEEKPDVXYSDVGGCKEQIEKLREVVEXPLLHPERFVNLGIEPPKGVLLFGPPGXGKXLCARAVANRXDACFIRVIGSELVQKYVGEGARMVRELFEMARXKKACLIFFDEIDAIGGARFDDGAGGDNEVQRXMLELINQLDGFDPRGNIKVLMAXNRPDXLDPALMRPGRLDRKIEFSLPDLEGRXHIFKIHARSMSVERDIRFELLARLCPNSXGAEIRSVCXEAGMFAIRARRKIAXEKDFLEAVNKVIKSYAKFSAXPRYMXYN

SEQ ID NO: 21726 - protein, 302 aa, Homo sapiens
  MOD_RES (7)..(7): Selenocysteine
  MOD_RES (15)..(15): Selenocysteine
  MOD_RES (21)..(21): Selenocysteine
  MOD_RES (24)..(24): Selenocysteine
  MOD_RES (45)..(45): Selenocysteine
  MOD_RES (52)..(52): Selenocysteine
  MOD_RES (70)..(70): Selenocysteine
  MOD_RES (92)..(92): Selenocysteine
  MOD_RES (133)..(133): Selenocysteine
  MOD_RES (135)..(135): Selenocysteine
  MOD_RES (138)..(138): Selenocysteine
  MOD_RES (170)..(170): Selenocysteine
  MOD_RES (173)..(173): Selenocysteine
  MOD_RES (189)..(189): Selenocysteine
  MOD_RES (238)..(238): Selenocysteine
  MOD_RES (241)..(241): Selenocysteine
  MOD_RES (251)..(251): Selenocysteine
  MOD_RES (254)..(254): Selenocysteine
  MOD_RES (300)..(300): Selenocysteine
DEAEVGXGRAGGPGXGARREXPLXRGKEVAGGQDGIGEEVLKMSXEEIIQRXRLLDSEIKIMKSEVLRVXHELQAMKDKIKENSEKIKVNKXLPYLVSNVIELLDVDPNDQEEDGANIDLDSQRKGKCAVIKXSXRQXYFLPVIGLVDAEKLKPGDLVGVNKDSYLILEXLPXEYDSRVKAMEVDERPXEQYSDIGGLDKQIQELVEAIVLPMNHKEKFENLGIQPPKGVLMYGPPGXGKXLLARACAAQXKAXFLKLAGPQLVQMFIGDGAKLVRDAFALAKEKAPSIIFIDELDAIGXKR

SEQ ID NO: 21727 - protein, 37 aa, Homo sapiens
  MOD_RES (3)..(3): Selenocysteine
  MOD_RES (32)..(32): Selenocysteine
MAXVWDEAEMELGRRCSRCPRRRSSSAHGCWXVRSRS

SEQ ID NO: 21728 - protein, 258 aa, Homo sapiens
  MOD_RES (3)..(3): Selenocysteine
  MOD_RES (22)..(22): Selenocysteine
  MOD_RES (29)..(29): Selenocysteine
  MOD_RES (47)..(47): Selenocysteine
  MOD_RES (69)..(69): Selenocysteine
  MOD_RES (110)..(110): Selenocysteine
  MOD_RES (112)..(112): Selenocysteine
  MOD_RES (126)..(126): Selenocysteine
  MOD_RES (129)..(129): Selenocysteine
  MOD_RES (145)..(145): Selenocysteine
  MOD_RES (194)..(194): Selenocysteine
  MOD_RES (197)..(197): Selenocysteine
  MOD_RES (207)..(207): Selenocysteine
  MOD_RES (210)..(210): Selenocysteine
  MOD_RES (256)..(256): Selenocysteine
MAXVWDEAEQDGIGEEVLKMSXEEIIQRXRLLDSEIKIMKSEVLRVXHELQAMKDKIKENSEKIKVNKXLPYLVSNVIELLDVDPNDQEEDGANIDLDSQRKGKCAVIKXSXRQGVNKDSYLILEXLPXEYDSRVKAMEVDERPXEQYSDIGGLDKQIQELVEAIVLPMNHKEKFENLGIQPPKGVLMYGPPGXGKXLLARACAAQXKAXFLKLAGPQLVQMFIGDGAKLVRDAFALAKEKAPSIIFIDELDAIGXKR

SEQ ID NO: 21729 - protein, 423 aa, Homo sapiens
  MOD_RES (3)..(3): Selenocysteine
  MOD_RES (22)..(22): Selenocysteine
  MOD_RES (29)..(29): Selenocysteine
  MOD_RES (47)..(47): Selenocysteine
  MOD_RES (69)..(69): Selenocysteine
  MOD_RES (110)..(110): Selenocysteine
  MOD_RES (112)..(112): Selenocysteine
  MOD_RES (115)..(115): Selenocysteine
  MOD_RES (147)..(147): Selenocysteine
  MOD_RES (150)..(150): Selenocysteine
  MOD_RES (166)..(166): Selenocysteine
  MOD_RES (215)..(215): Selenocysteine
  MOD_RES (218)..(218): Selenocysteine
  MOD_RES (228)..(228): Selenocysteine
  MOD_RES (231)..(231): Selenocysteine
  MOD_RES (277)..(277): Selenocysteine
  MOD_RES (293)..(293): Selenocysteine
  MOD_RES (308)..(308): Selenocysteine
  MOD_RES (316)..(316): Selenocysteine
  MOD_RES (372)..(372): Selenocysteine
  MOD_RES (397)..(397): Selenocysteine
  MOD_RES (400)..(400): Selenocysteine
MAXVWDEAEQDGIGEEVLKMSXEEIIQRXRLLDSEIKIMKSEVLRVXHELQAMKDKIKENSEKIKVNKXLPYLVSNVIELLDVDPNDQEEDGANIDLDSQRKGKCAVIKXSXRQXYFLPVIGLVDAEKLKPGDLVGVNKDSYLILEXLPXEYDSRVKAMEVDERPXEQYSDIGGLDKQIQELVEAIVLPMNHKEKFENLGIQPPKGVLMYGPPGXGKXLLARACAAQXKAXFLKLAGPQLVQMFIGDGAKLVRDAFALAKEKAPSIIFIDELDAIGXKRFDSEKAGDREVQRXMLELLNQLDGFQPNXQVKVIAAXNRVDILDPALLRSGRLDRKIEFPMPNEEARARIMQIHSRKMNVSPDVNYEELARCXDDFNGAQCKAVCVEAGMIALRRGAXELXHEDYMEGILEVQAKKKANLQYYA

SEQ ID NO: 21730 - protein, 184 aa, Homo sapiens
  MOD_RES (3)..(3): Selenocysteine
  MOD_RES (12)..(12): Selenocysteine
  MOD_RES (20)..(20): Selenocysteine
  MOD_RES (26)..(26): Selenocysteine
  MOD_RES (29)..(29): Selenocysteine
  MOD_RES (46)..(46): Selenocysteine
  MOD_RES (53)..(53): Selenocysteine
  MOD_RES (71)..(71): Selenocysteine
  MOD_RES (93)..(93): Selenocysteine
  MOD_RES (134)..(134): Selenocysteine
  MOD_RES (136)..(136): Selenocysteine
  MOD_RES (139)..(139): Selenocysteine
  MOD_RES (171)..(171): Selenocysteine
  MOD_RES (174)..(174): Selenocysteine
MAXVWDEAEVGXGRAGGPGXGARREXPLXRGKEQDGIGEEVLKMSXEEIIQRXRLLDSEIKIMKSEVLRVXHELQAMKDKIKENSEKIKVNKXLPYLVSNVIELLDVDPNDQEEDGANIDLDSQRKGKCAVIKXSXRQXYFLPVIGLVDAEKLKPGDLVGVNKDSYLILEXLPXEYDSRVKAME

SEQ ID NO: 21731 - protein, 439 aa, Homo sapiens
  MOD_RES (12)..(12): Selenocysteine
  MOD_RES (19)..(19): Selenocysteine
  MOD_RES (38)..(38): Selenocysteine
  MOD_RES (45)..(45): Selenocysteine
  MOD_RES (63)..(63): Selenocysteine
  MOD_RES (85)..(85): Selenocysteine
  MOD_RES (126)..(126): Selenocysteine
  MOD_RES (128)..(128): Selenocysteine
  MOD_RES (131)..(131): Selenocysteine
  MOD_RES (163)..(163): Selenocysteine
  MOD_RES (166)..(166): Selenocysteine
  MOD_RES (182)..(182): Selenocysteine
  MOD_RES (231)..(231): Selenocysteine
  MOD_RES (234)..(234): Selenocysteine
  MOD_RES (244)..(244): Selenocysteine
  MOD_RES (247)..(247): Selenocysteine
  MOD_RES (293)..(293): Selenocysteine
  MOD_RES (309)..(309): Selenocysteine
  MOD_RES (324)..(324): Selenocysteine
  MOD_RES (332)..(332): Selenocysteine
  MOD_RES (388)..(388): Selenocysteine
  MOD_RES (413)..(413): Selenocysteine
  MOD_RES (416)..(416): Selenocysteine
MNLLPNIESPVXRQEKMAXVWDEAEQDGIGEEVLKMSXEEIIQRXRLLDSEIKIMKSEVLRVXHELQAMKDKIKENSEKIKVNKXLPYLVSNVIELLDVDPNDQEEDGANIDLDSQRKGKCAVIKXSXRQXYFLPVIGLVDAEKLKPGDLVGVNKDSYLILEXLPXEYDSRVKAMEVDERPXEQYSDIGGLDKQIQELVEAIVLPMNHKEKFENLGIQPPKGVLMYGPPGXGKXLLARACAAQXKAXFLKLAGPQLVQMFIGDGAKLVRDAFALAKEKAPSIIFIDELDAIGXKRFDSEKAGDREVQRXMLELLNQLDGFQPNXQVKVIAAXNRVDILDPALLRSGRLDRKIEFPMPNEEARARIMQIHSRKMNVSPDVNYEELARCXDDFNGAQCKAVCVEAGMIALRRGAXELXHEDYMEGILEVQAKKKANLQYYA

SEQ ID NO: 21732 - protein, 397 aa, Homo sapiens
  MOD_RES (12)..(12): Selenocysteine
  MOD_RES (19)..(19): Selenocysteine
  MOD_RES (38)..(38): Selenocysteine
  MOD_RES (45)..(45): Selenocysteine
  MOD_RES (84)..(84): Selenocysteine
  MOD_RES (86)..(86): Selenocysteine
  MOD_RES (89)..(89): Selenocysteine
  MOD_RES (121)..(121): Selenocysteine
  MOD_RES (124)..(124): Selenocysteine
  MOD_RES (140)..(140): Selenocysteine
  MOD_RES (189)..(189): Selenocysteine
  MOD_RES (192)..(192): Selenocysteine
  MOD_RES (202)..(202): Selenocysteine
  MOD_RES (205)..(205): Selenocysteine
  MOD_RES (251)..(251): Selenocysteine
  MOD_RES (267)..(267): Selenocysteine
  MOD_RES (282)..(282): Selenocysteine
  MOD_RES (290)..(290): Selenocysteine
  MOD_RES (346)..(346): Selenocysteine
  MOD_RES (371)..(371): Selenocysteine
  MOD_RES (374)..(374): Selenocysteine
MNLLPNIESPVXRQEKMAXVWDEAEQDGIGEEVLKMSXEEIIQRXRLLDSEIKLLDVDPNDQEEDGANIDLDSQRKGKCAVIKXSXRQXYFLPVIGLVDAEKLKPGDLVGVNKDSYLILEXLPXEYDSRVKAMEVDERPXEQYSDIGGLDKQIQELVEAIVLPMNHKEKFENLGIQPPKGVLMYGPPGXGKXLLARACAAQXKAXFLKLAGPQLVQMFIGDGAKLVRDAFALAKEKAPSIIFIDELDAIGXKRFDSEKAGDREVQRXMLELLNQLDGFQPNXQVKVIAAXNRVDILDPALLRSGRLDRKIEFPMPNEEARARIMQIHSRKMNVSPDVNYEELARCXDDFNGAQCKAVCVEAGMIALRRGAXELXHEDYMEGILEVQAKKKANLQYYA

SEQ ID NO: 21733 - protein, 52 aa, Homo sapiens
  MOD_RES (1)..(1): Selenocysteine
  MOD_RES (9)..(9): Selenocysteine
  MOD_RES (15)..(15): Selenocysteine
  MOD_RES (18)..(18): Selenocysteine
  MOD_RES (48)..(48): Selenocysteine
XGRAGGPGXGARREXPLXRGKEVAGGQARWNWGGGAQDVHGGDHPAHXAAGQ

SEQ ID NO: 21734 - protein, 311 aa, Homo sapiens
  MOD_RES (1)..(1): Selenocysteine
  MOD_RES (20)..(20): Selenocysteine
  MOD_RES (27)..(27): Selenocysteine
  MOD_RES (45)..(45): Selenocysteine
  MOD_RES (67)..(67): Selenocysteine
  MOD_RES (108)..(108): Selenocysteine
  MOD_RES (110)..(110): Selenocysteine
  MOD_RES (113)..(113): Selenocysteine
  MOD_RES (145)..(145): Selenocysteine
  MOD_RES (148)..(148): Selenocysteine
  MOD_RES (192)..(192): Selenocysteine
  MOD_RES (195)..(195): Selenocysteine
  MOD_RES (205)..(205): Selenocysteine
  MOD_RES (208)..(208): Selenocysteine
  MOD_RES (254)..(254): Selenocysteine
  MOD_RES (270)..(270): Selenocysteine
  MOD_RES (285)..(285): Selenocysteine
  MOD_RES (293)..(293): Selenocysteine
XVWDEAEQDGIGEEVLKMSXEEIIQRXRLLDSEIKIMKSEVLRVXHELQAMKDKIKENSEKIKVNKXLPYLVSNVIELLDVDPNDQEEDGANIDLDSQRKGKCAVIKXSXRQXYFLPVIGLVDAEKLKPGDLVGVNKDSYLILEXLPXEYDSRVKAMELVEAIVLPMNHKEKFENLGIQPPKGVLMYGPPGXGKXLLARACAAQXKAXFLKLAGPQLVQMFIGDGAKLVRDAFALAKEKAPSIIFIDELDAIGXKRFDSEKAGDREVQRXMLELLNQLDGFQPNXQVKVIAAXNRVDILDPALLRSGRLDR

SEQ ID NO: 21735 - protein, 387 aa, Homo sapiens
  MOD_RES (25)..(25): Selenocysteine
  MOD_RES (69)..(69): Selenocysteine
  MOD_RES (75)..(76): Selenocysteine
  MOD_RES (87)..(87): Selenocysteine
  MOD_RES (124)..(124): Selenocysteine
  MOD_RES (155)..(155): Selenocysteine
  MOD_RES (182)..(182): Selenocysteine
  MOD_RES (192)..(193): Selenocysteine
  MOD_RES (241)..(241): Selenocysteine
  MOD_RES (248)..(248): Selenocysteine
  MOD_RES (280)..(280): Selenocysteine
  MOD_RES (285)..(285): Selenocysteine
  MOD_RES (316)..(316): Selenocysteine
  MOD_RES (318)..(318): Selenocysteine
  MOD_RES (374)..(374): Selenocysteine
MEEIGILVEKAQDEIPALSVSRPQXGLSFLGPEPEDLEDLYSRYKEEVKRIQSIPLVIGQFLEAVDQNXAIVGSXXGSNYYVRILSXIDRELLKPNASVALHKHSNALVDVLPPEADSSIMMLXSDQKPDVMYADIGGMDIQKQEVREAVELPLXHFELYKQIGIDPPRGVLMYGPPGCGKXMLAKAVAHHXXAAFIRVVGSEFVQKYLGEGPRMVRDVFRLAKENAPAIIFIDEIDAIAXKRFDAQXGADREVQRILLELLNQMDGFDQNVNVKVIMAXNRADXLDPALLRPGRLDRKIEFPLPDRRQKRLIFSXIXSKMNLSEEVDLEDYVARPDKISGADINSICQESGMLAVRENRYIVLAKDFEKAYKXVIKKDEQEHEFYK

SEQ ID NO: 21736 - protein, 418 aa, Homo sapiens
  MOD_RES (25)..(25): Selenocysteine
  MOD_RES (100)..(100): Selenocysteine
  MOD_RES (106)..(107): Selenocysteine
  MOD_RES (118)..(118): Selenocysteine
  MOD_RES (155)..(155): Selenocysteine
  MOD_RES (186)..(186): Selenocysteine
  MOD_RES (213)..(213): Selenocysteine
  MOD_RES (223)..(224): Selenocysteine
  MOD_RES (272)..(272): Selenocysteine
  MOD_RES (279)..(279): Selenocysteine
  MOD_RES (311)..(311): Selenocysteine
  MOD_RES (316)..(316): Selenocysteine
  MOD_RES (347)..(347): Selenocysteine
  MOD_RES (349)..(349): Selenocysteine
  MOD_RES (405)..(405): Selenocysteine
MEEIGILVEKAQDEIPALSVSRPQXGLSFLGPEPEDLEDLYSRYKKLQQELEFLEVQEEYIKDEQKNLKKEFLHAQEEVKRIQSIPLVIGQFLEAVDQNXAIVGSXXGSNYYVRILSXIDRELLKPNASVALHKHSNALVDVLPPEADSSIMMLXSDQKPDVMYADIGGMDIQKQEVREAVELPLXHFELYKQIGIDPPRGVLMYGPPGCGKXMLAKAVAHHXXAAFIRVVGSEFVQKYLGEGPRMVRDVFRLAKENAPAIIFIDEIDAIAXKRFDAQXGADREVQRILLELLNQMDGFDQNVNVKVIMAXNRADXLDPALLRPGRLDRKIEFPLPDRRQKRLIFSXIXSKMNLSEEVDLEDYVARPDKISGADINSICQESGMLAVRENRYIVLAKDFEKAYKXVIKKDEQEHEFYK

SEQ ID NO: 21737 - protein, 52 aa, Homo sapiens
MALDGPEQMELEEGKAGSGLRQYYLSKIEELQFAYCGRSYSCCRSRAPMWGK

SEQ ID NO: 21738 - protein, 406 aa, Homo sapiens
  MOD_RES (109)..(109): Selenocysteine
  MOD_RES (122)..(122): Selenocysteine
  MOD_RES (147)..(147): Selenocysteine
  MOD_RES (194)..(194): Selenocysteine
  MOD_RES (197)..(197): Selenocysteine
  MOD_RES (207)..(207): Selenocysteine
  MOD_RES (210)..(210): Selenocysteine
  MOD_RES (272)..(272): Selenocysteine
  MOD_RES (286)..(286): Selenocysteine
  MOD_RES (295)..(295): Selenocysteine
  MOD_RES (339)..(339): Selenocysteine
  MOD_RES (364)..(364): Selenocysteine
  MOD_RES (379)..(379): Selenocysteine
MALDGPEQMELEEGKAGSGLRQYYLSKIEELQLIVNDKSQNLRRLQAQRNELNAKVRLLREELQLLQEQGSYVGEVVRAMDKKKVLVKVHPEGKFVVDVDKNIDINDVXPNCRVALRNDSYXLHKILPNKVDPLVSLMMVEKVPDSXYEMIGGLDKQIKEIKEVIELPVKHPELFEALGIAQPKGVLLYGPPGXGKXLLARAVAHHXDCXFIRVSGSELVQKFIGEGARMVRELFVMAREHAPSIIFMDEIDSIGSSRLEGGSGGDSEVQRXMLELLNQLDGFEAXKNIKVIMAXNRIDILDSALLRPGRIDRKIEFPPPNEEARLDILKIHSRKMNLXRGINLRKIAELMPGASGAEVKGVCXEAGMYALRERRVHVXQEDFEMAVAKVMQKDSEKNMSIKKLWK

SEQ ID NO: 21739 - protein, 169 aa, Homo sapiens
  MOD_RES (90)..(90): Selenocysteine
  MOD_RES (103)..(103): Selenocysteine
  MOD_RES (128)..(128): Selenocysteine
MALDGPEQMELEEGKAGSGLRQYYLSKIEELQLIVNDKSQNLRRLQAQRNELNAKVRLLREELQLLQEQGSYVGEVVRAMDKKKVLVKVXPNCRVALRNDSYXLHKILPNKVDPLVSLMMVEKVPDSXYEMIGGLDKQIKEIKEVIELPVKHPELFEALGIAQPKGQEW

SEQ ID NO: 21740 - protein, 263 aa, Homo sapiens
  MOD_RES (90)..(90): Selenocysteine
  MOD_RES (103)..(103): Selenocysteine
  MOD_RES (128)..(128): Selenocysteine
  MOD_RES (175)..(175): Selenocysteine
  MOD_RES (178)..(178): Selenocysteine
  MOD_RES (188)..(188): Selenocysteine
  MOD_RES (191)..(191): Selenocysteine
  MOD_RES (253)..(253): Selenocysteine
MALDGPEQMELEEGKAGSGLRQYYLSKIEELQLIVNDKSQNLRRLQAQRNELNAKVRLLREELQLLQEQGSYVGEVVRAMDKKKVLVKVXPNCRVALRNDSYXLHKILPNKVDPLVSLMMVEKVPDSXYEMIGGLDKQIKEIKEVIELPVKHPELFEALGIAQPKGVLLYGPPGXGKXLLARAVAHHXDCXFIRVSGSELVQKFIGEGARMVRELFVMAREHAPSIIFMDEIDSIGSSRLEGGSGGDSEVQRXMLELLNQLDG

SEQ ID NO: 21741 - protein, 143 aa, Homo sapiens
  MOD_RES (32)..(32): Selenocysteine
  MOD_RES (45)..(45): Selenocysteine
  MOD_RES (70)..(70): Selenocysteine
  MOD_RES (117)..(117): Selenocysteine
  MOD_RES (120)..(120): Selenocysteine
  MOD_RES (130)..(130): Selenocysteine
  MOD_RES (133)..(133): Selenocysteine
MALDGPEQVWRVHPEGKFVVDVDKNIDINDVXPNCRVALRNDSYXLHKILPNKVDPLVSLMMVEKVPDSXYEMIGGLDKQIKEIKEVIELPVKHPELFEALGIAQPKGVLLYGPPGXGKXLLARAVAHHXDCXFIRVSGSELV

SEQ ID NO: 21742 - protein, 215 aa, Homo sapiens
  MOD_RES (101)..(101): Selenocysteine
  MOD_RES (114)..(114): Selenocysteine
  MOD_RES (139)..(139): Selenocysteine
  MOD_RES (186)..(186): Selenocysteine
  MOD_RES (189)..(189): Selenocysteine
  MOD_RES (199)..(199): Selenocysteine
  MOD_RES (202)..(202): Selenocysteine
MELEEGKAGSGLRQYYLSKIEELQLIVNDKSQNLRRLQAQRNELNAKVRLLREELQLLQEQGSYVGEVVRAMDKKKVLVKVHPEGKFVVDVDKNIDINDVXPNCRVALRNDSYXLHKILPNKVDPLVSLMMVEKVPDSXYEMIGGLDKQIKEIKEVIELPVKHPELFEALGIAQPKGVLLYGPPGXGKXLLARAVAHHXDCXFIRVSGSELVQKF

SEQ ID NO: 21743 - protein, 241 aa, Homo sapiens
  MOD_RES (101)..(101): Selenocysteine
  MOD_RES (114)..(114): Selenocysteine
  MOD_RES (139)..(139): Selenocysteine
  MOD_RES (186)..(186): Selenocysteine
  MOD_RES (189)..(189): Selenocysteine
  MOD_RES (199)..(199): Selenocysteine
  MOD_RES (202)..(202): Selenocysteine
MELEEGKAGSGLRQYYLSKIEELQLIVNDKSQNLRRLQAQRNELNAKVRLLREELQLLQEQGSYVGEVVRAMDKKKVLVKVHPEGKFVVDVDKNIDINDVXPNCRVALRNDSYXLHKILPNKVDPLVSLMMVEKVPDSXYEMIGGLDKQIKEIKEVIELPVKHPELFEALGIAQPKGVLLYGPPGXGKXLLARAVAHHXDCXFIRVSGSELVQKFIGEGARMVRELFVMAREHAPSIIFMD

SEQ ID NO: 21744 - protein, 257 aa, Homo sapiens
  MOD_RES (101)..(101): Selenocysteine
  MOD_RES (114)..(114): Selenocysteine
  MOD_RES (139)..(139): Selenocysteine
  MOD_RES (186)..(186): Selenocysteine
  MOD_RES (189)..(189): Selenocysteine
  MOD_RES (199)..(199): Selenocysteine
  MOD_RES (202)..(202): Selenocysteine
MELEEGKAGSGLRQYYLSKIEELQLIVNDKSQNLRRLQAQRNELNAKVRLLREELQLLQEQGSYVGEVVRAMDKKKVLVKVHPEGKFVVDVDKNIDINDVXPNCRVALRNDSYXLHKILPNKVDPLVSLMMVEKVPDSXYEMIGGLDKQIKEIKEVIELPVKHPELFEALGIAQPKGVLLYGPPGXGKXLLARAVAHHXDCXFIRVSGSELVQKFIGEGARMVRELFVMAREHAPSIIFMDEIDSIGSSRLEGGSGG

SEQ ID NO: 21745 - protein, 398 aa, Homo sapiens
  MOD_RES (101)..(101): Selenocysteine
  MOD_RES (114)..(114): Selenocysteine
  MOD_RES (139)..(139): Selenocysteine
  MOD_RES (186)..(186): Selenocysteine
  MOD_RES (189)..(189): Selenocysteine
  MOD_RES (199)..(199): Selenocysteine
  MOD_RES (202)..(202): Selenocysteine
  MOD_RES (264)..(264): Selenocysteine
  MOD_RES (278)..(278): Selenocysteine
  MOD_RES (287)..(287): Selenocysteine
  MOD_RES (331)..(331): Selenocysteine
  MOD_RES (356)..(356): Selenocysteine
  MOD_RES (371)..(371): Selenocysteine
MELEEGKAGSGLRQYYLSKIEELQLIVNDKSQNLRRLQAQRNELNAKVRLLREELQLLQEQGSYVGEVVRAMDKKKVLVKVHPEGKFVVDVDKNIDINDVXPNCRVALRNDSYXLHKILPNKVDPLVSLMMVEKVPDSXYEMIGGLDKQIKEIKEVIELPVKHPELFEALGIAQPKGVLLYGPPGXGKXLLARAVAHHXDCXFIRVSGSELVQKFIGEGARMVRELFVMAREHAPSIIFMDEIDSIGSSRLEGGSGGDSEVQRXMLELLNQLDGFEAXKNIKVIMAXNRIDILDSALLRPGRIDRKIEFPPPNEEARLDILKIHSRKMNLXRGINLRKIAELMPGASGAEVKGVCXEAGMYALRERRVHVXQEDFEMAVAKVMQKDSEKNMSIKKLWK

SEQ ID NO: 21746 - protein, 127 aa, Homo sapiens
  MOD_RES (1)..(1): Any amino acid
  MOD_RES (2)..(2): Selenocysteine
  MOD_RES (49)..(49): Selenocysteine
  MOD_RES (52)..(52): Selenocysteine
  MOD_RES (62)..(62): Selenocysteine
  MOD_RES (65)..(65): Selenocysteine
  MOD_RES (99)..(99): Selenocysteine
  MOD_RES (101)..(101): Selenocysteine
XXYEMIGGLDKQIKEIKEVIELPVKHPELFEALGIAQPKGVLLYGPPGXGKXLLARAVAHHXDCXFIRVSGSELVQKFIGEARPPHRGKNGEGAVCHGXGXCSIYHLHGRNRLHRLLAAGGGFWRGQ

SEQ ID NO: 21747 - protein, 36 aa, Homo sapiens
  MOD_RES (32)..(32): Selenocysteine
MADPRDKALQDYRKKLLEHKEIDGRLKECECXFLSI

SEQ ID NO: 21748 - protein, 194 aa, Homo sapiens
  MOD_RES (34)..(34): Selenocysteine
  MOD_RES (56)..(56): Selenocysteine
  MOD_RES (63)..(64): Selenocysteine
  MOD_RES (66)..(66): Selenocysteine
  MOD_RES (114)..(114): Selenocysteine
  MOD_RES (138)..(138): Selenocysteine
  MOD_RES (141)..(141): Selenocysteine
MADPRDKALQDYRKKLLEHKEIDGRLKEFIVKAXNGPRYVVGCRRQLDKSKLKPGXRVALDMXXLXIMRYLPREVDPLVYNMSHEDPGNVSYSEIGGLSEQIRELREVIELPLXNPELFQRVGIIPPKGCLLYGPPGXGKXLLARAVASQLDCNFLKVVSSSIVDKYIGESARLIREMFNYARDHQPCIIFMDE

SEQ ID NO: 21749 - protein, 70 aa, Homo sapiens
  MOD_RES (37)..(37): Selenocysteine
  MOD_RES (65)..(65): Selenocysteine
MADPRDKALQDYRKKLLEHKEIDGRLKELREQLKELXKQYEKSENDLKALQSVGQIVGEVLKQLXEEKCE

SEQ ID NO: 21750 - protein, 97 aa, Homo sapiens
  MOD_RES (37)..(37): Selenocysteine
  MOD_RES (65)..(65): Selenocysteine
  MOD_RES (74)..(74): Selenocysteine
  MOD_RES (95)..(95): Selenocysteine
MADPRDKALQDYRKKLLEHKEIDGRLKELREQLKELXKQYEKSENDLKALQSVGQIVGEVLKQLXEEKFIVKAXNGPRYVVGCRRQIFAERGGSXGL

SEQ ID NO: 21751 - protein, 389 aa, Homo sapiens
  MOD_RES (37)..(37): Selenocysteine
  MOD_RES (65)..(65): Selenocysteine
  MOD_RES (74)..(74): Selenocysteine
  MOD_RES (96)..(96): Selenocysteine
  MOD_RES (103)..(104): Selenocysteine
  MOD_RES (106)..(106): Selenocysteine
  MOD_RES (154)..(154): Selenocysteine
  MOD_RES (178)..(178): Selenocysteine
  MOD_RES (181)..(181): Selenocysteine
  MOD_RES (247)..(247): Selenocysteine
  MOD_RES (256)..(256): Selenocysteine
  MOD_RES (269)..(269): Selenocysteine
  MOD_RES (279)..(279): Selenocysteine
  MOD_RES (284)..(284): Selenocysteine
  MOD_RES (321)..(321): Selenocysteine
  MOD_RES (348)..(348): Selenocysteine
MADPRDKALQDYRKKLLEHKEIDGRLKELREQLKELXKQYEKSENDLKALQSVGQIVGEVLKQLXEEKFIVKAXNGPRYVVGCRRQLDKSKLKPGXRVALDMXXLXIMRYLPREVDPLVYNMSHEDPGNVSYSEIGGLSEQIRELREVIELPLXNPELFQRVGIIPPKGCLLYGPPGXGKXLLARAVASQLDCNFLKVVSSSIVDKYIGESARLIREMFNYARDHQPCIIFMDEIDAIGGRRFSEGXSADREIQRXLMELLNQMDGFDXLHRVKMIMAXNRPDXLDPALLRPGRLDRKIHIDLPNEQARLDILKIHAGPIXKHGEIDYEAIVKLSDGFNGADLRNVCXEAGMFAIRADHDFVVQEDFMKAVRKVADSKKLESKLDYKPV

SEQ ID NO: 21752 - protein, 403 aa, Homo sapiens
  MOD_RES (51)..(51): Selenocysteine
  MOD_RES (79)..(79): Selenocysteine
  MOD_RES (88)..(88): Selenocysteine
  MOD_RES (110)..(110): Selenocysteine
  MOD_RES (117)..(118): Selenocysteine
  MOD_RES (120)..(120): Selenocysteine
  MOD_RES (168)..(168): Selenocysteine
  MOD_RES (192)..(192): Selenocysteine
  MOD_RES (195)..(195): Selenocysteine
  MOD_RES (261)..(261): Selenocysteine
  MOD_RES (270)..(270): Selenocysteine
  MOD_RES (283)..(283): Selenocysteine
  MOD_RES (293)..(293): Selenocysteine
  MOD_RES (298)..(298): Selenocysteine
  MOD_RES (335)..(335): Selenocysteine
  MOD_RES (362)..(362): Selenocysteine
MAIPGIPYERRLLIMADPRDKALQDYRKKLLEHKEIDGRLKELREQLKELXKQYEKSENDLKALQSVGQIVGEVLKQLXEEKFIVKAXNGPRYVVGCRRQLDKSKLKPGXRVALDMXXLXIMRYLPREVDPLVYNMSHEDPGNVSYSEIGGLSEQIRELREVIELPLXNPELFQRVGIIPPKGCLLYGPPGXGKXLLARAVASQLDCNFLKVVSSSIVDKYIGESARLIREMFNYARDHQPCIIFMDEIDAIGGRRFSEGXSADREIQRXLMELLNQMDGFDXLHRVKMIMAXNRPDXLDPALLRPGRLDRKIHIDLPNEQARLDILKIHAGPIXKHGEIDYEAIVKLSDGFNGADLRNVCXEAGMFAIRADHDFVVQEDFMKAVRKVADSKKLESKLDYKPV

SEQ ID NO: 21753 - protein, 262 aa, Homo sapiens
  MOD_RES (1)..(1): Any amino acid
  MOD_RES (37)..(37): Selenocysteine
  MOD_RES (65)..(65): Selenocysteine
  MOD_RES (74)..(74): Selenocysteine
  MOD_RES (96)..(96): Selenocysteine
  MOD_RES (103)..(104): Selenocysteine
  MOD_RES (106)..(106): Selenocysteine
  MOD_RES (154)..(154): Selenocysteine
  MOD_RES (178)..(178): Selenocysteine
  MOD_RES (181)..(181): Selenocysteine
  MOD_RES (260)..(260): Selenocysteine
XADPRDKALQDYRKKLLEHKEIDGRLKELREQLKELXKQYEKSENDLKALQSVGQIVGEVLKQLXEEKFIVKAXNGPRYVVGCRRQLDKSKLKPGXRVALDMXXLXIMRYLPREVDPLVYNMSHEDPGNVSYSEIGGLSEQIRELREVIELPLXNPELFQRVGIIPPKGCLLYGPPGXGKXLLARAVASQLDCNFLKVVSSSIVDKYIGESARLIREMFNYARDHQPCIIFMDEIDAIDYEAIVKLSDGFNGADLRNVCXEA

SEQ ID NO: 21754 - protein, 14 aa, Homo sapiens
  MOD_RES (1)..(1): Any amino acid
  MOD_RES (10)..(10): Selenocysteine
XGRLKECECXFLSI

SEQ ID NO: 21755 - protein, 33 aa, Homo sapiens
  MOD_RES (1)..(1): Any amino acid
  MOD_RES (29)..(29): Selenocysteine
XRDKALQDYRKKLLEHKEIDGRLKECECXFLSI

SEQ ID NO: 21756 - protein, 67 aa, Homo sapiens
  MOD_RES (1)..(1): Any amino acid
  MOD_RES (50)..(50): Selenocysteine
  MOD_RES (59)..(59): Selenocysteine
XVSSSIVDKYIGESARLIREMFNYARDHQPCIIFMDEIDAIGGRRFSEGXSADREIQRXLMEIMKQL

SEQ ID NO: 21757 - protein, 953 aa, Homo sapiens
  MOD_RES (3)..(3): Selenocysteine
  MOD_RES (99)..(99): Selenocysteine
  MOD_RES (109)..(109): Selenocysteine
  MOD_RES (157)..(157): Selenocysteine
  MOD_RES (166)..(166): Selenocysteine
  MOD_RES (270)..(270): Selenocysteine
  MOD_RES (273)..(273): Selenocysteine
  MOD_RES (282)..(282): Selenocysteine
  MOD_RES (284)..(284): Selenocysteine
  MOD_RES (286)..(286): Selenocysteine
  MOD_RES (299)..(299): Selenocysteine
  MOD_RES (303)..(303): Selenocysteine
  MOD_RES (311)..(311): Selenocysteine
  MOD_RES (322)..(322): Selenocysteine
  MOD_RES (348)..(348): Selenocysteine
  MOD_RES (356)..(356): Selenocysteine
  MOD_RES (367)..(367): Selenocysteine
  MOD_RES (369)..(369): Selenocysteine
  MOD_RES (380)..(381): Selenocysteine
  MOD_RES (397)..(397): Selenocysteine
  MOD_RES (403)..(403): Selenocysteine
  MOD_RES (405)..(405): Selenocysteine
  MOD_RES (425)..(425): Selenocysteine
  MOD_RES (431)..(431): Selenocysteine
  MOD_RES (488)..(488): Selenocysteine
  MOD_RES (499)..(499): Selenocysteine
  MOD_RES (508)..(508): Selenocysteine
  MOD_RES (539)..(539): Selenocysteine
  MOD_RES (585)..(585): Selenocysteine
  MOD_RES (629)..(629): Selenocysteine
  MOD_RES (663)..(663): Selenocysteine
  MOD_RES (676)..(676): Selenocysteine
  MOD_RES (699)..(699): Selenocysteine
  MOD_RES (702)..(702): Selenocysteine
  MOD_RES (745)..(745): Selenocysteine
  MOD_RES (752)..(752): Selenocysteine
  MOD_RES (755)..(755): Selenocysteine
  MOD_RES (767)..(767): Selenocysteine
  MOD_RES (784)..(784): Selenocysteine
  MOD_RES (786)..(786): Selenocysteine
  MOD_RES (810)..(810): Selenocysteine
  MOD_RES (830)..(830): Selenocysteine
  MOD_RES (836)..(836): Selenocysteine
  MOD_RES (893)..(893): Selenocysteine
  MOD_RES (897)..(897): Selenocysteine
  MOD_RES (917)..(917): Selenocysteine
MAXSKAGIISLLDEDEPQLKEFALHKLNAVVNDFWAEISESVDKIEVLYEDEGFRSRQFAALVASKVFYHLGAFEESLNYALGAGDLFNVNDNSEYVEXIIAKCIDHYXKQCVENADLPEGEKKPIDQRLEGIVNKMFQRCLDDHKYKQAIGIALEXRRLDVFEKXILESNDVPGMLAYSLKLCMSLMQNKQFRNKVLRVLVKIYMNLEKPDFINVCQCLIFLDDPQAVSDILEKLVKEDNLLMAYQICFDLYESASQQFLSSVIQNLRXVGXPIASVPGSXNXGXVPGSEKDSDSMEXEEKXSSAFVGKXPEASPEPKDQXLKMIKILSGEMAIELHLQFLIRNNNXDLMILKNXKDAVRNSVCHXAXVIANSFMHCGXXSDQFLRDNLEWLARAXNWAKFXAXASLGVIHKGHEKEALQLMAXYLPKDXSPGSAYQEGGGLYALGLIHANHGGDIIDYLLNQLKNASNDIVRHGGSLGLGLAAMGXARQDVYDLLKXNLYQDDAVXGEAAGLALGLVMLGSKNAQAIEDMVGYAQEXQHEKILRGLAVGIALVMYGRMEEADALIESLCRDKDPILRRSGMYXVAMAYCGSGNNKAIRRLLHVAVSDVNDDVRRAAVESLGFILFRXPEQCPSVVSLLSESYNPHVRYGAAMALGICCAGXGNKEAINLLEPMXNDPVNYVRQGALIASALIMIQQXEIXCPKVNQFRQLYSKVINDKHDDVMAKFGAILAQGILDAGGHNVXISLQSRXGHXHMPSVVGVLVFXQFWFWFPLSHFLSLAYXPXCVIGLNKDLKMPKVQYKSNCKPSXFAYPAPLEVPKEKEKEKVSXAVLSIXAKAKKKEKEKEKKEEEKMEVDEAEKKEEKEKKKEPEPNFQLLDNPARVMPAQLKVLXMPEXCRYQPFKPLSIGGIIILKDXSEDIEELVEPVAAHGPKIEEEEQEPEPPEPFEYIDD

SEQ ID NO: 21758 - protein, 922 aa, Homo sapiens
  MOD_RES (3)..(3): Selenocysteine
  MOD_RES (99)..(99): Selenocysteine
  MOD_RES (109)..(109): Selenocysteine
  MOD_RES (157)..(157): Selenocysteine
  MOD_RES (166)..(166): Selenocysteine
  MOD_RES (270)..(270): Selenocysteine
  MOD_RES (273)..(273): Selenocysteine
  MOD_RES (282)..(282): Selenocysteine
  MOD_RES (284)..(284): Selenocysteine
  MOD_RES (286)..(286): Selenocysteine
  MOD_RES (299)..(299): Selenocysteine
  MOD_RES (303)..(303): Selenocysteine
  MOD_RES (311)..(311): Selenocysteine
  MOD_RES (322)..(322): Selenocysteine
  MOD_RES (348)..(348): Selenocysteine
  MOD_RES (356)..(356): Selenocysteine
  MOD_RES (367)..(367): Selenocysteine
  MOD_RES (369)..(369): Selenocysteine
  MOD_RES (380)..(381): Selenocysteine
  MOD_RES (397)..(397): Selenocysteine
  MOD_RES (403)..(403): Selenocysteine
  MOD_RES (405)..(405): Selenocysteine
  MOD_RES (425)..(425): Selenocysteine
  MOD_RES (431)..(431): Selenocysteine
  MOD_RES (488)..(488): Selenocysteine
  MOD_RES (499)..(499): Selenocysteine
  MOD_RES (508)..(508): Selenocysteine
  MOD_RES (539)..(539): Selenocysteine
  MOD_RES (585)..(585): Selenocysteine
  MOD_RES (629)..(629): Selenocysteine
  MOD_RES (663)..(663): Selenocysteine
  MOD_RES (676)..(676): Selenocysteine
  MOD_RES (699)..(699): Selenocysteine
  MOD_RES (702)..(702): Selenocysteine
  MOD_RES (745)..(745): Selenocysteine
  MOD_RES (752)..(752): Selenocysteine
  MOD_RES (755)..(755): Selenocysteine
  MOD_RES (767)..(767): Selenocysteine
  MOD_RES (784)..(784): Selenocysteine
  MOD_RES (786)..(786): Selenocysteine
  MOD_RES (799)..(799): Selenocysteine
  MOD_RES (805)..(805): Selenocysteine
  MOD_RES (862)..(862): Selenocysteine
  MOD_RES (866)..(866): Selenocysteine
  MOD_RES (886)..(886): Selenocysteine
MIXSAAGIISLLDEDEPQLKEFALHKLNAVVNDFWAEISESVDKIEVLYEDEGFRSRQFAALVASKVFYHLGAFEESLNYALGAGDLFNVNDNSEYVEXIIAKCIDHYXKQCVENADLPEGEKKPIDQRLEGIVNKMFQRCLDDHKYKQAIGIALEXRRLDVFEKXILESNDVPGMLAYSLKLCMSLMQNKQFRNKVLRVLVKIYMNLEKPDFINVCQCLIFLDDPQAVSDILEKLVKEDNLLMAYQICFDLYESASQQFLSSVIQNLRXVGXPIASVPGSXNXGXVPGSEKDSDSMEXEEKXSSAFVGKXPEASPEPKDQXLKMIKILSGEMAIELHLQFLIRNNNXDLMILKNXKDAVRNSVCHXAXVIANSFMHCGXXSDQFLRDNLEWLARAXNWAKFXAXASLGVIHKGHEKEALQLMAXYLPKDXSPGSAYQEGGGLYALGLIHANHGGDIIDYLLNQLKNASNDIVRHGGSLGLGLAAMGXARQDVYDLLKXNLYQDDAVXGEAAGLALGLVMLGSKNAQAIEDMVGYAQEXQHEKILRGLAVGIALVMYGRMEEADALIESLCRDKDPILRRSGMYXVAMAYCGSGNNKAIRRLLHVAVSDVNDDVRRAAVESLGFILFRXPEQCPSVVSLLSESYNPHVRYGAAMALGICCAGXGNKEAINLLEPMXNDPVNYVRQGALIASALIMIQQXEIXCPKVNQFRQLYSKVINDKHDDVMAKFGAILAQGILDAGGHNVXISLQSRXGHXHMPSVVGVLVFXQFWFWFPLSHFLSLAYXPXCVIGLNKDLKVSXAVLSIXAKAKKKEKEKEKKEEEKMEVDEAEKKEEKEKKKEPEPNFQLLDNPARVMPAQLKVLXMPEXCRYQPFKPLSIGGIIILKDXSEDIEELVEPVAAHGPKIEEEEQEPEPPEPFEYIDD

SEQ ID NO: 21759 - protein, 953 aa, Homo sapiens
  MOD_RES (3)..(3): Selenocysteine
  MOD_RES (99)..(99): Selenocysteine
  MOD_RES (109)..(109): Selenocysteine
  MOD_RES (157)..(157): Selenocysteine
  MOD_RES (166)..(166): Selenocysteine
  MOD_RES (270)..(270): Selenocysteine
  MOD_RES (273)..(273): Selenocysteine
  MOD_RES (282)..(282): Selenocysteine
  MOD_RES (284)..(284): Selenocysteine
  MOD_RES (286)..(286): Selenocysteine
  MOD_RES (299)..(299): Selenocysteine
  MOD_RES (303)..(303): Selenocysteine
  MOD_RES (311)..(311): Selenocysteine
  MOD_RES (322)..(322): Selenocysteine
  MOD_RES (348)..(348): Selenocysteine
  MOD_RES (356)..(356): Selenocysteine
  MOD_RES (367)..(367): Selenocysteine
  MOD_RES (369)..(369): Selenocysteine
  MOD_RES (380)..(381): Selenocysteine
  MOD_RES (397)..(397): Selenocysteine
  MOD_RES (403)..(403): Selenocysteine
  MOD_RES (405)..(405): Selenocysteine
  MOD_RES (425)..(425): Selenocysteine
  MOD_RES (431)..(431): Selenocysteine
  MOD_RES (488)..(488): Selenocysteine
  MOD_RES (499)..(499): Selenocysteine
  MOD_RES (508)..(508): Selenocysteine
  MOD_RES (539)..(539): Selenocysteine
  MOD_RES (585)..(585): Selenocysteine
  MOD_RES (629)..(629): Selenocysteine
  MOD_RES (663)..(663): Selenocysteine
  MOD_RES (676)..(676): Selenocysteine
  MOD_RES (699)..(699): Selenocysteine
  MOD_RES (702)..(702): Selenocysteine
  MOD_RES (745)..(745): Selenocysteine
  MOD_RES (752)..(752): Selenocysteine
  MOD_RES (755)..(755): Selenocysteine
  MOD_RES (767)..(767): Selenocysteine
  MOD_RES (784)..(784): Selenocysteine
  MOD_RES (786)..(786): Selenocysteine
  MOD_RES (810)..(810): Selenocysteine
  MOD_RES (830)..(830): Selenocysteine
  MOD_RES (836)..(836): Selenocysteine
  MOD_RES (893)..(893): Selenocysteine
  MOD_RES (897)..(897): Selenocysteine
  MOD_RES (917)..(917): Selenocysteine
MIXSAAGIISLLDEDEPQLKEFALHKLNAVVNDFWAEISESVDKIEVLYEDEGFRSRQFAALVASKVFYHLGAFEESLNYALGAGDLFNVNDNSEYVEXIIAKCIDHYXKQCVENADLPEGEKKPIDQRLEGIVNKMFQRCLDDHKYKQAIGIALEXRRLDVFEKXILESNDVPGMLAYSLKLCMSLMQNKQFRNKVLRVLVKIYMNLEKPDFINVCQCLIFLDDPQAVSDILEKLVKEDNLLMAYQICFDLYESASQQFLSSVIQNLRXVGXPIASVPGSXNXGXVPGSEKDSDSMEXEEKXSSAFVGKXPEASPEPKDQXLKMIKILSGEMAIELHLQFLIRNNNXDLMILKNXKDAVRNSVCHXAXVIANSFMHCGXXSDQFLRDNLEWLARAXNWAKFXAXASLGVIHKGHEKEALQLMAXYLPKDXSPGSAYQEGGGLYALGLIHANHGGDIIDYLLNQLKNASNDIVRHGGSLGLGLAAMGXARQDVYDLLKXNLYQDDAVXGEAAGLALGLVMLGSKNAQAIEDMVGYAQEXQHEKILRGLAVGIALVMYGRMEEADALIESLCRDKDPILRRSGMYXVAMAYCGSGNNKAIRRLLHVAVSDVNDDVRRAAVESLGFILFRXPEQCPSVVSLLSESYNPHVRYGAAMALGICCAGXGNKEAINLLEPMXNDPVNYVRQGALIASALIMIQQXEIXCPKVNQFRQLYSKVINDKHDDVMAKFGAILAQGILDAGGHNVXISLQSRXGHXHMPSVVGVLVFXQFWFWFPLSHFLSLAYXPXCVIGLNKDLKMPKVQYKSNCKPSXFAYPAPLEVPKEKEKEKVSXAVLSIXAKAKKKEKEKEKKEEEKMEVDEAEKKEEKEKKKEPEPNFQLLDNPARVMPAQLKVLXMPEXCRYQPFKPLSIGGIIILKDXSEDIEELVEPVAAHGPKIEEEEQEPEPPEPFEYIDD

SEQ ID NO: 21760 - protein, 203 aa, Homo sapiens
  MOD_RES (3)..(3): Selenocysteine
  MOD_RES (99)..(99): Selenocysteine
  MOD_RES (115)..(115): Selenocysteine
  MOD_RES (163)..(163): Selenocysteine
  MOD_RES (172)..(172): Selenocysteine
MIXSAAGIISLLDEDEPQLKEFALHKLNAVVNDFWAEISESVDKIEVLYEDEGFRSRQFAALVASKVFYHLGAFEESLNYALGAGDLFNVNDNSEYVEXIIGNYRLSAKCIDHYXKQCVENADLPEGEKKPIDQRLEGIVNKMFQRCLDDHKYKQAIGIALEXRRLDVFEKXILESNDVPGMLAYSLKLCMSLMQNKQFRNKV

SEQ ID NO: 21761 - protein, 48 aa, Homo sapiens
  MOD_RES (3)..(3): Selenocysteine
MIXSAAGIISLLDEDEPQLKEFALHKLNAVVNDFWAEISESVDKIKMH

SEQ ID NO: 21762 - protein, 164 aa, Homo sapiens
  MOD_RES (1)..(1): Any amino acid
  MOD_RES (9)..(9): Selenocysteine
  MOD_RES (57)..(57): Selenocysteine
  MOD_RES (66)..(66): Selenocysteine
  MOD_RES (122)..(122): Selenocysteine
  MOD_RES (125)..(125): Selenocysteine
  MOD_RES (134)..(134): Selenocysteine
  MOD_RES (136)..(136): Selenocysteine
  MOD_RES (138)..(138): Selenocysteine
  MOD_RES (151)..(151): Selenocysteine
  MOD_RES (155)..(155): Selenocysteine
  MOD_RES (163)..(163): Selenocysteine
XAKCIDHYXKQCVENADLPEGEKKPIDQRLEGIVNKMFQRCLDDHKYKQAIGIALEXRRLDVFEKXILESNDVPGMLAYSLKLCMSLMQNKQFRNKVLRVLVKIYMNLEKPDFINVCQNLRXVGXPIASVPGSXNXGXVPGSEKDSDSMEXEEKXSSAFVGKXP

SEQ ID NO: 21763 - protein, 192 aa, Homo sapiens
  MOD_RES (1)..(1): Any amino acid
  MOD_RES (32)..(32): Selenocysteine
  MOD_RES (78)..(78): Selenocysteine
  MOD_RES (122)..(122): Selenocysteine
  MOD_RES (156)..(156): Selenocysteine
  MOD_RES (163)..(163): Selenocysteine
  MOD_RES (189)..(189): Selenocysteine
XGEAAGLALGLVMLGSKNAQAIEDMVGYAQEXQHEKILRGLAVGIALVMYGRMEEADALIESLCRDKDPILRRSGMYXVAMAYCGSGNNKAIRRLLHVAVSDVNDDVRRAAVESLGFILFRXPEQCPSVVSLLSESYNPHVRYGAAMALGICCAGXGNKVKPXANGVSSFLAPDCFPSPQNLCNSCKNXSAM

SEQ ID NO: 21764 - protein, 193 aa, Homo sapiens
  MOD_RES (34)..(34): Selenocysteine
  MOD_RES (36)..(36): Selenocysteine
  MOD_RES (75)..(75): Selenocysteine
  MOD_RES (108)..(108): Selenocysteine
  MOD_RES (132)..(132): Selenocysteine
  MOD_RES (137)..(137): Selenocysteine
  MOD_RES (141)..(141): Selenocysteine
  MOD_RES (174)..(174): Selenocysteine
MEGCVSNLMVCNLAYSGKLEELKESILADKSLAXRXDQAGWSPLHIAASAGRDEIVKALLGKGAQVNAVNQNGCXPLHYAASKNRHEIAVMLLEGGANPDAKDHYEAXAMHRAAAKGNLKMIHILLYYKASXNIQDXEGNXPLHLACDEERVEEAKLLVSQGASIYIENKEEKXPLQVAKGGLGLILKRMVEG

SEQ ID NO: 21765 - protein, 110 aa, Homo sapiens
  MOD_RES (34)..(34): Selenocysteine
  MOD_RES (36)..(36): Selenocysteine
  MOD_RES (42)..(42): Selenocysteine
  MOD_RES (53)..(53): Selenocysteine
  MOD_RES (100)..(100): Selenocysteine
  MOD_RES (110)..(110): Selenocysteine
MEGCVSNLMVCNLAYSGKLEELKESILADKSLAXRXDQDSRXALHWACSAGHXEIVEFLLQLGVPVNDKDDAASKNRHEIAVMLLEGGANPDAKDHYEAXAMHRAAAKDX

SEQ ID NO: 21766 - protein, 185 aa, Homo sapiens
  MOD_RES (34)..(34): Selenocysteine
  MOD_RES (36)..(36): Selenocysteine
  MOD_RES (42)..(42): Selenocysteine
  MOD_RES (53)..(53): Selenocysteine
  MOD_RES (100)..(100): Selenocysteine
  MOD_RES (124)..(124): Selenocysteine
  MOD_RES (129)..(129): Selenocysteine
  MOD_RES (133)..(133): Selenocysteine
  MOD_RES (166)..(166): Selenocysteine
MEGCVSNLMVCNLAYSGKLEELKESILADKSLAXRXDQDSRXALHWACSAGHXEIVEFLLQLGVPVNDKDDAASKNRHEIAVMLLEGGANPDAKDHYEAXAMHRAAAKGNLKMIHILLYYKASXNIQDXEGNXPLHLACDEERVEEAKLLVSQGASIYIENKEEKXPLQVAKGGLGLILKRMVEG

SEQ ID NO: 21767 - protein, 151 aa, Homo sapiens
  MOD_RES (34)..(34): Selenocysteine
  MOD_RES (36)..(36): Selenocysteine
  MOD_RES (42)..(42): Selenocysteine
  MOD_RES (53)..(53): Selenocysteine
  MOD_RES (108)..(108): Selenocysteine
  MOD_RES (141)..(141): Selenocysteine
  MOD_RES (151)..(151): Selenocysteine
MEGCVSNLMVCNLAYSGKLEELKESILADKSLAXRXDQDSRXALHWACSAGHXEIVEFLLQLGVPVNDKDDAGWSPLHIAASAGRDEIVKALLGKGAQVNAVNQNGCXPLHYAASKNRHEIAVMLLEGGANPDAKDHYEAXAMHRAAAKDX

SEQ ID NO: 21768 - protein, 226 aa, Homo sapiens
  MOD_RES (34)..(34): Selenocysteine
  MOD_RES (36)..(36): Selenocysteine
  MOD_RES (42)..(42): Selenocysteine
  MOD_RES (53)..(53): Selenocysteine
  MOD_RES (108)..(108): Selenocysteine
  MOD_RES (141)..(141): Selenocysteine
  MOD_RES (165)..(165): Selenocysteine
  MOD_RES (170)..(170): Selenocysteine
  MOD_RES (174)..(174): Selenocysteine
  MOD_RES (207)..(207): Selenocysteine
MEGCVSNLMVCNLAYSGKLEELKESILADKSLAXRXDQDSRXALHWACSAGHXEIVEFLLQLGVPVNDKDDAGWSPLHIAASAGRDEIVKALLGKGAQVNAVNQNGCXPLHYAASKNRHEIAVMLLEGGANPDAKDHYEAXAMHRAAAKGNLKMIHILLYYKASXNIQDXEGNXPLHLACDEERVEEAKLLVSQGASIYIENKEEKXPLQVAKGGLGLILKRMVEG

SEQ ID NO: 21769 - protein, 188 aa, Homo sapiens
  MOD_RES (18)..(18): Selenocysteine
  MOD_RES (60)..(60): Selenocysteine
  MOD_RES (103)..(103): Selenocysteine
  MOD_RES (111)..(111): Selenocysteine
  MOD_RES (165)..(165): Selenocysteine
  MOD_RES (182)..(182): Selenocysteine
MAAAAVVEFQRAQSLLSXDREASIDILHSIVKRDIQENDEEAVQVKEQSILELGSLLAKXGQAAELGGLLKYVRPFLNSISKAKAARLVRSLLDLFLDMEAAXGQEFLFVXGHLILWVCSMLCFVSGDCQWSLESSLHQGHKLILVFEVELCLECIEWAKSEKRXFLRQALEARLVSLYFDXKRYQEA

SEQ ID NO: 21770 - protein, 422 aa, Homo sapiens
  MOD_RES (18)..(18): Selenocysteine
  MOD_RES (60)..(60): Selenocysteine
  MOD_RES (103)..(103): Selenocysteine
  MOD_RES (123)..(123): Selenocysteine
  MOD_RES (140)..(140): Selenocysteine
  MOD_RES (176)..(176): Selenocysteine
  MOD_RES (191)..(191): Selenocysteine
  MOD_RES (195)..(196): Selenocysteine
  MOD_RES (209)..(209): Selenocysteine
  MOD_RES (227)..(227): Selenocysteine
  MOD_RES (249)..(249): Selenocysteine
  MOD_RES (263)..(263): Selenocysteine
  MOD_RES (284)..(284): Selenocysteine
  MOD_RES (307)..(307): Selenocysteine
  MOD_RES (321)..(321): Selenocysteine
  MOD_RES (396)..(396): Selenocysteine
  MOD_RES (403)..(403): Selenocysteine
  MOD_RES (422)..(422): Selenocysteine
MAAAAVVEFQRAQSLLSXDREASIDILHSIVKRDIQENDEEAVQVKEQSILELGSLLAKXGQAAELGGLLKYVRPFLNSISKAKAARLVRSLLDLFLDMEAAXGQEVELCLECIEWAKSEKRXFLRQALEARLVSLYFDXKRYQEALHLGSQLLRELKKMDDKALLVEVQLLESKXYHALSNLPKARAALXSARXXANAIYCPPKLQAXLDMQSGIIHAAEEKDWKXAYSYFYEAFEGYDSIDSPKAIXSLKYMLLCKIMLNXPEDVQALVSGKLALRYAGRQXEALKCVAQASKNRSLADFEKALXDYRAELRDDPIISXHLAKLYDNLLEQNLIRVIEPFSRVQIEHISSLIKLSKADVERKLSQMILDKKFHGILDQGEGVLIIFDEPPVDKXYEAALEXIQNMSKVVDSLYNKAKKLX

SEQ ID NO: 21771 - protein, 45 aa, Homo sapiens
  MOD_RES (5)..(5): Selenocysteine
  MOD_RES (25)..(25): Selenocysteine
  MOD_RES (42)..(42): Selenocysteine
MEAAXGQEVELCLECIEWAKSEKRXFLRQALEARLVSLYFDXKRY

SEQ ID NO: 21772 - protein, 90 aa, Homo sapiens
  MOD_RES (1)..(1): Any amino acid
  MOD_RES (3)..(3): Selenocysteine
  MOD_RES (18)..(18): Selenocysteine
  MOD_RES (22)..(23): Selenocysteine
  MOD_RES (36)..(36): Selenocysteine
  MOD_RES (54)..(54): Selenocysteine
  MOD_RES (76)..(76): Selenocysteine
  MOD_RES (90)..(90): Selenocysteine
XKXYHALSNLPKARAALXSARXXANAIYCPPKLQAXLDMQSGIIHAAEEKDWKXAYSYFYEAFEGYDSIDSPKAIXSLKYMLLCKIMLNX

SEQ ID NO: 21773 - protein, 42 aa, Homo sapiens
  MOD_RES (23)..(23): Selenocysteine
MADGGSERADGRIVKMEVDYSAXVDQRLPECAKLAKACLYRY

SEQ ID NO: 21774 - protein, 436 aa, Homo sapiens
  MOD_RES (23)..(23): Selenocysteine
  MOD_RES (43)..(43): Selenocysteine
  MOD_RES (90)..(90): Selenocysteine
  MOD_RES (96)..(96): Selenocysteine
  MOD_RES (107)..(107): Selenocysteine
  MOD_RES (112)..(112): Selenocysteine
  MOD_RES (126)..(126): Selenocysteine
  MOD_RES (128)..(128): Selenocysteine
  MOD_RES (131)..(131): Selenocysteine
  MOD_RES (153)..(153): Selenocysteine
  MOD_RES (182)..(182): Selenocysteine
  MOD_RES (191)..(191): Selenocysteine
  MOD_RES (199)..(199): Selenocysteine
  MOD_RES (233)..(233): Selenocysteine
  MOD_RES (290)..(291): Selenocysteine
  MOD_RES (299)..(299): Selenocysteine
  MOD_RES (318)..(318): Selenocysteine
  MOD_RES (324)..(324): Selenocysteine
  MOD_RES (351)..(351): Selenocysteine
  MOD_RES (354)..(354): Selenocysteine
  MOD_RES (381)..(381): Selenocysteine
  MOD_RES (422)..(423): Selenocysteine
MADGGSERADGRIVKMEVDYSAXVDQRLPECAKLAKASDMVSXSRILVAVVKMCYEAKEWDLLNENIMLLSKRRSQLKQAVAKMVQQCCXYVEEIXDLPIKLRLIDXLRMVXEGKIYVEIERARLXKXLAXIKEQNGDVKEAASILQELQVEXYGSMEKKERVEFILEQMRLCLAVKDYIRXQIISKKINXKFFQEENXEKLKLKYYNLMIQLDQHEGSYLSICKHYRAIYDXPCIQAESEKWQQALKSVVLYVILAPFDNEQSDLVHRISGDKKLEEIPKYKDLLKLFXXMELMRWSXLVEDYGMELRKGSLESPAXDVFGSXEEGEKRWKDLKNRVVEHNIRIMAKYYXRIXMKRMAQLLDLSVDESEAFLSNLVVNKXIFAKVDRLAGIINFQRPKDPNNLLNDWSQKLNSLMSLVNKXXHLIAKEEMIHNLQ

SEQ ID NO: 21775 - protein, 456 aa, Homo sapiens
  MOD_RES (23)..(23): Selenocysteine
  MOD_RES (46)..(46): Selenocysteine
  MOD_RES (54)..(54): Selenocysteine
  MOD_RES (56)..(56): Selenocysteine
  MOD_RES (63)..(63): Selenocysteine
  MOD_RES (110)..(110): Selenocysteine
  MOD_RES (116)..(116): Selenocysteine
  MOD_RES (127)..(127): Selenocysteine
  MOD_RES (132)..(132): Selenocysteine
  MOD_RES (146)..(146): Selenocysteine
  MOD_RES (148)..(148): Selenocysteine
  MOD_RES (151)..(151): Selenocysteine
  MOD_RES (173)..(173): Selenocysteine
  MOD_RES (202)..(202): Selenocysteine
  MOD_RES (211)..(211): Selenocysteine
  MOD_RES (219)..(219): Selenocysteine
  MOD_RES (253)..(253): Selenocysteine
  MOD_RES (310)..(311): Selenocysteine
  MOD_RES (319)..(319): Selenocysteine
  MOD_RES (338)..(338): Selenocysteine
  MOD_RES (344)..(344): Selenocysteine
  MOD_RES (371)..(371): Selenocysteine
  MOD_RES (374)..(374): Selenocysteine
  MOD_RES (401)..(401): Selenocysteine
  MOD_RES (442)..(443): Selenocysteine
MADGGSERADGRIVKMEVDYSAXVDQRLPECAKLAKEGRLQEVIEXLLSLEKQXRXASDMVSXSRILVAVVKMCYEAKEWDLLNENIMLLSKRRSQLKQAVAKMVQQCCXYVEEIXDLPIKLRLIDXLRMVXEGKIYVEIERARLXKXLAXIKEQNGDVKEAASILQELQVEXYGSMEKKERVEFILEQMRLCLAVKDYIRXQIISKKINXKFFQEENXEKLKLKYYNLMIQLDQHEGSYLSICKHYRAIYDXPCIQAESEKWQQALKSVVLYVILAPFDNEQSDLVHRISGDKKLEEIPKYKDLLKLFXXMELMRWSXLVEDYGMELRKGSLESPAXDVFGSXEEGEKRWKDLKNRVVEHNIRIMAKYYXRIXMKRMAQLLDLSVDESEAFLSNLVVNKXIFAKVDRLAGIINFQRPKDPNNLLNDWSQKLNSLMSLVNKXXHLIAKEEMIHNLQ

SEQ ID NO: 21776 - protein, 38 aa, Homo sapiens
  MOD_RES (23)..(23): Selenocysteine
MADGGSERADGRIVKMEVDYSAXVDQRLPECAKLAKVV

SEQ ID NO: 21777 - protein, 72 aa, Homo sapiens
  MOD_RES (30)..(30): Selenocysteine
  MOD_RES (38)..(38): Selenocysteine
MKDVPGFLQQSQNSGPGQPAVWHRLEELYXKKLWHQLXLQVLDFVQDPCFAQGDGLIKGEPFVPRGNHSSCS

SEQ ID NO: 21778 - protein, 70 aa, Homo sapiens
  MOD_RES (30)..(30): Selenocysteine
  MOD_RES (38)..(38): Selenocysteine
MKDVPGFLQQSQNSGPGQPAVWHRLEELYXKKLWHQLXLQVLDFVQDPCFAQGDGLIKLYENFISEFEHR

SEQ ID NO: 21779 - protein, 113 aa, Homo sapiens
  MOD_RES (30)..(30): Selenocysteine
  MOD_RES (38)..(38): Selenocysteine
  MOD_RES (88)..(88): Selenocysteine
  MOD_RES (95)..(95): Selenocysteine
  MOD_RES (100)..(100): Selenocysteine
MKDVPGFLQQSQNSGPGQPAVWHRLEELYXKKLWHQLXLQVLDFVQDPCFAQGDGLIKLYENFISEFEHRVNPLSLVEIILHVVRQMXDPNVALXFLEKXREKVKSSDEAVIL

SEQ ID NO: 21780 - protein, 349 aa, Homo sapiens
  MOD_RES (30)..(30): Selenocysteine
  MOD_RES (38)..(38): Selenocysteine
  MOD_RES (88)..(88): Selenocysteine
  MOD_RES (95)..(95): Selenocysteine
  MOD_RES (100)..(100): Selenocysteine
  MOD_RES (116)..(116): Selenocysteine
  MOD_RES (131)..(131): Selenocysteine
  MOD_RES (134)..(134): Selenocysteine
  MOD_RES (149)..(149): Selenocysteine
  MOD_RES (165)..(165): Selenocysteine
  MOD_RES (199)..(199): Selenocysteine
  MOD_RES (228)..(228): Selenocysteine
  MOD_RES (236)..(236): Selenocysteine
  MOD_RES (250)..(250): Selenocysteine
  MOD_RES (253)..(253): Selenocysteine
  MOD_RES (307)..(307): Selenocysteine
  MOD_RES (331)..(331): Selenocysteine
  MOD_RES (349)..(349): Selenocysteine
MKDVPGFLQQSQNSGPGQPAVWHRLEELYXKKLWHQLXLQVLDFVQDPCFAQGDGLIKLYENFISEFEHRVNPLSLVEIILHVVRQMXDPNVALXFLEKXREKVKSSDEAVILCKXAIGALKLNIGDLQVXKEXIEDVEEMLNNLPGVXSVHSRFYDLSSKYYQXIGNHASYYKDALRFLGCVDIKDLPVSEQQERAFXLGLAGLLGEGVFNFGELLMHPVLESLRNXDRQWLIDXLYAFNSGNVERFQXLKXAWGQQPDLAANEAQLLRKIQLLCLMEVELLVMKALSVGLVKGSIDEVDKRVHMXWVQPRVLDLQQIKGMKDRLEFWCXDVKSMEMLVEHQAHDILX

SEQ ID NO: 21781 - protein, 376 aa, Homo sapiens
  MOD_RES (30)..(30): Selenocysteine
  MOD_RES (38)..(38): Selenocysteine
  MOD_RES (88)..(88): Selenocysteine
  MOD_RES (95)..(95): Selenocysteine
  MOD_RES (100)..(100): Selenocysteine
  MOD_RES (116)..(116): Selenocysteine
  MOD_RES (131)..(131): Selenocysteine
  MOD_RES (134)..(134): Selenocysteine
  MOD_RES (149)..(149): Selenocysteine
  MOD_RES (165)..(165): Selenocysteine
  MOD_RES (199)..(199): Selenocysteine
  MOD_RES (228)..(228): Selenocysteine
  MOD_RES (236)..(236): Selenocysteine
  MOD_RES (250)..(250): Selenocysteine
  MOD_RES (253)..(253): Selenocysteine
  MOD_RES (281)..(281): Selenocysteine
  MOD_RES (283)..(283): Selenocysteine
  MOD_RES (292)..(292): Selenocysteine
  MOD_RES (303)..(303): Selenocysteine
  MOD_RES (334)..(334): Selenocysteine
  MOD_RES (358)..(358): Selenocysteine
  MOD_RES (376)..(376): Selenocysteine
MKDVPGFLQQSQNSGPGQPAVWHRLEELYXKKLWHQLXLQVLDFVQDPCFAQGDGLIKLYENFISEFEHRVNPLSLVEIILHVVRQMXDPNVALXFLEKXREKVKSSDEAVILCKXAIGALKLNIGDLQVXKEXIEDVEEMLNNLPGVXSVHSRFYDLSSKYYQXIGNHASYYKDALRFLGCVDIKDLPVSEQQERAFXLGLAGLLGEGVFNFGELLMHPVLESLRNXDRQWLIDXLYAFNSGNVERFQXLKXAWGQQPDLAANEAQLLRKIQLLCLMEMXFXRPANHRQLXFEEIAKSAKIXVNEVELLVMKALSVGLVKGSIDEVDKRVHMXWVQPRVLDLQQIKGMKDRLEFWCXDVKSMEMLVEHQAHDILX

SEQ ID NO: 21782 - protein, 377 aa, Homo sapiens
  MOD_RES (30)..(30): Selenocysteine
  MOD_RES (38)..(38): Selenocysteine
  MOD_RES (88)..(88): Selenocysteine
  MOD_RES (95)..(95): Selenocysteine
  MOD_RES (100)..(100): Selenocysteine
  MOD_RES (116)..(116): Selenocysteine
  MOD_RES (131)..(131): Selenocysteine
  MOD_RES (134)..(134): Selenocysteine
  MOD_RES (149)..(149): Selenocysteine
  MOD_RES (165)..(165): Selenocysteine
  MOD_RES (199)..(199): Selenocysteine
  MOD_RES (228)..(228): Selenocysteine
  MOD_RES (236)..(236): Selenocysteine
  MOD_RES (250)..(250): Selenocysteine
  MOD_RES (253)..(253): Selenocysteine
  MOD_RES (281)..(281): Selenocysteine
  MOD_RES (283)..(283): Selenocysteine
  MOD_RES (292)..(292): Selenocysteine
  MOD_RES (303)..(303): Selenocysteine
  MOD_RES (334)..(334): Selenocysteine
  MOD_RES (377)..(377): Selenocysteine
MKDVPGFLQQSQNSGPGQPAVWHRLEELYXKKLWHQLXLQVLDFVQDPCFAQGDGLIKLYENFISEFEHRVNPLSLVEIILHVVRQMXDPNVALXFLEKXREKVKSSDEAVILCKXAIGALKLNIGDLQVXKEXIEDVEEMLNNLPGVXSVHSRFYDLSSKYYQXIGNHASYYKDALRFLGCVDIKDLPVSEQQERAFXLGLAGLLGEGVFNFGELLMHPVLESLRNXDRQWLIDXLYAFNSGNVERFQXLKXAWGQQPDLAANEAQLLRKIQLLCLMEMXFXRPANHRQLXFEEIAKSAKIXVNEVELLVMKALSVGLVKGSIDEVDKRVHMXWVQPRVLDLQQVMCIKEGPPGVLVHGVKSMEMLVEHQAHDILX

SEQ ID NO: 21783 - protein, 263 aa, Homo sapiens
  MOD_RES (30)..(30): Selenocysteine
  MOD_RES (50)..(50): Selenocysteine
  MOD_RES (57)..(57): Selenocysteine
  MOD_RES (62)..(62): Selenocysteine
  MOD_RES (78)..(78): Selenocysteine
  MOD_RES (93)..(93): Selenocysteine
  MOD_RES (96)..(96): Selenocysteine
  MOD_RES (111)..(111): Selenocysteine
  MOD_RES (127)..(127): Selenocysteine
  MOD_RES (161)..(161): Selenocysteine
  MOD_RES (190)..(190): Selenocysteine
  MOD_RES (198)..(198): Selenocysteine
  MOD_RES (212)..(212): Selenocysteine
  MOD_RES (215)..(215): Selenocysteine
  MOD_RES (243)..(243): Selenocysteine
  MOD_RES (245)..(245): Selenocysteine
  MOD_RES (254)..(254): Selenocysteine
MKDVPGFLQQSQNSGPGQPAVWHRLEELYXKKVNPLSLVEIILHVVRQMXDPNVALXFLEKXREKVKSSDEAVILCKXAIGALKLNIGDLQVXKEXIEDVEEMLNNLPGVXSVHSRFYDLSSKYYQXIGNHASYYKDALRFLGCVDIKDLPVSEQQERAFXLGLAGLLGEGVFNFGELLMHPVLESLRNXDRQWLIDXLYAFNSGNVERFQXLKXAWGQQPDLAANEAQLLRKIQLLCLMEMXFXRPANHRQLXFEEIAKSAK

SEQ ID NO: 21784 - protein, 378 aa, Homo sapiens
  MOD_RES (30)..(30): Selenocysteine
  MOD_RES (36)..(36): Selenocysteine
  MOD_RES (43)..(43): Selenocysteine
  MOD_RES (90)..(90): Selenocysteine
  MOD_RES (97)..(97): Selenocysteine
  MOD_RES (102)..(102): Selenocysteine
  MOD_RES (118)..(118): Selenocysteine
  MOD_RES (133)..(133): Selenocysteine
  MOD_RES (136)..(136): Selenocysteine
  MOD_RES (151)..(151): Selenocysteine
  MOD_RES (167)..(167): Selenocysteine
  MOD_RES (201)..(201): Selenocysteine
  MOD_RES (230)..(230): Selenocysteine
  MOD_RES (238)..(238): Selenocysteine
  MOD_RES (252)..(252): Selenocysteine
  MOD_RES (255)..(255): Selenocysteine
  MOD_RES (283)..(283): Selenocysteine
  MOD_RES (285)..(285): Selenocysteine
  MOD_RES (294)..(294): Selenocysteine
  MOD_RES (305)..(305): Selenocysteine
  MOD_RES (336)..(336): Selenocysteine
  MOD_RES (360)..(360): Selenocysteine
  MOD_RES (378)..(378): Selenocysteine
MKDVPGFLQQSQNSGPGQPAVWHRLEELYXKNFMKXLSVNLNXGKSLSSVFHFENECIDARRCSKAGGFYFRVNPLSLVEIILHVVRQMXDPNVALXFLEKXREKVKSSDEAVILCKXAIGALKLNIGDLQVXKEXIEDVEEMLNNLPGVXSVHSRFYDLSSKYYQXIGNHASYYKDALRFLGCVDIKDLPVSEQQERAFXLGLAGLLGEGVFNFGELLMHPVLESLRNXDRQWLIDXLYAFNSGNVERFQXLKXAWGQQPDLAANEAQLLRKIQLLCLMEMXFXRPANHRQLXFEEIAKSAKIXVNEVELLVMKALSVGLVKGSIDEVDKRVHMXWVQPRVLDLQQIKGMKDRLEFWCXDVKSMEMLVEHQAHDILX

SEQ ID NO: 21785 - protein, 221 aa, Homo sapiens
  MOD_RES (1)..(1): Any amino acid
  MOD_RES (6)..(6): Selenocysteine
  MOD_RES (11)..(11): Selenocysteine
  MOD_RES (27)..(27): Selenocysteine
  MOD_RES (42)..(42): Selenocysteine
  MOD_RES (45)..(45): Selenocysteine
  MOD_RES (60)..(60): Selenocysteine
  MOD_RES (76)..(76): Selenocysteine
  MOD_RES (110)..(110): Selenocysteine
  MOD_RES (139)..(139): Selenocysteine
  MOD_RES (147)..(147): Selenocysteine
  MOD_RES (161)..(161): Selenocysteine
  MOD_RES (164)..(164): Selenocysteine
  MOD_RES (203)..(203): Selenocysteine
  MOD_RES (221)..(221): Selenocysteine
XNVALXFLEKXREKVKSSDEAVILCKXAIGALKLNIGDLQVXKEXIEDVEEMLNNLPGVXSVHSRFYDLSSKYYQXIGNHASYYKDALRFLGCVDIKDLPVSEQQERAFXLGLAGLLGEGVFNFGELLMHPVLESLRNXDRQWLIDXLYAFNSGNVERFQXLKXAWGQQPDLAANEAQLLRKIQLLCLMEIKGMKDRLEFWCXDVKSMEMLVEHQAHDILX

SEQ ID NO: 21786 - protein, 84 aa, Homo sapiens
  MOD_RES (20)..(20): Selenocysteine
  MOD_RES (27)..(27): Selenocysteine
  MOD_RES (66)..(66): Selenocysteine
  MOD_RES (80)..(80): Selenocysteine
MDRLLRLGGGMPGLGQGPPXDAPAVDXAEQVYISSLALLKMLKHGRAGVPMEVMGLMLGEFVDDYXVRVIDVFAMPQSGXGVSV

SEQ ID NO: 21787 - protein, 310 aa, Homo sapiens
  MOD_RES (20)..(20): Selenocysteine
  MOD_RES (27)..(27): Selenocysteine
  MOD_RES (66)..(66): Selenocysteine
  MOD_RES (80)..(80): Selenocysteine
  MOD_RES (102)..(102): Selenocysteine
  MOD_RES (129)..(129): Selenocysteine
  MOD_RES (177)..(178): Selenocysteine
  MOD_RES (204)..(204): Selenocysteine
  MOD_RES (230)..(230): Selenocysteine
  MOD_RES (266)..(266): Selenocysteine
  MOD_RES (293)..(293): Selenocysteine
  MOD_RES (306)..(306): Selenocysteine
MDRLLRLGGGMPGLGQGPPXDAPAVDXAEQVYISSLALLKMLKHGRAGVPMEVMGLMLGEFVDDYXVRVIDVFAMPQSGXGVSVEAVDPVFQAKMLDMLKQXGRPEMVVGWYHSHPGFGCWLSGVDINXQQSFEALSERAVAVVVDPIQSVKGKVVIDAFRLINANMMVLGHEPRQXXSNLGHLNKPSIQALIHGLNRHYYSIXINYRKNELEQKMLLNLHKKSWMEGLXLQDYSEHCKHNESVVKEMLELAKNYNKAVEEEDKMXPEQLAIKNVGKQDPKRHLEEHVDVLMXSNIVQCLAAMLDXVVFK

SEQ ID NO: 21788 - protein, 908 aa, Homo sapiens
  MOD_RES (24)..(24): Selenocysteine
  MOD_RES (68)..(68): Selenocysteine
  MOD_RES (86)..(87): Selenocysteine
  MOD_RES (90)..(90): Selenocysteine
  MOD_RES (132)..(132): Selenocysteine
  MOD_RES (186)..(186): Selenocysteine
  MOD_RES (234)..(234): Selenocysteine
  MOD_RES (283)..(283): Selenocysteine
  MOD_RES (318)..(318): Selenocysteine
  MOD_RES (351)..(351): Selenocysteine
  MOD_RES (392)..(392): Selenocysteine
  MOD_RES (427)..(427): Selenocysteine
  MOD_RES (476)..(476): Selenocysteine
  MOD_RES (499)..(499): Selenocysteine
  MOD_RES (518)..(518): Selenocysteine
  MOD_RES (535)..(535): Selenocysteine
  MOD_RES (537)..(537): Selenocysteine
  MOD_RES (541)..(541): Selenocysteine
  MOD_RES (548)..(548): Selenocysteine
  MOD_RES (553)..(553): Selenocysteine
  MOD_RES (593)..(593): Selenocysteine
  MOD_RES (674)..(674): Selenocysteine
  MOD_RES (685)..(685): Selenocysteine
  MOD_RES (709)..(709): Selenocysteine
  MOD_RES (736)..(736): Selenocysteine
  MOD_RES (769)..(769): Selenocysteine
  MOD_RES (775)..(775): Selenocysteine
  MOD_RES (777)..(777): Selenocysteine
  MOD_RES (798)..(798): Selenocysteine
  MOD_RES (832)..(832): Selenocysteine
  MOD_RES (861)..(861): Selenocysteine
  MOD_RES (863)..(863): Selenocysteine
  MOD_RES (867)..(867): Selenocysteine
  MOD_RES (869)..(870): Selenocysteine
  MOD_RES (884)..(884): Selenocysteine
  MOD_RES (891)..(891): Selenocysteine
MEEGGRDKAPVQPQQSPAAAPGGXDEKPSGKERRDAGDKDKEQELSEEDKQLQDELEMLVERLGEKDXSLYRPALEELRRQIRSSXXSMXSVPKPLKFLRPHYGKLKEIYENMAPGENKRFAADIISVLAMXMSGERECLKYRLVGSQEELASWGHEYVRHLAGEVAKEWQELDDAEKVQREPLLXLVKEIVPYNMAHNAEHEACDLLMEIEQVDMLEKDIDENAYAKVCLYLXSCVNYVPEPENSALLRCALGVFRKFSRFPEALRLALMLNDMELVEDIFXSCKDVVVQKQMAFMLGRHGVFLELSEDVEEYEDLXEIMSNVQLNSNFLALARELDIMEPKVPDDIYKXHLENNRFGGSGSQVDSARMNLASSFVNGFVNAAFGQDKLLXDDGNKWLYKNKDHGMLSAAASLGMILLWDVDGGLXQIDKYLYSSEDYIKSGALLACGIVNSGVRNECDPALALLSDYVLHNSNXMRLGSIFGLGLAYAGSNREDVLXLLLPVMGDSKSSMEVAGVXALACGMIAVGSCNGDVXSXILQXIMEKSEXELKDXYARWLPLGLGLNHLGKGEAIEAILAALEVVSEPFRSFANXLVDVCAYAGSGNVLKVQQLLHICSEHFDSKEKEEDKDKKEKKDKDKKEAPADMGAHQGVAVLGIALIAMGEEIGAEMALRXFGHLLRYGEPXLRRAVPLALALISVSNPRLNILDXLSKFSHDADPEVSYNSIFAMGMVGSGXNNARLAAMLRQLAQYHAKDPNNLFMVRLAQGLXHLGKGXLXLCPYHSDRQLMSQVAVAGLLXVLVSFLDVRNIILGKSHYVLYGLVAAMQPRMLVXFDEELRPLPVSVRVGQAVDVVGQAGKPKXIXGFQXHXXPVLLAHGERAELAXEEFLPVXPILEGFVILRKNPNYDL

SEQ ID NO: 21789 - protein, 217 aa, Homo sapiens
  MOD_RES (24)..(24): Selenocysteine
  MOD_RES (68)..(68): Selenocysteine
  MOD_RES (86)..(87): Selenocysteine
  MOD_RES (90)..(90): Selenocysteine
  MOD_RES (132)..(132): Selenocysteine
  MOD_RES (208)..(208): Selenocysteine
MEEGGRDKAPVQPQQSPAAAPGGXDEKPSGKERRDAGDKDKEQELSEEDKQLQDELEMLVERLGEKDXSLYRPALEELRRQIRSSXXSMXSVPKPLKFLRPHYGKLKEIYENMAPGENKRFAADIISVLAMXMSGERECLKYRLVGSQEELASWGHEYVSCVNYVPEPENSALLRCALGVFRKFSRFPEALRLALMLNDMELVEDIFXSCKDVVVQK

SEQ ID NO: 21790 - protein, 59 aa, Homo sapiens
  MOD_RES (24)..(24): Selenocysteine
MEEGGRDKAPVQPQQSPAAAPGGXDEKPSGKERRDAGDKDKEQELVRRDPESRRRRLRG

SEQ ID NO: 21791 - protein, 749 aa, Homo sapiens
  MOD_RES (27)..(27): Selenocysteine
  MOD_RES (75)..(75): Selenocysteine
  MOD_RES (124)..(124): Selenocysteine
  MOD_RES (159)..(159): Selenocysteine
  MOD_RES (192)..(192): Selenocysteine
  MOD_RES (233)..(233): Selenocysteine
  MOD_RES (268)..(268): Selenocysteine
  MOD_RES (317)..(317): Selenocysteine
  MOD_RES (340)..(340): Selenocysteine
  MOD_RES (359)..(359): Selenocysteine
  MOD_RES (376)..(376): Selenocysteine
  MOD_RES (378)..(378): Selenocysteine
  MOD_RES (382)..(382): Selenocysteine
  MOD_RES (389)..(389): Selenocysteine
  MOD_RES (394)..(394): Selenocysteine
  MOD_RES (434)..(434): Selenocysteine
  MOD_RES (515)..(515): Selenocysteine
  MOD_RES (526)..(526): Selenocysteine
  MOD_RES (550)..(550): Selenocysteine
  MOD_RES (577)..(577): Selenocysteine
  MOD_RES (610)..(610): Selenocysteine
  MOD_RES (616)..(616): Selenocysteine
  MOD_RES (618)..(618): Selenocysteine
  MOD_RES (639)..(639): Selenocysteine
  MOD_RES (673)..(673): Selenocysteine
  MOD_RES (702)..(702): Selenocysteine
  MOD_RES (704)..(704): Selenocysteine
  MOD_RES (708)..(708): Selenocysteine
  MOD_RES (710)..(711): Selenocysteine
  MOD_RES (725)..(725): Selenocysteine
  MOD_RES (732)..(732): Selenocysteine
MSMSGEVAKEWQELDDAEKVQREPLLXLVKEIVPYNMAHNAEHEACDLLMEIEQVDMLEKDIDENAYAKVCLYLXSCVNYVPEPENSALLRCALGVFRKFSRFPEALRLALMLNDMELVEDIFXSCKDVVVQKQMAFMLGRHGVFLELSEDVEEYEDLXEIMSNVQLNSNFLALARELDIMEPKVPDDIYKXHLENNRFGGSGSQVDSARMNLASSFVNGFVNAAFGQDKLLXDDGNKWLYKNKDHGMLSAAASLGMILLWDVDGGLXQIDKYLYSSEDYIKSGALLACGIVNSGVRNECDPALALLSDYVLHNSNXMRLGSIFGLGLAYAGSNREDVLXLLLPVMGDSKSSMEVAGVXALACGMIAVGSCNGDVXSXILQXIMEKSEXELKDXYARWLPLGLGLNHLGKGEAIEAILAALEVVSEPFRSFANXLVDVCAYAGSGNVLKVQQLLHICSEHFDSKEKEEDKDKKEKKDKDKKEAPADMGAHQGVAVLGIALIAMGEEIGAEMALRXFGHLLRYGEPXLRRAVPLALALISVSNPRLNILDXLSKFSHDADPEVSYNSIFAMGMVGSGXNNARLAAMLRQLAQYHAKDPNNLFMVRLAQGLXHLGKGXLXLCPYHSDRQLMSQVAVAGLLXVLVSFLDVRNIILGKSHYVLYGLVAAMQPRMLVXFDEELRPLPVSVRVGQAVDVVGQAGKPKXIXGFQXHXXPVLLAHGERAELAXEEFLPVXPILEGFVILRKNPNYDL

SEQ ID NO: 21792 - protein, 778 aa, Homo sapiens
  MOD_RES (2)..(2): Selenocysteine
  MOD_RES (56)..(56): Selenocysteine
  MOD_RES (104)..(104): Selenocysteine
  MOD_RES (153)..(153): Selenocysteine
  MOD_RES (188)..(188): Selenocysteine
  MOD_RES (221)..(221): Selenocysteine
  MOD_RES (262)..(262): Selenocysteine
  MOD_RES (297)..(297): Selenocysteine
  MOD_RES (346)..(346): Selenocysteine
  MOD_RES (369)..(369): Selenocysteine
  MOD_RES (388)..(388): Selenocysteine
  MOD_RES (405)..(405): Selenocysteine
  MOD_RES (407)..(407): Selenocysteine
  MOD_RES (411)..(411): Selenocysteine
  MOD_RES (418)..(418): Selenocysteine
  MOD_RES (423)..(423): Selenocysteine
  MOD_RES (463)..(463): Selenocysteine
  MOD_RES (544)..(544): Selenocysteine
  MOD_RES (555)..(555): Selenocysteine
  MOD_RES (579)..(579): Selenocysteine
  MOD_RES (606)..(606): Selenocysteine
  MOD_RES (639)..(639): Selenocysteine
  MOD_RES (645)..(645): Selenocysteine
  MOD_RES (647)..(647): Selenocysteine
  MOD_RES (668)..(668): Selenocysteine
  MOD_RES (702)..(702): Selenocysteine
  MOD_RES (731)..(731): Selenocysteine
  MOD_RES (733)..(733): Selenocysteine
  MOD_RES (737)..(737): Selenocysteine
  MOD_RES (739)..(740): Selenocysteine
  MOD_RES (754)..(754): Selenocysteine
  MOD_RES (761)..(761): Selenocysteine
MXMSGERECLKYRLVGSQEELASWGHEYVRHLAGEVAKEWQELDDAEKVQREPLLXLVKEIVPYNMAHNAEHEACDLLMEIEQVDMLEKDIDENAYAKVCLYLXSCVNYVPEPENSALLRCALGVFRKFSRFPEALRLALMLNDMELVEDIFXSCKDVVVQKQMAFMLGRHGVFLELSEDVEEYEDLXEIMSNVQLNSNFLALARELDIMEPKVPDDIYKXHLENNRFGGSGSQVDSARMNLASSFVNGFVNAAFGQDKLLXDDGNKWLYKNKDHGMLSAAASLGMILLWDVDGGLXQIDKYLYSSEDYIKSGALLACGIVNSGVRNECDPALALLSDYVLHNSNXMRLGSIFGLGLAYAGSNREDVLXLLLPVMGDSKSSMEVAGVXALACGMIAVGSCNGDVXSXILQXIMEKSEXELKDXYARWLPLGLGLNHLGKGEAIEAILAALEVVSEPFRSFANXLVDVCAYAGSGNVLKVQQLLHICSEHFDSKEKEEDKDKKEKKDKDKKEAPADMGAHQGVAVLGIALIAMGEEIGAEMALRXFGHLLRYGEPXLRRAVPLALALISVSNPRLNILDXLSKFSHDADPEVSYNSIFAMGMVGSGXNNARLAAMLRQLAQYHAKDPNNLFMVRLAQGLXHLGKGXLXLCPYHSDRQLMSQVAVAGLLXVLVSFLDVRNIILGKSHYVLYGLVAAMQPRMLVXFDEELRPLPVSVRVGQAVDVVGQAGKPKXIXGFQXHXXPVLLAHGERAELAXEEFLPVXPILEGFVILRKNPNYDL

SEQ ID NO: 21793 - protein, 143 aa, Homo sapiens
  MOD_RES (1)..(1): Any amino acid
  MOD_RES (6)..(6): Selenocysteine
  MOD_RES (24)..(25): Selenocysteine
  MOD_RES (28)..(28): Selenocysteine
  MOD_RES (70)..(70): Selenocysteine
  MOD_RES (131)..(131): Selenocysteine
XGEKDXSLYRPALEELRRQIRSSXXSMXSVPKPLKFLRPHYGKLKEIYENMAPGENKRFAADIISVLAMXMSGERECLKYRLVGSQEELASWGHEYVREVLPLKLCSLNRLGLSVGIWQEKWLRSGRSWMXQRRSSGSLCSLW

SEQ ID NO: 21794 - protein, 203 aa, Homo sapiens
  MOD_RES (1)..(1): Any amino acid
  MOD_RES (2)..(2): Selenocysteine
  MOD_RES (9)..(9): Selenocysteine
  MOD_RES (14)..(14): Selenocysteine
  MOD_RES (54)..(54): Selenocysteine
  MOD_RES (118)..(118): Selenocysteine
  MOD_RES (142)..(142): Selenocysteine
  MOD_RES (169)..(169): Selenocysteine
  MOD_RES (202)..(202): Selenocysteine
XXIMEKSEXELKDXYARWLPLGLGLNHLGKGEAIEAILAALEVVSEPFRSFANXLVDVCAYAGSGNVLKVQQLLHICSEHFDSKEKEEDKDKKEKKDKDKKEAPADMGAHQLRYGEPXLRRAVPLALALISVSNPRLNILDXLSKFSHDADPEVSYNSIFAMGMVGSGXNNARLAAMLRQLAQYHAKDPNNLFMVRLAQGLXH

SEQ ID NO: 21795 - protein, 534 aa, Homo sapiens
  MOD_RES (43)..(43): Selenocysteine
  MOD_RES (48)..(48): Selenocysteine
  MOD_RES (55)..(55): Selenocysteine
  MOD_RES (69)..(69): Selenocysteine
  MOD_RES (71)..(71): Selenocysteine
  MOD_RES (104)..(104): Selenocysteine
  MOD_RES (122)..(122): Selenocysteine
  MOD_RES (127)..(127): Selenocysteine
  MOD_RES (141)..(141): Selenocysteine
  MOD_RES (151)..(151): Selenocysteine
  MOD_RES (157)..(157): Selenocysteine
  MOD_RES (197)..(197): Selenocysteine
  MOD_RES (237)..(237): Selenocysteine
  MOD_RES (239)..(239): Selenocysteine
  MOD_RES (249)..(249): Selenocysteine
  MOD_RES (292)..(292): Selenocysteine
  MOD_RES (308)..(308): Selenocysteine
  MOD_RES (310)..(310): Selenocysteine
  MOD_RES (320)..(320): Selenocysteine
  MOD_RES (327)..(327): Selenocysteine
  MOD_RES (364)..(364): Selenocysteine
  MOD_RES (369)..(369): Selenocysteine
  MOD_RES (391)..(391): Selenocysteine
  MOD_RES (393)..(393): Selenocysteine
  MOD_RES (405)..(405): Selenocysteine
  MOD_RES (469)..(469): Selenocysteine
MKQEGSARRRGADKAKPPPGGGEQEPPPPPAPQDVEMKEEAAXGGGSXGEADGKXAAAAAEHSQRELDXVXLEDIKEHVKQLEKAVSGKEPRFVLRALRMLPSXSRRLNHYVLYKAVQGFFXSNNAXRDFLLPFLEEPMDXEADLQFRPRXGKAASXPLLPEVEAYLQLLVVIFMMNSKRYKEAQKISDDLMQKISXQNRRALDLVAAKCYYYHARVYEFLDKLDVVRSFLHARLRXAXLRHDADGQAXLLNLLLRNYLHYSLYDQAEKLVSKSVFPEQANNNEWARYLYYXGRIKAIQLEYSEARRXMXNALRKAPQHXAVGFKQXVHKLLIVVELLLGEIPDRLQFRQPSLKRSLMPYFLLXQAVRXGNLAKFNQVLDQFGEKFQADGXYXLIIRLRHNVIKXGVRMISLSYSRISLADIAQKLQLDSPEDAEFIVAKAIRDGVIEASINHEKGYVQSKEMIDIYSXREPQLAFHQRISFCLDIHNMSVKAMRFPPKSYNKDLESAEERREREQQDLEFAKEMAEDDDDSFP

SEQ ID NO: 21796 - protein, 86 aa, Homo sapiens
  MOD_RES (41)..(41): Selenocysteine
  MOD_RES (52)..(52): Selenocysteine
MKQEGSARRRGADKAKPPPGGGEQEPPPPPAPQDVEMKEEXFCSPSWKSPWXQRLIYSSVPAREKLRRHPSCLKWKPISNSSWSSS

SEQ ID NO: 21797 - protein, 117 aa, Homo sapiens
  MOD_RES (1)..(1): Any amino acid
  MOD_RES (3)..(3): Selenocysteine
  MOD_RES (9)..(9): Selenocysteine
  MOD_RES (49)..(49): Selenocysteine
  MOD_RES (89)..(89): Selenocysteine
  MOD_RES (91)..(91): Selenocysteine
  MOD_RES (101)..(101): Selenocysteine
XRXGKAASXPLLPEVEAYLQLLVVIFMMNSKRYKEAQKISDDLMQKISXQNRRALDLVAAKCYYYHARVYEFLDKLDVVRSFLHARLRXAXLRHDADGQAXSPGRVLASSVGAGGEG

SEQ ID NO: 21798 - protein, 203 aa, Homo sapiens
  MOD_RES (9)..(9): Selenocysteine
  MOD_RES (26)..(26): Selenocysteine
  MOD_RES (38)..(38): Selenocysteine
  MOD_RES (47)..(48): Selenocysteine
  MOD_RES (50)..(50): Selenocysteine
  MOD_RES (53)..(53): Selenocysteine
  MOD_RES (62)..(62): Selenocysteine
  MOD_RES (70)..(70): Selenocysteine
  MOD_RES (73)..(73): Selenocysteine
  MOD_RES (135)..(135): Selenocysteine
  MOD_RES (139)..(139): Selenocysteine
  MOD_RES (144)..(144): Selenocysteine
  MOD_RES (151)..(151): Selenocysteine
  MOD_RES (157)..(157): Selenocysteine
MRNGDFLPXRLQAQQDAVNIVCHSKXRSNPENNVGLIXLANDCEVLXXLXPDXGRILSKLHXVQPKGKIXFCXGIRVAHLALKHRQGKNHKMRIIAFVGSPVEDNEKDLVKLAKRLKKEKVNVDIINFGEEEVNXEKLXAFVNXLNGKDGXGSHLVXVPPGPSLADALISSPILAGEGGAMLGLGASDFEFGVDPSADPELAL

SEQ ID NO: 21799 - protein, 377 aa, Homo sapiens
  MOD_RES (6)..(6): Selenocysteine
  MOD_RES (24)..(24): Selenocysteine
  MOD_RES (41)..(41): Selenocysteine
  MOD_RES (53)..(53): Selenocysteine
  MOD_RES (62)..(63): Selenocysteine
  MOD_RES (65)..(65): Selenocysteine
  MOD_RES (68)..(68): Selenocysteine
  MOD_RES (77)..(77): Selenocysteine
  MOD_RES (85)..(85): Selenocysteine
  MOD_RES (88)..(88): Selenocysteine
  MOD_RES (150)..(150): Selenocysteine
  MOD_RES (154)..(154): Selenocysteine
  MOD_RES (159)..(159): Selenocysteine
  MOD_RES (166)..(166): Selenocysteine
  MOD_RES (172)..(172): Selenocysteine
  MOD_RES (250)..(251): Selenocysteine
  MOD_RES (253)..(253): Selenocysteine
  MOD_RES (264)..(264): Selenocysteine
  MOD_RES (273)..(273): Selenocysteine
  MOD_RES (282)..(282): Selenocysteine
  MOD_RES (316)..(316): Selenocysteine
  MOD_RES (364)..(364): Selenocysteine
MVLESXMVCVDNSEYMRNGDFLPXRLQAQQDAVNIVCHSKXRSNPENNVGLIXLANDCEVLXXLXPDXGRILSKLHXVQPKGKIXFCXGIRVAHLALKHRQGKNHKMRIIAFVGSPVEDNEKDLVKLAKRLKKEKVNVDIINFGEEEVNXEKLXAFVNXLNGKDGXGSHLVXVPPGPSLADALISSPILAGEGGAMLGLGASDFEFGVDPSADPELALALRVSMEEQRQRQEEEARRAAAASAAEAGIAXXGXEDSDDALLKMXISQQEFGRXGLPDLSSMXEEEQIAYAMQMSLQGAEFGQAESADIDASSAMDXSEPAKEEDDYDVMQDPEFLQSVLENLPGVDPNNEAIRNAMGSLASQAXKDGKKDKKEEDKK

SEQ ID NO: 21800 - protein, 380 aa, Homo sapiens
  MOD_RES (6)..(6): Selenocysteine
  MOD_RES (24)..(24): Selenocysteine
  MOD_RES (41)..(41): Selenocysteine
  MOD_RES (53)..(53): Selenocysteine
  MOD_RES (62)..(63): Selenocysteine
  MOD_RES (65)..(65): Selenocysteine
  MOD_RES (68)..(68): Selenocysteine
  MOD_RES (77)..(77): Selenocysteine
  MOD_RES (85)..(85): Selenocysteine
  MOD_RES (88)..(88): Selenocysteine
  MOD_RES (150)..(150): Selenocysteine
  MOD_RES (154)..(154): Selenocysteine
  MOD_RES (159)..(159): Selenocysteine
  MOD_RES (166)..(166): Selenocysteine
  MOD_RES (172)..(172): Selenocysteine
  MOD_RES (250)..(251): Selenocysteine
  MOD_RES (253)..(253): Selenocysteine
  MOD_RES (267)..(267): Selenocysteine
  MOD_RES (276)..(276): Selenocysteine
  MOD_RES (285)..(285): Selenocysteine
  MOD_RES (319)..(319): Selenocysteine
  MOD_RES (367)..(367): Selenocysteine
MVLESXMVCVDNSEYMRNGDFLPXRLQAQQDAVNIVCHSKXRSNPENNVGLIXLANDCEVLXXLXPDXGRILSKLHXVQPKGKIXFCXGIRVAHLALKHRQGKNHKMRIIAFVGSPVEDNEKDLVKLAKRLKKEKVNVDIINFGEEEVNXEKLXAFVNXLNGKDGXGSHLVXVPPGPSLADALISSPILAGEGGAMLGLGASDFEFGVDPSADPELALALRVSMEEQRQRQEEEARRAAAASAAEAGIAXXGXEGERDSDDALLKMXISQQEFGRXGLPDLSSMXEEEQIAYAMQMSLQGAEFGQAESADIDASSAMDXSEPAKEEDDYDVMQDPEFLQSVLENLPGVDPNNEAIRNAMGSLASQAXKDGKKDKKEEDKK

SEQ ID NO: 21801 - protein, 193 aa, Homo sapiens
  MOD_RES (1)..(1): Any amino acid
  MOD_RES (66)..(67): Selenocysteine
  MOD_RES (69)..(69): Selenocysteine
  MOD_RES (80)..(80): Selenocysteine
  MOD_RES (89)..(89): Selenocysteine
  MOD_RES (98)..(98): Selenocysteine
  MOD_RES (132)..(132): Selenocysteine
  MOD_RES (180)..(180): Selenocysteine
XGSPVEDNEKDLVKLAKRLKKEKVNVDIINFGEEALRVSMEEQRQRQEEEARRAAAASAAEAGIAXXGXEDSDDALLKMXISQQEFGRXGLPDLSSMXEEEQIAYAMQMSLQGAEFGQAESADIDASSAMDXSEPAKEEDDYDVMQDPEFLQSVLENLPGVDPNNEAIRNAMGSLASQAXKDGKKDKKEEDKK

SEQ ID NO: 21802 - protein, 84 aa, Homo sapiens
  MOD_RES (1)..(1): Any amino acid
  MOD_RES (10)..(10): Selenocysteine
  MOD_RES (71)..(71): Selenocysteine
XIDASSAMDXSEPAKSSINRVLSRPLYLEEDDYDVMQDPEFLQSVLENLPGVDPNNEAIRNAMGSLASQAXKDGKKDKKEEDKK

SEQ ID NO: 21803 - protein, 39 aa, Homo sapiens
  MOD_RES (1)..(1): Any amino acid
  MOD_RES (21)..(22): Selenocysteine
  MOD_RES (24)..(24): Selenocysteine
  MOD_RES (36)..(36): Selenocysteine
XQEEEARRAAAASAAEAGIAXXGXEGERGGIRSPGXAGC

SEQ ID NO: 21804 - protein, 113 aa, Homo sapiens
  MOD_RES (8)..(8): Selenocysteine
  MOD_RES (10)..(10): Selenocysteine
  MOD_RES (50)..(50): Selenocysteine
  MOD_RES (57)..(57): Selenocysteine
  MOD_RES (92)..(92): Selenocysteine
  MOD_RES (111)..(111): Selenocysteine
GKQVLQKXGXRFERLLMRIGHQSKNAPVELKIRCLDAISSLLYLPPEQQXDDLLRMXESWFSSLSRDPLELFRGISSQPFPELHCAALKVFXGRKHLHLEELVGGNQVKNXVE

SEQ ID NO: 21805 - protein, 504 aa, Homo sapiens
  MOD_RES (61)..(62): Selenocysteine
  MOD_RES (103)..(103): Selenocysteine
  MOD_RES (118)..(118): Selenocysteine
  MOD_RES (155)..(155): Selenocysteine
  MOD_RES (177)..(177): Selenocysteine
  MOD_RES (204)..(205): Selenocysteine
  MOD_RES (210)..(210): Selenocysteine
  MOD_RES (217)..(217): Selenocysteine
  MOD_RES (226)..(226): Selenocysteine
  MOD_RES (232)..(232): Selenocysteine
  MOD_RES (237)..(237): Selenocysteine
  MOD_RES (310)..(310): Selenocysteine
  MOD_RES (318)..(318): Selenocysteine
  MOD_RES (335)..(335): Selenocysteine
  MOD_RES (337)..(337): Selenocysteine
  MOD_RES (377)..(377): Selenocysteine
  MOD_RES (384)..(384): Selenocysteine
  MOD_RES (419)..(419): Selenocysteine
  MOD_RES (468)..(468): Selenocysteine
  MOD_RES (483)..(483): Selenocysteine
  MOD_RES (497)..(498): Selenocysteine
MAAQALALLREVARLEAPLEELRALHSVLQAVPLNELRQQAAELRLGPLFSLLNENHREKXXLCVSILERLLQAMEPVHVARNLRVDLQRGLIHPDDSVKILXLSQIGRIVENSDAVXEILNNAELLKQIVYCIGGENLSVAKAAIKSLSRISLXQAGLEALFESNLLDDLKSVMKXNDIVRYRVYELIIEISSVSPESLNYCXXSGLVXQLLRELXGEDVLVRAXCIEMVXSLAYXHHGRQYLAQEGVIDQISNIIVGADSDPFSSFYLPGFVKFFGNLAVMDSPQQICERYPIFVEKVFEMIESQDPXMIGVAVDXVGILGSNVEGKQVLQKXGXRFERLLMRIGHQSKNAPVELKIRCLDAISSLLYLPPEQQXDDLLRMXESWFSSLSRDPLELFRGISSQPFPELHCAALKVFXAIANQPWAQKLMFNSPGFVEYVVDRSVEHDKASKDAKYELVKALANSKXIAEIFGNPNYLRLRXYLSEGPYYVKPVSXXAVEGAE

SEQ ID NO: 21806 - protein, 461 aa, Homo sapiens
  MOD_RES (61)..(62): Selenocysteine
  MOD_RES (103)..(103): Selenocysteine
  MOD_RES (118)..(118): Selenocysteine
  MOD_RES (161)..(162): Selenocysteine
  MOD_RES (167)..(167): Selenocysteine
  MOD_RES (174)..(174): Selenocysteine
  MOD_RES (183)..(183): Selenocysteine
  MOD_RES (189)..(189): Selenocysteine
  MOD_RES (194)..(194): Selenocysteine
  MOD_RES (267)..(267): Selenocysteine
  MOD_RES (275)..(275): Selenocysteine
  MOD_RES (292)..(292): Selenocysteine
  MOD_RES (294)..(294): Selenocysteine
  MOD_RES (334)..(334): Selenocysteine
  MOD_RES (341)..(341): Selenocysteine
  MOD_RES (376)..(376): Selenocysteine
  MOD_RES (425)..(425): Selenocysteine
  MOD_RES (440)..(440): Selenocysteine
  MOD_RES (454)..(455): Selenocysteine
MAAQALALLREVARLEAPLEELRALHSVLQAVPLNELRQQAAELRLGPLFSLLNENHREKXXLCVSILERLLQAMEPVHVARNLRVDLQRGLIHPDDSVKILXLSQIGRIVENSDAVXEILNNAELLKQIVYCIGGENLSVAKALIIEISSVSPESLNYCXXSGLVXQLLRELXGEDVLVRAXCIEMVXSLAYXHHGRQYLAQEGVIDQISNIIVGADSDPFSSFYLPGFVKFFGNLAVMDSPQQICERYPIFVEKVFEMIESQDPXMIGVAVDXVGILGSNVEGKQVLQKXGXRFERLLMRIGHQSKNAPVELKIRCLDAISSLLYLPPEQQXDDLLRMXESWFSSLSRDPLELFRGISSQPFPELHCAALKVFXAIANQPWAQKLMFNSPGFVEYVVDRSVEHDKASKDAKYELVKALANSKXIAEIFGNPNYLRLRXYLSEGPYYVKPVSXXAVEGAE

SEQ ID NO: 21807 - protein, 72 aa, Homo sapiens
MAAQALALLREVARLEAPLEELRALHSVLQAVPLNELRQQAAELRLGPLFSLLNENHRLEELLKILMLLLRF

SEQ ID NO: 21808 - protein, 351 aa, Homo sapiens
  MOD_RES (8)..(8): Selenocysteine
  MOD_RES (84)..(84): Selenocysteine
  MOD_RES (89)..(89): Selenocysteine
  MOD_RES (93)..(93): Selenocysteine
  MOD_RES (120)..(120): Selenocysteine
  MOD_RES (123)..(123): Selenocysteine
  MOD_RES (166)..(166): Selenocysteine
  MOD_RES (169)..(169): Selenocysteine
  MOD_RES (171)..(171): Selenocysteine
  MOD_RES (180)..(180): Selenocysteine
  MOD_RES (183)..(183): Selenocysteine
  MOD_RES (185)..(185): Selenocysteine
  MOD_RES (277)..(277): Selenocysteine
  MOD_RES (318)..(318): Selenocysteine
  MOD_RES (331)..(331): Selenocysteine
MNESNDSXNYDMAPYYEALCKSLDWQIDVDLLNKMKKANEDELKRLDEELEDAEKNLGESEIRDAMMAKAEYLCRIGDKEGALXAFRKXYDKXVALGHRLDIVFYLLRIGLFYMDNDLIXRNXEKAKSLIEEGGDWDRRNRLKVYQGLYCVAIRDFKQAAELFLDXVSXFXSYELMDYKXFVXYXVYVSMIALERPDLREKVIKGAEILEVLHSLPAVRQYLFSLYECRYSVFFQSLAVVEQEMKKDWLFAPHYRYYVREMRIHAYSQLLESYRSLXLGYMAEAFGVGVEFIDQELSRFIAAGRLHCKIDKVNEIVEXNRPDSKNWQYQEXIKKGDLLLNRVQKLSRVINM

SEQ ID NO: 21809 - protein, 226 aa, Homo sapiens
  MOD_RES (20)..(20): Selenocysteine
  MOD_RES (44)..(44): Selenocysteine
  MOD_RES (136)..(136): Selenocysteine
  MOD_RES (141)..(141): Selenocysteine
  MOD_RES (145)..(145): Selenocysteine
  MOD_RES (172)..(172): Selenocysteine
  MOD_RES (175)..(175): Selenocysteine
  MOD_RES (218)..(218): Selenocysteine
  MOD_RES (221)..(221): Selenocysteine
  MOD_RES (223)..(223): Selenocysteine
MPLENLEEEDFWNRIRQEQXEDCPPSSPSRGWHCQDWPSRKPPXSIRLCFAKPIIKRHRMPSYMAPYYEALCKSLDWQIDVDLLNKMKKANEDELKRLDEELEDAEKNLGESEIRDAMMAKAEYLCRIGDKEGALXAFRKXYDKXVALGHRLDIVFYLLRIGLFYMDNDLIXRNXEKAKSLIEEGGDWDRRNRLKVYQGLYCVAIRDFKQAAELFLDXVSXFXSYE

SEQ ID NO: 21810 - protein, 350 aa, Homo sapiens
  MOD_RES (83)..(83): Selenocysteine
  MOD_RES (88)..(88): Selenocysteine
  MOD_RES (92)..(92): Selenocysteine
  MOD_RES (119)..(119): Selenocysteine
  MOD_RES (122)..(122): Selenocysteine
  MOD_RES (165)..(165): Selenocysteine
  MOD_RES (168)..(168): Selenocysteine
  MOD_RES (170)..(170): Selenocysteine
  MOD_RES (179)..(179): Selenocysteine
  MOD_RES (182)..(182): Selenocysteine
  MOD_RES (184)..(184): Selenocysteine
  MOD_RES (276)..(276): Selenocysteine
  MOD_RES (317)..(317): Selenocysteine
  MOD_RES (330)..(330): Selenocysteine
MPLENLEEEDMAPYYEALCKSLDWQIDVDLLNKMKKANEDELKRLDEELEDAEKNLGESEIRDAMMAKAEYLCRIGDKEGALXAFRKXYDKXVALGHRLDIVFYLLRIGLFYMDNDLIXRNXEKAKSLIEEGGDWDRRNRLKVYQGLYCVAIRDFKQAAELFLDXVSXFXSYELMDYKXFVXYXVYVSMIALERPDLREKVIKGAEILEVLHSLPAVRQYLFSLYECRYSVFFQSLAVVEQEMKKDWLFAPHYRYYVREMRIHAYSQLLESYRSLXLGYMAEAFGVGVEFIDQELSRFIAAGRLHCKIDKVNEIVEXNRPDSKNWQYQEXIKKGDLLLNRVQKLSRVINM

SEQ ID NO: 21811 - protein, 144 aa, Homo sapiens
  MOD_RES (59)..(59): Selenocysteine
  MOD_RES (143)..(143): Selenocysteine
MPLENLEEEGLPKNPDLRIAQLRFLLSLPEHRGDAAVRDELMAAVRDNNFWNRIRQEQXEDCPPSSPSRDMAPYYEALCKSLDWQIDVDLLNKMKKANEDELKRLDEELEDAEKNLGESEIRDAMMAKAEYLCRIGDKEGALXA

SEQ ID NO: 21812 - protein, 442 aa, Homo sapiens
  MOD_RES (59)..(59): Selenocysteine
  MOD_RES (83)..(83): Selenocysteine
  MOD_RES (175)..(175): Selenocysteine
  MOD_RES (180)..(180): Selenocysteine
  MOD_RES (184)..(184): Selenocysteine
  MOD_RES (211)..(211): Selenocysteine
  MOD_RES (214)..(214): Selenocysteine
  MOD_RES (257)..(257): Selenocysteine
  MOD_RES (260)..(260): Selenocysteine
  MOD_RES (262)..(262): Selenocysteine
  MOD_RES (271)..(271): Selenocysteine
  MOD_RES (274)..(274): Selenocysteine
  MOD_RES (276)..(276): Selenocysteine
  MOD_RES (368)..(368): Selenocysteine
  MOD_RES (409)..(409): Selenocysteine
  MOD_RES (422)..(422): Selenocysteine
MPLENLEEEGLPKNPDLRIAQLRFLLSLPEHRGDAAVRDELMAAVRDNNFWNRIRQEQXEDCPPSSPSRGWHCQDWPSRKPPXSIRLCFAKPIIKRHRMPSYMAPYYEALCKSLDWQIDVDLLNKMKKANEDELKRLDEELEDAEKNLGESEIRDAMMAKAEYLCRIGDKEGALXAFRKXYDKXVALGHRLDIVFYLLRIGLFYMDNDLIXRNXEKAKSLIEEGGDWDRRNRLKVYQGLYCVAIRDFKQAAELFLDXVSXFXSYELMDYKXFVXYXVYVSMIALERPDLREKVIKGAEILEVLHSLPAVRQYLFSLYECRYSVFFQSLAVVEQEMKKDWLFAPHYRYYVREMRIHAYSQLLESYRSLXLGYMAEAFGVGVEFIDQELSRFIAAGRLHCKIDKVNEIVEXNRPDSKNWQYQEXIKKGDLLLNRVQKLSRVINM

SEQ ID NO: 21813 - protein, 389 aa, Homo sapiens
  MOD_RES (122)..(122): Selenocysteine
  MOD_RES (127)..(127): Selenocysteine
  MOD_RES (131)..(131): Selenocysteine
  MOD_RES (158)..(158): Selenocysteine
  MOD_RES (161)..(161): Selenocysteine
  MOD_RES (204)..(204): Selenocysteine
  MOD_RES (207)..(207): Selenocysteine
  MOD_RES (209)..(209): Selenocysteine
  MOD_RES (218)..(218): Selenocysteine
  MOD_RES (221)..(221): Selenocysteine
  MOD_RES (223)..(223): Selenocysteine
  MOD_RES (315)..(315): Selenocysteine
  MOD_RES (356)..(356): Selenocysteine
  MOD_RES (369)..(369): Selenocysteine
MPLENLEEEGLPKNPDLRIAQLRFLLSLPEHRGDAAVRDELMAAVRDNNMAPYYEALCKSLDWQIDVDLLNKMKKANEDELKRLDEELEDAEKNLGESEIRDAMMAKAEYLCRIGDKEGALXAFRKXYDKXVALGHRLDIVFYLLRIGLFYMDNDLIXRNXEKAKSLIEEGGDWDRRNRLKVYQGLYCVAIRDFKQAAELFLDXVSXFXSYELMDYKXFVXYXVYVSMIALERPDLREKVIKGAEILEVLHSLPAVRQYLFSLYECRYSVFFQSLAVVEQEMKKDWLFAPHYRYYVREMRIHAYSQLLESYRSLXLGYMAEAFGVGVEFIDQELSRFIAAGRLHCKIDKVNEIVEXNRPDSKNWQYQEXIKKGDLLLNRVQKLSRVINM

SEQ ID NO: 21814 - protein, 138 aa, Homo sapiens
  MOD_RES (1)..(1): Any amino acid
  MOD_RES (6)..(6): Selenocysteine
  MOD_RES (9)..(9): Selenocysteine
  MOD_RES (52)..(52): Selenocysteine
  MOD_RES (55)..(55): Selenocysteine
  MOD_RES (57)..(57): Selenocysteine
  MOD_RES (66)..(66): Selenocysteine
  MOD_RES (69)..(69): Selenocysteine
  MOD_RES (71)..(71): Selenocysteine
  MOD_RES (136)..(136): Selenocysteine
XNDLIXRNXEKAKSLIEEGGDWDRRNRLKVYQGLYCVAIRDFKQAAELFLDXVSXFXSYELMDYKXFVXYXVYVSMIALERPDLREKVIKGAEILEVLHSLPAVRQYLFSLYECRYSVFFQSLGNCPGLLLPGDYXAK

SEQ ID NO: 21815 - protein, 177 aa, Homo sapiens
  MOD_RES (97)..(97): Selenocysteine
  MOD_RES (135)..(135): Selenocysteine
  MOD_RES (149)..(149): Selenocysteine
  MOD_RES (151)..(151): Selenocysteine
  MOD_RES (154)..(154): Selenocysteine
  MOD_RES (159)..(159): Selenocysteine
MPELAVQKVVVHPLVLLSVVDHFNRIGKVGNQKRVVGVLLGSWQKKVLDVSNSFAVPFDEDDKDDSVWFLDHDYLENMYGMFKKVNARERIVGWYHXGPKLHKNDIAINELMKRYCPNSVLVIIDVKPKDLGLPXEAYISVEEVHDDGXPXSKXFEHVXSEIGAEEAEEVGVEHLLR

SEQ ID NO: 21816 - protein, 198 aa, Homo sapiens
  MOD_RES (97)..(97): Selenocysteine
  MOD_RES (135)..(135): Selenocysteine
  MOD_RES (149)..(149): Selenocysteine
  MOD_RES (151)..(151): Selenocysteine
  MOD_RES (154)..(154): Selenocysteine
  MOD_RES (159)..(159): Selenocysteine
  MOD_RES (180)..(180): Selenocysteine
  MOD_RES (183)..(183): Selenocysteine
  MOD_RES (198)..(198): Selenocysteine
MPELAVQKVVVHPLVLLSVVDHFNRIGKVGNQKRVVGVLLGSWQKKVLDVSNSFAVPFDEDDKDDSVWFLDHDYLENMYGMFKKVNARERIVGWYHXGPKLHKNDIAINELMKRYCPNSVLVIIDVKPKDLGLPXEAYISVEEVHDDGXPXSKXFEHVXSEIGAEEAEEVGVEHLLRCRXSSXCCQMSACRSSSRPFX

SEQ ID NO: 21817 - protein, 324 aa, Homo sapiens
  MOD_RES (97)..(97): Selenocysteine
  MOD_RES (135)..(135): Selenocysteine
  MOD_RES (149)..(149): Selenocysteine
  MOD_RES (151)..(151): Selenocysteine
  MOD_RES (154)..(154): Selenocysteine
  MOD_RES (159)..(159): Selenocysteine
  MOD_RES (182)..(183): Selenocysteine
  MOD_RES (186)..(186): Selenocysteine
  MOD_RES (192)..(192): Selenocysteine
  MOD_RES (217)..(217): Selenocysteine
  MOD_RES (253)..(253): Selenocysteine
MPELAVQKVVVHPLVLLSVVDHFNRIGKVGNQKRVVGVLLGSWQKKVLDVSNSFAVPFDEDDKDDSVWFLDHDYLENMYGMFKKVNARERIVGWYHXGPKLHKNDIAINELMKRYCPNSVLVIIDVKPKDLGLPXEAYISVEEVHDDGXPXSKXFEHVXSEIGAEEAEEVGVEHLLRDIKDXXVGXLSQRIXNQVHGLKGLNSKLLDIRSYLEKVAXGKLPINHQIIYQLQDVFNLLPDVSLQEFVKAFYLKXNDQMVVVYLASLIRSVVALHNLINNKIANRDAEKKEGQEKEESKKDRKEDKEKDKDKEKSDVKKEEKKEKK

SEQ ID NO: 21818 - protein, 43 aa, Homo sapiens
  MOD_RES (39)..(39): Selenocysteine
MPELAVQKVVVHPLVLLSVVDHFNRVSPCCPRCPCSSQXPELK

SEQ ID NO: 21819 - protein, 287 aa, Homo sapiens
  MOD_RES (20)..(20): Selenocysteine
  MOD_RES (29)..(29): Selenocysteine
  MOD_RES (68)..(69): Selenocysteine
  MOD_RES (71)..(71): Selenocysteine
  MOD_RES (74)..(74): Selenocysteine
  MOD_RES (147)..(147): Selenocysteine
  MOD_RES (159)..(159): Selenocysteine
  MOD_RES (194)..(194): Selenocysteine
  MOD_RES (203)..(203): Selenocysteine
  MOD_RES (222)..(222): Selenocysteine
  MOD_RES (225)..(225): Selenocysteine
  MOD_RES (232)..(232): Selenocysteine
  MOD_RES (237)..(237): Selenocysteine
  MOD_RES (265)..(266): Selenocysteine
  MOD_RES (270)..(270): Selenocysteine
MAAAAVNGAAGFSSSGPAAXSGAVLQAAXGMYEQLKGEWNRKSPNLSKCGEELGRLKLVLLELNFLPXXGXKLXKQQLILARDILEIGAQWSILRKDIPSFERYMAQLKCYYFDYKEQLPESAYMHQLLGLNLLFLLSQNRVAEFHXELERLPAKDIQXNVYIKHPVSLEQYLMEGSYNKVFLAKGNIPAESYXFFIDILLDXIRDEIAGCIEKAYEKILFXEAXRILFFNXPKKMXDYAKKRGWVLGPNNYYSFASQQQKPEDXXIPSXELAKQVIEYARQLEMIV

SEQ ID NO: 21820 - protein, 251 aa, Homo sapiens
  MOD_RES (20)..(20): Selenocysteine
  MOD_RES (29)..(29): Selenocysteine
  MOD_RES (68)..(69): Selenocysteine
  MOD_RES (71)..(71): Selenocysteine
  MOD_RES (74)..(74): Selenocysteine
  MOD_RES (147)..(147): Selenocysteine
  MOD_RES (159)..(159): Selenocysteine
  MOD_RES (194)..(194): Selenocysteine
  MOD_RES (203)..(203): Selenocysteine
  MOD_RES (222)..(222): Selenocysteine
  MOD_RES (225)..(225): Selenocysteine
  MOD_RES (232)..(232): Selenocysteine
  MOD_RES (237)..(237): Selenocysteine
MAAAAVNGAAGFSSSGPAAXSGAVLQAAXGMYEQLKGEWNRKSPNLSKCGEELGRLKLVLLELNFLPXXGXKLXKQQLILARDILEIGAQWSILRKDIPSFERYMAQLKCYYFDYKEQLPESAYMHQLLGLNLLFLLSQNRVAEFHXELERLPAKDIQXNVYIKHPVSLEQYLMEGSYNKVFLAKGNIPAESYXFFIDILLDXIRDEIAGCIEKAYEKILFXEAXRILFFNXPKKMXDYAKKVAGVQGKGP

SEQ ID NO: 21821 - protein, 129 aa, Homo sapiens
  MOD_RES (20)..(20): Selenocysteine
  MOD_RES (29)..(29): Selenocysteine
  MOD_RES (68)..(69): Selenocysteine
  MOD_RES (71)..(71): Selenocysteine
  MOD_RES (74)..(74): Selenocysteine
  MOD_RES (128)..(128): Selenocysteine
MAAAAVNGAAGFSSSGPAAXSGAVLQAAXGMYEQLKGEWNRKSPNLSKCGEELGRLKLVLLELNFLPXXGXKLXKQQLILARECHWGEIGLGAVAPAHQGGSSHLGSLWEAEVGGSPEVRSSRPAWSXW

SEQ ID NO: 21822 - protein, 67 aa, Homo sapiens
  MOD_RES (43)..(43): Selenocysteine
  MOD_RES (55)..(55): Selenocysteine
MAQLKCYYFDYKEQLPESAYMHQLLGLNLLFLLSQNRVAEFHXELERLPAKDIQXNVYIKHPVSLEQ

SEQ ID NO: 21823 - protein, 172 aa, Homo sapiens
  MOD_RES (43)..(43): Selenocysteine
  MOD_RES (55)..(55): Selenocysteine
  MOD_RES (90)..(90): Selenocysteine
  MOD_RES (99)..(99): Selenocysteine
  MOD_RES (118)..(118): Selenocysteine
  MOD_RES (121)..(121): Selenocysteine
  MOD_RES (128)..(128): Selenocysteine
  MOD_RES (133)..(133): Selenocysteine
  MOD_RES (156)..(157): Selenocysteine
  MOD_RES (169)..(169): Selenocysteine
MAQLKCYYFDYKEQLPESAYMHQLLGLNLLFLLSQNRVAEFHXELERLPAKDIQXNVYIKHPVSLEQYLMEGSYNKVFLAKGNIPAESYXFFIDILLDXIRDEIAGCIEKAYEKILFXEAXRILFFNXPKKMXDYAKKVAGVQGKGPWDQGVKSLXXVWGGLEGHWNKXAQV

SEQ ID NO: 21824 - protein, 350 aa, Homo sapiens
  MOD_RES (19)..(19): Selenocysteine
  MOD_RES (36)..(36): Selenocysteine
  MOD_RES (83)..(83): Selenocysteine
  MOD_RES (92)..(92): Selenocysteine
  MOD_RES (131)..(132): Selenocysteine
  MOD_RES (134)..(134): Selenocysteine
  MOD_RES (137)..(137): Selenocysteine
  MOD_RES (210)..(210): Selenocysteine
  MOD_RES (222)..(222): Selenocysteine
  MOD_RES (257)..(257): Selenocysteine
  MOD_RES (266)..(266): Selenocysteine
  MOD_RES (285)..(285): Selenocysteine
  MOD_RES (288)..(288): Selenocysteine
  MOD_RES (295)..(295): Selenocysteine
  MOD_RES (300)..(300): Selenocysteine
  MOD_RES (328)..(329): Selenocysteine
  MOD_RES (333)..(333): Selenocysteine
MFIKGRAPRAPPRERRRAXRGGLRQVVAPPRALGSXSRPHFRRASVCRRRCRKSGGLLAASRKMAAAAVNGAAGFSSSGPAAXSGAVLQAAXGMYEQLKGEWNRKSPNLSKCGEELGRLKLVLLELNFLPXXGXKLXKQQLILARDILEIGAQWSILRKDIPSFERYMAQLKCYYFDYKEQLPESAYMHQLLGLNLLFLLSQNRVAEFHXELERLPAKDIQXNVYIKHPVSLEQYLMEGSYNKVFLAKGNIPAESYXFFIDILLDXIRDEIAGCIEKAYEKILFXEAXRILFFNXPKKMXDYAKKRGWVLGPNNYYSFASQQQKPEDXXIPSXELAKQVIEYARQLEMIV

SEQ ID NO: 21825 - protein, 63 aa, Homo sapiens
  MOD_RES (23)..(23): Selenocysteine
  MOD_RES (32)..(32): Selenocysteine
  MOD_RES (45)..(45): Selenocysteine
  MOD_RES (63)..(63): Selenocysteine
YLMEGSYNKVFLAKGNIPAESYXFFIDILLDXISELGLVMGLWIXALISPPLAVDMCGHVCQX

SEQ ID NO: 21826 - protein, 128 aa, Homo sapiens
  MOD_RES (23)..(23): Selenocysteine
  MOD_RES (107)..(107): Selenocysteine
  MOD_RES (114)..(114): Selenocysteine
MNEPLVDCEGYPRSDVDLYQVRXARHNIICLQNDHKAVMKQVEEALHQLHARDKEKQARDMAEAHKEAMSRKLGQSESQGPPRAFAKVNSISPGSPASIAVIQGLAXQVHAQGXRVCKWMMRLWSSAL

SEQ ID NO: 21827 - protein, 118 aa, Homo sapiens
  MOD_RES (19)..(19): Selenocysteine
  MOD_RES (62)..(62): Selenocysteine
  MOD_RES (86)..(86): Selenocysteine
  MOD_RES (101)..(101): Selenocysteine
MSDEEARQSGGSSQAGVVXVSDVQELMRRKEEIEAQIKANYDVLESGLQVDDEIVEFGSVNXQNFQSLHNIGSVVQHSEGKPLNVXVIRRGEKHQLRLVPXRWAGKGLLGCNIIPLQR

SEQ ID NO: 21828 - protein, 209 aa, Homo sapiens
  MOD_RES (19)..(19): Selenocysteine
  MOD_RES (74)..(74): Selenocysteine
  MOD_RES (167)..(167): Selenocysteine
  MOD_RES (190)..(190): Selenocysteine
  MOD_RES (200)..(201): Selenocysteine
  MOD_RES (204)..(204): Selenocysteine
MSDEEARQSGGSSQAGVVXVSDVQELMRRKEEIEAQIKANYDVLESQKGIGMNEPLVDCEGYPRSDVDLYQVRXARHNIICLQNDHKAVMKQVEEALHQLHARDKEKQARDMAEAHKEAMSRKLGQSESQGPPRAFAKVNSISPGSPASIAGLQVDDEIVEFGSVNXQNFQSLHNIGSVVQHSEGALAPXILLSVSMNLXXPGXSSRSP

SEQ ID NO: 21829 - protein, 223 aa, Homo sapiens
  MOD_RES (19)..(19): Selenocysteine
  MOD_RES (74)..(74): Selenocysteine
  MOD_RES (167)..(167): Selenocysteine
  MOD_RES (191)..(191): Selenocysteine
  MOD_RES (206)..(206): Selenocysteine
MSDEEARQSGGSSQAGVVXVSDVQELMRRKEEIEAQIKANYDVLESQKGIGMNEPLVDCEGYPRSDVDLYQVRXARHNIICLQNDHKAVMKQVEEALHQLHARDKEKQARDMAEAHKEAMSRKLGQSESQGPPRAFAKVNSISPGSPASIAGLQVDDEIVEFGSVNXQNFQSLHNIGSVVQHSEGKPLNVXVIRRGEKHQLRLVPXRWAGKGLLGCNIIPLQR

SEQ ID NO: 21830 - protein, 222 aa, Homo sapiens
  MOD_RES (19)..(19): Selenocysteine
  MOD_RES (74)..(74): Selenocysteine
  MOD_RES (167)..(167): Selenocysteine
  MOD_RES (190)..(190): Selenocysteine
  MOD_RES (205)..(205): Selenocysteine
MSDEEARQSGGSSQAGVVXVSDVQELMRRKEEIEAQIKANYDVLESQKGIGMNEPLVDCEGYPRSDVDLYQVRXARHNIICLQNDHKAVMKQVEEALHQLHARDKEKQARDMAEAHKEAMSRKLGQSESQGPPRAFAKVNSISPGSPASIAGLQVDDEIVEFGSVNXQNFQSLHNIGSVVQHSEGPLNVXVIRRGEKHQLRLVPXRWAGKGLLGCNIIPLQR

SEQ ID NO: 21831 - protein, 153 aa, Homo sapiens
  MOD_RES (19)..(19): Selenocysteine
  MOD_RES (74)..(74): Selenocysteine
MSDEEARQSGGSSQAGVVXVSDVQELMRRKEEIEAQIKANYDVLESQKGIGMNEPLVDCEGYPRSDVDLYQVRXARHNIICLQNDHKAVMKQVEEALHQLHARDKEKQARDMAEAHKEAMSRKLGQSESQGPPRAFAKVNSISPGSPASIAVI

SEQ ID NO: 21832 - protein, 179 aa, Homo sapiens
  MOD_RES (19)..(19): Selenocysteine
  MOD_RES (74)..(74): Selenocysteine
  MOD_RES (158)..(158): Selenocysteine
  MOD_RES (165)..(165): Selenocysteine
MSDEEARQSGGSSQAGVVXVSDVQELMRRKEEIEAQIKANYDVLESQKGIGMNEPLVDCEGYPRSDVDLYQVRXARHNIICLQNDHKAVMKQVEEALHQLHARDKEKQARDMAEAHKEAMSRKLGQSESQGPPRAFAKVNSISPGSPASIAVIQGLAXQVHAQGXRVCKWMMRLWSSAL

SEQ ID NO: 21833 - protein, 85 aa, Homo sapiens
  MOD_RES (19)..(19): Selenocysteine
  MOD_RES (74)..(74): Selenocysteine
MSDEEARQSGGSSQAGVVXVSDVQELMRRKEEIEAQIKANYDVLESQKGIGMNEPLVDCEGYPRSDVDLYQVRXARHNIIWSASG

SEQ ID NO: 21834 - protein, 114 aa, Homo sapiens
  MOD_RES (50)..(51): Selenocysteine
  MOD_RES (79)..(79): Selenocysteine
  MOD_RES (83)..(83): Selenocysteine
  MOD_RES (90)..(90): Selenocysteine
  MOD_RES (104)..(104): Selenocysteine
KEDKDEKKKGEDEDKGPPCGPVNCNEKIVVLLQRLKPEIKDVIEQLNLVXXWLQLQIPRIEDGNNFGVAVQEKVFELMXSLHXKLEGFHXQISKYFSERGDAVXKAAKQPHVVG

SEQ ID NO: 21835 - protein, 249 aa, Homo sapiens
  MOD_RES (23)..(23): Selenocysteine
  MOD_RES (25)..(25): Selenocysteine
  MOD_RES (132)..(133): Selenocysteine
  MOD_RES (161)..(161): Selenocysteine
  MOD_RES (165)..(165): Selenocysteine
  MOD_RES (172)..(172): Selenocysteine
  MOD_RES (186)..(186): Selenocysteine
  MOD_RES (244)..(244): Selenocysteine
MAMLRVQPEAQAKVDVFREDLCXKXENLLGSYFPKKISELDAFLKEPALNEANLSNLKAPLDIPVPDPVKEKEKEERKKQQEKEDKDEKKKGEDEDKGPPCGPVNCNEKIVVLLQRLKPEIKDVIEQLNLVXXWLQLQIPRIEDGNNFGVAVQEKVFELMXSLHXKLEGFHXQISKYFSERGDAVXKAAKQPHVGDYRQLVHELDEAEYRDIRLMVMEIRNAYAVLYDIILKNFEKLKKPRGEXKGMIY

SEQ ID NO: 21836 - protein, 233 aa, Homo sapiens
  MOD_RES (23)..(23): Selenocysteine
  MOD_RES (25)..(25): Selenocysteine
  MOD_RES (132)..(133): Selenocysteine
  MOD_RES (161)..(161): Selenocysteine
  MOD_RES (165)..(165): Selenocysteine
  MOD_RES (172)..(172): Selenocysteine
  MOD_RES (186)..(186): Selenocysteine
  MOD_RES (231)..(231): Selenocysteine
MAMLRVQPEAQAKVDVFREDLCXKXENLLGSYFPKKISELDAFLKEPALNEANLSNLKAPLDIPVPDPVKEKEKEERKKQQEKEDKDEKKKGEDEDKGPPCGPVNCNEKIVVLLQRLKPEIKDVIEQLNLVXXWLQLQIPRIEDGNNFGVAVQEKVFELMXSLHXKLEGFHXQISKYFSERGDAVXKAAKQPHVGDYRQLVHELDEAEYRDIRLMVMEIRNAYVRRLCYMXSS

SEQ ID NO: 21837 - protein, 250 aa, Homo sapiens
  MOD_RES (23)..(23): Selenocysteine
  MOD_RES (25)..(25): Selenocysteine
  MOD_RES (132)..(133): Selenocysteine
  MOD_RES (161)..(161): Selenocysteine
  MOD_RES (165)..(165): Selenocysteine
  MOD_RES (172)..(172): Selenocysteine
  MOD_RES (186)..(186): Selenocysteine
  MOD_RES (241)..(241): Selenocysteine
  MOD_RES (245)..(245): Selenocysteine
MAMLRVQPEAQAKVDVFREDLCXKXENLLGSYFPKKISELDAFLKEPALNEANLSNLKAPLDIPVPDPVKEKEKEERKKQQEKEDKDEKKKGEDEDKGPPCGPVNCNEKIVVLLQRLKPEIKDVIEQLNLVXXWLQLQIPRIEDGNNFGVAVQEKVFELMXSLHXKLEGFHXQISKYFSERGDAVXKAAKQPHVGDYRQLVHELDEAEYRDIRLMVMEIRNAYVRRQGQGRGGQRQLSQAXHSLXLQARG

SEQ ID NO: 21838 - protein, 90 aa, Homo sapiens
  MOD_RES (2)..(2): Selenocysteine
  MOD_RES (6)..(6): Selenocysteine
  MOD_RES (13)..(13): Selenocysteine
  MOD_RES (27)..(27): Selenocysteine
  MOD_RES (85)..(85): Selenocysteine
MXSLHXKLEGFHXQISKYFSERGDAVXKAAKQPHVGDYRQLVHELDEAEYRDIRLMVMEIRNAYAVLYDIILKNFEKLKKPRGEXKGMIY

SEQ ID NO: 21839 - protein, 228 aa, Homo sapiens
  MOD_RES (47)..(47): Selenocysteine
  MOD_RES (69)..(69): Selenocysteine
  MOD_RES (102)..(102): Selenocysteine
  MOD_RES (112)..(112): Selenocysteine
  MOD_RES (144)..(144): Selenocysteine
  MOD_RES (151)..(152): Selenocysteine
  MOD_RES (171)..(171): Selenocysteine
MAKPCGVRLSGEARKQAEEFLYRFLPQKIIYLNQLLQEDSLNVADLXSLRAPLDIPIPDPPPKDDEMEXDKQEKKEVHKCGFLPGNEKVLSLLALVKPEVWXLKEKCILVIXWIQHLIPKIEDGNDFGVAIQEKVLERVNAVKXKVEAFQXXISKYFSERGDAVAKASKEXHVMDYRALVHERDEAAYGELRAMVLDLRAFYAELYHIISSNLEKIVNPKGEEKPSMY

SEQ ID NO: 21840 - protein, 254 aa, Homo sapiens
  MOD_RES (58)..(58): Selenocysteine
  MOD_RES (80)..(80): Selenocysteine
  MOD_RES (102)..(102): Selenocysteine
  MOD_RES (128)..(128): Selenocysteine
  MOD_RES (138)..(138): Selenocysteine
  MOD_RES (170)..(170): Selenocysteine
  MOD_RES (177)..(178): Selenocysteine
  MOD_RES (197)..(197): Selenocysteine
MAKPCGVRLSGEARKQVEVFRQNLFQEAEEFLYRFLPQKIIYLNQLLQEDSLNVADLXSLRAPLDIPIPDPPPKDDEMEXDKQEKKEGKRDKRKGLNPLFLXVHKCGFLPGNEKVLSLLALVKPEVWXLKEKCILVIXWIQHLIPKIEDGNDFGVAIQEKVLERVNAVKXKVEAFQXXISKYFSERGDAVAKASKEXHVMDYRALVHERDEAAYGELRAMVLDLRAFYAELYHIISSNLEKIVNPKGEEKPSMY

SEQ ID NO: 21841 - protein, 239 aa, Homo sapiens
  MOD_RES (58)..(58): Selenocysteine
  MOD_RES (80)..(80): Selenocysteine
  MOD_RES (113)..(113): Selenocysteine
  MOD_RES (123)..(123): Selenocysteine
  MOD_RES (155)..(155): Selenocysteine
  MOD_RES (162)..(163): Selenocysteine
  MOD_RES (182)..(182): Selenocysteine
MAKPCGVRLSGEARKQVEVFRQNLFQEAEEFLYRFLPQKIIYLNQLLQEDSLNVADLXSLRAPLDIPIPDPPPKDDEMEXDKQEKKEVHKCGFLPGNEKVLSLLALVKPEVWXLKEKCILVIXWIQHLIPKIEDGNDFGVAIQEKVLERVNAVKXKVEAFQXXISKYFSERGDAVAKASKEXHVMDYRALVHERDEAAYGELRAMVLDLRAFYAELYHIISSNLEKIVNPKGEEKPSMY

SEQ ID NO: 21842 - protein, 48 aa, Homo sapiens
  MOD_RES (31)..(31): Selenocysteine
MAKPCGVRLSGEARKQVEVFRQNLFQEILAXENHIPESALARGLPQCG

SEQ ID NO: 21843 - protein, 39 aa, Homo sapiens
  MOD_RES (38)..(38): Selenocysteine
MAKPCGVRLSGEARKQVEVFRQNLFQEVFSFLICKSWXQ

SEQ ID NO: 21844 - protein, 85 aa, Homo sapiens
  MOD_RES (3)..(3): Selenocysteine
  MOD_RES (36)..(36): Selenocysteine
  MOD_RES (46)..(46): Selenocysteine
  MOD_RES (78)..(78): Selenocysteine
  MOD_RES (85)..(85): Selenocysteine
MEXDKQEKKEVHKCGFLPGNEKVLSLLALVKPEVWXLKEKCILVIXWIQHLIPKIEDGNDFGVAIQEKVLERVNAVKXKVEAFQX

SEQ ID NO: 21845 - protein, 42 aa, Homo sapiens
  MOD_RES (15)..(15): Selenocysteine
  MOD_RES (19)..(19): Selenocysteine
  MOD_RES (28)..(28): Selenocysteine
  MOD_RES (31)..(31): Selenocysteine
MASLLKVDQEVKLKXASDXGGREGRGRXEEXGRCCPQSPAFF

SEQ ID NO: 21846 - protein, 130 aa, Homo sapiens
  MOD_RES (23)..(23): Selenocysteine
  MOD_RES (56)..(56): Selenocysteine
  MOD_RES (73)..(73): Selenocysteine
  MOD_RES (83)..(83): Selenocysteine
  MOD_RES (103)..(103): Selenocysteine
MASLLKVDQEVKLKVDSFRERIXSEAEDLVANFFPKKLLELDSFLKEPILNIHDLXQIHSDMNLPVPDPILLXNSHDGLDGPXYKKRRLDECEEAFQGQNVGXAPDSQDRRWKQLWGVHSGGNSCRAKNC

SEQ ID NO: 21847 - protein, 179 aa, Homo sapiens
  MOD_RES (23)..(23): Selenocysteine
  MOD_RES (56)..(56): Selenocysteine
  MOD_RES (73)..(73): Selenocysteine
  MOD_RES (83)..(83): Selenocysteine
  MOD_RES (99)..(99): Selenocysteine
  MOD_RES (135)..(135): Selenocysteine
  MOD_RES (138)..(138): Selenocysteine
  MOD_RES (144)..(144): Selenocysteine
  MOD_RES (162)..(162): Selenocysteine
MASLLKVDQEVKLKVDSFRERIXSEAEDLVANFFPKKLLELDSFLKEPILNIHDLXQIHSDMNLPVPDPILLXNSHDGLDGPXYKKRRLDECEEAFQGXKVFVMPNGMLKSNQQLVDIIEKVKPEIRLLIEKCNXEEXVAELRXVESEAASYLDQISRYYIXRAKLVSKIAKYPHVEDY

SEQ ID NO: 21848 - protein, 231 aa, Homo sapiens
  MOD_RES (23)..(23): Selenocysteine
  MOD_RES (56)..(56): Selenocysteine
  MOD_RES (73)..(73): Selenocysteine
  MOD_RES (83)..(83): Selenocysteine
  MOD_RES (99)..(99): Selenocysteine
  MOD_RES (135)..(135): Selenocysteine
  MOD_RES (138)..(138): Selenocysteine
  MOD_RES (144)..(144): Selenocysteine
  MOD_RES (162)..(162): Selenocysteine
  MOD_RES (182)..(182): Selenocysteine
  MOD_RES (184)..(184): Selenocysteine
  MOD_RES (207)..(207): Selenocysteine
  MOD_RES (229)..(229): Selenocysteine
MASLLKVDQEVKLKVDSFRERIXSEAEDLVANFFPKKLLELDSFLKEPILNIHDLXQIHSDMNLPVPDPILLXNSHDGLDGPXYKKRRLDECEEAFQGXKVFVMPNGMLKSNQQLVDIIEKVKPEIRLLIEKCNXEEXVAELRXVESEAASYLDQISRYYIXRAKLVSKIAKYPHVEDYRRXVXEIDEKEYISLRLIISELRNQYVXLHDMILKNIEKIKRPRSSNAEXLY

SEQ ID NO: 21849 - protein, 267 aa, Homo sapiens
  MOD_RES (23)..(23): Selenocysteine
  MOD_RES (56)..(56): Selenocysteine
  MOD_RES (73)..(73): Selenocysteine
  MOD_RES (83)..(83): Selenocysteine
  MOD_RES (99)..(99): Selenocysteine
  MOD_RES (135)..(135): Selenocysteine
  MOD_RES (174)..(174): Selenocysteine
  MOD_RES (180)..(180): Selenocysteine
  MOD_RES (198)..(198): Selenocysteine
  MOD_RES (218)..(218): Selenocysteine
  MOD_RES (220)..(220): Selenocysteine
  MOD_RES (243)..(243): Selenocysteine
  MOD_RES (265)..(265): Selenocysteine
MASLLKVDQEVKLKVDSFRERIXSEAEDLVANFFPKKLLELDSFLKEPILNIHDLXQIHSDMNLPVPDPILLXNSHDGLDGPXYKKRRLDECEEAFQGXKVFVMPNGMLKSNQQLVDIIEKVKPEIRLLIEKCNXPSGKGPHICFDLQVKMWVQLLIPRIEDGNNFGVSIQEEXVAELRXVESEAASYLDQISRYYIXRAKLVSKIAKYPHVEDYRRXVXEIDEKEYISLRLIISELRNQYVXLHDMILKNIEKIKRPRSSNAEXLY

SEQ ID NO: 21850 - protein, 254 aa, Homo sapiens
  MOD_RES (23)..(23): Selenocysteine
  MOD_RES (56)..(56): Selenocysteine
  MOD_RES (73)..(73): Selenocysteine
  MOD_RES (83)..(83): Selenocysteine
  MOD_RES (99)..(99): Selenocysteine
  MOD_RES (135)..(135): Selenocysteine
  MOD_RES (161)..(161): Selenocysteine
  MOD_RES (167)..(167): Selenocysteine
  MOD_RES (185)..(185): Selenocysteine
  MOD_RES (205)..(205): Selenocysteine
  MOD_RES (207)..(207): Selenocysteine
  MOD_RES (230)..(230): Selenocysteine
  MOD_RES (252)..(252): Selenocysteine
MASLLKVDQEVKLKVDSFRERIXSEAEDLVANFFPKKLLELDSFLKEPILNIHDLXQIHSDMNLPVPDPILLXNSHDGLDGPXYKKRRLDECEEAFQGXKVFVMPNGMLKSNQQLVDIIEKVKPEIRLLIEKCNXVKMWVQLLIPRIEDGNNFGVSIQEEXVAELRXVESEAASYLDQISRYYIXRAKLVSKIAKYPHVEDYRRXVXEIDEKEYISLRLIISELRNQYVXLHDMILKNIEKIKRPRSSNAEXLY

SEQ ID NO: 21851 - protein, 170 aa, Homo sapiens
  MOD_RES (23)..(23): Selenocysteine
  MOD_RES (56)..(56): Selenocysteine
  MOD_RES (77)..(77): Selenocysteine
  MOD_RES (83)..(83): Selenocysteine
  MOD_RES (101)..(101): Selenocysteine
  MOD_RES (121)..(121): Selenocysteine
  MOD_RES (123)..(123): Selenocysteine
  MOD_RES (146)..(146): Selenocysteine
  MOD_RES (168)..(168): Selenocysteine
MASLLKVDQEVKLKVDSFRERIXSEAEDLVANFFPKKLLELDSFLKEPILNIHDLXQLLIPRIEDGNNFGVSIQEEXVAELRXVESEAASYLDQISRYYIXRAKLVSKIAKYPHVEDYRRXVXEIDEKEYISLRLIISELRNQYVXLHDMILKNIEKIKRPRSSNAEXLY

SEQ ID NO: 21852 - protein, 198 aa, Homo sapiens
  MOD_RES (23)..(23): Selenocysteine
  MOD_RES (27)..(27): Selenocysteine
  MOD_RES (43)..(43): Selenocysteine
  MOD_RES (79)..(79): Selenocysteine
  MOD_RES (105)..(105): Selenocysteine
  MOD_RES (111)..(111): Selenocysteine
  MOD_RES (129)..(129): Selenocysteine
  MOD_RES (149)..(149): Selenocysteine
  MOD_RES (151)..(151): Selenocysteine
  MOD_RES (174)..(174): Selenocysteine
  MOD_RES (196)..(196): Selenocysteine
MASLLKVDQEVKLKVDSFRERIXSEPXYKKRRLDECEEAFQGXKVFVMPNGMLKSNQQLVDIIEKVKPEIRLLIEKCNXVKMWVQLLIPRIEDGNNFGVSIQEEXVAELRXVESEAASYLDQISRYYIXRAKLVSKIAKYPHVEDYRRXVXEIDEKEYISLRLIISELRNQYVXLHDMILKNIEKIKRPRSSNAEXLY

SEQ ID NO: 21853 - protein, 265 aa, Homo sapiens
  MOD_RES (34)..(34): Selenocysteine
  MOD_RES (67)..(67): Selenocysteine
  MOD_RES (84)..(84): Selenocysteine
  MOD_RES (94)..(94): Selenocysteine
  MOD_RES (110)..(110): Selenocysteine
  MOD_RES (146)..(146): Selenocysteine
  MOD_RES (172)..(172): Selenocysteine
  MOD_RES (178)..(178): Selenocysteine
  MOD_RES (196)..(196): Selenocysteine
  MOD_RES (216)..(216): Selenocysteine
  MOD_RES (218)..(218): Selenocysteine
  MOD_RES (241)..(241): Selenocysteine
  MOD_RES (263)..(263): Selenocysteine
MEKWILKKIKYLQSGGLSASYYSYKVDSFRERIXSEAEDLVANFFPKKLLELDSFLKEPILNIHDLXQIHSDMNLPVPDPILLXNSHDGLDGPXYKKRRLDECEEAFQGXKVFVMPNGMLKSNQQLVDIIEKVKPEIRLLIEKCNXVKMWVQLLIPRIEDGNNFGVSIQEEXVAELRXVESEAASYLDQISRYYIXRAKLVSKIAKYPHVEDYRRXVXEIDEKEYISLRLIISELRNQYVXLHDMILKNIEKIKRPRSSNAEXLY

SEQ ID NO: 21854 - protein, 96 aa, Homo sapiens
  MOD_RES (12)..(12): Selenocysteine
  MOD_RES (22)..(22): Selenocysteine
  MOD_RES (38)..(38): Selenocysteine
  MOD_RES (74)..(74): Selenocysteine
MNLPVPDPILLXNSHDGLDGPXYKKRRLDECEEAFQGXKVFVMPNGMLKSNQQLVDIIEKVKPEIRLLIEKCNXVKMWVQLLIPRIEDGNNFGVSI

SEQ ID NO: 21855 - protein, 111 aa, Homo sapiens
  MOD_RES (12)..(12): Selenocysteine
  MOD_RES (22)..(22): Selenocysteine
  MOD_RES (38)..(38): Selenocysteine
  MOD_RES (74)..(74): Selenocysteine
  MOD_RES (100)..(100): Selenocysteine
  MOD_RES (106)..(106): Selenocysteine
MNLPVPDPILLXNSHDGLDGPXYKKRRLDECEEAFQGXKVFVMPNGMLKSNQQLVDIIEKVKPEIRLLIEKCNXVKMWVQLLIPRIEDGNNFGVSIQEEXVAELRXVESEA

SEQ ID NO: 21856 - protein, 119 aa, Homo sapiens
  MOD_RES (12)..(12): Selenocysteine
  MOD_RES (22)..(22): Selenocysteine
  MOD_RES (38)..(38): Selenocysteine
  MOD_RES (74)..(74): Selenocysteine
  MOD_RES (100)..(100): Selenocysteine
  MOD_RES (106)..(106): Selenocysteine
MNLPVPDPILLXNSHDGLDGPXYKKRRLDECEEAFQGXKVFVMPNGMLKSNQQLVDIIEKVKPEIRLLIEKCNXVKMWVQLLIPRIEDGNNFGVSIQEEXVAELRXVESEAASYLDQIS

SEQ ID NO: 21857 - protein, 193 aa, Homo sapiens
  MOD_RES (12)..(12): Selenocysteine
  MOD_RES (22)..(22): Selenocysteine
  MOD_RES (38)..(38): Selenocysteine
  MOD_RES (74)..(74): Selenocysteine
  MOD_RES (100)..(100): Selenocysteine
  MOD_RES (106)..(106): Selenocysteine
  MOD_RES (124)..(124): Selenocysteine
  MOD_RES (144)..(144): Selenocysteine
  MOD_RES (146)..(146): Selenocysteine
  MOD_RES (169)..(169): Selenocysteine
  MOD_RES (191)..(191): Selenocysteine
MNLPVPDPILLXNSHDGLDGPXYKKRRLDECEEAFQGXKVFVMPNGMLKSNQQLVDIIEKVKPEIRLLIEKCNXVKMWVQLLIPRIEDGNNFGVSIQEEXVAELRXVESEAASYLDQISRYYIXRAKLVSKIAKYPHVEDYRRXVXEIDEKEYISLRLIISELRNQYVXLHDMILKNIEKIKRPRSSNAEXLY

SEQ ID NO: 21858 - protein, 571 aa, Homo sapiens
  MOD_RES (76)..(76): Selenocysteine
  MOD_RES (81)..(81): Selenocysteine
  MOD_RES (157)..(157): Selenocysteine
  MOD_RES (175)..(175): Selenocysteine
  MOD_RES (189)..(189): Selenocysteine
  MOD_RES (206)..(206): Selenocysteine
  MOD_RES (212)..(212): Selenocysteine
  MOD_RES (220)..(220): Selenocysteine
  MOD_RES (264)..(264): Selenocysteine
  MOD_RES (281)..(281): Selenocysteine
  MOD_RES (303)..(303): Selenocysteine
  MOD_RES (316)..(316): Selenocysteine
  MOD_RES (338)..(338): Selenocysteine
  MOD_RES (380)..(380): Selenocysteine
  MOD_RES (389)..(389): Selenocysteine
  MOD_RES (394)..(394): Selenocysteine
  MOD_RES (412)..(412): Selenocysteine
  MOD_RES (440)..(440): Selenocysteine
  MOD_RES (446)..(446): Selenocysteine
  MOD_RES (448)..(448): Selenocysteine
  MOD_RES (454)..(454): Selenocysteine
  MOD_RES (456)..(456): Selenocysteine
  MOD_RES (479)..(479): Selenocysteine
  MOD_RES (503)..(503): Selenocysteine
  MOD_RES (509)..(509): Selenocysteine
  MOD_RES (512)..(512): Selenocysteine
  MOD_RES (530)..(530): Selenocysteine
  MOD_RES (540)..(540): Selenocysteine
MEPAERAGVGEPPEPGGRPEPGPRGFVPQKEIVYNKLLPYAERLDAESDLQLAQIKCNLGRAVQLQELWPGGLFWXRKLSXYIRLYGRKFSKEDHVLFIKLLYELVSIPKLEISMMQGFARLLINLLKKKELLSRADLELPWRPLYDMVERILYSKXEHLGLNWFPNSVENILKXLVKSCRPYFPADAXAEMLEEWRPLMCPFDVXMQKAIXYFEIFLPXSLPPELHHKGFKLWFDELIGLWVSVQNLPQWEGQLVNLFARLAXDNIGYIDWDPYVPKIFXRILRSLNLPVGSSQVLVPRFLXNAYDIGHAVIWIXAMMGGPSKLVQKHLAGLFNSIXSFYHPSNNGRWLNKLMKLLQRLPNSVVRRLHRERYKKPSWLXPVPDSHKLXDQDVXDFVQCIIQPVLLAMFSKXGSLEAAQALQNLALMRPELVIPPVLERXYPALEXLXEPHQLXAXLSCVIGVARSLVSGGRWFPEGPXHMLPLLMRALPGVDPNDFSKCMIXFQFIAXFSXLVPLVDCSSVLQERNDLXEVERELCSAXAEFEDFVLQFMDRWPFRRFLIFLLHIYLKQE

SEQ ID NO: 21859 - protein, 1843 aa, Homo sapiens
  MOD_RES (76)..(76): Selenocysteine
  MOD_RES (81)..(81): Selenocysteine
  MOD_RES (157)..(157): Selenocysteine
  MOD_RES (175)..(175): Selenocysteine
  MOD_RES (189)..(189): Selenocysteine
  MOD_RES (206)..(206): Selenocysteine
  MOD_RES (212)..(212): Selenocysteine
  MOD_RES (220)..(220): Selenocysteine
  MOD_RES (264)..(264): Selenocysteine
  MOD_RES (281)..(281): Selenocysteine
  MOD_RES (303)..(303): Selenocysteine
  MOD_RES (316)..(316): Selenocysteine
  MOD_RES (338)..(338): Selenocysteine
  MOD_RES (380)..(380): Selenocysteine
  MOD_RES (389)..(389): Selenocysteine
  MOD_RES (394)..(394): Selenocysteine
  MOD_RES (412)..(412): Selenocysteine
  MOD_RES (440)..(440): Selenocysteine
  MOD_RES (446)..(446): Selenocysteine
  MOD_RES (448)..(448): Selenocysteine
  MOD_RES (454)..(454): Selenocysteine
  MOD_RES (456)..(456): Selenocysteine
  MOD_RES (479)..(479): Selenocysteine
  MOD_RES (503)..(503): Selenocysteine
  MOD_RES (509)..(509): Selenocysteine
  MOD_RES (512)..(512): Selenocysteine
  MOD_RES (530)..(530): Selenocysteine
  MOD_RES (540)..(540): Selenocysteine
  MOD_RES (562)..(562): Selenocysteine
  MOD_RES (566)..(566): Selenocysteine
  MOD_RES (570)..(570): Selenocysteine
  MOD_RES (572)..(572): Selenocysteine
  MOD_RES (576)..(576): Selenocysteine
  MOD_RES (589)..(589): Selenocysteine
  MOD_RES (592)..(592): Selenocysteine
  MOD_RES (595)..(595): Selenocysteine
  MOD_RES (614)..(614): Selenocysteine
  MOD_RES (620)..(620): Selenocysteine
  MOD_RES (655)..(655): Selenocysteine
  MOD_RES (658)..(658): Selenocysteine
  MOD_RES (684)..(684): Selenocysteine
  MOD_RES (705)..(705): Selenocysteine
  MOD_RES (709)..(709): Selenocysteine
  MOD_RES (715)..(715): Selenocysteine
  MOD_RES (728)..(729): Selenocysteine
  MOD_RES (734)..(734): Selenocysteine
  MOD_RES (815)..(815): Selenocysteine
  MOD_RES (837)..(837): Selenocysteine
  MOD_RES (849)..(849): Selenocysteine
  MOD_RES (853)..(853): Selenocysteine
  MOD_RES (870)..(870): Selenocysteine
  MOD_RES (887)..(887): Selenocysteine
  MOD_RES (952)..(952): Selenocysteine
  MOD_RES (954)..(954): Selenocysteine
  MOD_RES (976)..(976): Selenocysteine
  MOD_RES (989)..(989): Selenocysteine
  MOD_RES (1020)..(1020): Selenocysteine
  MOD_RES (1052)..(1052): Selenocysteine
  MOD_RES (1089)..(1089): Selenocysteine
  MOD_RES (1095)..(1095): Selenocysteine
  MOD_RES (1149)..(1149): Selenocysteine
  MOD_RES (1218)..(1218): Selenocysteine
  MOD_RES (1223)..(1223): Selenocysteine
  MOD_RES (1236)..(1236): Selenocysteine
  MOD_RES (1255)..(1255): Selenocysteine
  MOD_RES (1259)..(1259): Selenocysteine
  MOD_RES (1272)..(1272): Selenocysteine
  MOD_RES (1278)..(1278): Selenocysteine
  MOD_RES (1303)..(1303): Selenocysteine
  MOD_RES (1324)..(1324): Selenocysteine
  MOD_RES (1375)..(1375): Selenocysteine
  MOD_RES (1394)..(1394): Selenocysteine
  MOD_RES (1411)..(1411): Selenocysteine
  MOD_RES (1417)..(1417): Selenocysteine
  MOD_RES (1420)..(1420): Selenocysteine
  MOD_RES (1430)..(1430): Selenocysteine
  MOD_RES (1495)..(1495): Selenocysteine
  MOD_RES (1510)..(1510): Selenocysteine
  MOD_RES (1522)..(1523): Selenocysteine
  MOD_RES (1525)..(1525): Selenocysteine
  MOD_RES (1534)..(1534): Selenocysteine
  MOD_RES (1568)..(1568): Selenocysteine
  MOD_RES (1576)..(1576): Selenocysteine
  MOD_RES (1591)..(1591): Selenocysteine
  MOD_RES (1594)..(1594): Selenocysteine
  MOD_RES (1649)..(1649): Selenocysteine
  MOD_RES (1660)..(1660): Selenocysteine
  MOD_RES (1663)..(1663): Selenocysteine
  MOD_RES (1667)..(1667): Selenocysteine
  MOD_RES (1707)..(1708): Selenocysteine
  MOD_RES (1719)..(1719): Selenocysteine
  MOD_RES (1734)..(1734): Selenocysteine
  MOD_RES (1750)..(1750): Selenocysteine
  MOD_RES (1779)..(1779): Selenocysteine
  MOD_RES (1801)..(1801): Selenocysteine
  MOD_RES (1805)..(1805): Selenocysteine
  MOD_RES (1812)..(1812): Selenocysteine
  MOD_RES (1825)..(1825): Selenocysteine
  MOD_RES (1833)..(1833): Selenocysteine
MEPAERAGVGEPPEPGGRPEPGPRGFVPQKEIVYNKLLPYAERLDAESDLQLAQIKCNLGRAVQLQELWPGGLFWXRKLSXYIRLYGRKFSKEDHVLFIKLLYELVSIPKLEISMMQGFARLLINLLKKKELLSRADLELPWRPLYDMVERILYSKXEHLGLNWFPNSVENILKXLVKSCRPYFPADAXAEMLEEWRPLMCPFDVXMQKAIXYFEIFLPXSLPPELHHKGFKLWFDELIGLWVSVQNLPQWEGQLVNLFARLAXDNIGYIDWDPYVPKIFXRILRSLNLPVGSSQVLVPRFLXNAYDIGHAVIWIXAMMGGPSKLVQKHLAGLFNSIXSFYHPSNNGRWLNKLMKLLQRLPNSVVRRLHRERYKKPSWLXPVPDSHKLXDQDVXDFVQCIIQPVLLAMFSKXGSLEAAQALQNLALMRPELVIPPVLERXYPALEXLXEPHQLXAXLSCVIGVARSLVSGGRWFPEGPXHMLPLLMRALPGVDPNDFSKCMIXFQFIAXFSXLVPLVDCSSVLQERNDLXEVERELCSAXAEFEDFVLQFMDRCFGLIESSXLEQXREEXEXEKMXHLESLVELGLSSXFSXILXQCSKEIFMVALQKVFNFSXSHIFEXRVAGRMVADMCRAAVKCCPEESLKLFVPHCCSVIXQLXMNDDVLNDEELDKELLWNLQLLSEIXRVDGRKLLLYREQLVKILQRXLHLXCKQGYXLSCNLLHHLLRSXXLIYPXEYCSVPGGFDKPPSEYFPIKDWGKPGDLWNLGIQWHVPSSEEVSFAFYLLDSFLQPELVKLQHCGDGKLEMSRDDILQSLXIVHNCLIGSGNLLPPLKGEPVXNLVPSMVSLEEXKLYXGLEYDLSRENHREVIAXVIRKLLNHILDNSEDDXKSLFLIIKIIGDLLQFQGSHKHEFDSRWKSFNLVKKSMENRLHGKKQHIRALLIDRVMLQHELRXLXVEGCEYKKIHQDMIRDLLRLSXSSYSQVRNKAQQXFFAALGAYNFCCRDIIPLVLEFLRPDRQGVXQQQFKGALYCLLGNHSGVCLANLHDWDCIVQXWPAIVSSGLSQAMSLEKPSIVRLFDDLAEKIHRQYEXIGLDFXIPKSCVEIAELLQQSKNPSINQILLSPEKIKEGIKRQQEKNADALRNYENLVDXLLDGVEQRNLPWKFEHIGIGLLSLLLRDDRVLPLRAIRFFVENLNHDAIVVRKMAISAVAGILKQLKRXHKKLXINPCEISGCPKPXQIIAGDRPDNHWLHYDSKXIPRXKKEWESSCFVEKXHWGYYXWPKNMVVYAGVEEQPKLGRSREDMXEAEQIIFDHFSDPKFVEQLIXFLSLEDRKGKDKFNPRRFCLFKGIFRNFDDAFLPVLKPHLEHLVADSHESXQRCVAEIIAGLIRGSKHWXFEKVEKLWELLCPLLRXALSNIXVEXYNDWGACIAXSCESRDPRKLHWLFELLLESPLSGEGGSFVDACRLYVLQGGLAQQEWRVPELLHRLLKYLEPKLXQVYKNVRERIGSVLXYIFMIDVSLPNXXPXISPHVPEFXARILEKLKPLMDVDEEIQNHVMEENGIGEEDERXQGIKLLKXILKWLMASAGRSFSXAVXEQLQLLPLFFKIAPVENDNSYDELKRDAKLCLSLMSQGLLYPHQVPLVLQVLKQXARSSSWHARYXVLXYLQXMVFYNLFIFLNNEDAVKDIRWLVISLLEDEQLEVREMAAXXLSGLLQCNFLXMDSPMQIHFEQLCKXKLPKKRKRDPGSVGDXIPSAELVKRHAGVLGLGACVLSSPYDVPXWMPQLLMNLSAHLNDPQPIEMXVKKXLSNFRRXHHDNWQEHKQQFXDDQLLVLXDLLVSPCYYA

SEQ ID NO: 21860 - protein, 127 aa, Homo sapiens
  MOD_RES (4)..(4): Selenocysteine
  MOD_RES (77)..(77): Selenocysteine
  MOD_RES (106)..(106): Selenocysteine
  MOD_RES (124)..(124): Selenocysteine
  MOD_RES (126)..(126): Selenocysteine
HPHXSRQPPWCDPLGPFVVGGEDLDPFGPRRGGMIVDPLRSGFPRALIDPSSGLPNRLPPGAVPPGARFDPFGPIGXSPPGAGVKMSPAKCLEYQIHGDVSSLGNXRQPQRQLWSESCRFREDXVXS

SEQ ID NO: 21861 - protein, 183 aa, Homo sapiens
  MOD_RES (16)..(16): Selenocysteine
  MOD_RES (32)..(32): Selenocysteine
  MOD_RES (84)..(84): Selenocysteine
  MOD_RES (105)..(105): Selenocysteine
  MOD_RES (123)..(123): Selenocysteine
  MOD_RES (140)..(140): Selenocysteine
  MOD_RES (162)..(162): Selenocysteine
  MOD_RES (178)..(178): Selenocysteine
MAGLEVLFASAAPAIXCRQDALVCFLHWEVVXHGYFGLGVGDQPGPNDKKSELLPAGWNNNKDLYVLRYEYKDGSRKLLVKAIXVESSMILNVLEYGSQQVADLXLNLDDYIDAEHLGDFHRXYKNSEELRSRIVSGIIXPIHEQWEKANVSSPHREFPPAXAREVDPLRIPPHHPHXSRQPP

SEQ ID NO: 21862 - protein, 263 aa, Homo sapiens
  MOD_RES (16)..(16): Selenocysteine
  MOD_RES (32)..(32): Selenocysteine
  MOD_RES (84)..(84): Selenocysteine
  MOD_RES (105)..(105): Selenocysteine
  MOD_RES (123)..(123): Selenocysteine
  MOD_RES (140)..(140): Selenocysteine
  MOD_RES (162)..(162): Selenocysteine
  MOD_RES (178)..(178): Selenocysteine
  MOD_RES (251)..(251): Selenocysteine
MAGLEVLFASAAPAIXCRQDALVCFLHWEVVXHGYFGLGVGDQPGPNDKKSELLPAGWNNNKDLYVLRYEYKDGSRKLLVKAIXVESSMILNVLEYGSQQVADLXLNLDDYIDAEHLGDFHRXYKNSEELRSRIVSGIIXPIHEQWEKANVSSPHREFPPAXAREVDPLRIPPHHPHXSRQPPWCDPLGPFVVGGEDLDPFGPRRGGMIVDPLRSGFPRALIDPSSGLPNRLPPGAVPPGARFDPFGPIGXSPPGPRPDRRGQ

SEQ ID NO: 21863 - protein, 271 aa, Homo sapiens
  MOD_RES (16)..(16): Selenocysteine
  MOD_RES (32)..(32): Selenocysteine
  MOD_RES (84)..(84): Selenocysteine
  MOD_RES (105)..(105): Selenocysteine
  MOD_RES (123)..(123): Selenocysteine
  MOD_RES (140)..(140): Selenocysteine
  MOD_RES (162)..(162): Selenocysteine
  MOD_RES (178)..(178): Selenocysteine
  MOD_RES (251)..(251): Selenocysteine
MAGLEVLFASAAPAIXCRQDALVCFLHWEVVXHGYFGLGVGDQPGPNDKKSELLPAGWNNNKDLYVLRYEYKDGSRKLLVKAIXVESSMILNVLEYGSQQVADLXLNLDDYIDAEHLGDFHRXYKNSEELRSRIVSGIIXPIHEQWEKANVSSPHREFPPAXAREVDPLRIPPHHPHXSRQPPWCDPLGPFVVGGEDLDPFGPRRGGMIVDPLRSGFPRALIDPSSGLPNRLPPGAVPPGARFDPFGPIGXSPPGPNPDHLPPPGYDDMYL

SEQ ID NO: 21864 - protein, 107 aa, Homo sapiens
  MOD_RES (1)..(1): Any amino acid
  MOD_RES (22)..(22): Selenocysteine
  MOD_RES (38)..(38): Selenocysteine
  MOD_RES (93)..(93): Selenocysteine
XIHEQWEKANVSSPHREFPPAXAREVDPLRIPPHHPHXSRQPPWPRRGGMIVDPLRSGFPRALIDPSSGLPNRLPPGAVPPGARFDPFGPIGXSPPGPNPDHLPPPG

SEQ ID NO: 21865 - protein, 252 aa, Homo sapiens
  MOD_RES (22)..(22): Selenocysteine
  MOD_RES (51)..(51): Selenocysteine
  MOD_RES (116)..(116): Selenocysteine
  MOD_RES (158)..(158): Selenocysteine
  MOD_RES (184)..(185): Selenocysteine
  MOD_RES (198)..(198): Selenocysteine
  MOD_RES (228)..(228): Selenocysteine
  MOD_RES (247)..(247): Selenocysteine
  MOD_RES (249)..(249): Selenocysteine
AQAEERYGKELVQIARKAGGQXEINSLRASFDSLKQQMENVGSSHIQLALXLREELRSLEEFRERQKEQRKKGMAVPRQSDCMEVKSPSWEYEAVMDRVQKSKLSLYKKAMESKKXYEQKCRDADDAEQAFERISANGHQKQVEKSQNKARQCKDSAXEAERVYRQSIAQLEKVRAEWEQEHRXXCEAFQLQEFDRLXILRNALWVHSNQLSMQCVKDDELYEEVRLXLEGCSIDADIDSFIQAKSXGXEPP

SEQ ID NO: 21866 - protein, 145 aa, Homo sapiens
  MOD_RES (8)..(8): Selenocysteine
  MOD_RES (11)..(11): Selenocysteine
  MOD_RES (59)..(59): Selenocysteine
  MOD_RES (88)..(88): Selenocysteine
  MOD_RES (134)..(134): Selenocysteine
MASCRDFXAHXGYEVLLQRLLDGRKMCKDMEELLRQRAQAEERYGKELVQIARKAGGQXEINSLRASFDSLKQQMENVGSSHIQLALXLREELRSLEEFRERQKEQRKKYEAVMDRVQKSKLSLYKKAMESKKXYEQKCRDADDA

SEQ ID NO: 21867 - protein, 101 aa, Homo sapiens
  MOD_RES (34)..(34): Selenocysteine
  MOD_RES (63)..(63): Selenocysteine
MCKDMEELLRQRAQAEERYGKELVQIARKAGGQXEINSLRASFDSLKQQMENVGSSHIQLALXLREELRSLEEFRERQKEQRKKSQERCCASSQGHSVLLA

SEQ ID NO: 21868 - protein, 38 aa, Homo sapiens
  MOD_RES (20)..(20): Selenocysteine
MMPQLQFKDAFWASQSAGIXSVSHRARLAIEHFEDCSH

SEQ ID NO: 21869 - protein, 136 aa, Homo sapiens
  MOD_RES (17)..(17): Selenocysteine
  MOD_RES (20)..(20): Selenocysteine
  MOD_RES (68)..(68): Selenocysteine
  MOD_RES (97)..(97): Selenocysteine
MMPQLQFKDAFWCRDFXAHXGYEVLLQRLLDGRKMCKDMEELLRQRAQAEERYGKELVQIARKAGGQXEINSLRASFDSLKQQMENVGSSHIQLALXLREELRSLEEFRERQKEQRKKGSLPRPRPSAQNLVSPAV

SEQ ID NO: 21870 - protein, 209 aa, Homo sapiens
  MOD_RES (17)..(17): Selenocysteine
  MOD_RES (20)..(20): Selenocysteine
  MOD_RES (68)..(68): Selenocysteine
  MOD_RES (97)..(97): Selenocysteine
  MOD_RES (143)..(143): Selenocysteine
  MOD_RES (182)..(182): Selenocysteine
  MOD_RES (208)..(209): Selenocysteine
MMPQLQFKDAFWCRDFXAHXGYEVLLQRLLDGRKMCKDMEELLRQRAQAEERYGKELVQIARKAGGQXEINSLRASFDSLKQQMENVGSSHIQLALXLREELRSLEEFRERQKEQRKKYEAVMDRVQKSKLSLYKKAMESKKXYEQKCRDADDAEQAFERISANGHQKQSQNKARQCKDSAXEAERVYRQSIAQLEKVRAEWEQEHRXX

SEQ ID NO: 21871 - protein, 397 aa, Homo sapiens
  MOD_RES (17)..(17): Selenocysteine
  MOD_RES (20)..(20): Selenocysteine
  MOD_RES (68)..(68): Selenocysteine
  MOD_RES (97)..(97): Selenocysteine
  MOD_RES (143)..(143): Selenocysteine
  MOD_RES (185)..(185): Selenocysteine
  MOD_RES (211)..(212): Selenocysteine
  MOD_RES (225)..(225): Selenocysteine
  MOD_RES (255)..(255): Selenocysteine
  MOD_RES (274)..(274): Selenocysteine
  MOD_RES (276)..(276): Selenocysteine
  MOD_RES (302)..(303): Selenocysteine
  MOD_RES (312)..(312): Selenocysteine
  MOD_RES (314)..(314): Selenocysteine
  MOD_RES (316)..(316): Selenocysteine
  MOD_RES (318)..(318): Selenocysteine
  MOD_RES (327)..(327): Selenocysteine
  MOD_RES (352)..(352): Selenocysteine
  MOD_RES (379)..(379): Selenocysteine
MMPQLQFKDAFWCRDFXAHXGYEVLLQRLLDGRKMCKDMEELLRQRAQAEERYGKELVQIARKAGGQXEINSLRASFDSLKQQMENVGSSHIQLALXLREELRSLEEFRERQKEQRKKYEAVMDRVQKSKLSLYKKAMESKKXYEQKCRDADDAEQAFERISANGHQKQVEKSQNKARQCKDSAXEAERVYRQSIAQLEKVRAEWEQEHRXXCEAFQLQEFDRLXILRNALWVHSNQLSMQCVKDDELYEEVRLXLEGCSIDADIDSFIQAKSXGXEPPGEVRLADSAASRFSGLLHGSPKXXSLAASAASXEXLXPXPERNEGVYXAIAVQEIQGNPASPAQEYRALYDYXAQNPDELDLSAGDILEVILEGEDGWWXVERNGQRGFVPGSYLEKL

SEQ ID NO: 21872 - protein, 413 aa, Homo sapiens
  MOD_RES (17)..(17): Selenocysteine
  MOD_RES (20)..(20): Selenocysteine
  MOD_RES (68)..(68): Selenocysteine
  MOD_RES (97)..(97): Selenocysteine
  MOD_RES (143)..(143): Selenocysteine
  MOD_RES (185)..(185): Selenocysteine
  MOD_RES (211)..(212): Selenocysteine
  MOD_RES (225)..(225): Selenocysteine
  MOD_RES (255)..(255): Selenocysteine
  MOD_RES (274)..(274): Selenocysteine
  MOD_RES (276)..(276): Selenocysteine
  MOD_RES (293)..(293): Selenocysteine
  MOD_RES (296)..(296): Selenocysteine
  MOD_RES (321)..(322): Selenocysteine
  MOD_RES (330)..(330): Selenocysteine
  MOD_RES (332)..(332): Selenocysteine
  MOD_RES (334)..(334): Selenocysteine
  MOD_RES (343)..(343): Selenocysteine
  MOD_RES (368)..(368): Selenocysteine
  MOD_RES (395)..(395): Selenocysteine
MMPQLQFKDAFWCRDFXAHXGYEVLLQRLLDGRKMCKDMEELLRQRAQAEERYGKELVQIARKAGGQXEINSLRASFDSLKQQMENVGSSHIQLALXLREELRSLEEFRERQKEQRKKYEAVMDRVQKSKLSLYKKAMESKKXYEQKCRDADDAEQAFERISANGHQKQVEKSQNKARQCKDSAXEAERVYRQSIAQLEKVRAEWEQEHRXXCEAFQLQEFDRLXILRNALWVHSNQLSMQCVKDDELYEEVRLXLEGCSIDADIDSFIQAKSXGXEPPAPVPYQNYYDREVXPLXSSPGIQPSCGMIKRFSGLLHGSPKXXSLAASAEXLXPXPERNEGVYXAIAVQEIQGNPASPAQEYRALYDYXAQNPDELDLSAGDILEVILEGEDGWWXVERNGQRGFVPGSYLEKL

SEQ ID NO: 21873 - protein, 416 aa, Homo sapiens
  MOD_RES (17)..(17): Selenocysteine
  MOD_RES (20)..(20): Selenocysteine
  MOD_RES (68)..(68): Selenocysteine
  MOD_RES (97)..(97): Selenocysteine
  MOD_RES (143)..(143): Selenocysteine
  MOD_RES (185)..(185): Selenocysteine
  MOD_RES (211)..(212): Selenocysteine
  MOD_RES (225)..(225): Selenocysteine
  MOD_RES (255)..(255): Selenocysteine
  MOD_RES (274)..(274): Selenocysteine
  MOD_RES (276)..(276): Selenocysteine
  MOD_RES (293)..(293): Selenocysteine
  MOD_RES (296)..(296): Selenocysteine
  MOD_RES (321)..(322): Selenocysteine
  MOD_RES (331)..(331): Selenocysteine
  MOD_RES (333)..(333): Selenocysteine
  MOD_RES (335)..(335): Selenocysteine
  MOD_RES (337)..(337): Selenocysteine
  MOD_RES (346)..(346): Selenocysteine
  MOD_RES (371)..(371): Selenocysteine
  MOD_RES (398)..(398): Selenocysteine
MMPQLQFKDAFWCRDFXAHXGYEVLLQRLLDGRKMCKDMEELLRQRAQAEERYGKELVQIARKAGGQXEINSLRASFDSLKQQMENVGSSHIQLALXLREELRSLEEFRERQKEQRKKYEAVMDRVQKSKLSLYKKAMESKKXYEQKCRDADDAEQAFERISANGHQKQVEKSQNKARQCKDSAXEAERVYRQSIAQLEKVRAEWEQEHRXXCEAFQLQEFDRLXILRNALWVHSNQLSMQCVKDDELYEEVRLXLEGCSIDADIDSFIQAKSXGXEPPAPVPYQNYYDREVXPLXSSPGIQPSCGMIKRFSGLLHGSPKXXSLAASAASXEXLXPXPERNEGVYXAIAVQEIQGNPASPAQEYRALYDYXAQNPDELDLSAGDILEVILEGEDGWWXVERNGQRGFVPGSYLEKL

SEQ ID NO: 21874 - protein, 175 aa, Homo sapiens
  MOD_RES (82)..(82): Selenocysteine
  MOD_RES (85)..(85): Selenocysteine
  MOD_RES (133)..(133): Selenocysteine
  MOD_RES (162)..(162): Selenocysteine
MNDRCPRPGSSSLARGCLLSVADGAGREGGPGPALPGLGRCCWRLALHQASLWQESELCRGRRLRMMPQLQFKDAFWCRDFXAHXGYEVLLQRLLDGRKMCKDMEELLRQRAQAEERYGKELVQIARKAGGQXEINSLRASFDSLKQQMENVGSSHIQLALXLREELRSLEEFRE

SEQ ID NO: 21875 - protein, 417 aa, Homo sapiens
  MOD_RES (82)..(82): Selenocysteine
  MOD_RES (85)..(85): Selenocysteine
  MOD_RES (133)..(133): Selenocysteine
  MOD_RES (162)..(162): Selenocysteine
  MOD_RES (208)..(208): Selenocysteine
  MOD_RES (250)..(250): Selenocysteine
  MOD_RES (276)..(277): Selenocysteine
  MOD_RES (290)..(290): Selenocysteine
  MOD_RES (320)..(320): Selenocysteine
  MOD_RES (339)..(339): Selenocysteine
  MOD_RES (341)..(341): Selenocysteine
  MOD_RES (378)..(378): Selenocysteine
  MOD_RES (390)..(390): Selenocysteine
MNDRCPRPGSSSLARGCLLSVADGAGREGGPGPALPGLGRCCWRLALHQASLWQESELCRGRRLRMMPQLQFKDAFWCRDFXAHXGYEVLLQRLLDGRKMCKDMEELLRQRAQAEERYGKELVQIARKAGGQXEINSLRASFDSLKQQMENVGSSHIQLALXLREELRSLEEFRERQKEQRKKYEAVMDRVQKSKLSLYKKAMESKKXYEQKCRDADDAEQAFERISANGHQKQVEKSQNKARQCKDSAXEAERVYRQSIAQLEKVRAEWEQEHRXXCEAFQLQEFDRLXILRNALWVHSNQLSMQCVKDDELYEEVRLXLEGCSIDADIDSFIQAKSXGXEPPGEVRLADSAASSSGALPELLRSGGHPADQQPWHXAVLRHDKEVLWXAARKSQDHFVGSFCCVHRDPDPHPRAE

SEQ ID NO: 21876 - protein, 133 aa, Homo sapiens
  MOD_RES (1)..(1): Any amino acid
  MOD_RES (38)..(39): Selenocysteine
  MOD_RES (48)..(48): Selenocysteine
  MOD_RES (50)..(50): Selenocysteine
  MOD_RES (52)..(52): Selenocysteine
  MOD_RES (54)..(54): Selenocysteine
  MOD_RES (63)..(63): Selenocysteine
  MOD_RES (88)..(88): Selenocysteine
  MOD_RES (115)..(115): Selenocysteine
XDAGRLQHRRRHRQFHPGQEHGHRAPRFSGLLHGSPKXXSLAASAASXEXLXPXPERNEGVYXAIAVQEIQGNPASPAQEYRALYDYXAQNPDELDLSAGDILEVILEGEDGWWXVERNGQRGFVPGSYLEKL

SEQ ID NO: 21877 - protein, 342 aa, Homo sapiens
  MOD_RES (16)..(16): Selenocysteine
  MOD_RES (60)..(60): Selenocysteine
  MOD_RES (69)..(69): Selenocysteine
  MOD_RES (101)..(101): Selenocysteine
  MOD_RES (112)..(112): Selenocysteine
  MOD_RES (120)..(120): Selenocysteine
  MOD_RES (125)..(125): Selenocysteine
  MOD_RES (130)..(130): Selenocysteine
  MOD_RES (158)..(158): Selenocysteine
  MOD_RES (160)..(160): Selenocysteine
  MOD_RES (171)..(171): Selenocysteine
  MOD_RES (212)..(212): Selenocysteine
  MOD_RES (236)..(236): Selenocysteine
  MOD_RES (256)..(256): Selenocysteine
  MOD_RES (278)..(278): Selenocysteine
  MOD_RES (284)..(284): Selenocysteine
  MOD_RES (297)..(297): Selenocysteine
  MOD_RES (305)..(305): Selenocysteine
  MOD_RES (321)..(322): Selenocysteine
  MOD_RES (324)..(324): Selenocysteine
  MOD_RES (326)..(326): Selenocysteine
MEPHDSSHMDSEFRYXLFPIVYSIIFVLGVIANGYVLWVFARLYPCKKFNEIKIFMVNLXMADMLFLIXLPLWIVYYQNQGNWILPKFLCNVAGCLFFINXYCSVAFLGVIXYNRFQAVXRPIKXAQANXRKRGISLSLVIWVAIVGAASYFLILDSXNXVPDSAGSGNVXRCFEHYEKGSVPVLIIHIFIVFSFFLVFLIILFCNLVIIRXLLMQPVQQQRNAEVKRRALWMVCXVLAVFIICFVPHHVVQLPWXLAELGFQDSKFHQAINDAHQVXLCLLSXNCVLDPVIYCFLXKKFRKHLXEKFYSMRSSRKCSRAXXDXVXEVVVPFNQIPGNSLKN

SEQ ID NO: 21878 - protein, 82 aa, Homo sapiens
  MOD_RES (27)..(27): Selenocysteine
  MOD_RES (47)..(47): Selenocysteine
  MOD_RES (75)..(75): Selenocysteine
MADGNQAQLAMSHLNGHKLHGKPIRIXLSKHQNVQLPREGQEDQGLXKDYGNSPLHRFKKPGSKNFQNIFPPSAXLHLSNIP

SEQ ID NO: 21879 - protein, 238 aa, Homo sapiens
  MOD_RES (12)..(12): Selenocysteine
  MOD_RES (22)..(22): Selenocysteine
  MOD_RES (25)..(25): Selenocysteine
  MOD_RES (71)..(71): Selenocysteine
  MOD_RES (86)..(86): Selenocysteine
  MOD_RES (103)..(103): Selenocysteine
  MOD_RES (109)..(109): Selenocysteine
  MOD_RES (115)..(115): Selenocysteine
  MOD_RES (118)..(118): Selenocysteine
  MOD_RES (138)..(138): Selenocysteine
  MOD_RES (193)..(193): Selenocysteine
  MOD_RES (206)..(206): Selenocysteine
  MOD_RES (212)..(212): Selenocysteine
  MOD_RES (214)..(214): Selenocysteine
MDGIVPDIAVGXKRGSDELFSXCVXNGPFIMSSNSASAANGNDSKKFKGDSRSAGVPSRVIHIRKLPIDVXEGEVISLGLPFGKVXNLLMLKGKNQAFIEMNXEEAANXMVNYYXSVXPVLRGQPIYIQFSNHKELKXDSSPNQAAALQAVNSVQSGNLALAASAAAVDAGMAMAGQSPVLRIIVENLFYPVXLDVLHQIFSKFGXVLKIIXFXKNNQFQALLQYADPVSAQHAKLSL

SEQ ID NO: 21880 - protein, 531 aa, Homo sapiens
  MOD_RES (12)..(12): Selenocysteine
  MOD_RES (22)..(22): Selenocysteine
  MOD_RES (25)..(25): Selenocysteine
  MOD_RES (71)..(71): Selenocysteine
  MOD_RES (86)..(86): Selenocysteine
  MOD_RES (103)..(103): Selenocysteine
  MOD_RES (109)..(109): Selenocysteine
  MOD_RES (115)..(115): Selenocysteine
  MOD_RES (118)..(118): Selenocysteine
  MOD_RES (138)..(138): Selenocysteine
  MOD_RES (196)..(196): Selenocysteine
  MOD_RES (209)..(209): Selenocysteine
  MOD_RES (215)..(215): Selenocysteine
  MOD_RES (217)..(217): Selenocysteine
  MOD_RES (252)..(252): Selenocysteine
  MOD_RES (261)..(261): Selenocysteine
  MOD_RES (276)..(276): Selenocysteine
  MOD_RES (292)..(292): Selenocysteine
  MOD_RES (350)..(350): Selenocysteine
  MOD_RES (407)..(407): Selenocysteine
  MOD_RES (427)..(427): Selenocysteine
  MOD_RES (455)..(455): Selenocysteine
  MOD_RES (530)..(530): Selenocysteine
MDGIVPDIAVGXKRGSDELFSXCVXNGPFIMSSNSASAANGNDSKKFKGDSRSAGVPSRVIHIRKLPIDVXEGEVISLGLPFGKVXNLLMLKGKNQAFIEMNXEEAANXMVNYYXSVXPVLRGQPIYIQFSNHKELKXDSSPNQARAQAALQAVNSVQSGNLALAASAAAVDAGMAMAGQSPVLRIIVENLFYPVXLDVLHQIFSKFGXVLKIIXFXKNNQFQALLQYADPVSAQHAKLSLDGQNIYNACCXLRIDFSKLXSLNVKYNNDKSRDYXRPDLPSGDSQPSLDQXMAAAFGLSVPNVHGALAPLAIPSAAAAAAAAGRIAIPGLAGAGNSVLLVSNLNPERVXPQSLFILFGVYGDVQRVKILFNKKENALVQMADGNQAQLAMSHLNGHKLHGKPIRIXLSKHQNVQLPREGQEDQGLXKDYGNSPLHRFKKPGSKNFQNIFPPSAXLHLSNIPPSVSEEDLKVLFSSNGGVVKGFKFFQKDRKMALIQMGSVEEAVQALIDLHNHDLGENHHLRVSFSKSXI

SEQ ID NO: 21881 - protein, 550 aa, Homo sapiens
  MOD_RES (12)..(12): Selenocysteine
  MOD_RES (22)..(22): Selenocysteine
  MOD_RES (25)..(25): Selenocysteine
  MOD_RES (71)..(71): Selenocysteine
  MOD_RES (86)..(86): Selenocysteine
  MOD_RES (103)..(103): Selenocysteine
  MOD_RES (109)..(109): Selenocysteine
  MOD_RES (115)..(115): Selenocysteine
  MOD_RES (118)..(118): Selenocysteine
  MOD_RES (138)..(138): Selenocysteine
  MOD_RES (196)..(196): Selenocysteine
  MOD_RES (209)..(209): Selenocysteine
  MOD_RES (215)..(215): Selenocysteine
  MOD_RES (217)..(217): Selenocysteine
  MOD_RES (252)..(252): Selenocysteine
  MOD_RES (261)..(261): Selenocysteine
  MOD_RES (276)..(276): Selenocysteine
  MOD_RES (292)..(292): Selenocysteine
  MOD_RES (309)..(309): Selenocysteine
  MOD_RES (369)..(369): Selenocysteine
  MOD_RES (426)..(426): Selenocysteine
  MOD_RES (446)..(446): Selenocysteine
  MOD_RES (474)..(474): Selenocysteine
  MOD_RES (549)..(549): Selenocysteine
MDGIVPDIAVGXKRGSDELFSXCVXNGPFIMSSNSASAANGNDSKKFKGDSRSAGVPSRVIHIRKLPIDVXEGEVISLGLPFGKVXNLLMLKGKNQAFIEMNXEEAANXMVNYYXSVXPVLRGQPIYIQFSNHKELKXDSSPNQARAQAALQAVNSVQSGNLALAASAAAVDAGMAMAGQSPVLRIIVENLFYPVXLDVLHQIFSKFGXVLKIIXFXKNNQFQALLQYADPVSAQHAKLSLDGQNIYNACCXLRIDFSKLXSLNVKYNNDKSRDYXRPDLPSGDSQPSLDQXMAAAFASPYAGAGFPPXFAIPQAAGLSVPNVHGALAPLAIPSAAAAAAAAGRIAIPGLAGAGNSVLLVSNLNPERVXPQSLFILFGVYGDVQRVKILFNKKENALVQMADGNQAQLAMSHLNGHKLHGKPIRIXLSKHQNVQLPREGQEDQGLXKDYGNSPLHRFKKPGSKNFQNIFPPSAXLHLSNIPPSVSEEDLKVLFSSNGGVVKGFKFFQKDRKMALIQMGSVEEAVQALIDLHNHDLGENHHLRVSFSKSXI

SEQ ID NO: 21882 - protein, 557 aa, Homo sapiens
  MOD_RES (12)..(12): Selenocysteine
  MOD_RES (22)..(22): Selenocysteine
  MOD_RES (25)..(25): Selenocysteine
  MOD_RES (71)..(71): Selenocysteine
  MOD_RES (86)..(86): Selenocysteine
  MOD_RES (103)..(103): Selenocysteine
  MOD_RES (109)..(109): Selenocysteine
  MOD_RES (115)..(115): Selenocysteine
  MOD_RES (118)..(118): Selenocysteine
  MOD_RES (138)..(138): Selenocysteine
  MOD_RES (196)..(196): Selenocysteine
  MOD_RES (209)..(209): Selenocysteine
  MOD_RES (215)..(215): Selenocysteine
  MOD_RES (217)..(217): Selenocysteine
  MOD_RES (252)..(252): Selenocysteine
  MOD_RES (261)..(261): Selenocysteine
  MOD_RES (276)..(276): Selenocysteine
  MOD_RES (292)..(292): Selenocysteine
  MOD_RES (316)..(316): Selenocysteine
  MOD_RES (376)..(376): Selenocysteine
  MOD_RES (433)..(433): Selenocysteine
  MOD_RES (453)..(453): Selenocysteine
  MOD_RES (481)..(481): Selenocysteine
  MOD_RES (556)..(556): Selenocysteine
MDGIVPDIAVGXKRGSDELFSXCVXNGPFIMSSNSASAANGNDSKKFKGDSRSAGVPSRVIHIRKLPIDVXEGEVISLGLPFGKVXNLLMLKGKNQAFIEMNXEEAANXMVNYYXSVXPVLRGQPIYIQFSNHKELKXDSSPNQARAQAALQAVNSVQSGNLALAASAAAVDAGMAMAGQSPVLRIIVENLFYPVXLDVLHQIFSKFGXVLKIIXFXKNNQFQALLQYADPVSAQHAKLSLDGQNIYNACCXLRIDFSKLXSLNVKYNNDKSRDYXRPDLPSGDSQPSLDQXMAAAFGAPGIISASPYAGAGFPPXFAIPQAAGLSVPNVHGALAPLAIPSAAAAAAAAGRIAIPGLAGAGNSVLLVSNLNPERVXPQSLFILFGVYGDVQRVKILFNKKENALVQMADGNQAQLAMSHLNGHKLHGKPIRIXLSKHQNVQLPREGQEDQGLXKDYGNSPLHRFKKPGSKNFQNIFPPSAXLHLSNIPPSVSEEDLKVLFSSNGGVVKGFKFFQKDRKMALIQMGSVEEAVQALIDLHNHDLGENHHLRVSFSKSXI

SEQ ID NO: 21883 - protein, 588 aa, Homo sapiens
  MOD_RES (12)..(12): Selenocysteine
  MOD_RES (22)..(22): Selenocysteine
  MOD_RES (25)..(25): Selenocysteine
  MOD_RES (71)..(71): Selenocysteine
  MOD_RES (86)..(86): Selenocysteine
  MOD_RES (103)..(103): Selenocysteine
  MOD_RES (109)..(109): Selenocysteine
  MOD_RES (115)..(115): Selenocysteine
  MOD_RES (118)..(118): Selenocysteine
  MOD_RES (138)..(138): Selenocysteine
  MOD_RES (158)..(158): Selenocysteine
  MOD_RES (227)..(227): Selenocysteine
  MOD_RES (240)..(240): Selenocysteine
  MOD_RES (246)..(246): Selenocysteine
  MOD_RES (248)..(248): Selenocysteine
  MOD_RES (283)..(283): Selenocysteine
  MOD_RES (292)..(292): Selenocysteine
  MOD_RES (307)..(307): Selenocysteine
  MOD_RES (323)..(323): Selenocysteine
  MOD_RES (347)..(347): Selenocysteine
  MOD_RES (407)..(407): Selenocysteine
  MOD_RES (464)..(464): Selenocysteine
  MOD_RES (484)..(484): Selenocysteine
  MOD_RES (512)..(512): Selenocysteine
  MOD_RES (587)..(587): Selenocysteine
MDGIVPDIAVGXKRGSDELFSXCVXNGPFIMSSNSASAANGNDSKKFKGDSRSAGVPSRVIHIRKLPIDVXEGEVISLGLPFGKVXNLLMLKGKNQAFIEMNXEEAANXMVNYYXSVXPVLRGQPIYIQFSNHKELKXDSSPNQAVRGPAADPSSPGXSGVGPAAGAGDSRLCLPQRAQAALQAVNSVQSGNLALAASAAAVDAGMAMAGQSPVLRIIVENLFYPVXLDVLHQIFSKFGXVLKIIXFXKNNQFQALLQYADPVSAQHAKLSLDGQNIYNACCXLRIDFSKLXSLNVKYNNDKSRDYXRPDLPSGDSQPSLDQXMAAAFGAPGIISASPYAGAGFPPXFAIPQAAGLSVPNVHGALAPLAIPSAAAAAAAAGRIAIPGLAGAGNSVLLVSNLNPERVXPQSLFILFGVYGDVQRVKILFNKKENALVQMADGNQAQLAMSHLNGHKLHGKPIRIXLSKHQNVQLPREGQEDQGLXKDYGNSPLHRFKKPGSKNFQNIFPPSAXLHLSNIPPSVSEEDLKVLFSSNGGVVKGFKFFQKDRKMALIQMGSVEEAVQALIDLHNHDLGENHHLRVSFSKSXI

SEQ ID NO: 21884 - protein, 197 aa, Homo sapiens
  MOD_RES (12)..(12): Selenocysteine
  MOD_RES (16)..(16): Selenocysteine
  MOD_RES (73)..(73): Selenocysteine
  MOD_RES (93)..(93): Selenocysteine
  MOD_RES (121)..(121): Selenocysteine
  MOD_RES (196)..(196): Selenocysteine
MDGIVPDIAVGXKRVXPQSLFILFGVYGDVQRVKILFNKKENALVQMADGNQAQLAMSHLNGHKLHGKPIRIXLSKHQNVQLPREGQEDQGLXKDYGNSPLHRFKKPGSKNFQNIFPPSAXLHLSNIPPSVSEEDLKVLFSSNGGVVKGFKFFQKDRKMALIQMGSVEEAVQALIDLHNHDLGENHHLRVSFSKSXI

SEQ ID NO: 21885 - protein, 56 aa, Homo sapiens
  MOD_RES (14)..(14): Selenocysteine
  MOD_RES (24)..(24): Selenocysteine
  MOD_RES (27)..(27): Selenocysteine
MRAGSIVPDIAVGXKRGSDELFSXCVXNGPFIMSSNSASAANGNDSKKFKGDSRSA

SEQ ID NO: 21886 - protein, 149 aa, Homo sapiens
  MOD_RES (41)..(41): Selenocysteine
  MOD_RES (56)..(56): Selenocysteine
  MOD_RES (73)..(73): Selenocysteine
  MOD_RES (79)..(79): Selenocysteine
  MOD_RES (85)..(85): Selenocysteine
  MOD_RES (88)..(88): Selenocysteine
  MOD_RES (108)..(108): Selenocysteine
MSSNSASAANGNDSKKFKGDSRSAGVPSRVIHIRKLPIDVXEGEVISLGLPFGKVXNLLMLKGKNQAFIEMNXEEAANXMVNYYXSVXPVLRGQPIYIQFSNHKELKXDSSPNQARAQAALQAVNSVQSGNLALAASAAAVDAGMAMAG

SEQ ID NO: 21887 - protein, 527 aa, Homo sapiens
  MOD_RES (41)..(41): Selenocysteine
  MOD_RES (56)..(56): Selenocysteine
  MOD_RES (73)..(73): Selenocysteine
  MOD_RES (79)..(79): Selenocysteine
  MOD_RES (85)..(85): Selenocysteine
  MOD_RES (88)..(88): Selenocysteine
  MOD_RES (108)..(108): Selenocysteine
  MOD_RES (166)..(166): Selenocysteine
  MOD_RES (179)..(179): Selenocysteine
  MOD_RES (185)..(185): Selenocysteine
  MOD_RES (187)..(187): Selenocysteine
  MOD_RES (222)..(222): Selenocysteine
  MOD_RES (231)..(231): Selenocysteine
  MOD_RES (246)..(246): Selenocysteine
  MOD_RES (262)..(262): Selenocysteine
  MOD_RES (286)..(286): Selenocysteine
  MOD_RES (346)..(346): Selenocysteine
  MOD_RES (403)..(403): Selenocysteine
  MOD_RES (423)..(423): Selenocysteine
  MOD_RES (451)..(451): Selenocysteine
  MOD_RES (526)..(526): Selenocysteine
MSSNSASAANGNDSKKFKGDSRSAGVPSRVIHIRKLPIDVXEGEVISLGLPFGKVXNLLMLKGKNQAFIEMNXEEAANXMVNYYXSVXPVLRGQPIYIQFSNHKELKXDSSPNQARAQAALQAVNSVQSGNLALAASAAAVDAGMAMAGQSPVLRIIVENLFYPVXLDVLHQIFSKFGXVLKIIXFXKNNQFQALLQYADPVSAQHAKLSLDGQNIYNACCXLRIDFSKLXSLNVKYNNDKSRDYXRPDLPSGDSQPSLDQXMAAAFGAPGIISASPYAGAGFPPXFAIPQAAGLSVPNVHGALAPLAIPSAAAAAAAAGRIAIPGLAGAGNSVLLVSNLNPERVXPQSLFILFGVYGDVQRVKILFNKKENALVQMADGNQAQLAMSHLNGHKLHGKPIRIXLSKHQNVQLPREGQEDQGLXKDYGNSPLHRFKKPGSKNFQNIFPPSAXLHLSNIPPSVSEEDLKVLFSSNGGVVKGFKFFQKDRKMALIQMGSVEEAVQALIDLHNHDLGENHHLRVSFSKSXI

SEQ ID NO: 21888 - protein, 227 aa, Homo sapiens
  MOD_RES (1)..(1): Any amino acid
  MOD_RES (10)..(10): Selenocysteine
  MOD_RES (68)..(68): Selenocysteine
  MOD_RES (81)..(81): Selenocysteine
  MOD_RES (87)..(87): Selenocysteine
  MOD_RES (89)..(89): Selenocysteine
  MOD_RES (124)..(124): Selenocysteine
  MOD_RES (133)..(133): Selenocysteine
  MOD_RES (148)..(148): Selenocysteine
  MOD_RES (164)..(164): Selenocysteine
  MOD_RES (222)..(222): Selenocysteine
  MOD_RES (224)..(224): Selenocysteine
XFSNHKELKXDSSPNQARAQAALQAVNSVQSGNLALAASAAAVDAGMAMAGQSPVLRIIVENLFYPVXLDVLHQIFSKFGXVLKIIXFXKNNQFQALLQYADPVSAQHAKLSLDGQNIYNACCXLRIDFSKLXSLNVKYNNDKSRDYXRPDLPSGDSQPSLDQXMAAAFGLSVPNVHGALAPLAIPSAAAAAAAAGRIAIPGLAGAGNSVLLVSNLNPEASXVXCSA

SEQ ID NO: 21889 - protein, 105 aa, Homo sapiens
  MOD_RES (1)..(1): Any amino acid
  MOD_RES (4)..(4): Selenocysteine
  MOD_RES (7)..(7): Selenocysteine
  MOD_RES (53)..(53): Selenocysteine
  MOD_RES (68)..(68): Selenocysteine
  MOD_RES (81)..(81): Selenocysteine
XFSXCVXNGPFIMSSNSASAANGNDSKKFKGDSRSAGVPSRVIHIRKLPIDVXEGEVISLGLPFGKVXNLLMLKGKNQGLXKDYGNSPLHRFKKPGSKNFQNIFP

SEQ ID NO: 21890 - protein, 256 aa, Homo sapiens
  MOD_RES (1)..(1): Any amino acid
  MOD_RES (21)..(21): Selenocysteine
  MOD_RES (34)..(34): Selenocysteine
  MOD_RES (40)..(40): Selenocysteine
  MOD_RES (42)..(42): Selenocysteine
  MOD_RES (77)..(77): Selenocysteine
  MOD_RES (86)..(86): Selenocysteine
  MOD_RES (101)..(101): Selenocysteine
  MOD_RES (117)..(117): Selenocysteine
  MOD_RES (141)..(141): Selenocysteine
  MOD_RES (240)..(240): Selenocysteine
XMAGQSPVLRIIVENLFYPVXLDVLHQIFSKFGXVLKIIXFXKNNQFQALLQYADPVSAQHAKLSLDGQNIYNACCXLRIDFSKLXSLNVKYNNDKSRDYXRPDLPSGDSQPSLDQXMAAAFGAPGIISASPYAGAGFPPXFAIPQAAGLSVPNVHGALAPLAIPSAAAAAAAAGRIAIPGLAGAGNSVLLVSNLNPERVKILFNKKENALVQMADGNQAQLAMSHLNGHKLHGKPIRIXLSKHQNVQLPREGQED

SEQ ID NO: 21891 - protein, 115 aa, Homo sapiens
  MOD_RES (1)..(1): Any amino acid
  MOD_RES (10)..(10): Selenocysteine
  MOD_RES (26)..(26): Selenocysteine
  MOD_RES (50)..(50): Selenocysteine
  MOD_RES (110)..(110): Selenocysteine
  MOD_RES (112)..(112): Selenocysteine
XNNDKSRDYXRPDLPSGDSQPSLDQXMAAAFGAPGIISASPYAGAGFPPXFAIPQAAGLSVPNVHGALAPLAIPSAAAAAAAAGRIAIPGLAGAGNSVLLVSNLNPEASXVXCSA

SEQ ID NO: 21892 - protein, 16 aa, Homo sapiens
  MOD_RES (8)..(8): Selenocysteine
DDRGDKEXRSDKLEDE

SEQ ID NO: 21893 - protein, 486 aa, Homo sapiens
  MOD_RES (4)..(4): Selenocysteine
  MOD_RES (56)..(56): Selenocysteine
  MOD_RES (76)..(76): Selenocysteine
  MOD_RES (94)..(94): Selenocysteine
  MOD_RES (104)..(105): Selenocysteine
  MOD_RES (136)..(136): Selenocysteine
  MOD_RES (186)..(186): Selenocysteine
  MOD_RES (193)..(193): Selenocysteine
  MOD_RES (225)..(225): Selenocysteine
  MOD_RES (230)..(230): Selenocysteine
  MOD_RES (241)..(241): Selenocysteine
  MOD_RES (247)..(247): Selenocysteine
  MOD_RES (281)..(281): Selenocysteine
  MOD_RES (295)..(295): Selenocysteine
  MOD_RES (302)..(305): Selenocysteine
  MOD_RES (335)..(335): Selenocysteine
  MOD_RES (378)..(379): Selenocysteine
  MOD_RES (404)..(404): Selenocysteine
  MOD_RES (416)..(416): Selenocysteine
  MOD_RES (423)..(423): Selenocysteine
  MOD_RES (430)..(430): Selenocysteine
  MOD_RES (436)..(436): Selenocysteine
  MOD_RES (470)..(470): Selenocysteine
GKAXGRKAPLWLRAKFQRLLFKLGCYIQKNCGKFLVVGLLIFGAFAVGLKAANLEXNVEELWVEVGGRVSRELNYXRQKIGEEAMFNPQLMIQXPKEEGANVLXXEALLQHLDSALQASRVHVYMYNRGKPPLRWXNFDPLEFLEELKKINYQVDSWEEMLNKAEVGHGYMDRPCLNPADPDCPAXAPNKNSXKPLDMALVLNGGCHGLSRKYMHWQEELIVGGXVKNSXGKLVSAHALQXMFQLMXPKQMYEHFKGYEYVSHINWNEDKAAAILEAWQRXYVEVVHQSVAQNSXQKVLSFXXXXLDDILKSFSDVSVIRVASGYLLMLAYACLXMLRWDCSKSQGAVGLAGVLLVALSVAAGLGLCSLIGISFNAAXXQVLPFLALGVGVDDVFLLAHAFSEXGQNKRIPFEDRXGECLKRXGASVALXSISNVXAFFMAALIPIPALRAFSLQYILMAHRGRLSFNDXLWCGGLKSYMRFPYEE

SEQ ID NO: 21894 - protein, 352 aa, Homo sapiens
  MOD_RES (24)..(24): Selenocysteine
  MOD_RES (31)..(31): Selenocysteine
  MOD_RES (63)..(63): Selenocysteine
  MOD_RES (68)..(68): Selenocysteine
  MOD_RES (79)..(79): Selenocysteine
  MOD_RES (85)..(85): Selenocysteine
  MOD_RES (119)..(119): Selenocysteine
  MOD_RES (133)..(133): Selenocysteine
  MOD_RES (140)..(143): Selenocysteine
  MOD_RES (190)..(190): Selenocysteine
  MOD_RES (202)..(202): Selenocysteine
  MOD_RES (209)..(209): Selenocysteine
  MOD_RES (216)..(216): Selenocysteine
  MOD_RES (222)..(222): Selenocysteine
  MOD_RES (280)..(280): Selenocysteine
  MOD_RES (296)..(296): Selenocysteine
  MOD_RES (298)..(298): Selenocysteine
  MOD_RES (302)..(302): Selenocysteine
  MOD_RES (319)..(319): Selenocysteine
  MOD_RES (322)..(322): Selenocysteine
  MOD_RES (326)..(326): Selenocysteine
  MOD_RES (331)..(331): Selenocysteine
  MOD_RES (337)..(337): Selenocysteine
  MOD_RES (342)..(343): Selenocysteine
KAEVGHGYMDRPCLNPADPDCPAXAPNKNSXKPLDMALVLNGGCHGLSRKYMHWQEELIVGGXVKNSXGKLVSAHALQXMFQLMXPKQMYEHFKGYEYVSHINWNEDKAAAILEAWQRXYVEVVHQSVAQNSXQKVLSFXXXXLDDILKSFSDVSVIRVASGYLLMVLPFLALGVGVDDVFLLAHAFSEXGQNKRIPFEDRXGECLKRXGASVALXSISNVXAFFMAALIPIPALRAFSLQAAVVVVFNFAMVLLIFPAILSMDLYRREDRRLDIFCCFXSPCVSRVIQVEPQAYXDXHDNXRYSPPPPYSSHSFAHEXQIXMQSXVQLRXEYDPHXHVYYXXAEPRSEISV

SEQ ID NO: 21895 - protein, 1447 aa, Homo sapiens
  MOD_RES (36)..(36): Selenocysteine
  MOD_RES (71)..(71): Selenocysteine
  MOD_RES (123)..(123): Selenocysteine
  MOD_RES (143)..(143): Selenocysteine
  MOD_RES (161)..(161): Selenocysteine
  MOD_RES (171)..(172): Selenocysteine
  MOD_RES (211)..(211): Selenocysteine
  MOD_RES (213)..(213): Selenocysteine
  MOD_RES (230)..(230): Selenocysteine
  MOD_RES (245)..(245): Selenocysteine
  MOD_RES (257)..(257): Selenocysteine
  MOD_RES (307)..(307): Selenocysteine
  MOD_RES (314)..(314): Selenocysteine
  MOD_RES (346)..(346): Selenocysteine
  MOD_RES (351)..(351): Selenocysteine
  MOD_RES (362)..(362): Selenocysteine
  MOD_RES (368)..(368): Selenocysteine
  MOD_RES (402)..(402): Selenocysteine
  MOD_RES (416)..(416): Selenocysteine
  MOD_RES (423)..(426): Selenocysteine
  MOD_RES (456)..(456): Selenocysteine
  MOD_RES (499)..(500): Selenocysteine
  MOD_RES (525)..(525): Selenocysteine
  MOD_RES (537)..(537): Selenocysteine
  MOD_RES (544)..(544): Selenocysteine
  MOD_RES (551)..(551): Selenocysteine
  MOD_RES (557)..(557): Selenocysteine
  MOD_RES (615)..(615): Selenocysteine
  MOD_RES (631)..(631): Selenocysteine
  MOD_RES (633)..(633): Selenocysteine
  MOD_RES (637)..(637): Selenocysteine
  MOD_RES (654)..(654): Selenocysteine
  MOD_RES (657)..(657): Selenocysteine
  MOD_RES (661)..(661): Selenocysteine
  MOD_RES (666)..(666): Selenocysteine
  MOD_RES (672)..(672): Selenocysteine
  MOD_RES (677)..(678): Selenocysteine
  MOD_RES (691)..(691): Selenocysteine
  MOD_RES (693)..(693): Selenocysteine
  MOD_RES (696)..(696): Selenocysteine
  MOD_RES (705)..(705): Selenocysteine
  MOD_RES (708)..(708): Selenocysteine
  MOD_RES (728)..(728): Selenocysteine
  MOD_RES (731)..(731): Selenocysteine
  MOD_RES (768)..(769): Selenocysteine
  MOD_RES (778)..(778): Selenocysteine
  MOD_RES (785)..(785): Selenocysteine
  MOD_RES (807)..(807): Selenocysteine
  MOD_RES (865)..(865): Selenocysteine
  MOD_RES (890)..(890): Selenocysteine
  MOD_RES (903)..(903): Selenocysteine
  MOD_RES (924)..(924): Selenocysteine
  MOD_RES (959)..(959): Selenocysteine
  MOD_RES (984)..(984): Selenocysteine
  MOD_RES (996)..(996): Selenocysteine
  MOD_RES (1002)..(1002): Selenocysteine
  MOD_RES (1039)..(1039): Selenocysteine
  MOD_RES (1052)..(1052): Selenocysteine
  MOD_RES (1064)..(1064): Selenocysteine
  MOD_RES (1097)..(1097): Selenocysteine
  MOD_RES (1106)..(1106): Selenocysteine
  MOD_RES (1133)..(1133): Selenocysteine
  MOD_RES (1160)..(1160): Selenocysteine
  MOD_RES (1195)..(1195): Selenocysteine
  MOD_RES (1214)..(1214): Selenocysteine
  MOD_RES (1229)..(1230): Selenocysteine
  MOD_RES (1259)..(1259): Selenocysteine
  MOD_RES (1268)..(1268): Selenocysteine
  MOD_RES (1327)..(1327): Selenocysteine
  MOD_RES (1355)..(1355): Selenocysteine
  MOD_RES (1369)..(1370): Selenocysteine
  MOD_RES (1372)..(1372): Selenocysteine
  MOD_RES (1378)..(1378): Selenocysteine
  MOD_RES (1404)..(1404): Selenocysteine
MASAGNAAEPQDRGGGGSGCIGAPGRPAGGGRRRRXGGLRRAAAPDRDYLHRPSYCDAAFALEQISKGKAXGRKAPLWLRAKFQRLLFKLGCYIQKNCGKFLVVGLLIFGAFAVGLKAANLEXNVEELWVEVGGRVSRELNYXRQKIGEEAMFNPQLMIQXPKEEGANVLXXEALLQHLDSALQASRVHVYMYNRQWKLEHLCYKSGELIXEXGYMDQIIEYLYPCLIIXPLDCFWEGAKLQSGXAYLLGKPPLRWXNFDPLEFLEELKKINYQVDSWEEMLNKAEVGHGYMDRPCLNPADPDCPAXAPNKNSXKPLDMALVLNGGCHGLSRKYMHWQEELIVGGXVKNSXGKLVSAHALQXMFQLMXPKQMYEHFKGYEYVSHINWNEDKAAAILEAWQRXYVEVVHQSVAQNSXQKVLSFXXXXLDDILKSFSDVSVIRVASGYLLMLAYACLXMLRWDCSKSQGAVGLAGVLLVALSVAAGLGLCSLIGISFNAAXXQVLPFLALGVGVDDVFLLAHAFSEXGQNKRIPFEDRXGECLKRXGASVALXSISNVXAFFMAALIPIPALRAFSLQAAVVVVFNFAMVLLIFPAILSMDLYRREDRRLDIFCCFXSPCVSRVIQVEPQAYXDXHDNXRYSPPPPYSSHSFAHEXQIXMQSXVQLRXEYDPHXHVYYXXAEPRSEISVQPVXVXQDXLSCQSPESXSSXRDLLSQFSDSSLHCLEPPCXKWXLSSFAEKHYAPFLLKPKAKVVVIFLFLGLLGVSLYGXXRVRDGLDLXDIVPREXREYDFIAAQFKYFSFYNMYIVXQKADYPNIQHLLYDLHRSFSNVKYVMLEENKQLPKMWLHYFRDWLQGLQDAFDSDWEXGKIMPNNYKNGSDDGVLAYKLLVQXGSRDKPIDISQLXKQRLVDADGIINPSAFYIYLXAWVSNDPVAYAASQANIRPHRPEWVHDKADYMPEXRLRIPAAEPIEYAQFPFYLNGLRDXSDFVEAIEKVRXICSNYXSLGLSSYPNGYPFLFWEQYIGLRHWLLLFISVVLACXFLVCAVFLLNPWXAGIIVMVLALMXVELFGMMGLIGIKLSAVPVVILIASVGIGVEFXVHVALAFLXAIGDKNRRAVLALEHMFAPVLDGAVSXLLGVLMLAGSEFDFIVRYFFAVLAILXILGVLNGLVLLPVLLSFFGPYPEVSPANGLNRLPXPSPEPPPSVVRFAMPPGHXHSGSDSSDSEYSSQXXVSGLSEELRHYEAQQGAGGPAHQVIVEAXENPVFAHSXVVHPESRHHPPSNPRQQPHLDSGSLPPGRQGQQPRRDPPREGLWPPPYRPRRDAFEISXEGHSGPSNRARWGPRGARSHNPRNPASXAMGSSVPGYCQPIXXVXASASVXVAVHPPPVPGPGRNPRGGLCPGYPEXDHGLFEDPHVPFHVRCERRDSKVEVIELQDVECEERPRGSSSN

SEQ ID NO: 21896 - protein, 1446 aa, Homo sapiens
  MOD_RES (17)..(17): Selenocysteine
  MOD_RES (32)..(32): Selenocysteine
  MOD_RES (62)..(62): Selenocysteine
  MOD_RES (70)..(70): Selenocysteine
  MOD_RES (122)..(122): Selenocysteine
  MOD_RES (142)..(142): Selenocysteine
  MOD_RES (160)..(160): Selenocysteine
  MOD_RES (170)..(171): Selenocysteine
  MOD_RES (210)..(210): Selenocysteine
  MOD_RES (212)..(212): Selenocysteine
  MOD_RES (229)..(229): Selenocysteine
  MOD_RES (244)..(244): Selenocysteine
  MOD_RES (256)..(256): Selenocysteine
  MOD_RES (306)..(306): Selenocysteine
  MOD_RES (313)..(313): Selenocysteine
  MOD_RES (345)..(345): Selenocysteine
  MOD_RES (350)..(350): Selenocysteine
  MOD_RES (361)..(361): Selenocysteine
  MOD_RES (367)..(367): Selenocysteine
  MOD_RES (401)..(401): Selenocysteine
  MOD_RES (415)..(415): Selenocysteine
  MOD_RES (422)..(425): Selenocysteine
  MOD_RES (455)..(455): Selenocysteine
  MOD_RES (498)..(499): Selenocysteine
  MOD_RES (524)..(524): Selenocysteine
  MOD_RES (536)..(536): Selenocysteine
  MOD_RES (543)..(543): Selenocysteine
  MOD_RES (550)..(550): Selenocysteine
  MOD_RES (556)..(556): Selenocysteine
  MOD_RES (614)..(614): Selenocysteine
  MOD_RES (630)..(630): Selenocysteine
  MOD_RES (632)..(632): Selenocysteine
  MOD_RES (636)..(636): Selenocysteine
  MOD_RES (653)..(653): Selenocysteine
  MOD_RES (656)..(656): Selenocysteine
  MOD_RES (660)..(660): Selenocysteine
  MOD_RES (665)..(665): Selenocysteine
  MOD_RES (671)..(671): Selenocysteine
  MOD_RES (676)..(677): Selenocysteine
  MOD_RES (690)..(690): Selenocysteine
  MOD_RES (692)..(692): Selenocysteine
  MOD_RES (695)..(695): Selenocysteine
  MOD_RES (704)..(704): Selenocysteine
  MOD_RES (707)..(707): Selenocysteine
  MOD_RES (727)..(727): Selenocysteine
  MOD_RES (730)..(730): Selenocysteine
  MOD_RES (767)..(768): Selenocysteine
  MOD_RES (777)..(777): Selenocysteine
  MOD_RES (784)..(784): Selenocysteine
  MOD_RES (806)..(806): Selenocysteine
  MOD_RES (864)..(864): Selenocysteine
  MOD_RES (889)..(889): Selenocysteine
  MOD_RES (902)..(902): Selenocysteine
  MOD_RES (923)..(923): Selenocysteine
  MOD_RES (958)..(958): Selenocysteine
  MOD_RES (983)..(983): Selenocysteine
  MOD_RES (995)..(995): Selenocysteine
  MOD_RES (1001)..(1001): Selenocysteine
  MOD_RES (1038)..(1038): Selenocysteine
  MOD_RES (1051)..(1051): Selenocysteine
  MOD_RES (1063)..(1063): Selenocysteine
  MOD_RES (1096)..(1096): Selenocysteine
  MOD_RES (1105)..(1105): Selenocysteine
  MOD_RES (1132)..(1132): Selenocysteine
  MOD_RES (1159)..(1159): Selenocysteine
  MOD_RES (1194)..(1194): Selenocysteine
  MOD_RES (1213)..(1213): Selenocysteine
  MOD_RES (1228)..(1229): Selenocysteine
  MOD_RES (1258)..(1258): Selenocysteine
  MOD_RES (1267)..(1267): Selenocysteine
  MOD_RES (1326)..(1326): Selenocysteine
  MOD_RES (1354)..(1354): Selenocysteine
  MOD_RES (1368)..(1369): Selenocysteine
  MOD_RES (1371)..(1371): Selenocysteine
  MOD_RES (1377)..(1377): Selenocysteine
  MOD_RES (1403)..(1403): Selenocysteine
MELLNRNRLVIVSPRCXPPKASGGPARRGFYXFRSFCKDGGGGEEEEENGGEEKDDRGDKEXRSDKGKAXGRKAPLWLRAKFQRLLFKLGCYIQKNCGKFLVVGLLIFGAFAVGLKAANLEXNVEELWVEVGGRVSRELNYXRQKIGEEAMFNPQLMIQXPKEEGANVLXXEALLQHLDSALQASRVHVYMYNRQWKLEHLCYKSGELIXEXGYMDQIIEYLYPCLIIXPLDCFWEGAKLQSGXAYLLGKPPLRWXNFDPLEFLEELKKINYQVDSWEEMLNKAEVGHGYMDRPCLNPADPDCPAXAPNKNSXKPLDMALVLNGGCHGLSRKYMHWQEELIVGGXVKNSXGKLVSAHALQXMFQLMXPKQMYEHFKGYEYVSHINWNEDKAAAILEAWQRXYVEVVHQSVAQNSXQKVLSFXXXXLDDILKSFSDVSVIRVASGYLLMLAYACLXMLRWDCSKSQGAVGLAGVLLVALSVAAGLGLCSLIGISFNAAXXQVLPFLALGVGVDDVFLLAHAFSEXGQNKRIPFEDRXGECLKRXGASVALXSISNVXAFFMAALIPIPALRAFSLQAAVVVVFNFAMVLLIFPAILSMDLYRREDRRLDIFCCFXSPCVSRVIQVEPQAYXDXHDNXRYSPPPPYSSHSFAHEXQIXMQSXVQLRXEYDPHXHVYYXXAEPRSEISVQPVXVXQDXLSCQSPESXSSXRDLLSQFSDSSLHCLEPPCXKWXLSSFAEKHYAPFLLKPKAKVVVIFLFLGLLGVSLYGXXRVRDGLDLXDIVPREXREYDFIAAQFKYFSFYNMYIVXQKADYPNIQHLLYDLHRSFSNVKYVMLEENKQLPKMWLHYFRDWLQGLQDAFDSDWEXGKIMPNNYKNGSDDGVLAYKLLVQXGSRDKPIDISQLXKQRLVDADGIINPSAFYIYLXAWVSNDPVAYAASQANIRPHRPEWVHDKADYMPEXRLRIPAAEPIEYAQFPFYLNGLRDXSDFVEAIEKVRXICSNYXSLGLSSYPNGYPFLFWEQYIGLRHWLLLFISVVLACXFLVCAVFLLNPWXAGIIVMVLALMXVELFGMMGLIGIKLSAVPVVILIASVGIGVEFXVHVALAFLXAIGDKNRRAVLALEHMFAPVLDGAVSXLLGVLMLAGSEFDFIVRYFFAVLAILXILGVLNGLVLLPVLLSFFGPYPEVSPANGLNRLPXPSPEPPPSVVRFAMPPGHXHSGSDSSDSEYSSQXXVSGLSEELRHYEAQQGAGGPAHQVIVEAXENPVFAHSXVVHPESRHHPPSNPRQQPHLDSGSLPPGRQGQQPRRDPPREGLWPPPYRPRRDAFEISXEGHSGPSNRARWGPRGARSHNPRNPASXAMGSSVPGYCQPIXXVXASASVXVAVHPPPVPGPGRNPRGGLCPGYPEXDHGLFEDPHVPFHVRCERRDSKVEVIELQDVECEERPRGSSSN

SEQ ID NO: 21897 - protein, 92 aa, Homo sapiens
  MOD_RES (10)..(10): Selenocysteine
  MOD_RES (20)..(21): Selenocysteine
  MOD_RES (60)..(60): Selenocysteine
  MOD_RES (62)..(62): Selenocysteine
  MOD_RES (79)..(79): Selenocysteine
MFNPQLMIQXPKEEGANVLXXEALLQHLDSALQASRVHVYMYNRQWKLEHLCYKSGELIXEXGYMDQIIEYLYPCLIIXPLDCFWEGAKLQS

SEQ ID NO: 21898 - protein, 174 aa, Homo sapiens
  MOD_RES (10)..(10): Selenocysteine
  MOD_RES (20)..(21): Selenocysteine
  MOD_RES (60)..(60): Selenocysteine
  MOD_RES (62)..(62): Selenocysteine
  MOD_RES (79)..(79): Selenocysteine
  MOD_RES (94)..(94): Selenocysteine
  MOD_RES (106)..(106): Selenocysteine
  MOD_RES (156)..(156): Selenocysteine
  MOD_RES (163)..(163): Selenocysteine
MFNPQLMIQXPKEEGANVLXXEALLQHLDSALQASRVHVYMYNRQWKLEHLCYKSGELIXEXGYMDQIIEYLYPCLIIXPLDCFWEGAKLQSGXAYLLGKPPLRWXNFDPLEFLEELKKINYQVDSWEEMLNKAEVGHGYMDRPCLNPADPDCPAXAPNKNSXKPLDMALVLNG

SEQ ID NO: 21899 - protein, 1296 aa, Homo sapiens
  MOD_RES (10)..(10): Selenocysteine
  MOD_RES (20)..(21): Selenocysteine
  MOD_RES (60)..(60): Selenocysteine
  MOD_RES (62)..(62): Selenocysteine
  MOD_RES (79)..(79): Selenocysteine
  MOD_RES (94)..(94): Selenocysteine
  MOD_RES (106)..(106): Selenocysteine
  MOD_RES (156)..(156): Selenocysteine
  MOD_RES (163)..(163): Selenocysteine
  MOD_RES (195)..(195): Selenocysteine
  MOD_RES (200)..(200): Selenocysteine
  MOD_RES (211)..(211): Selenocysteine
  MOD_RES (217)..(217): Selenocysteine
  MOD_RES (251)..(251): Selenocysteine
  MOD_RES (265)..(265): Selenocysteine
  MOD_RES (272)..(275): Selenocysteine
  MOD_RES (305)..(305): Selenocysteine
  MOD_RES (348)..(349): Selenocysteine
  MOD_RES (374)..(374): Selenocysteine
  MOD_RES (386)..(386): Selenocysteine
  MOD_RES (393)..(393): Selenocysteine
  MOD_RES (400)..(400): Selenocysteine
  MOD_RES (406)..(406): Selenocysteine
  MOD_RES (464)..(464): Selenocysteine
  MOD_RES (480)..(480): Selenocysteine
  MOD_RES (482)..(482): Selenocysteine
  MOD_RES (486)..(486): Selenocysteine
  MOD_RES (503)..(503): Selenocysteine
  MOD_RES (506)..(506): Selenocysteine
  MOD_RES (510)..(510): Selenocysteine
  MOD_RES (515)..(515): Selenocysteine
  MOD_RES (521)..(521): Selenocysteine
  MOD_RES (526)..(527): Selenocysteine
  MOD_RES (540)..(540): Selenocysteine
  MOD_RES (542)..(542): Selenocysteine
  MOD_RES (545)..(545): Selenocysteine
  MOD_RES (554)..(554): Selenocysteine
  MOD_RES (557)..(557): Selenocysteine
  MOD_RES (577)..(577): Selenocysteine
  MOD_RES (580)..(580): Selenocysteine
  MOD_RES (617)..(618): Selenocysteine
  MOD_RES (627)..(627): Selenocysteine
  MOD_RES (634)..(634): Selenocysteine
  MOD_RES (656)..(656): Selenocysteine
  MOD_RES (714)..(714): Selenocysteine
  MOD_RES (739)..(739): Selenocysteine
  MOD_RES (752)..(752): Selenocysteine
  MOD_RES (773)..(773): Selenocysteine
  MOD_RES (808)..(808): Selenocysteine
  MOD_RES (833)..(833): Selenocysteine
  MOD_RES (845)..(845): Selenocysteine
  MOD_RES (851)..(851): Selenocysteine
  MOD_RES (888)..(888): Selenocysteine
  MOD_RES (901)..(901): Selenocysteine
  MOD_RES (913)..(913): Selenocysteine
  MOD_RES (946)..(946): Selenocysteine
  MOD_RES (955)..(955): Selenocysteine
  MOD_RES (982)..(982): Selenocysteine
  MOD_RES (1009)..(1009): Selenocysteine
  MOD_RES (1044)..(1044): Selenocysteine
  MOD_RES (1063)..(1063): Selenocysteine
  MOD_RES (1078)..(1079): Selenocysteine
  MOD_RES (1108)..(1108): Selenocysteine
  MOD_RES (1117)..(1117): Selenocysteine
  MOD_RES (1176)..(1176): Selenocysteine
  MOD_RES (1204)..(1204): Selenocysteine
  MOD_RES (1218)..(1219): Selenocysteine
  MOD_RES (1221)..(1221): Selenocysteine
  MOD_RES (1227)..(1227): Selenocysteine
  MOD_RES (1253)..(1253): Selenocysteine
MFNPQLMIQXPKEEGANVLXXEALLQHLDSALQASRVHVYMYNRQWKLEHLCYKSGELIXEXGYMDQIIEYLYPCLIIXPLDCFWEGAKLQSGXAYLLGKPPLRWXNFDPLEFLEELKKINYQVDSWEEMLNKAEVGHGYMDRPCLNPADPDCPAXAPNKNSXKPLDMALVLNGGCHGLSRKYMHWQEELIVGGXVKNSXGKLVSAHALQXMFQLMXPKQMYEHFKGYEYVSHINWNEDKAAAILEAWQRXYVEVVHQSVAQNSXQKVLSFXXXXLDDILKSFSDVSVIRVASGYLLMLAYACLXMLRWDCSKSQGAVGLAGVLLVALSVAAGLGLCSLIGISFNAAXXQVLPFLALGVGVDDVFLLAHAFSEXGQNKRIPFEDRXGECLKRXGASVALXSISNVXAFFMAALIPIPALRAFSLQAAVVVVFNFAMVLLIFPAILSMDLYRREDRRLDIFCCFXSPCVSRVIQVEPQAYXDXHDNXRYSPPPPYSSHSFAHEXQIXMQSXVQLRXEYDPHXHVYYXXAEPRSEISVQPVXVXQDXLSCQSPESXSSXRDLLSQFSDSSLHCLEPPCXKWXLSSFAEKHYAPFLLKPKAKVVVIFLFLGLLGVSLYGXXRVRDGLDLXDIVPREXREYDFIAAQFKYFSFYNMYIVXQKADYPNIQHLLYDLHRSFSNVKYVMLEENKQLPKMWLHYFRDWLQGLQDAFDSDWEXGKIMPNNYKNGSDDGVLAYKLLVQXGSRDKPIDISQLXKQRLVDADGIINPSAFYIYLXAWVSNDPVAYAASQANIRPHRPEWVHDKADYMPEXRLRIPAAEPIEYAQFPFYLNGLRDXSDFVEAIEKVRXICSNYXSLGLSSYPNGYPFLFWEQYIGLRHWLLLFISVVLACXFLVCAVFLLNPWXAGIIVMVLALMXVELFGMMGLIGIKLSAVPVVILIASVGIGVEFXVHVALAFLXAIGDKNRRAVLALEHMFAPVLDGAVSXLLGVLMLAGSEFDFIVRYFFAVLAILXILGVLNGLVLLPVLLSFFGPYPEVSPANGLNRLPXPSPEPPPSVVRFAMPPGHXHSGSDSSDSEYSSQXXVSGLSEELRHYEAQQGAGGPAHQVIVEAXENPVFAHSXVVHPESRHHPPSNPRQQPHLDSGSLPPGRQGQQPRRDPPREGLWPPPYRPRRDAFEISXEGHSGPSNRARWGPRGARSHNPRNPASXAMGSSVPGYCQPIXXVXASASVXVAVHPPPVPGPGRNPRGGLCPGYPEXDHGLFEDPHVPFHVRCERRDSKVEVIELQDVECEERPRGSSSN

SEQ ID NO: 21900 - protein, 79 aa, Homo sapiens
  MOD_RES (10)..(10): Selenocysteine
  MOD_RES (20)..(21): Selenocysteine
  MOD_RES (65)..(65): Selenocysteine
  MOD_RES (76)..(76): Selenocysteine
MFNPQLMIQXPKEEGANVLXXEALLQHLDSALQASRVHVYMYNSEKFLSLLFILLGSGNWNICVXNQESLSQKQVXWIR

SEQ ID NO: 21901 - protein, 183 aa, Homo sapiens
  MOD_RES (5)..(5): Selenocysteine
  MOD_RES (57)..(57): Selenocysteine
  MOD_RES (77)..(77): Selenocysteine
  MOD_RES (95)..(95): Selenocysteine
  MOD_RES (105)..(106): Selenocysteine
  MOD_RES (145)..(145): Selenocysteine
  MOD_RES (147)..(147): Selenocysteine
  MOD_RES (164)..(164): Selenocysteine
  MOD_RES (179)..(179): Selenocysteine
MGKAXGRKAPLWLRAKFQRLLFKLGCYIQKNCGKFLVVGLLIFGAFAVGLKAANLEXNVEELWVEVGGRVSRELNYXRQKIGEEAMFNPQLMIQXPKEEGANVLXXEALLQHLDSALQASRVHVYMYNRQWKLEHLCYKSGELIXEXGYMDQIIEYLYPCLIIXPLDCFWEGAKLQSGXAYLL

SEQ ID NO: 21902 - protein, 1381 aa, Homo sapiens
  MOD_RES (5)..(5): Selenocysteine
  MOD_RES (57)..(57): Selenocysteine
  MOD_RES (77)..(77): Selenocysteine
  MOD_RES (95)..(95): Selenocysteine
  MOD_RES (105)..(106): Selenocysteine
  MOD_RES (145)..(145): Selenocysteine
  MOD_RES (147)..(147): Selenocysteine
  MOD_RES (164)..(164): Selenocysteine
  MOD_RES (179)..(179): Selenocysteine
  MOD_RES (191)..(191): Selenocysteine
  MOD_RES (241)..(241): Selenocysteine
  MOD_RES (248)..(248): Selenocysteine
  MOD_RES (280)..(280): Selenocysteine
  MOD_RES (285)..(285): Selenocysteine
  MOD_RES (296)..(296): Selenocysteine
  MOD_RES (302)..(302): Selenocysteine
  MOD_RES (336)..(336): Selenocysteine
  MOD_RES (350)..(350): Selenocysteine
  MOD_RES (357)..(360): Selenocysteine
  MOD_RES (390)..(390): Selenocysteine
  MOD_RES (433)..(434): Selenocysteine
  MOD_RES (459)..(459): Selenocysteine
  MOD_RES (471)..(471): Selenocysteine
  MOD_RES (478)..(478): Selenocysteine
  MOD_RES (485)..(485): Selenocysteine
  MOD_RES (491)..(491): Selenocysteine
  MOD_RES (549)..(549): Selenocysteine
  MOD_RES (565)..(565): Selenocysteine
  MOD_RES (567)..(567): Selenocysteine
  MOD_RES (571)..(571): Selenocysteine
  MOD_RES (588)..(588): Selenocysteine
  MOD_RES (591)..(591): Selenocysteine
  MOD_RES (595)..(595): Selenocysteine
  MOD_RES (600)..(600): Selenocysteine
  MOD_RES (606)..(606): Selenocysteine
  MOD_RES (611)..(612): Selenocysteine
  MOD_RES (625)..(625): Selenocysteine
  MOD_RES (627)..(627): Selenocysteine
  MOD_RES (630)..(630): Selenocysteine
  MOD_RES (639)..(639): Selenocysteine
  MOD_RES (642)..(642): Selenocysteine
  MOD_RES (662)..(662): Selenocysteine
  MOD_RES (665)..(665): Selenocysteine
  MOD_RES (702)..(703): Selenocysteine
  MOD_RES (712)..(712): Selenocysteine
  MOD_RES (719)..(719): Selenocysteine
  MOD_RES (741)..(741): Selenocysteine
  MOD_RES (799)..(799): Selenocysteine
  MOD_RES (824)..(824): Selenocysteine
  MOD_RES (837)..(837): Selenocysteine
  MOD_RES (858)..(858): Selenocysteine
  MOD_RES (893)..(893): Selenocysteine
  MOD_RES (918)..(918): Selenocysteine
  MOD_RES (930)..(930): Selenocysteine
  MOD_RES (936)..(936): Selenocysteine
  MOD_RES (973)..(973): Selenocysteine
  MOD_RES (986)..(986): Selenocysteine
  MOD_RES (998)..(998): Selenocysteine
  MOD_RES (1031)..(1031): Selenocysteine
  MOD_RES (1040)..(1040): Selenocysteine
  MOD_RES (1067)..(1067): Selenocysteine
  MOD_RES (1094)..(1094): Selenocysteine
  MOD_RES (1129)..(1129): Selenocysteine
  MOD_RES (1148)..(1148): Selenocysteine
  MOD_RES (1163)..(1164): Selenocysteine
  MOD_RES (1193)..(1193): Selenocysteine
  MOD_RES (1202)..(1202): Selenocysteine
  MOD_RES (1261)..(1261): Selenocysteine
  MOD_RES (1289)..(1289): Selenocysteine
  MOD_RES (1303)..(1304): Selenocysteine
  MOD_RES (1306)..(1306): Selenocysteine
  MOD_RES (1312)..(1312): Selenocysteine
  MOD_RES (1338)..(1338): Selenocysteine
MGKAXGRKAPLWLRAKFQRLLFKLGCYIQKNCGKFLVVGLLIFGAFAVGLKAANLEXNVEELWVEVGGRVSRELNYXRQKIGEEAMFNPQLMIQXPKEEGANVLXXEALLQHLDSALQASRVHVYMYNRQWKLEHLCYKSGELIXEXGYMDQIIEYLYPCLIIXPLDCFWEGAKLQSGXAYLLGKPPLRWXNFDPLEFLEELKKINYQVDSWEEMLNKAEVGHGYMDRPCLNPADPDCPAXAPNKNSXKPLDMALVLNGGCHGLSRKYMHWQEELIVGGXVKNSXGKLVSAHALQXMFQLMXPKQMYEHFKGYEYVSHINWNEDKAAAILEAWQRXYVEVVHQSVAQNSXQKVLSFXXXXLDDILKSFSDVSVIRVASGYLLMLAYACLXMLRWDCSKSQGAVGLAGVLLVALSVAAGLGLCSLIGISFNAAXXQVLPFLALGVGVDDVFLLAHAFSEXGQNKRIPFEDRXGECLKRXGASVALXSISNVXAFFMAALIPIPALRAFSLQAAVVVVFNFAMVLLIFPAILSMDLYRREDRRLDIFCCFXSPCVSRVIQVEPQAYXDXHDNXRYSPPPPYSSHSFAHEXQIXMQSXVQLRXEYDPHXHVYYXXAEPRSEISVQPVXVXQDXLSCQSPESXSSXRDLLSQFSDSSLHCLEPPCXKWXLSSFAEKHYAPFLLKPKAKVVVIFLFLGLLGVSLYGXXRVRDGLDLXDIVPREXREYDFIAAQFKYFSFYNMYIVXQKADYPNIQHLLYDLHRSFSNVKYVMLEENKQLPKMWLHYFRDWLQGLQDAFDSDWEXGKIMPNNYKNGSDDGVLAYKLLVQXGSRDKPIDISQLXKQRLVDADGIINPSAFYIYLXAWVSNDPVAYAASQANIRPHRPEWVHDKADYMPEXRLRIPAAEPIEYAQFPFYLNGLRDXSDFVEAIEKVRXICSNYXSLGLSSYPNGYPFLFWEQYIGLRHWLLLFISVVLACXFLVCAVFLLNPWXAGIIVMVLALMXVELFGMMGLIGIKLSAVPVVILIASVGIGVEFXVHVALAFLXAIGDKNRRAVLALEHMFAPVLDGAVSXLLGVLMLAGSEFDFIVRYFFAVLAILXILGVLNGLVLLPVLLSFFGPYPEVSPANGLNRLPXPSPEPPPSVVRFAMPPGHXHSGSDSSDSEYSSQXXVSGLSEELRHYEAQQGAGGPAHQVIVEAXENPVFAHSXVVHPESRHHPPSNPRQQPHLDSGSLPPGRQGQQPRRDPPREGLWPPPYRPRRDAFEISXEGHSGPSNRARWGPRGARSHNPRNPASXAMGSSVPGYCQPIXXVXASASVXVAVHPPPVPGPGRNPRGGLCPGYPEXDHGLFEDPHVPFHVRCERRDSKVEVIELQDVECEERPRGSSSN

SEQ ID NO: 21903 - protein, 67 aa, Homo sapiens
  MOD_RES (27)..(27): Selenocysteine
  MOD_RES (34)..(34): Selenocysteine
  MOD_RES (66)..(66): Selenocysteine
MLNKAEVGHGYMDRPCLNPADPDCPAXAPNKNSXKPLDMALVLNGGCHGLSRKYMHWQEELIVGGXV

SEQ ID NO: 21904 - protein, 1146 aa, Homo sapiens
  MOD_RES (2)..(2): Selenocysteine
  MOD_RES (15)..(15): Selenocysteine
  MOD_RES (20)..(20): Selenocysteine
  MOD_RES (80)..(80): Selenocysteine
  MOD_RES (100)..(100): Selenocysteine
  MOD_RES (111)..(111): Selenocysteine
  MOD_RES (118)..(118): Selenocysteine
  MOD_RES (128)..(128): Selenocysteine
  MOD_RES (141)..(141): Selenocysteine
  MOD_RES (187)..(187): Selenocysteine
  MOD_RES (214)..(214): Selenocysteine
  MOD_RES (319)..(319): Selenocysteine
  MOD_RES (338)..(338): Selenocysteine
  MOD_RES (350)..(350): Selenocysteine
  MOD_RES (381)..(382): Selenocysteine
  MOD_RES (412)..(412): Selenocysteine
  MOD_RES (450)..(450): Selenocysteine
  MOD_RES (455)..(456): Selenocysteine
  MOD_RES (479)..(479): Selenocysteine
  MOD_RES (485)..(485): Selenocysteine
  MOD_RES (498)..(498): Selenocysteine
  MOD_RES (500)..(500): Selenocysteine
  MOD_RES (505)..(505): Selenocysteine
  MOD_RES (538)..(538): Selenocysteine
  MOD_RES (588)..(588): Selenocysteine
  MOD_RES (597)..(597): Selenocysteine
  MOD_RES (599)..(599): Selenocysteine
  MOD_RES (604)..(604): Selenocysteine
  MOD_RES (615)..(615): Selenocysteine
  MOD_RES (642)..(642): Selenocysteine
  MOD_RES (652)..(652): Selenocysteine
  MOD_RES (705)..(705): Selenocysteine
  MOD_RES (714)..(714): Selenocysteine
  MOD_RES (721)..(721): Selenocysteine
  MOD_RES (743)..(743): Selenocysteine
  MOD_RES (775)..(775): Selenocysteine
  MOD_RES (780)..(780): Selenocysteine
  MOD_RES (806)..(806): Selenocysteine
  MOD_RES (827)..(827): Selenocysteine
  MOD_RES (840)..(841): Selenocysteine
  MOD_RES (861)..(861): Selenocysteine
  MOD_RES (892)..(893): Selenocysteine
  MOD_RES (920)..(920): Selenocysteine
  MOD_RES (975)..(975): Selenocysteine
  MOD_RES (988)..(988): Selenocysteine
  MOD_RES (1000)..(1000): Selenocysteine
  MOD_RES (1033)..(1033): Selenocysteine
  MOD_RES (1042)..(1043): Selenocysteine
  MOD_RES (1058)..(1058): Selenocysteine
  MOD_RES (1063)..(1063): Selenocysteine
  MOD_RES (1069)..(1069): Selenocysteine
  MOD_RES (1093)..(1093): Selenocysteine
  MOD_RES (1096)..(1096): Selenocysteine
MXRSPPLRELPPSYXPPARXAAPQILAGSLKAPLWLRAYFQGLLFSLGCGIQRHCGKVLFLGLLAFGALALGLRMAIIEXNLEQLWVEVGSRVSQELHYXKEKLGEEAAYXSQMLIQXARQEGENILXPEALGLHLQAALXASKVQVSLYGKSWDLNKICYKSGVPLIENGMIERMIEKLFPCVILXPLDCFWEGAKLQGGSAYLPGRPDIQWXNLDPEQLLEELGPFASLEGFRELLDKAQVGQAYVGRPCLHPDDLHCPPSAPNHHSRQAPNVAHELSGGCHGFSHKFMHWQEELLLGGMARDPQGELLRAEALQSXFLLMSPRQLYEHFRGDYQXHDIGWSEEQASXVLQAWQRRFVQLAQEALPENASQQIHAFSSXXLDDILHAFSEVSAARVVGGYLLMLAYACVXMLRWDCAQSQGSVGLAGVLLVALAVASGLGLCALLGIXFNAAXXQVLPFLALGIGVDDVFLLAHAFXEALPGXPLQERMGECLQRXGXSVVLXSINNMAAFLMAALVPIPALRAFSLQAAIVVGCXFVAVMLVFPAILSLDLRRRHCQRLDVLCCFSSPCSAQVIQILPQELGDGXVPVGIAHLXAXVQAFXHCEASSQHVVXILPPQAHLVPPPSDPLGSELFSPGGSXRDLLGQEEEXRQKAACKSLPCARWNLAHFARYQFAPLLLQSHAKAIVLVLFGALLGLSLYGAXLVQDGLALXDVVPRGXKEHAFLSAQLRYFSLYEVALVXQGGFDYAHSQRALFDLHQRFSSLKAVLPPPAXQAPRXWLHYYRNWLQGIQAAFDQDWASGRIXRHSYRNGSEDGALAYKLLIQXGDAQEPLDFSQLXXRKLVDREGLIPPELFYMGLXVWVSSDPLGLAASQANFYPPPPEWLHDKYDXXGENLRIPPAQPLEFAQFPFLLRGLQKXADFVEAIEGARAACAEAGQAGVHAYPSGSPFLFWEQYLGLRRCFLLAVCILLVCXFLVCALLLLNPWXAGLIVLVLAMMXVELFGIMGFLGIKLSAIPVVILVASVGIGVEFXVHVALGFLXXQGSRNLRAAHALEHXFAPVXDGAISXLLGLLMLAGSHFDFIVRYFFAALXVLXLLGLLHGLVLLPVLLSILGPPPEVIQMYKESPEILSPPAPQGGGLRPEEI

SEQ ID NO: 21905 - protein, 1203 aa, Homo sapiens
  MOD_RES (2)..(2): Selenocysteine
  MOD_RES (15)..(15): Selenocysteine
  MOD_RES (20)..(20): Selenocysteine
  MOD_RES (80)..(80): Selenocysteine
  MOD_RES (100)..(100): Selenocysteine
  MOD_RES (111)..(111): Selenocysteine
  MOD_RES (118)..(118): Selenocysteine
  MOD_RES (128)..(128): Selenocysteine
  MOD_RES (141)..(141): Selenocysteine
  MOD_RES (187)..(187): Selenocysteine
  MOD_RES (214)..(214): Selenocysteine
  MOD_RES (319)..(319): Selenocysteine
  MOD_RES (338)..(338): Selenocysteine
  MOD_RES (350)..(350): Selenocysteine
  MOD_RES (381)..(382): Selenocysteine
  MOD_RES (412)..(412): Selenocysteine
  MOD_RES (450)..(450): Selenocysteine
  MOD_RES (455)..(456): Selenocysteine
  MOD_RES (479)..(479): Selenocysteine
  MOD_RES (485)..(485): Selenocysteine
  MOD_RES (498)..(498): Selenocysteine
  MOD_RES (500)..(500): Selenocysteine
  MOD_RES (505)..(505): Selenocysteine
  MOD_RES (538)..(538): Selenocysteine
  MOD_RES (588)..(588): Selenocysteine
  MOD_RES (597)..(597): Selenocysteine
  MOD_RES (599)..(599): Selenocysteine
  MOD_RES (604)..(604): Selenocysteine
  MOD_RES (615)..(615): Selenocysteine
  MOD_RES (642)..(642): Selenocysteine
  MOD_RES (652)..(652): Selenocysteine
  MOD_RES (705)..(705): Selenocysteine
  MOD_RES (714)..(714): Selenocysteine
  MOD_RES (721)..(721): Selenocysteine
  MOD_RES (743)..(743): Selenocysteine
  MOD_RES (775)..(775): Selenocysteine
  MOD_RES (780)..(780): Selenocysteine
  MOD_RES (806)..(806): Selenocysteine
  MOD_RES (827)..(827): Selenocysteine
  MOD_RES (840)..(841): Selenocysteine
  MOD_RES (861)..(861): Selenocysteine
  MOD_RES (892)..(893): Selenocysteine
  MOD_RES (920)..(920): Selenocysteine
  MOD_RES (975)..(975): Selenocysteine
  MOD_RES (988)..(988): Selenocysteine
  MOD_RES (1000)..(1000): Selenocysteine
  MOD_RES (1033)..(1033): Selenocysteine
  MOD_RES (1042)..(1043): Selenocysteine
  MOD_RES (1058)..(1058): Selenocysteine
  MOD_RES (1063)..(1063): Selenocysteine
  MOD_RES (1069)..(1069): Selenocysteine
  MOD_RES (1093)..(1093): Selenocysteine
  MOD_RES (1096)..(1096): Selenocysteine
  MOD_RES (1157)..(1158): Selenocysteine
  MOD_RES (1161)..(1161): Selenocysteine
  MOD_RES (1188)..(1188): Selenocysteine
  MOD_RES (1202)..(1202): Selenocysteine
MXRSPPLRELPPSYXPPARXAAPQILAGSLKAPLWLRAYFQGLLFSLGCGIQRHCGKVLFLGLLAFGALALGLRMAIIEXNLEQLWVEVGSRVSQELHYXKEKLGEEAAYXSQMLIQXARQEGENILXPEALGLHLQAALXASKVQVSLYGKSWDLNKICYKSGVPLIENGMIERMIEKLFPCVILXPLDCFWEGAKLQGGSAYLPGRPDIQWXNLDPEQLLEELGPFASLEGFRELLDKAQVGQAYVGRPCLHPDDLHCPPSAPNHHSRQAPNVAHELSGGCHGFSHKFMHWQEELLLGGMARDPQGELLRAEALQSXFLLMSPRQLYEHFRGDYQXHDIGWSEEQASXVLQAWQRRFVQLAQEALPENASQQIHAFSSXXLDDILHAFSEVSAARVVGGYLLMLAYACVXMLRWDCAQSQGSVGLAGVLLVALAVASGLGLCALLGIXFNAAXXQVLPFLALGIGVDDVFLLAHAFXEALPGXPLQERMGECLQRXGXSVVLXSINNMAAFLMAALVPIPALRAFSLQAAIVVGCXFVAVMLVFPAILSLDLRRRHCQRLDVLCCFSSPCSAQVIQILPQELGDGXVPVGIAHLXAXVQAFXHCEASSQHVVXILPPQAHLVPPPSDPLGSELFSPGGSXRDLLGQEEEXRQKAACKSLPCARWNLAHFARYQFAPLLLQSHAKAIVLVLFGALLGLSLYGAXLVQDGLALXDVVPRGXKEHAFLSAQLRYFSLYEVALVXQGGFDYAHSQRALFDLHQRFSSLKAVLPPPAXQAPRXWLHYYRNWLQGIQAAFDQDWASGRIXRHSYRNGSEDGALAYKLLIQXGDAQEPLDFSQLXXRKLVDREGLIPPELFYMGLXVWVSSDPLGLAASQANFYPPPPEWLHDKYDXXGENLRIPPAQPLEFAQFPFLLRGLQKXADFVEAIEGARAACAEAGQAGVHAYPSGSPFLFWEQYLGLRRCFLLAVCILLVCXFLVCALLLLNPWXAGLIVLVLAMMXVELFGIMGFLGIKLSAIPVVILVASVGIGVEFXVHVALGFLXXQGSRNLRAAHALEHXFAPVXDGAISXLLGLLMLAGSHFDFIVRYFFAALXVLXLLGLLHGLVLLPVLLSILGPPPEVIQMYKESPEILSPPAPQGGGLRWGASSSLPQSFARVXXSMXVAIHPPPLPGAYIHPAPDEPPWSPAAXSSGNLSSRGPGPAXG

SEQ ID NO: 21906 - protein, 88 aa, Homo sapiens
  MOD_RES (1)..(1): Any amino acid
  MOD_RES (14)..(14): Selenocysteine
  MOD_RES (17)..(17): Selenocysteine
XFDFIVRYFFAALXVLXLLGLLHGLVLLPVLLSILGPPPEVIQMYKESPEILSPPAPQGGGLRVGSLQVNISYWKELLWCQDLRPEEI

SEQ ID NO: 21907 - protein, 256 aa, Homo sapiens
  MOD_RES (7)..(7): Selenocysteine
  MOD_RES (18)..(18): Selenocysteine
  MOD_RES (30)..(30): Selenocysteine
  MOD_RES (42)..(42): Selenocysteine
  MOD_RES (61)..(61): Selenocysteine
  MOD_RES (64)..(64): Selenocysteine
  MOD_RES (69)..(69): Selenocysteine
  MOD_RES (73)..(73): Selenocysteine
  MOD_RES (91)..(91): Selenocysteine
  MOD_RES (107)..(107): Selenocysteine
  MOD_RES (131)..(131): Selenocysteine
  MOD_RES (148)..(148): Selenocysteine
  MOD_RES (159)..(159): Selenocysteine
  MOD_RES (169)..(169): Selenocysteine
  MOD_RES (176)..(176): Selenocysteine
  MOD_RES (201)..(201): Selenocysteine
  MOD_RES (206)..(206): Selenocysteine
  MOD_RES (208)..(208): Selenocysteine
  MOD_RES (216)..(216): Selenocysteine
  MOD_RES (223)..(223): Selenocysteine
  MOD_RES (249)..(249): Selenocysteine
MLDQHHXDLILKLHAAVXKIQVPRPGFNYXFAHICILNNDKXCIVDDIVHVLEELKNARAXNRXNFAIXYPIXHLKDGRAVYNGHQLGGVXVHSKDRVKSAEAIQLXYYLQSINSLNDMVAERWESSFCDXVRLFQKSNSKVKMYPYXSSSLREDFQKXSRVSERYLVXSLILVVXMAILCCSMQDCVRSKPWLGLLGLVXISLAXLXAAGIINLXGGKYNSXFLGVPFVMLGNYYSSFFCFRLLVVLXRFLKGQE

SEQ ID NO: 21908 - protein, 888 aa, Homo sapiens
  MOD_RES (12)..(12): Selenocysteine
  MOD_RES (89)..(89): Selenocysteine
  MOD_RES (99)..(99): Selenocysteine
  MOD_RES (112)..(112): Selenocysteine
  MOD_RES (123)..(123): Selenocysteine
  MOD_RES (135)..(135): Selenocysteine
  MOD_RES (147)..(147): Selenocysteine
  MOD_RES (166)..(166): Selenocysteine
  MOD_RES (169)..(169): Selenocysteine
  MOD_RES (174)..(174): Selenocysteine
  MOD_RES (178)..(178): Selenocysteine
  MOD_RES (196)..(196): Selenocysteine
  MOD_RES (212)..(212): Selenocysteine
  MOD_RES (236)..(236): Selenocysteine
  MOD_RES (253)..(253): Selenocysteine
  MOD_RES (264)..(264): Selenocysteine
  MOD_RES (274)..(274): Selenocysteine
  MOD_RES (281)..(281): Selenocysteine
  MOD_RES (306)..(306): Selenocysteine
  MOD_RES (311)..(311): Selenocysteine
  MOD_RES (313)..(313): Selenocysteine
  MOD_RES (321)..(321): Selenocysteine
  MOD_RES (328)..(328): Selenocysteine
  MOD_RES (344)..(344): Selenocysteine
  MOD_RES (354)..(354): Selenocysteine
  MOD_RES (364)..(364): Selenocysteine
  MOD_RES (378)..(379): Selenocysteine
  MOD_RES (385)..(385): Selenocysteine
  MOD_RES (394)..(394): Selenocysteine
  MOD_RES (428)..(428): Selenocysteine
  MOD_RES (462)..(462): Selenocysteine
  MOD_RES (469)..(469): Selenocysteine
  MOD_RES (477)..(477): Selenocysteine
  MOD_RES (496)..(496): Selenocysteine
  MOD_RES (498)..(498): Selenocysteine
  MOD_RES (534)..(534): Selenocysteine
  MOD_RES (536)..(536): Selenocysteine
  MOD_RES (538)..(538): Selenocysteine
  MOD_RES (542)..(543): Selenocysteine
  MOD_RES (569)..(569): Selenocysteine
  MOD_RES (579)..(579): Selenocysteine
  MOD_RES (602)..(602): Selenocysteine
  MOD_RES (610)..(610): Selenocysteine
  MOD_RES (653)..(653): Selenocysteine
  MOD_RES (656)..(656): Selenocysteine
  MOD_RES (667)..(667): Selenocysteine
  MOD_RES (674)..(674): Selenocysteine
  MOD_RES (728)..(728): Selenocysteine
  MOD_RES (730)..(730): Selenocysteine
  MOD_RES (743)..(743): Selenocysteine
  MOD_RES (764)..(764): Selenocysteine
  MOD_RES (774)..(774): Selenocysteine
  MOD_RES (782)..(782): Selenocysteine
  MOD_RES (784)..(784): Selenocysteine
  MOD_RES (820)..(820): Selenocysteine
  MOD_RES (822)..(822): Selenocysteine
  MOD_RES (834)..(834): Selenocysteine
  MOD_RES (847)..(847): Selenocysteine
  MOD_RES (879)..(879): Selenocysteine
  MOD_RES (886)..(887): Selenocysteine
MLRQVLHRGLRXCFSRLGHFIASHPVFFASAPVLISILLGASFSRYQVEESVEHLLAPQHSLAKIERNLVNSLFPVNRSKHRLYSDLQXPGRYGRVIVXSFQKANMLDQHHXDLILKLHAAVXKIQVPRPGFNYXFAHICILNNDKXCIVDDIVHVLEELKNARAXNRXNFAIXYPIXHLKDGRAVYNGHQLGGVXVHSKDRVKSAEAIQLXYYLQSINSLNDMVAERWESSFCDXVRLFQKSNSKVKMYPYXSSSLREDFQKXSRVSERYLVXSLILVVXMAILCCSMQDCVRSKPWLGLLGLVXISLAXLXAAGIINLXGGKYNSXFLGVPFVMLGHGLYGXFEMLSSWRKXREDQHVKERXAAVYADSMLSFSLXXAMYLVXFGIGASPFXNIEAARIFCCNSCIAIFFNYLYVLSFYGSSLVFXGYIENNYQHSIFCRKVPKPEALQEKPAWYRFLLXARFSEDXAEGEEANXYESHLLVCFLKRYYCDWIXNXYVKPFVVLFYLIYISFALMGYLQVSEGSDLSNIVAXAXQXIEYXXAQQKYFSNYSPVIGFYIYESIEYWNXSVQEDVLEYXKGFVRISWFESYLNYLRKLNVSXGLPKKNFXDMLRNSFLKAPQFSHFQEDIIFSKKYNDEVDVVASRMFLVAKXMEXNREELYDLLEXLRRLSVXSKVKFIVFNPSFVYMDRYASSLGAPLHNSCISALFLLFFSAFLVADSLINVWIXLXVVSVEFGVIGFMXLWKVELDCISVLCLIYGINYXIDNCAPMLSXFVLGKDFXRXKWVKNALEVHGVAILQSYLCYIVGLIPLAAVPSNLXCXLFRCLFLIAFVXFFHCFAILPVILXFLPPSKKKRKEKKNPENREEIECVEMVDIDSXRVVDQIXXV

SEQ ID NO: 21909 - protein, 103 aa, Homo sapiens
  MOD_RES (1)..(1): Any amino acid
  MOD_RES (25)..(25): Selenocysteine
  MOD_RES (35)..(35): Selenocysteine
  MOD_RES (48)..(48): Selenocysteine
  MOD_RES (73)..(73): Selenocysteine
  MOD_RES (86)..(86): Selenocysteine
  MOD_RES (98)..(98): Selenocysteine
XERNLVNSLFPVNRSKHRLYSDLQXPGRYGRVIVXSFQKANMLDQHHXDLILKVMDYMGLLKCYPPGGKLEKXNMLKRELQQSMQXPCSPFLSPLPCXWSPLA

SEQ ID NO: 21910 - protein, 153 aa, Homo sapiens
  MOD_RES (11)..(11): Selenocysteine
  MOD_RES (19)..(19): Selenocysteine
  MOD_RES (41)..(41): Selenocysteine
  MOD_RES (86)..(86): Selenocysteine
  MOD_RES (95)..(95): Selenocysteine
  MOD_RES (128)..(128): Selenocysteine
  MOD_RES (130)..(130): Selenocysteine
ALLFHKMMFEXIPMFSGGXCNPQFVVCQLKVKIYSSNSGPXRREDKFMYFEFPQPLPVCGDIKVEFFHKQNKMLKKDKMFHFWVNXFFIPGPEEXSEKVENGSLCDQEIDSICSIERADNDKEYLVLXLXKNDLDKANKDKANRYFSPNFKVS

SEQ ID NO: 21911 - protein, 156 aa, Homo sapiens
  MOD_RES (44)..(44): Selenocysteine
  MOD_RES (97)..(97): Selenocysteine
  MOD_RES (126)..(126): Selenocysteine
  MOD_RES (134)..(134): Selenocysteine
MGFPAERLEGVYRNNIDDVVRFLDSKHKNHYKIYNLCAERHYDXAKFNCRVAQYPFEDHNPPQLELIKPFCEDLDQWLSEDDNHVAAIHCKAGKGRXGVMICAYLLHRGKFLKAQEALDFYGEVRXRDKKADPXGGIPDKGIIVIGDGSSMDVIAP

SEQ ID NO: 21912 - protein, 403 aa, Homo sapiens
  MOD_RES (2)..(2): Selenocysteine
  MOD_RES (26)..(26): Selenocysteine
  MOD_RES (78)..(78): Selenocysteine
  MOD_RES (131)..(131): Selenocysteine
  MOD_RES (160)..(160): Selenocysteine
  MOD_RES (167)..(167): Selenocysteine
  MOD_RES (202)..(202): Selenocysteine
  MOD_RES (210)..(210): Selenocysteine
  MOD_RES (232)..(232): Selenocysteine
  MOD_RES (277)..(277): Selenocysteine
  MOD_RES (286)..(286): Selenocysteine
  MOD_RES (319)..(319): Selenocysteine
  MOD_RES (321)..(321): Selenocysteine
  MOD_RES (348)..(348): Selenocysteine
  MOD_RES (350)..(350): Selenocysteine
  MOD_RES (363)..(363): Selenocysteine
  MOD_RES (366)..(366): Selenocysteine
  MOD_RES (382)..(383): Selenocysteine
  MOD_RES (398)..(398): Selenocysteine
  MOD_RES (401)..(401): Selenocysteine
MXAIIKEIVSRNKRRYQEDGFDLDLXYIYPNIIAMGFPAERLEGVYRNNIDDVVRFLDSKHKNHYKIYNLCAERHYDXAKFNCRVAQYPFEDHNPPQLELIKPFCEDLDQWLSEDDNHVAAIHCKAGKGRXGVMICAYLLHRGKFLKAQEALDFYGEVRXRDKKGVXIPSQRRYVYYYSYLLKNHLDYRPVALLFHKMMFEXIPMFSGGXCNPQFVVCQLKVKIYSSNSGPXRREDKFMYFEFPQPLPVCGDIKVEFFHKQNKMLKKDKMFHFWVNXFFIPGPEEXSEKVENGSLCDQEIDSICSIERADNDKEYLVLXLXKNDLDKANKDKANRYFSPNFKVKLYFXKXVEEPSNPEASSSXSVXPDVSDNEPDHYRYSDXXDSDPENEPFDEDQHXQIXKV

SEQ ID NO: 21913 - protein, 328 aa, Homo sapiens
  MOD_RES (28)..(28): Selenocysteine
  MOD_RES (104)..(104): Selenocysteine
  MOD_RES (192)..(192): Selenocysteine
  MOD_RES (204)..(204): Selenocysteine
  MOD_RES (261)..(261): Selenocysteine
  MOD_RES (284)..(284): Selenocysteine
  MOD_RES (297)..(297): Selenocysteine
  MOD_RES (302)..(302): Selenocysteine
MDAVLLEHFPGGLDAFPSSYFDEDDFFXDQSSRDPLEDGDELLADEQAEVEFLSHQLHEYCYRDGACLLLQPAPPAAPLALAPPSSGGLGEPDDGGGGGYCCEXGAPPGGFPYSPGSPPSCLAYPCAGAAVLSPGARLRGLSGAAAAAARRRRRVRSEAELQQLRQAANVRERRRMQSINDAFEGLRSHIPXLPYEKRLSKVDXLRLAIGYINFLSELVQADLPLRGGGAGGCGGPGGGGRLGGDSPGSQAQKVIICHRGXRSPSPSDPDYGLPPLAGHSLSWXDEKQLKEQNIIRXAKVWXPEDPRKLNSKSSFNNIENEPPFEFVS

SEQ ID NO: 21914 - protein, 296 aa, Homo sapiens
  MOD_RES (11)..(12): Selenocysteine
  MOD_RES (29)..(29): Selenocysteine
  MOD_RES (69)..(69): Selenocysteine
  MOD_RES (71)..(71): Selenocysteine
  MOD_RES (120)..(120): Selenocysteine
  MOD_RES (145)..(145): Selenocysteine
  MOD_RES (181)..(181): Selenocysteine
  MOD_RES (214)..(214): Selenocysteine
  MOD_RES (240)..(240): Selenocysteine
  MOD_RES (271)..(271): Selenocysteine
  MOD_RES (275)..(275): Selenocysteine
  MOD_RES (292)..(292): Selenocysteine
MKSPFYRCQNXXSVEKGNSAVMGGVLFSXGLLGNLLALGLLARSGLGWCSRRPLRPLPSVFYMLVCGLXVXDLLGKCLLSPVVLAAYAQNRSLRVLAPALDNSLCQAFAFFMSFFGLSSXLQLLAMALECWLSLGHPFFYRRHIXLRLGALVAPVVSAFSLAFCALPFMGFGKFVQYCPGXWCFIQMVHEEGSLSVLGYSVLYSSLMALLVLAXVLCNLGAMRNLYAMHRRLQRHPRSCXRDCAEPRADGREASPQPLEELDHLLLLALMXVLFXMCSLPVIAFVPGVPAKXPGSR

SEQ ID NO: 21915 - protein, 359 aa, Homo sapiens
  MOD_RES (11)..(12): Selenocysteine
  MOD_RES (29)..(29): Selenocysteine
  MOD_RES (69)..(69): Selenocysteine
  MOD_RES (71)..(71): Selenocysteine
  MOD_RES (120)..(120): Selenocysteine
  MOD_RES (145)..(145): Selenocysteine
  MOD_RES (181)..(181): Selenocysteine
  MOD_RES (214)..(214): Selenocysteine
  MOD_RES (240)..(240): Selenocysteine
  MOD_RES (271)..(271): Selenocysteine
  MOD_RES (275)..(275): Selenocysteine
  MOD_RES (299)..(299): Selenocysteine
  MOD_RES (353)..(353): Selenocysteine
MKSPFYRCQNXXSVEKGNSAVMGGVLFSXGLLGNLLALGLLARSGLGWCSRRPLRPLPSVFYMLVCGLXVXDLLGKCLLSPVVLAAYAQNRSLRVLAPALDNSLCQAFAFFMSFFGLSSXLQLLAMALECWLSLGHPFFYRRHIXLRLGALVAPVVSAFSLAFCALPFMGFGKFVQYCPGXWCFIQMVHEEGSLSVLGYSVLYSSLMALLVLAXVLCNLGAMRNLYAMHRRLQRHPRSCXRDCAEPRADGREASPQPLEELDHLLLLALMXVLFXMCSLPVIYRAYYGAFKDVKEKNRXSEEAEDLRALRFLSVISIVDPWIFIIFRSPVFRIFFHKIFIRPLRYRSRCSNSXNMESSL

SEQ ID NO: 21916 - protein, 395 aa, Homo sapiens
  MOD_RES (6)..(6): Selenocysteine
  MOD_RES (26)..(26): Selenocysteine
  MOD_RES (64)..(64): Selenocysteine
  MOD_RES (67)..(68): Selenocysteine
  MOD_RES (88)..(88): Selenocysteine
  MOD_RES (101)..(102): Selenocysteine
  MOD_RES (144)..(144): Selenocysteine
  MOD_RES (163)..(163): Selenocysteine
  MOD_RES (172)..(172): Selenocysteine
  MOD_RES (198)..(198): Selenocysteine
  MOD_RES (290)..(290): Selenocysteine
  MOD_RES (307)..(307): Selenocysteine
  MOD_RES (321)..(321): Selenocysteine
  MOD_RES (344)..(344): Selenocysteine
  MOD_RES (347)..(347): Selenocysteine
  MOD_RES (383)..(383): Selenocysteine
  MOD_RES (393)..(393): Selenocysteine
MSANAXLKPLCPILEQMSRLQSHSNXSIRYIDHAAVLLHGLASLLGLVENGVILFVVGCRMRQXVVXXWVLHLALSDLLASASLPFFXYFLAVGHSWELGXXFCKLHSSIFFLNMFASGFLLSAISLDRCLQVVRPVWAQNHRXVAAAHKVCLVLWALAVLNXVPYFVFRDXISRLDGRIMCYYNVLLLNPGPDRDAXCNSRQVALAVSKFLLAFLVPLAIIASSHAAVSLRLQHRGRRRPGRFVRLVAAVVAAFALCWGPYHVFSLLEARAHANPGLRPLVWRGLPFVXSLAFFNSVANPVLYVLXCPDMLRKLRRSLRXVLESVLVDDSELGGAGSSRRRRXSSXARSASPLALCSRPEEPRGPARLLGWLLGSCAASPQXGPLNRALSSXSS

SEQ ID NO: 21917 - protein, 402 aa, Homo sapiens
  MOD_RES (16)..(17): Selenocysteine
  MOD_RES (26)..(26): Selenocysteine
  MOD_RES (44)..(44): Selenocysteine
  MOD_RES (72)..(72): Selenocysteine
  MOD_RES (83)..(83): Selenocysteine
  MOD_RES (100)..(100): Selenocysteine
  MOD_RES (140)..(140): Selenocysteine
  MOD_RES (186)..(186): Selenocysteine
  MOD_RES (223)..(223): Selenocysteine
  MOD_RES (274)..(274): Selenocysteine
  MOD_RES (327)..(327): Selenocysteine
  MOD_RES (382)..(382): Selenocysteine
MSPCGPLNLSLAGEAXXCAAPWVPNXSAVPPSGASPALPIFSMXLGAVSNLLALALLAQAAGRLRRRRSAAXFLLFVASLLAXDLAGHVIPGALVLRLYXAGRAPAGGACHFLGGCMVFFGLCPLLLGCGMAVERCVGVXRPLLHAARVSVARARLALAAVAAVALAVALLPLARVGRYELQYPGXWCFIGLGPPGGWRQALLAGLFASLGLVALLAALVCNXLSGLALLRARWRRRSRRPPPASGPDSRRRWGAHGPRSASASSASSIASASXFFGGSRSSGSARRARAHDVEMVGQLVGIMVVSCICWSPMLVLVALAVGGWSSXSLQRPLFLAVRLASWNQILDPWVYILLRQAVLRQLLRLLPPRAGAKGGPAGLGLXPSAWEASSLRSSRHSGLSHF

SEQ ID NO: 21918 - protein, 103 aa, Homo sapiens
  MOD_RES (5)..(5): Selenocysteine
  MOD_RES (15)..(15): Selenocysteine
  MOD_RES (17)..(17): Selenocysteine
  MOD_RES (26)..(26): Selenocysteine
  MOD_RES (34)..(34): Selenocysteine
  MOD_RES (83)..(83): Selenocysteine
  MOD_RES (87)..(87): Selenocysteine
  MOD_RES (89)..(89): Selenocysteine
  MOD_RES (93)..(93): Selenocysteine
MAEEXDHLILLAIMXIXFAVCSLPFXIFAYMNEXSSRKEKWDLQALRFLSINSIIDPWVFAILRPPVLRLMRSVLCCRISLRXQDAXQXSCSXQSDASKQADL

SEQ ID NO: 21919 - protein, 358 aa, Homo sapiens
  MOD_RES (15)..(15): Selenocysteine
  MOD_RES (72)..(72): Selenocysteine
  MOD_RES (77)..(77): Selenocysteine
  MOD_RES (82)..(82): Selenocysteine
  MOD_RES (98)..(98): Selenocysteine
  MOD_RES (110)..(110): Selenocysteine
  MOD_RES (117)..(117): Selenocysteine
  MOD_RES (123)..(123): Selenocysteine
  MOD_RES (185)..(185): Selenocysteine
  MOD_RES (194)..(194): Selenocysteine
  MOD_RES (202)..(202): Selenocysteine
  MOD_RES (260)..(260): Selenocysteine
  MOD_RES (270)..(270): Selenocysteine
  MOD_RES (272)..(272): Selenocysteine
  MOD_RES (281)..(281): Selenocysteine
  MOD_RES (289)..(289): Selenocysteine
  MOD_RES (338)..(338): Selenocysteine
  MOD_RES (342)..(342): Selenocysteine
  MOD_RES (344)..(344): Selenocysteine
  MOD_RES (348)..(348): Selenocysteine
MGNASNDSQSEDCEXRQWLPPGESPAISSVMFSAGVLGNLIALALLARRWRGDVGCSAGRRSSLSLFHVLVXELVFXDLLGXCLISPVVLASYARNQXLVALAPESRACXYFAFAMXFFSLAXMLMLFAMALERYLSIGHPYFYQRRVSRSGGLAVLPVIYAVSLLFCSLPLLDYGQYVQYCPGXWCFIRHGRXAYLQLYAXLLLLLIVSVLACNFSVILNLIRMHRRSRRSRCGPSLGSGRGGPGARRRGERVSMAEEXDHLILLAIMXIXFAVCSLPFXIFAYMNEXSSRKEKWDLQALRFLSINSIIDPWVFAILRPPVLRLMRSVLCCRISLRXQDAXQXSCSXQSDASKQADL

SEQ ID NO: 21920 - protein, 365 aa, Homo sapiens
  MOD_RES (4)..(4): Selenocysteine
  MOD_RES (15)..(15): Selenocysteine
  MOD_RES (22)..(22): Selenocysteine
  MOD_RES (38)..(38): Selenocysteine
  MOD_RES (57)..(57): Selenocysteine
  MOD_RES (61)..(61): Selenocysteine
  MOD_RES (98)..(98): Selenocysteine
  MOD_RES (106)..(107): Selenocysteine
  MOD_RES (131)..(131): Selenocysteine
  MOD_RES (136)..(136): Selenocysteine
  MOD_RES (138)..(138): Selenocysteine
  MOD_RES (171)..(171): Selenocysteine
  MOD_RES (174)..(174): Selenocysteine
  MOD_RES (200)..(200): Selenocysteine
  MOD_RES (206)..(206): Selenocysteine
  MOD_RES (212)..(212): Selenocysteine
  MOD_RES (219)..(219): Selenocysteine
  MOD_RES (243)..(243): Selenocysteine
  MOD_RES (245)..(245): Selenocysteine
  MOD_RES (252)..(252): Selenocysteine
  MOD_RES (265)..(265): Selenocysteine
  MOD_RES (277)..(278): Selenocysteine
  MOD_RES (280)..(280): Selenocysteine
  MOD_RES (310)..(310): Selenocysteine
  MOD_RES (317)..(317): Selenocysteine
  MOD_RES (319)..(319): Selenocysteine
MKEXRGYGGDAPFCXRLNHSYXGMWAPERSAEARGNLXRPPGSGEDCGSVSVAFPIXMLLXGFVGNALAMLLVSRSYRRRESKRKKSFLLCIGWLALXDLVGQLLXXPVVIVVYLSKQRWEHIDPSGRLCXFFGLXMXVFGLSSLFIASAMAVERALAIRAPHWYASHMKXRAXRAVLLGVWLAVLAFALLPVLGVGQYXVQWPGXWCFISXGRGGNGXSSSHNWGNLFFASAFAFLGLLALXVXFSCNLAXIKALVSRCRAKAXASQSSAQWGRIXXEXAIQLMGIMCVLSVCWSPLLIMMLKMIFNQXSVEHCKXHXEKQKECNFFLIAVRLASLNQILDPWVYLLLRKILLRKFCQEEFWGN

SEQ ID NO: 21921 - protein, 374 aa, Homo sapiens
  MOD_RES (4)..(4): Selenocysteine
  MOD_RES (15)..(15): Selenocysteine
  MOD_RES (22)..(22): Selenocysteine
  MOD_RES (38)..(38): Selenocysteine
  MOD_RES (57)..(57): Selenocysteine
  MOD_RES (61)..(61): Selenocysteine
  MOD_RES (98)..(98): Selenocysteine
  MOD_RES (106)..(107): Selenocysteine
  MOD_RES (131)..(131): Selenocysteine
  MOD_RES (136)..(136): Selenocysteine
  MOD_RES (138)..(138): Selenocysteine
  MOD_RES (171)..(171): Selenocysteine
  MOD_RES (174)..(174): Selenocysteine
  MOD_RES (200)..(200): Selenocysteine
  MOD_RES (206)..(206): Selenocysteine
  MOD_RES (212)..(212): Selenocysteine
  MOD_RES (219)..(219): Selenocysteine
  MOD_RES (243)..(243): Selenocysteine
  MOD_RES (245)..(245): Selenocysteine
  MOD_RES (252)..(252): Selenocysteine
  MOD_RES (265)..(265): Selenocysteine
  MOD_RES (277)..(278): Selenocysteine
  MOD_RES (280)..(280): Selenocysteine
  MOD_RES (310)..(310): Selenocysteine
  MOD_RES (317)..(317): Selenocysteine
  MOD_RES (319)..(319): Selenocysteine
MKEXRGYGGDAPFCXRLNHSYXGMWAPERSAEARGNLXRPPGSGEDCGSVSVAFPIXMLLXGFVGNALAMLLVSRSYRRRESKRKKSFLLCIGWLALXDLVGQLLXXPVVIVVYLSKQRWEHIDPSGRLCXFFGLXMXVFGLSSLFIASAMAVERALAIRAPHWYASHMKXRAXRAVLLGVWLAVLAFALLPVLGVGQYXVQWPGXWCFISXGRGGNGXSSSHNWGNLFFASAFAFLGLLALXVXFSCNLAXIKALVSRCRAKAXASQSSAQWGRIXXEXAIQLMGIMCVLSVCWSPLLIMMLKMIFNQXSVEHCKXHXEKQKECNFFLIAVRLASLNQILDPWVYLLLRKILLRKFCQMRKRRLREQEEFWGN

SEQ ID NO: 21922 - protein, 388 aa, Homo sapiens
  MOD_RES (4)..(4): Selenocysteine
  MOD_RES (15)..(15): Selenocysteine
  MOD_RES (22)..(22): Selenocysteine
  MOD_RES (38)..(38): Selenocysteine
  MOD_RES (57)..(57): Selenocysteine
  MOD_RES (61)..(61): Selenocysteine
  MOD_RES (98)..(98): Selenocysteine
  MOD_RES (106)..(107): Selenocysteine
  MOD_RES (131)..(131): Selenocysteine
  MOD_RES (136)..(136): Selenocysteine
  MOD_RES (138)..(138): Selenocysteine
  MOD_RES (171)..(171): Selenocysteine
  MOD_RES (174)..(174): Selenocysteine
  MOD_RES (200)..(200): Selenocysteine
  MOD_RES (206)..(206): Selenocysteine
  MOD_RES (212)..(212): Selenocysteine
  MOD_RES (219)..(219): Selenocysteine
  MOD_RES (243)..(243): Selenocysteine
  MOD_RES (245)..(245): Selenocysteine
  MOD_RES (252)..(252): Selenocysteine
  MOD_RES (265)..(265): Selenocysteine
  MOD_RES (277)..(278): Selenocysteine
  MOD_RES (280)..(280): Selenocysteine
  MOD_RES (310)..(310): Selenocysteine
  MOD_RES (317)..(317): Selenocysteine
  MOD_RES (319)..(319): Selenocysteine
  MOD_RES (386)..(386): Selenocysteine
MKEXRGYGGDAPFCXRLNHSYXGMWAPERSAEARGNLXRPPGSGEDCGSVSVAFPIXMLLXGFVGNALAMLLVSRSYRRRESKRKKSFLLCIGWLALXDLVGQLLXXPVVIVVYLSKQRWEHIDPSGRLCXFFGLXMXVFGLSSLFIASAMAVERALAIRAPHWYASHMKXRAXRAVLLGVWLAVLAFALLPVLGVGQYXVQWPGXWCFISXGRGGNGXSSSHNWGNLFFASAFAFLGLLALXVXFSCNLAXIKALVSRCRAKAXASQSSAQWGRIXXEXAIQLMGIMCVLSVCWSPLLIMMLKMIFNQXSVEHCKXHXEKQKECNFFLIAVRLASLNQILDPWVYLLLRKILLRKFCQVANAVSSCSNDGQKGQPISLSNEIIQXEA

SEQ ID NO: 21923 - protein, 388 aa, Homo sapiens
  MOD_RES (4)..(4): Selenocysteine
  MOD_RES (15)..(15): Selenocysteine
  MOD_RES (22)..(22): Selenocysteine
  MOD_RES (38)..(38): Selenocysteine
  MOD_RES (57)..(57): Selenocysteine
  MOD_RES (61)..(61): Selenocysteine
  MOD_RES (98)..(98): Selenocysteine
  MOD_RES (106)..(107): Selenocysteine
  MOD_RES (131)..(131): Selenocysteine
  MOD_RES (136)..(136): Selenocysteine
  MOD_RES (138)..(138): Selenocysteine
  MOD_RES (171)..(171): Selenocysteine
  MOD_RES (174)..(174): Selenocysteine
  MOD_RES (200)..(200): Selenocysteine
  MOD_RES (206)..(206): Selenocysteine
  MOD_RES (212)..(212): Selenocysteine
  MOD_RES (219)..(219): Selenocysteine
  MOD_RES (243)..(243): Selenocysteine
  MOD_RES (245)..(245): Selenocysteine
  MOD_RES (252)..(252): Selenocysteine
  MOD_RES (265)..(265): Selenocysteine
  MOD_RES (277)..(278): Selenocysteine
  MOD_RES (280)..(280): Selenocysteine
  MOD_RES (310)..(310): Selenocysteine
  MOD_RES (317)..(317): Selenocysteine
  MOD_RES (319)..(319): Selenocysteine
  MOD_RES (376)..(376): Selenocysteine
  MOD_RES (383)..(383): Selenocysteine
MKEXRGYGGDAPFCXRLNHSYXGMWAPERSAEARGNLXRPPGSGEDCGSVSVAFPIXMLLXGFVGNALAMLLVSRSYRRRESKRKKSFLLCIGWLALXDLVGQLLXXPVVIVVYLSKQRWEHIDPSGRLCXFFGLXMXVFGLSSLFIASAMAVERALAIRAPHWYASHMKXRAXRAVLLGVWLAVLAFALLPVLGVGQYXVQWPGXWCFISXGRGGNGXSSSHNWGNLFFASAFAFLGLLALXVXFSCNLAXIKALVSRCRAKAXASQSSAQWGRIXXEXAIQLMGIMCVLSVCWSPLLIMMLKMIFNQXSVEHCKXHXEKQKECNFFLIAVRLASLNQILDPWVYLLLRKILLRKFCQVANAVSFSRRNFGEIKXCLSARIXSLEAP

SEQ ID NO: 21924 - protein, 390 aa, Homo sapiens
  MOD_RES (4)..(4): Selenocysteine
  MOD_RES (15)..(15): Selenocysteine
  MOD_RES (22)..(22): Selenocysteine
  MOD_RES (38)..(38): Selenocysteine
  MOD_RES (57)..(57): Selenocysteine
  MOD_RES (61)..(61): Selenocysteine
  MOD_RES (98)..(98): Selenocysteine
  MOD_RES (106)..(107): Selenocysteine
  MOD_RES (131)..(131): Selenocysteine
  MOD_RES (136)..(136): Selenocysteine
  MOD_RES (138)..(138): Selenocysteine
  MOD_RES (171)..(171): Selenocysteine
  MOD_RES (174)..(174): Selenocysteine
  MOD_RES (200)..(200): Selenocysteine
  MOD_RES (206)..(206): Selenocysteine
  MOD_RES (212)..(212): Selenocysteine
  MOD_RES (219)..(219): Selenocysteine
  MOD_RES (243)..(243): Selenocysteine
  MOD_RES (245)..(245): Selenocysteine
  MOD_RES (252)..(252): Selenocysteine
  MOD_RES (265)..(265): Selenocysteine
  MOD_RES (277)..(278): Selenocysteine
  MOD_RES (280)..(280): Selenocysteine
  MOD_RES (310)..(310): Selenocysteine
  MOD_RES (317)..(317): Selenocysteine
  MOD_RES (319)..(319): Selenocysteine
  MOD_RES (364)..(364): Selenocysteine
  MOD_RES (372)..(372): Selenocysteine
  MOD_RES (381)..(381): Selenocysteine
MKEXRGYGGDAPFCXRLNHSYXGMWAPERSAEARGNLXRPPGSGEDCGSVSVAFPIXMLLXGFVGNALAMLLVSRSYRRRESKRKKSFLLCIGWLALXDLVGQLLXXPVVIVVYLSKQRWEHIDPSGRLCXFFGLXMXVFGLSSLFIASAMAVERALAIRAPHWYASHMKXRAXRAVLLGVWLAVLAFALLPVLGVGQYXVQWPGXWCFISXGRGGNGXSSSHNWGNLFFASAFAFLGLLALXVXFSCNLAXIKALVSRCRAKAXASQSSAQWGRIXXEXAIQLMGIMCVLSVCWSPLLIMMLKMIFNQXSVEHCKXHXEKQKECNFFLIAVRLASLNQILDPWVYLLLRKILLRKFCQIRYHXNNYASSSXSLPCQCSSXLMWSDHLER

SEQ ID NO: 21925 - protein, 393 aa, Homo sapiens
  MOD_RES (4)..(4): Selenocysteine
  MOD_RES (15)..(15): Selenocysteine
  MOD_RES (22)..(22): Selenocysteine
  MOD_RES (38)..(38): Selenocysteine
  MOD_RES (57)..(57): Selenocysteine
  MOD_RES (61)..(61): Selenocysteine
  MOD_RES (98)..(98): Selenocysteine
  MOD_RES (106)..(107): Selenocysteine
  MOD_RES (131)..(131): Selenocysteine
  MOD_RES (136)..(136): Selenocysteine
  MOD_RES (138)..(138): Selenocysteine
  MOD_RES (171)..(171): Selenocysteine
  MOD_RES (174)..(174): Selenocysteine
  MOD_RES (200)..(200): Selenocysteine
  MOD_RES (206)..(206): Selenocysteine
  MOD_RES (212)..(212): Selenocysteine
  MOD_RES (219)..(219): Selenocysteine
  MOD_RES (243)..(243): Selenocysteine
  MOD_RES (245)..(245): Selenocysteine
  MOD_RES (252)..(252): Selenocysteine
  MOD_RES (265)..(265): Selenocysteine
  MOD_RES (277)..(278): Selenocysteine
  MOD_RES (280)..(280): Selenocysteine
  MOD_RES (310)..(310): Selenocysteine
  MOD_RES (317)..(317): Selenocysteine
  MOD_RES (319)..(319): Selenocysteine
  MOD_RES (378)..(378): Selenocysteine
MKEXRGYGGDAPFCXRLNHSYXGMWAPERSAEARGNLXRPPGSGEDCGSVSVAFPIXMLLXGFVGNALAMLLVSRSYRRRESKRKKSFLLCIGWLALXDLVGQLLXXPVVIVVYLSKQRWEHIDPSGRLCXFFGLXMXVFGLSSLFIASAMAVERALAIRAPHWYASHMKXRAXRAVLLGVWLAVLAFALLPVLGVGQYXVQWPGXWCFISXGRGGNGXSSSHNWGNLFFASAFAFLGLLALXVXFSCNLAXIKALVSRCRAKAXASQSSAQWGRIXXEXAIQLMGIMCVLSVCWSPLLIMMLKMIFNQXSVEHCKXHXEKQKECNFFLIAVRLASLNQILDPWVYLLLRKILLRKFCQEMGPDGRCFCHAWRQVPRXWCSSHDREPCSVQLS

SEQ ID NO: 21926 - protein, 402 aa, Homo sapiens
  MOD_RES (4)..(4): Selenocysteine
  MOD_RES (15)..(15): Selenocysteine
  MOD_RES (22)..(22): Selenocysteine
  MOD_RES (38)..(38): Selenocysteine
  MOD_RES (57)..(57): Selenocysteine
  MOD_RES (61)..(61): Selenocysteine
  MOD_RES (98)..(98): Selenocysteine
  MOD_RES (106)..(107): Selenocysteine
  MOD_RES (131)..(131): Selenocysteine
  MOD_RES (136)..(136): Selenocysteine
  MOD_RES (138)..(138): Selenocysteine
  MOD_RES (171)..(171): Selenocysteine
  MOD_RES (174)..(174): Selenocysteine
  MOD_RES (200)..(200): Selenocysteine
  MOD_RES (206)..(206): Selenocysteine
  MOD_RES (212)..(212): Selenocysteine
  MOD_RES (219)..(219): Selenocysteine
  MOD_RES (243)..(243): Selenocysteine
  MOD_RES (245)..(245): Selenocysteine
  MOD_RES (252)..(252): Selenocysteine
  MOD_RES (265)..(265): Selenocysteine
  MOD_RES (277)..(278): Selenocysteine
  MOD_RES (280)..(280): Selenocysteine
  MOD_RES (310)..(310): Selenocysteine
  MOD_RES (317)..(317): Selenocysteine
  MOD_RES (319)..(319): Selenocysteine
  MOD_RES (387)..(387): Selenocysteine
MKEXRGYGGDAPFCXRLNHSYXGMWAPERSAEARGNLXRPPGSGEDCGSVSVAFPIXMLLXGFVGNALAMLLVSRSYRRRESKRKKSFLLCIGWLALXDLVGQLLXXPVVIVVYLSKQRWEHIDPSGRLCXFFGLXMXVFGLSSLFIASAMAVERALAIRAPHWYASHMKXRAXRAVLLGVWLAVLAFALLPVLGVGQYXVQWPGXWCFISXGRGGNGXSSSHNWGNLFFASAFAFLGLLALXVXFSCNLAXIKALVSRCRAKAXASQSSAQWGRIXXEXAIQLMGIMCVLSVCWSPLLIMMLKMIFNQXSVEHCKXHXEKQKECNFFLIAVRLASLNQILDPWVYLLLRKILLRKFCQMRKRRLREQEMGPDGRCFCHAWRQVPRXWCSSHDREPCSVQLS

SEQ ID NO: 21927 - protein, 412 aa, Homo sapiens
  MOD_RES (4)..(4): Selenocysteine
  MOD_RES (15)..(15): Selenocysteine
  MOD_RES (22)..(22): Selenocysteine
  MOD_RES (38)..(38): Selenocysteine
  MOD_RES (57)..(57): Selenocysteine
  MOD_RES (61)..(61): Selenocysteine
  MOD_RES (98)..(98): Selenocysteine
  MOD_RES (106)..(107): Selenocysteine
  MOD_RES (131)..(131): Selenocysteine
  MOD_RES (136)..(136): Selenocysteine
  MOD_RES (138)..(138): Selenocysteine
  MOD_RES (171)..(171): Selenocysteine
  MOD_RES (174)..(174): Selenocysteine
  MOD_RES (200)..(200): Selenocysteine
  MOD_RES (206)..(206): Selenocysteine
  MOD_RES (212)..(212): Selenocysteine
  MOD_RES (219)..(219): Selenocysteine
  MOD_RES (243)..(243): Selenocysteine
  MOD_RES (245)..(245): Selenocysteine
  MOD_RES (252)..(252): Selenocysteine
  MOD_RES (265)..(265): Selenocysteine
  MOD_RES (277)..(278): Selenocysteine
  MOD_RES (280)..(280): Selenocysteine
  MOD_RES (310)..(310): Selenocysteine
  MOD_RES (317)..(317): Selenocysteine
  MOD_RES (319)..(319): Selenocysteine
MKEXRGYGGDAPFCXRLNHSYXGMWAPERSAEARGNLXRPPGSGEDCGSVSVAFPIXMLLXGFVGNALAMLLVSRSYRRRESKRKKSFLLCIGWLALXDLVGQLLXXPVVIVVYLSKQRWEHIDPSGRLCXFFGLXMXVFGLSSLFIASAMAVERALAIRAPHWYASHMKXRAXRAVLLGVWLAVLAFALLPVLGVGQYXVQWPGXWCFISXGRGGNGXSSSHNWGNLFFASAFAFLGLLALXVXFSCNLAXIKALVSRCRAKAXASQSSAQWGRIXXEXAIQLMGIMCVLSVCWSPLLIMMLKMIFNQXSVEHCKXHXEKQKECNFFLIAVRLASLNQILDPWVYLLLRKILLRKFCQLKKQKLRSKIGSYSVPKARVPWCDHNSLQPQPPGLKYIFISQVQAILLPQPPK

SEQ ID NO: 21928 - protein, 418 aa, Homo sapiens
  MOD_RES (4)..(4): Selenocysteine
  MOD_RES (15)..(15): Selenocysteine
  MOD_RES (22)..(22): Selenocysteine
  MOD_RES (38)..(38): Selenocysteine
  MOD_RES (57)..(57): Selenocysteine
  MOD_RES (61)..(61): Selenocysteine
  MOD_RES (98)..(98): Selenocysteine
  MOD_RES (106)..(107): Selenocysteine
  MOD_RES (131)..(131): Selenocysteine
  MOD_RES (136)..(136): Selenocysteine
  MOD_RES (138)..(138): Selenocysteine
  MOD_RES (171)..(171): Selenocysteine
  MOD_RES (174)..(174): Selenocysteine
  MOD_RES (200)..(200): Selenocysteine
  MOD_RES (206)..(206): Selenocysteine
  MOD_RES (212)..(212): Selenocysteine
  MOD_RES (219)..(219): Selenocysteine
  MOD_RES (243)..(243): Selenocysteine
  MOD_RES (245)..(245): Selenocysteine
  MOD_RES (252)..(252): Selenocysteine
  MOD_RES (265)..(265): Selenocysteine
  MOD_RES (277)..(278): Selenocysteine
  MOD_RES (280)..(280): Selenocysteine
  MOD_RES (310)..(310): Selenocysteine
  MOD_RES (317)..(317): Selenocysteine
  MOD_RES (319)..(319): Selenocysteine
  MOD_RES (382)..(382): Selenocysteine
  MOD_RES (390)..(390): Selenocysteine
  MOD_RES (410)..(410): Selenocysteine
  MOD_RES (414)..(414): Selenocysteine
  MOD_RES (417)..(417): Selenocysteine
MKEXRGYGGDAPFCXRLNHSYXGMWAPERSAEARGNLXRPPGSGEDCGSVSVAFPIXMLLXGFVGNALAMLLVSRSYRRRESKRKKSFLLCIGWLALXDLVGQLLXXPVVIVVYLSKQRWEHIDPSGRLCXFFGLXMXVFGLSSLFIASAMAVERALAIRAPHWYASHMKXRAXRAVLLGVWLAVLAFALLPVLGVGQYXVQWPGXWCFISXGRGGNGXSSSHNWGNLFFASAFAFLGLLALXVXFSCNLAXIKALVSRCRAKAXASQSSAQWGRIXXEXAIQLMGIMCVLSVCWSPLLIMMLKMIFNQXSVEHCKXHXEKQKECNFFLIAVRLASLNQILDPWVYLLLRKILLRKFCQMRKRRLREQLICSLQNSQIQRAXAHCGQVQXYRVLNREEMEVLVSSINVYXRISXVKXE

SEQ ID NO: 21929 - protein, 425 aa, Homo sapiens
  MOD_RES (4)..(4): Selenocysteine
  MOD_RES (15)..(15): Selenocysteine
  MOD_RES (22)..(22): Selenocysteine
  MOD_RES (38)..(38): Selenocysteine
  MOD_RES (57)..(57): Selenocysteine
  MOD_RES (61)..(61): Selenocysteine
  MOD_RES (98)..(98): Selenocysteine
  MOD_RES (106)..(107): Selenocysteine
  MOD_RES (131)..(131): Selenocysteine
  MOD_RES (136)..(136): Selenocysteine
  MOD_RES (138)..(138): Selenocysteine
  MOD_RES (171)..(171): Selenocysteine
  MOD_RES (174)..(174): Selenocysteine
  MOD_RES (200)..(200): Selenocysteine
  MOD_RES (206)..(206): Selenocysteine
  MOD_RES (212)..(212): Selenocysteine
  MOD_RES (219)..(219): Selenocysteine
  MOD_RES (243)..(243): Selenocysteine
  MOD_RES (245)..(245): Selenocysteine
  MOD_RES (252)..(252): Selenocysteine
  MOD_RES (265)..(265): Selenocysteine
  MOD_RES (277)..(278): Selenocysteine
  MOD_RES (280)..(280): Selenocysteine
  MOD_RES (310)..(310): Selenocysteine
  MOD_RES (317)..(317): Selenocysteine
  MOD_RES (319)..(319): Selenocysteine
  MOD_RES (374)..(374): Selenocysteine
  MOD_RES (376)..(376): Selenocysteine
  MOD_RES (409)..(409): Selenocysteine
MKEXRGYGGDAPFCXRLNHSYXGMWAPERSAEARGNLXRPPGSGEDCGSVSVAFPIXMLLXGFVGNALAMLLVSRSYRRRESKRKKSFLLCIGWLALXDLVGQLLXXPVVIVVYLSKQRWEHIDPSGRLCXFFGLXMXVFGLSSLFIASAMAVERALAIRAPHWYASHMKXRAXRAVLLGVWLAVLAFALLPVLGVGQYXVQWPGXWCFISXGRGGNGXSSSHNWGNLFFASAFAFLGLLALXVXFSCNLAXIKALVSRCRAKAXASQSSAQWGRIXXEXAIQLMGIMCVLSVCWSPLLIMMLKMIFNQXSVEHCKXHXEKQKECNFFLIAVRLASLNQILDPWVYLLLRKILLRKFCQMRKRRLREQAPLLPXSXVIDPSRFCAQPFRWFLDLSFPAMSSSHPQLPLXLASFKLLREPCSVQLS

SEQ ID NO: 21930 - protein, 488 aa, Homo sapiens
  MOD_RES (3)..(3): Selenocysteine
  MOD_RES (22)..(22): Selenocysteine
  MOD_RES (52)..(53): Selenocysteine
  MOD_RES (56)..(56): Selenocysteine
  MOD_RES (64)..(64): Selenocysteine
  MOD_RES (69)..(69): Selenocysteine
  MOD_RES (76)..(76): Selenocysteine
  MOD_RES (79)..(79): Selenocysteine
  MOD_RES (96)..(96): Selenocysteine
  MOD_RES (139)..(139): Selenocysteine
  MOD_RES (168)..(168): Selenocysteine
  MOD_RES (175)..(176): Selenocysteine
  MOD_RES (179)..(179): Selenocysteine
  MOD_RES (199)..(199): Selenocysteine
  MOD_RES (221)..(221): Selenocysteine
  MOD_RES (225)..(225): Selenocysteine
  MOD_RES (277)..(277): Selenocysteine
  MOD_RES (335)..(335): Selenocysteine
  MOD_RES (369)..(369): Selenocysteine
  MOD_RES (391)..(391): Selenocysteine
  MOD_RES (394)..(394): Selenocysteine
  MOD_RES (428)..(429): Selenocysteine
  MOD_RES (433)..(433): Selenocysteine
  MOD_RES (439)..(439): Selenocysteine
  MOD_RES (475)..(475): Selenocysteine
  MOD_RES (480)..(480): Selenocysteine
MSXPGVNSSASLSPDRLNSPVXIPAVMFIFGVVGNLVAIVVLCKSRKEQKEXXFYXLVCGLAVXDLLGXLLVSPVXIAXYMKGQWPGGQPLCEYSXFILLFFSLSGLSIICAMSVERYLAINHAYFYSHYVDKRLAGLXLFAVYASNVLFCALPNMGLGSSRLQYPDXWCFIDWXXNVXAHAAYSYMYAGFSSFLILAXVLCNVLVCGALLRMHRQFMRRXSLGXEQHHAAAAASVASRGHPAASPALPRLSDFRRRRSFRRIAGAEIQMVILLIAXSLVVLICSIPLVVRVFVNQLYQPSLEREVSKNPDLQAIRIASVNPILDPWIYILLRKXVLSKAIEKIKCLFCRIGGSRRERSGQHCSDSQRXSSAMSGHSRSFISRELKEISSXSQXLLPDLSLPDLSENGLGGRNLLPGVPGMGLAQEDXXSLRXLRISEXSDSSQGQDSESVLLVDEAGGSGRAGPAPKGSSLQVXFPSEXLNLSEKCI

SEQ ID NO: 21931 - protein, 152 aa, Homo sapiens
  MOD_RES (21)..(21): Selenocysteine
  MOD_RES (34)..(34): Selenocysteine
  MOD_RES (78)..(78): Selenocysteine
  MOD_RES (114)..(114): Selenocysteine
  MOD_RES (129)..(129): Selenocysteine
  MOD_RES (131)..(131): Selenocysteine
MPAHSLVMSSPALPAFLLCSXLLVIKMYVVAIIXGQVRLRKKAFANPEDALRHGGPQYCRSDPDVERCLRAHRNDMEXIYPFLFLGFVYSFLGPNPFVAWMHFLVFLVGRVAHXVAYLGKLRAPIRSVXYXLAQLPCASMALQILWEAARHL

SEQ ID NO: 21932 - protein, 139 aa, Homo sapiens
  MOD_RES (37)..(37): Selenocysteine
  MOD_RES (69)..(69): Selenocysteine
  MOD_RES (90)..(90): Selenocysteine
MQPASAKWYDRRDYVFIEFCVEDSKDVNVNFEKSKLXFSCLGGSDNFKHLNEIDLFHCIDPNDSKHKRXDRSILCCLRKGESGQSWPRLXKERAKLNWLSVDFNNWKDWEDDSDEDMSNFDRFSEDSQDSDDEKMPDLE

SEQ ID NO: 21933 - protein, 160 aa, Homo sapiens
  MOD_RES (37)..(37): Selenocysteine
  MOD_RES (69)..(69): Selenocysteine
  MOD_RES (90)..(90): Selenocysteine
MQPASAKWYDRRDYVFIEFCVEDSKDVNVNFEKSKLXFSCLGGSDNFKHLNEIDLFHCIDPNDSKHKRXDRSILCCLRKGESGQSWPRLXKERAKLNWLSVDFNNWKDWEDDSDEDMSNFDRFSEMMNNMGGDEDVDLPEVDGADDDSQDSDDEKMPDLE

SEQ ID NO: 21934 - protein, 130 aa, Homo sapiens
  MOD_RES (37)..(37): Selenocysteine
  MOD_RES (69)..(69): Selenocysteine
  MOD_RES (90)..(90): Selenocysteine
MQPASAKWYDRRDYVFIEFCVEDSKDVNVNFEKSKLXFSCLGGSDNFKHLNEIDLFHCIDPNDSKHKRXDRSILCCLRKGESGQSWPRLXKERAKMMNNMGGDEDVDLPEVDGADDDSQDSDDEKMPDLE

SEQ ID NO: 21935 - protein, 127 aa, Homo sapiens
  MOD_RES (37)..(37): Selenocysteine
MQPASAKWYDRRDYVFIEFCVEDSKDVNVNFEKSKLXFSCLGGSDNFKHLNEIDLFHCIDPNLNWLSVDFNNWKDWEDDSDEDMSNFDRFSEMMNNMGGDEDVDLPEVDGADDDSQDSDDEKMPDLE

SEQ ID NO: 21936 - protein, 124 aa, Homo sapiens
  MOD_RES (37)..(37): Selenocysteine
  MOD_RES (54)..(54): Selenocysteine
MQPASAKWYDRRDYVFIEFCVEDSKDVNVNFEKSKLXFSCLRKGESGQSWPRLXKERAKLNWLSVDFNNWKDWEDDSDEDMSNFDRFSEMMNNMGGDEDVDLPEVDGADDDSQDSDDEKMPDLE

SEQ ID NO: 21937 - protein, 164 aa, Homo sapiens
  MOD_RES (41)..(41): Selenocysteine
  MOD_RES (73)..(73): Selenocysteine
  MOD_RES (94)..(94): Selenocysteine
MSLEKQPASAKWYDRRDYVFIEFCVEDSKDVNVNFEKSKLXFSCLGGSDNFKHLNEIDLFHCIDPNDSKHKRXDRSILCCLRKGESGQSWPRLXKERAKLNWLSVDFNNWKDWEDDSDEDMSNFDRFSEMMNNMGGDEDVDLPEVDGADDDSQDSDDEKMPDLE

SEQ ID NO: 21938 - protein, 297 aa, Homo sapiens
  MOD_RES (20)..(21): Selenocysteine
  MOD_RES (24)..(24): Selenocysteine
  MOD_RES (38)..(38): Selenocysteine
  MOD_RES (76)..(76): Selenocysteine
  MOD_RES (138)..(138): Selenocysteine
  MOD_RES (145)..(145): Selenocysteine
  MOD_RES (148)..(148): Selenocysteine
  MOD_RES (184)..(184): Selenocysteine
  MOD_RES (190)..(190): Selenocysteine
  MOD_RES (223)..(223): Selenocysteine
  MOD_RES (226)..(226): Selenocysteine
  MOD_RES (295)..(295): Selenocysteine
MSMNNSKQLVSPAAALLSNXXCQXENRLSVFFSVIFMXVGILSNSLAIAILMKAYQRFRQKSKASFLLLASGLVIXDFFGHLINGAIAVFVYASDKEWIRFDQSNVLCSIFGICMVFSGLCPLLLGSVMAIERCIGVXKPIFHSXKIXSKHVKMMLSGVCLFAVFIALLPILGHRDYKIQASRXWCFYNXEDIKDWEDRFYLLLFSFLGLLALGVSLLCNAIXGIXLLRVKFKSQQHRQGRSHHLEMVIQLLAIMCVSCICWSPFLGYRIILNGKEKYKVYEEQSDFLHRLQWPXLE

SEQ ID NO: 21939 - protein, 297 aa, Homo sapiens
  MOD_RES (20)..(21): Selenocysteine
  MOD_RES (24)..(24): Selenocysteine
  MOD_RES (38)..(38): Selenocysteine
  MOD_RES (76)..(76): Selenocysteine
  MOD_RES (138)..(138): Selenocysteine
  MOD_RES (145)..(145): Selenocysteine
  MOD_RES (148)..(148): Selenocysteine
  MOD_RES (184)..(184): Selenocysteine
  MOD_RES (190)..(190): Selenocysteine
  MOD_RES (223)..(223): Selenocysteine
  MOD_RES (226)..(226): Selenocysteine
  MOD_RES (293)..(293): Selenocysteine
MSMNNSKQLVSPAAALLSNXXCQXENRLSVFFSVIFMXVGILSNSLAIAILMKAYQRFRQKSKASFLLLASGLVIXDFFGHLINGAIAVFVYASDKEWIRFDQSNVLCSIFGICMVFSGLCPLLLGSVMAIERCIGVXKPIFHSXKIXSKHVKMMLSGVCLFAVFIALLPILGHRDYKIQASRXWCFYNXEDIKDWEDRFYLLLFSFLGLLALGVSLLCNAIXGIXLLRVKFKSQQHRQGRSHHLEMVIQLLAIMCVSCICWSPFLGYRIILNGKEKYKVYEEQSDFLHSDKXLNEK

SEQ ID NO: 21940 - protein, 359 aa, Homo sapiens
  MOD_RES (20)..(21): Selenocysteine
  MOD_RES (24)..(24): Selenocysteine
  MOD_RES (38)..(38): Selenocysteine
  MOD_RES (76)..(76): Selenocysteine
  MOD_RES (138)..(138): Selenocysteine
  MOD_RES (145)..(145): Selenocysteine
  MOD_RES (148)..(148): Selenocysteine
  MOD_RES (184)..(184): Selenocysteine
  MOD_RES (190)..(190): Selenocysteine
  MOD_RES (223)..(223): Selenocysteine
  MOD_RES (226)..(226): Selenocysteine
  MOD_RES (268)..(268): Selenocysteine
  MOD_RES (282)..(282): Selenocysteine
  MOD_RES (285)..(286): Selenocysteine
  MOD_RES (294)..(294): Selenocysteine
  MOD_RES (359)..(359): Selenocysteine
MSMNNSKQLVSPAAALLSNXXCQXENRLSVFFSVIFMXVGILSNSLAIAILMKAYQRFRQKSKASFLLLASGLVIXDFFGHLINGAIAVFVYASDKEWIRFDQSNVLCSIFGICMVFSGLCPLLLGSVMAIERCIGVXKPIFHSXKIXSKHVKMMLSGVCLFAVFIALLPILGHRDYKIQASRXWCFYNXEDIKDWEDRFYLLLFSFLGLLALGVSLLCNAIXGIXLLRVKFKSQQHRQGRSHHLEMVIQLLAIMCVSCICWSPFLVXMANIGINGNHSLEXCEXXLFALRMAXWNQILDPWVYILLRKAVLKNLYKLASQCCGVHVISLHIWELSSIKNSLKVAAISESPVAEKSASX

SEQ ID NO: 21941 - protein, 296 aa, Homo sapiens
  MOD_RES (9)..(9): Selenocysteine
  MOD_RES (19)..(19): Selenocysteine
  MOD_RES (21)..(21): Selenocysteine
  MOD_RES (54)..(54): Selenocysteine
  MOD_RES (59)..(59): Selenocysteine
  MOD_RES (64)..(64): Selenocysteine
  MOD_RES (100)..(100): Selenocysteine
  MOD_RES (207)..(207): Selenocysteine
  MOD_RES (230)..(230): Selenocysteine
  MOD_RES (245)..(245): Selenocysteine
  MOD_RES (256)..(256): Selenocysteine
  MOD_RES (270)..(270): Selenocysteine
  MOD_RES (296)..(296): Selenocysteine
MADSCRNLXYVRGSVGPAXSXLMFVAGVVGNGLALGILSARRPARPSAFAVLVXGLAAXDLLGXSFLSPAVFVAYARNSSLLGLARGGPALCDAFAFAMXFFGLASMLILFAMAVERCLALSHPYLYAQLDGPRCARLALPAIYAFCVLFCALPLLGLGQHQQYCPGSWCFLRMRWAQPGGAAFSLAYAGLVALLVAAIFLCNGSVXLSLCRMYRQQKRHQGSLGPRPRXGEDEVDHLILLALMXVVMAVCSLPLXHVERPRQDRMRWLXPVIPALWEAEAGGSFEVRSSRPVWPX

SEQ ID NO: 21942 - protein, 386 aa, Homo sapiens
  MOD_RES (9)..(9): Selenocysteine
  MOD_RES (19)..(19): Selenocysteine
  MOD_RES (21)..(21): Selenocysteine
  MOD_RES (54)..(54): Selenocysteine
  MOD_RES (59)..(59): Selenocysteine
  MOD_RES (64)..(64): Selenocysteine
  MOD_RES (100)..(100): Selenocysteine
  MOD_RES (207)..(207): Selenocysteine
  MOD_RES (230)..(230): Selenocysteine
  MOD_RES (245)..(245): Selenocysteine
  MOD_RES (256)..(256): Selenocysteine
  MOD_RES (261)..(261): Selenocysteine
  MOD_RES (321)..(321): Selenocysteine
  MOD_RES (363)..(363): Selenocysteine
  MOD_RES (373)..(373): Selenocysteine
MADSCRNLXYVRGSVGPAXSXLMFVAGVVGNGLALGILSARRPARPSAFAVLVXGLAAXDLLGXSFLSPAVFVAYARNSSLLGLARGGPALCDAFAFAMXFFGLASMLILFAMAVERCLALSHPYLYAQLDGPRCARLALPAIYAFCVLFCALPLLGLGQHQQYCPGSWCFLRMRWAQPGGAAFSLAYAGLVALLVAAIFLCNGSVXLSLCRMYRQQKRHQGSLGPRPRXGEDEVDHLILLALMXVVMAVCSLPLXIRCFXQAVAPDSSSEMGDLLAFRFYAFNPILDPWVFILFRKAVFQRLKLWVCCLCLGPAHGDSQXPLSQLASGRRDPRAPSAPVGKEGSCVPLSAWGEGQVEPLPPXQQSSGSAVGXSSKAEASVACSLC

SEQ ID NO: 21943 - protein, 115 aa, Homo sapiens
  MOD_RES (50)..(50): Selenocysteine
  MOD_RES (92)..(92): Selenocysteine
  MOD_RES (102)..(102): Selenocysteine
MGDLLAFRFYAFNPILDPWVFILFRKAVFQRLKLWVCCLCLGPAHGDSQXPLSQLASGRRDPRAPSAPVGKEGSCVPLSAWGEGQVEPLPPXQQSSGSAVGXSSKAEASVACSLC

SEQ ID NO: 21944 - protein, 143 aa, Homo sapiens
  MOD_RES (2)..(2): Selenocysteine
  MOD_RES (13)..(13): Selenocysteine
  MOD_RES (18)..(18): Selenocysteine
  MOD_RES (78)..(78): Selenocysteine
  MOD_RES (120)..(120): Selenocysteine
  MOD_RES (130)..(130): Selenocysteine
MXVVMAVCSLPLXIRCFXQAVAPDSSSEMGDLLAFRFYAFNPILDPWVFILFRKAVFQRLKLWVCCLCLGPAHGDSQXPLSQLASGRRDPRAPSAPVGKEGSCVPLSAWGEGQVEPLPPXQQSSGSAVGXSSKAEASVACSLC

SEQ ID NO: 21945 - protein, 174 aa, Homo sapiens
  MOD_RES (18)..(18): Selenocysteine
  MOD_RES (33)..(33): Selenocysteine
  MOD_RES (44)..(44): Selenocysteine
  MOD_RES (49)..(49): Selenocysteine
  MOD_RES (109)..(109): Selenocysteine
  MOD_RES (151)..(151): Selenocysteine
  MOD_RES (161)..(161): Selenocysteine
MYRQQKRHQGSLGPRPRXGEDEVDHLILLALMXVVMAVCSLPLXIRCFXQAVAPDSSSEMGDLLAFRFYAFNPILDPWVFILFRKAVFQRLKLWVCCLCLGPAHGDSQXPLSQLASGRRDPRAPSAPVGKEGSCVPLSAWGEGQVEPLPPXQQSSGSAVGXSSKAEASVACSLC

SEQ ID NO: 21946 - protein, 500 aa, Homo sapiens
  MOD_RES (24)..(24): Selenocysteine
  MOD_RES (55)..(55): Selenocysteine
  MOD_RES (66)..(66): Selenocysteine
  MOD_RES (75)..(75): Selenocysteine
  MOD_RES (92)..(92): Selenocysteine
  MOD_RES (127)..(127): Selenocysteine
  MOD_RES (137)..(137): Selenocysteine
  MOD_RES (142)..(142): Selenocysteine
  MOD_RES (153)..(153): Selenocysteine
  MOD_RES (179)..(179): Selenocysteine
  MOD_RES (189)..(189): Selenocysteine
  MOD_RES (206)..(206): Selenocysteine
  MOD_RES (284)..(284): Selenocysteine
  MOD_RES (327)..(329): Selenocysteine
  MOD_RES (338)..(338): Selenocysteine
  MOD_RES (352)..(352): Selenocysteine
  MOD_RES (358)..(358): Selenocysteine
  MOD_RES (399)..(399): Selenocysteine
MAWAALLGLLAALLLLLLLSRRRXRRPGEPPLDLGSIPWLGYALDFGKDAASFLXRMKEKHGDIFXILVGGRYVXVLLDPHSYDAVVWEPRXRLDFHAYAIFLMERIFDVQLPHYSPSDEKARMKLXLLHRELQALXEAMYXNLHAVLLGDAXEAGSGWHEMGLLDFSYSFLLRAGYLXLYGIEALPRXHESQAQDRVHSADVFHXFRQLDRLLPKLARGSLSVGDKDHMCSVKSRLWKLLSPARLARRAHRSKWLESYLLHLEEMGVSEEMQARALVLQLWAXQGNMGPAAFWLLLFLLKNPEALAAVRGELESILWQAEQPVSQXXXLPQKVLDSXPVLDSVLSESLRLXAAPFIXREVVVDLAMPMADGREFNLRRGDRLLLFPFLSPQRDPEIYXDPEVFKYNRFLNPDGSEKKDFYKDGKRLKNYNMPWGAGHNHCLGRSYAVNSIKQFVFLVLVHLDLELINADVEIPEFDLSRYGFGLMQPEHDVPVRYRIRP

SEQ ID NO: 21947 - protein, 115 aa, Homo sapiens
  MOD_RES (21)..(21): Selenocysteine
  MOD_RES (110)..(110): Selenocysteine
MIPAKDMAKVMIVMLAICFLXKSDGKSVKKRSVSEIQLMHNLGKHLNSMERVEWLRKKLQDVHNFVALGAPLAPRDAGSQRPRKKEDNVLVESHEKSLGEADKADVNVLXKAKSQ

SEQ ID NO: 21948 - protein, 333 aa, Homo sapiens
  MOD_RES (3)..(3): Selenocysteine
  MOD_RES (33)..(33): Selenocysteine
  MOD_RES (70)..(70): Selenocysteine
  MOD_RES (74)..(74): Selenocysteine
  MOD_RES (99)..(99): Selenocysteine
  MOD_RES (163)..(163): Selenocysteine
  MOD_RES (175)..(175): Selenocysteine
  MOD_RES (178)..(178): Selenocysteine
  MOD_RES (192)..(192): Selenocysteine
  MOD_RES (203)..(203): Selenocysteine
  MOD_RES (218)..(218): Selenocysteine
  MOD_RES (249)..(249): Selenocysteine
  MOD_RES (257)..(257): Selenocysteine
  MOD_RES (273)..(273): Selenocysteine
  MOD_RES (286)..(286): Selenocysteine
  MOD_RES (294)..(294): Selenocysteine
  MOD_RES (325)..(325): Selenocysteine
  MOD_RES (333)..(333): Selenocysteine
MGXARIAPGLALLLCCPVLSSAYALVDADDVMXKEEQIFLLHRAQAQCEKRLKEVLQRPASIMESDKGWXSASXSGKPRKDKASGKLYPESEEDKEAPXGSRYRGRPCLPEWDHILCWPLGAPGEVVAVPCPDYIYDFNHKGHAYRRCDRNGSWELVPGHNRXWANYSECVKFLXNEXREREVFDRLGMIYXVGYSVSLASLXVAVLILAYFRRLHCXRNYIHMHLFLSFMLRAVSIFVKDAVLYSGAXLDEAERLXEEELRAIAQAPPPPAXAAAGYAGCRVAVXFFLYFLAXNYYWILVEGLYLHSLIFMAFFSEKKYLWGFXVFGWGAGX

SEQ ID NO: 21949 - protein, 527 aa, Homo sapiens
  MOD_RES (3)..(3): Selenocysteine
  MOD_RES (33)..(33): Selenocysteine
  MOD_RES (70)..(70): Selenocysteine
  MOD_RES (74)..(74): Selenocysteine
  MOD_RES (99)..(99): Selenocysteine
  MOD_RES (163)..(163): Selenocysteine
  MOD_RES (175)..(175): Selenocysteine
  MOD_RES (178)..(178): Selenocysteine
  MOD_RES (192)..(192): Selenocysteine
  MOD_RES (203)..(203): Selenocysteine
  MOD_RES (218)..(218): Selenocysteine
  MOD_RES (249)..(249): Selenocysteine
  MOD_RES (257)..(257): Selenocysteine
  MOD_RES (273)..(273): Selenocysteine
  MOD_RES (286)..(286): Selenocysteine
  MOD_RES (294)..(294): Selenocysteine
  MOD_RES (325)..(325): Selenocysteine
  MOD_RES (345)..(345): Selenocysteine
  MOD_RES (349)..(349): Selenocysteine
  MOD_RES (387)..(387): Selenocysteine
  MOD_RES (392)..(392): Selenocysteine
  MOD_RES (399)..(399): Selenocysteine
  MOD_RES (410)..(410): Selenocysteine
  MOD_RES (427)..(427): Selenocysteine
  MOD_RES (430)..(430): Selenocysteine
  MOD_RES (435)..(435): Selenocysteine
  MOD_RES (478)..(478): Selenocysteine
  MOD_RES (503)..(503): Selenocysteine
  MOD_RES (506)..(506): Selenocysteine
  MOD_RES (525)..(525): Selenocysteine
  MOD_RES (527)..(527): Selenocysteine
MGXARIAPGLALLLCCPVLSSAYALVDADDVMXKEEQIFLLHRAQAQCEKRLKEVLQRPASIMESDKGWXSASXSGKPRKDKASGKLYPESEEDKEAPXGSRYRGRPCLPEWDHILCWPLGAPGEVVAVPCPDYIYDFNHKGHAYRRCDRNGSWELVPGHNRXWANYSECVKFLXNEXREREVFDRLGMIYXVGYSVSLASLXVAVLILAYFRRLHCXRNYIHMHLFLSFMLRAVSIFVKDAVLYSGAXLDEAERLXEEELRAIAQAPPPPAXAAAGYAGCRVAVXFFLYFLAXNYYWILVEGLYLHSLIFMAFFSEKKYLWGFXVFGWGLPAVFVAVWVSVRAXLANXGCWDLSSGNKKWIIQVPILASIVLNFILFINIVRVLAXKLREXNAGRCDXRQQYRKLLKSXLVLMPLFGVHYIVFMAXPYXEVSGXLWQVQMHYEMLFNSFQGFFVAIIYCFCNGEVQAEIKKSWSRWXLALDFKRKARSGSSSYSYGPMVSHXSVXNVGPRVGLGLPLSPRLLPXAX

SEQ ID NO: 21950 - protein, 593 aa, Homo sapiens
  MOD_RES (3)..(3): Selenocysteine
  MOD_RES (33)..(33): Selenocysteine
  MOD_RES (70)..(70): Selenocysteine
  MOD_RES (74)..(74): Selenocysteine
  MOD_RES (99)..(99): Selenocysteine
  MOD_RES (163)..(163): Selenocysteine
  MOD_RES (175)..(175): Selenocysteine
  MOD_RES (178)..(178): Selenocysteine
  MOD_RES (192)..(192): Selenocysteine
  MOD_RES (203)..(203): Selenocysteine
  MOD_RES (218)..(218): Selenocysteine
  MOD_RES (249)..(249): Selenocysteine
  MOD_RES (257)..(257): Selenocysteine
  MOD_RES (273)..(273): Selenocysteine
  MOD_RES (286)..(286): Selenocysteine
  MOD_RES (294)..(294): Selenocysteine
  MOD_RES (325)..(325): Selenocysteine
  MOD_RES (345)..(345): Selenocysteine
  MOD_RES (349)..(349): Selenocysteine
  MOD_RES (387)..(387): Selenocysteine
  MOD_RES (392)..(392): Selenocysteine
  MOD_RES (399)..(399): Selenocysteine
  MOD_RES (410)..(410): Selenocysteine
  MOD_RES (427)..(427): Selenocysteine
  MOD_RES (430)..(430): Selenocysteine
  MOD_RES (435)..(435): Selenocysteine
  MOD_RES (478)..(478): Selenocysteine
  MOD_RES (503)..(503): Selenocysteine
  MOD_RES (506)..(506): Selenocysteine
  MOD_RES (525)..(525): Selenocysteine
  MOD_RES (527)..(528): Selenocysteine
  MOD_RES (542)..(542): Selenocysteine
  MOD_RES (547)..(547): Selenocysteine
  MOD_RES (550)..(551): Selenocysteine
  MOD_RES (591)..(591): Selenocysteine
MGXARIAPGLALLLCCPVLSSAYALVDADDVMXKEEQIFLLHRAQAQCEKRLKEVLQRPASIMESDKGWXSASXSGKPRKDKASGKLYPESEEDKEAPXGSRYRGRPCLPEWDHILCWPLGAPGEVVAVPCPDYIYDFNHKGHAYRRCDRNGSWELVPGHNRXWANYSECVKFLXNEXREREVFDRLGMIYXVGYSVSLASLXVAVLILAYFRRLHCXRNYIHMHLFLSFMLRAVSIFVKDAVLYSGAXLDEAERLXEEELRAIAQAPPPPAXAAAGYAGCRVAVXFFLYFLAXNYYWILVEGLYLHSLIFMAFFSEKKYLWGFXVFGWGLPAVFVAVWVSVRAXLANXGCWDLSSGNKKWIIQVPILASIVLNFILFINIVRVLAXKLREXNAGRCDXRQQYRKLLKSXLVLMPLFGVHYIVFMAXPYXEVSGXLWQVQMHYEMLFNSFQGFFVAIIYCFCNGEVQAEIKKSWSRWXLALDFKRKARSGSSSYSYGPMVSHXSVXNVGPRVGLGLPLSPRLLPXAXXNGHPQLPGHAKPGXPALEXLEXXPPAMAAPKDDGFLNGSCSGLDEEASGPERPPALLQEEWEXVM

SEQ ID NO: 21951 - protein, 182 aa, Homo sapiens
  MOD_RES (2)..(2): Selenocysteine
  MOD_RES (7)..(7): Selenocysteine
  MOD_RES (39)..(39): Selenocysteine
  MOD_RES (67)..(67): Selenocysteine
  MOD_RES (92)..(92): Selenocysteine
  MOD_RES (95)..(95): Selenocysteine
  MOD_RES (114)..(114): Selenocysteine
  MOD_RES (116)..(117): Selenocysteine
  MOD_RES (131)..(131): Selenocysteine
  MOD_RES (136)..(136): Selenocysteine
  MOD_RES (139)..(140): Selenocysteine
  MOD_RES (180)..(180): Selenocysteine
YXEVSGXLWQVQMHYEMLFNSFQGFFVAIIYCFCNGENXPEDILKAEKSFQMMQVQAEIKKSWSRWXLALDFKRKARSGSSSYSYGPMVSHXSVXNVGPRVGLGLPLSPRLLPXAXXNGHPQLPGHAKPGXPALEXLEXXPPAMAAPKDDGFLNGSCSGLDEEASGPERPPALLQEEWEXVM

SEQ ID NO: 21952 - protein, 100 aa, Homo sapiens
  MOD_RES (3)..(3): Selenocysteine
  MOD_RES (30)..(30): Selenocysteine
  MOD_RES (56)..(56): Selenocysteine
MEXRQVSRSPRVRLLLLLLLLLVVPWGVRXASGVALPPVGVLSLRPPGRAWADPAXPRPRRSLALADDAAFRERARLLAALERRHWLNSYMHKLLVLDAP

SEQ ID NO: 21953 - protein, 550 aa, Homo sapiens
  MOD_RES (31)..(31): Selenocysteine
  MOD_RES (33)..(33): Selenocysteine
  MOD_RES (53)..(53): Selenocysteine
  MOD_RES (77)..(77): Selenocysteine
  MOD_RES (108)..(108): Selenocysteine
  MOD_RES (118)..(118): Selenocysteine
  MOD_RES (149)..(149): Selenocysteine
  MOD_RES (175)..(175): Selenocysteine
  MOD_RES (192)..(192): Selenocysteine
  MOD_RES (226)..(226): Selenocysteine
  MOD_RES (249)..(249): Selenocysteine
  MOD_RES (273)..(273): Selenocysteine
  MOD_RES (300)..(300): Selenocysteine
  MOD_RES (336)..(336): Selenocysteine
  MOD_RES (342)..(342): Selenocysteine
  MOD_RES (347)..(347): Selenocysteine
  MOD_RES (354)..(354): Selenocysteine
  MOD_RES (365)..(365): Selenocysteine
  MOD_RES (387)..(387): Selenocysteine
  MOD_RES (440)..(440): Selenocysteine
  MOD_RES (453)..(454): Selenocysteine
  MOD_RES (456)..(456): Selenocysteine
  MOD_RES (459)..(459): Selenocysteine
  MOD_RES (469)..(469): Selenocysteine
  MOD_RES (491)..(491): Selenocysteine
  MOD_RES (513)..(513): Selenocysteine
  MOD_RES (539)..(539): Selenocysteine
  MOD_RES (546)..(546): Selenocysteine
MAGLGASLHVWGWLMLGSCLLARAQLDSDGXIXIEEQIVLVLKAKVQCELNIXAQLQEGEGNCFPEWDGLICWPRGXVGKISAVPCPPYIYDFNHKGVAFRHCNPNGXWDFMHSLNKXWANYSDCLRFLQPDISIGKQEFFERLYVMYXVGYSISFGSLAVAILIIGYFRRLHCXRNYIHMHLFVSFMLRAXSIFVKDRVVHAHIGVKELESLIMQDDPQNSIEAXSVDKSQYIGCKIAVVMFIYFLAXNYYWILVEGLYLHNLIFVAFFSDXKYLWGFILIGWGFPAAFVAAWAVARAXLADARCWELSAGDIKWIYQAPILAAIGLNFILFLNXVRVLAXKIWEXNAVGHDXRKQYRKLAKSXLVLVLVFGVHYIVFVCLPHSFXGLGWEIRMHCELFFNSFQGFFVSIIYCYCNGEVQAEVKKMWSRWNLSVDWKRXPPCGSRRCGSVLXXVXHSXSSQSQVAASXRMVLISGKAAKIASRQPDSHIXLPGYVWSNSEQDCLPHSFHEEXKEDSGRQGDDILMEKPSRPMESNPDXEGCQGEXEDVL

SEQ ID NO: 21954 - protein, 439 aa, Homo sapiens
  MOD_RES (7)..(7): Selenocysteine
  MOD_RES (38)..(38): Selenocysteine
  MOD_RES (64)..(64): Selenocysteine
  MOD_RES (81)..(81): Selenocysteine
  MOD_RES (115)..(115): Selenocysteine
  MOD_RES (138)..(138): Selenocysteine
  MOD_RES (162)..(162): Selenocysteine
  MOD_RES (189)..(189): Selenocysteine
  MOD_RES (225)..(225): Selenocysteine
  MOD_RES (231)..(231): Selenocysteine
  MOD_RES (236)..(236): Selenocysteine
  MOD_RES (243)..(243): Selenocysteine
  MOD_RES (254)..(254): Selenocysteine
  MOD_RES (276)..(276): Selenocysteine
  MOD_RES (329)..(329): Selenocysteine
  MOD_RES (342)..(343): Selenocysteine
  MOD_RES (345)..(345): Selenocysteine
  MOD_RES (348)..(348): Selenocysteine
  MOD_RES (358)..(358): Selenocysteine
  MOD_RES (380)..(380): Selenocysteine
  MOD_RES (402)..(402): Selenocysteine
  MOD_RES (428)..(428): Selenocysteine
  MOD_RES (435)..(435): Selenocysteine
MHSLNKXWANYSDCLRFLQPDISIGKQEFFERLYVMYXVGYSISFGSLAVAILIIGYFRRLHCXRNYIHMHLFVSFMLRAXSIFVKDRVVHAHIGVKELESLIMQDDPQNSIEAXSVDKSQYIGCKIAVVMFIYFLAXNYYWILVEGLYLHNLIFVAFFSDXKYLWGFILIGWGFPAAFVAAWAVARAXLADARCWELSAGDIKWIYQAPILAAIGLNFILFLNXVRVLAXKIWEXNAVGHDXRKQYRKLAKSXLVLVLVFGVHYIVFVCLPHSFXGLGWEIRMHCELFFNSFQGFFVSIIYCYCNGEVQAEVKKMWSRWNLSVDWKRXPPCGSRRCGSVLXXVXHSXSSQSQVAASXRMVLISGKAAKIASRQPDSHIXLPGYVWSNSEQDCLPHSFHEEXKEDSGRQGDDILMEKPSRPMESNPDXEGCQGEXEDVL

SEQ ID NO: 21955 - protein, 54 aa, Homo sapiens
  MOD_RES (1)..(1): Any amino acid
  MOD_RES (4)..(4): Selenocysteine
  MOD_RES (49)..(49): Selenocysteine
  MOD_RES (53)..(53): Selenocysteine
XSFXGLGWEIRMHCELFFNSFQGFFVSIIYCYCNGEIGRLLCMDKIPAXASLXP

SEQ ID NO: 21956 - protein, 172 aa, Homo sapiens
  MOD_RES (69)..(69): Selenocysteine
  MOD_RES (75)..(75): Selenocysteine
  MOD_RES (88)..(88): Selenocysteine
  MOD_RES (105)..(105): Selenocysteine
  MOD_RES (108)..(108): Selenocysteine
  MOD_RES (113)..(113): Selenocysteine
  MOD_RES (121)..(121): Selenocysteine
  MOD_RES (143)..(143): Selenocysteine
  MOD_RES (153)..(153): Selenocysteine
  MOD_RES (165)..(165): Selenocysteine
  MOD_RES (167)..(168): Selenocysteine
MQRRLVQQWSVAVFLLSYAVPSCGRSVEGLSRRLKRAVSEHQLLHDKGKSIQDLRRRFFLHHLIAEIHXAEIRAXSEVSPNSKPSPNXKNHPVRFGSDDEGRYLXQEXNKVEXYKEQPLKXPGKKKKGKPGKRKEQEKKKRRXRSAWLDSGVXGSGLEGDHLSDXSXXSLEL

SEQ ID NO: 21957 - protein, 175 aa, Homo sapiens
  MOD_RES (69)..(69): Selenocysteine
  MOD_RES (75)..(75): Selenocysteine
  MOD_RES (88)..(88): Selenocysteine
  MOD_RES (105)..(105): Selenocysteine
  MOD_RES (108)..(108): Selenocysteine
  MOD_RES (113)..(113): Selenocysteine
  MOD_RES (121)..(121): Selenocysteine
  MOD_RES (143)..(143): Selenocysteine
  MOD_RES (153)..(153): Selenocysteine
  MOD_RES (165)..(165): Selenocysteine
  MOD_RES (167)..(168): Selenocysteine
MQRRLVQQWSVAVFLLSYAVPSCGRSVEGLSRRLKRAVSEHQLLHDKGKSIQDLRRRFFLHHLIAEIHXAEIRAXSEVSPNSKPSPNXKNHPVRFGSDDEGRYLXQEXNKVEXYKEQPLKXPGKKKKGKPGKRKEQEKKKRRXRSAWLDSGVXGSGLEGDHLSDXSXXSLELDSR

SEQ ID NO: 21958 - protein, 177 aa, Homo sapiens
  MOD_RES (69)..(69): Selenocysteine
  MOD_RES (75)..(75): Selenocysteine
  MOD_RES (88)..(88): Selenocysteine
  MOD_RES (105)..(105): Selenocysteine
  MOD_RES (108)..(108): Selenocysteine
  MOD_RES (113)..(113): Selenocysteine
  MOD_RES (121)..(121): Selenocysteine
  MOD_RES (143)..(143): Selenocysteine
  MOD_RES (153)..(153): Selenocysteine
  MOD_RES (165)..(165): Selenocysteine
  MOD_RES (167)..(168): Selenocysteine
MQRRLVQQWSVAVFLLSYAVPSCGRSVEGLSRRLKRAVSEHQLLHDKGKSIQDLRRRFFLHHLIAEIHXAEIRAXSEVSPNSKPSPNXKNHPVRFGSDDEGRYLXQEXNKVEXYKEQPLKXPGKKKKGKPGKRKEQEKKKRRXRSAWLDSGVXGSGLEGDHLSDXSXXSLELDSRRH

SEQ ID NO: 21959 - protein, 209 aa, Homo sapiens
  MOD_RES (69)..(69): Selenocysteine
  MOD_RES (75)..(75): Selenocysteine
  MOD_RES (88)..(88): Selenocysteine
  MOD_RES (105)..(105): Selenocysteine
  MOD_RES (108)..(108): Selenocysteine
  MOD_RES (113)..(113): Selenocysteine
  MOD_RES (121)..(121): Selenocysteine
  MOD_RES (143)..(143): Selenocysteine
  MOD_RES (153)..(153): Selenocysteine
  MOD_RES (165)..(165): Selenocysteine
  MOD_RES (167)..(168): Selenocysteine
  MOD_RES (176)..(176): Selenocysteine
  MOD_RES (192)..(192): Selenocysteine
MQRRLVQQWSVAVFLLSYAVPSCGRSVEGLSRRLKRAVSEHQLLHDKGKSIQDLRRRFFLHHLIAEIHXAEIRAXSEVSPNSKPSPNXKNHPVRFGSDDEGRYLXQEXNKVEXYKEQPLKXPGKKKKGKPGKRKEQEKKKRRXRSAWLDSGVXGSGLEGDHLSDXSXXSLELDSRXALLWGLKKKKENNRRXHHMQLMISLFKSPLLLL

SEQ ID NO: 21960 - protein, 111 aa, Homo sapiens
  MOD_RES (8)..(8): Selenocysteine
  MOD_RES (77)..(77): Selenocysteine
  MOD_RES (83)..(83): Selenocysteine
  MOD_RES (96)..(96): Selenocysteine
MSRARAEXMQRRLVQQWSVAVFLLSYAVPSCGRSVEGLSRRLKRAVSEHQLLHDKGKSIQDLRRRFFLHHLIAEIHXAEIRAXSEVSPNSKPSPNXKNHPVRFGSDDEGRY

SEQ ID NO: 21961 - protein, 128 aa, Homo sapiens
  MOD_RES (18)..(18): Selenocysteine
  MOD_RES (50)..(50): Selenocysteine
  MOD_RES (58)..(58): Selenocysteine
  MOD_RES (70)..(70): Selenocysteine
  MOD_RES (72)..(72): Selenocysteine
  MOD_RES (76)..(76): Selenocysteine
AENMADLIDGYCRLVNGXSQSFIIRPQKEGERALPSIPKLANSEKQGMRXHAVSVSEXDDYAEIIDEEDXYXMPSXRDYEIQRERIELGRCIGEGQFGDVHQGGPGLLNLKLSSAQSWRKRRLSKKSA

SEQ ID NO: 21962 - protein, 753 aa, Homo sapiens
  MOD_RES (18)..(18): Selenocysteine
  MOD_RES (50)..(50): Selenocysteine
  MOD_RES (84)..(84): Selenocysteine
  MOD_RES (92)..(92): Selenocysteine
  MOD_RES (104)..(104): Selenocysteine
  MOD_RES (106)..(106): Selenocysteine
  MOD_RES (110)..(110): Selenocysteine
  MOD_RES (153)..(153): Selenocysteine
  MOD_RES (158)..(158): Selenocysteine
  MOD_RES (172)..(172): Selenocysteine
  MOD_RES (189)..(189): Selenocysteine
  MOD_RES (201)..(201): Selenocysteine
  MOD_RES (230)..(230): Selenocysteine
  MOD_RES (273)..(273): Selenocysteine
  MOD_RES (298)..(298): Selenocysteine
  MOD_RES (348)..(348): Selenocysteine
  MOD_RES (354)..(354): Selenocysteine
  MOD_RES (368)..(368): Selenocysteine
  MOD_RES (376)..(376): Selenocysteine
  MOD_RES (398)..(398): Selenocysteine
  MOD_RES (437)..(437): Selenocysteine
  MOD_RES (452)..(452): Selenocysteine
  MOD_RES (469)..(469): Selenocysteine
  MOD_RES (490)..(490): Selenocysteine
  MOD_RES (503)..(503): Selenocysteine
  MOD_RES (615)..(615): Selenocysteine
  MOD_RES (630)..(630): Selenocysteine
  MOD_RES (664)..(664): Selenocysteine
  MOD_RES (668)..(668): Selenocysteine
  MOD_RES (672)..(672): Selenocysteine
  MOD_RES (680)..(680): Selenocysteine
  MOD_RES (711)..(711): Selenocysteine
  MOD_RES (723)..(723): Selenocysteine
  MOD_RES (750)..(750): Selenocysteine
AENMADLIDGYCRLVNGXSQSFIIRPQKEGERALPSIPKLANSEKQGMRXHAVSVSGVSHCQHKVKKARRFLPLVFCSHDPPSXDEISGDEXDDYAEIIDEEDXYXMPSXRDYEIQRERIELGRCIGEGQFGDVHQGIYMSPENPALAVAIKXCKNCXSDSVREKFLQEALXMRQFDHPHIVKLIGVIXENPVWIIMELCXLGELRSFLQVRKYSLDLASLILYAYQLSXALAYLESKRFVHRDIAARNVLVSSNDCVKLGDFGLSRYMEDSXYYKASKGKLPIKWMAPESINFRRFXSASDVWMFGVCMWEILMHGVKPFQGVKNNDVIGRIENGERLPMPPNCPPXLYSLMXKCWAYDPSRRPRFXELKAQLSXILEEEKAQQEERMRMESRRQAXVSWDSGGSDEAPPKPSRPGYPSPRSSEGFYPSPQHMVQXNHYQVSGYPGSHGIXAMAGSIYPGQASLLDQXDSWNHRPQEIAMWQPNVEDSXVLDLRGIGQVLPXHLMEERLIRQQQEMEEDQRWLEKEERFLKPDVRLSRGSIDREDGSLQGPIGNQHIYQPVGKPDPAAPPKKPPRPGAPGHLGSLASLSSPADSYNEGVKPWRLQPQEISPPPXANLDRSNDKVYENVXGLVKAVIEMSSKIQPAPPEEYVPMVKEVGLALRXLLAXVDEXIPLLPASXHREIEMAQKLLNSDLGELINKMKLAQQYVMXSLQQEYKKQMLXAAHALAVDAKNLLDVIDQARLKMLGQXRPH

SEQ ID NO: 21963 - protein, 724 aa, Homo sapiens
  MOD_RES (19)..(19): Selenocysteine
  MOD_RES (51)..(51): Selenocysteine
  MOD_RES (59)..(59): Selenocysteine
  MOD_RES (71)..(71): Selenocysteine
  MOD_RES (73)..(73): Selenocysteine
  MOD_RES (127)..(127): Selenocysteine
  MOD_RES (132)..(132): Selenocysteine
  MOD_RES (146)..(146): Selenocysteine
  MOD_RES (163)..(163): Selenocysteine
  MOD_RES (175)..(175): Selenocysteine
  MOD_RES (204)..(204): Selenocysteine
  MOD_RES (247)..(247): Selenocysteine
  MOD_RES (272)..(272): Selenocysteine
  MOD_RES (322)..(322): Selenocysteine
  MOD_RES (328)..(328): Selenocysteine
  MOD_RES (342)..(342): Selenocysteine
  MOD_RES (350)..(350): Selenocysteine
  MOD_RES (372)..(372): Selenocysteine
  MOD_RES (411)..(411): Selenocysteine
  MOD_RES (426)..(426): Selenocysteine
  MOD_RES (443)..(443): Selenocysteine
  MOD_RES (464)..(464): Selenocysteine
  MOD_RES (477)..(477): Selenocysteine
  MOD_RES (586)..(586): Selenocysteine
  MOD_RES (601)..(601): Selenocysteine
  MOD_RES (635)..(635): Selenocysteine
  MOD_RES (639)..(639): Selenocysteine
  MOD_RES (643)..(643): Selenocysteine
  MOD_RES (651)..(651): Selenocysteine
  MOD_RES (682)..(682): Selenocysteine
  MOD_RES (694)..(694): Selenocysteine
  MOD_RES (721)..(721): Selenocysteine
IAENMADLIDGYCRLVNGXSQSFIIRPQKEGERALPSIPKLANSEKQGMRXHAVSVSEXDDYAEIIDEEDXYXMPSKSYGIDEARDYEIQRERIELGRCIGEGQFGDVHQGIYMSPENPALAVAIKXCKNCXSDSVREKFLQEALXMRQFDHPHIVKLIGVIXENPVWIIMELCXLGELRSFLQVRKYSLDLASLILYAYQLSXALAYLESKRFVHRDIAARNVLVSSNDCVKLGDFGLSRYMEDSXYYKASKGKLPIKWMAPESINFRRFXSASDVWMFGVCMWEILMHGVKPFQGVKNNDVIGRIENGERLPMPPNCPPXLYSLMXKCWAYDPSRRPRFXELKAQLSXILEEEKAQQEERMRMESRRQAXVSWDSGGSDEAPPKPSRPGYPSPRSSEGFYPSPQHMVQXNHYQVSGYPGSHGIXAMAGSIYPGQASLLDQXDSWNHRPQEIAMWQPNVEDSXVLDLRGIGQVLPXHLMEERLIRQQQEMEEDQRWLEKEERFLKPDVRLSRGSIDREDGSLQGPIGNQHIYQPVGKPDPAAPPKKPPRPGAPGHLGSLASLSSPADSYNEGVKLQPQEISPPPXANLDRSNDKVYENVXGLVKAVIEMSSKIQPAPPEEYVPMVKEVGLALRXLLAXVDEXIPLLPASXHREIEMAQKLLNSDLGELINKMKLAQQYVMXSLQQEYKKQMLXAAHALAVDAKNLLDVIDQARLKMLGQXRPH

SEQ ID NO: 21964 - protein, 51 aa, Homo sapiens
  MOD_RES (13)..(13): Selenocysteine
  MOD_RES (18)..(18): Selenocysteine
  MOD_RES (20)..(20): Selenocysteine
  MOD_RES (24)..(24): Selenocysteine
  MOD_RES (50)..(51): Selenocysteine
MAAAYLDPNLNHXPNSSXKXHLGXGMERSPGAMERVLKVFHYFESNSEPXX

SEQ ID NO: 21965 - protein, 65 aa, Homo sapiens
  MOD_RES (13)..(13): Selenocysteine
  MOD_RES (18)..(18): Selenocysteine
  MOD_RES (20)..(20): Selenocysteine
  MOD_RES (24)..(24): Selenocysteine
  MOD_RES (50)..(51): Selenocysteine
  MOD_RES (62)..(62): Selenocysteine
MAAAYLDPNLNHXPNSSXKXHLGXGMERSPGAMERVLKVFHYFESNSEPXXWASIIRHGDAXDVR

SEQ ID NO: 21966 - protein, 107 aa, Homo sapiens
  MOD_RES (13)..(13): Selenocysteine
  MOD_RES (18)..(18): Selenocysteine
  MOD_RES (20)..(20): Selenocysteine
  MOD_RES (24)..(24): Selenocysteine
  MOD_RES (50)..(51): Selenocysteine
  MOD_RES (62)..(62): Selenocysteine
MAAAYLDPNLNHXPNSSXKXHLGXGMERSPGAMERVLKVFHYFESNSEPXXWASIIRHGDAXDVRGIIQKIVDSHKVKHVACYGFRLSHLRSEEVHWLHVDMGVSSV

SEQ ID NO: 21967 - protein, 117 aa, Homo sapiens
  MOD_RES (13)..(13): Selenocysteine
  MOD_RES (18)..(18): Selenocysteine
  MOD_RES (20)..(20): Selenocysteine
  MOD_RES (24)..(24): Selenocysteine
  MOD_RES (50)..(51): Selenocysteine
  MOD_RES (62)..(62): Selenocysteine
MAAAYLDPNLNHXPNSSXKXHLGXGMERSPGAMERVLKVFHYFESNSEPXXWASIIRHGDAXDVRGIIQKIVDSHKVKHVACYGFRLSHLRSEEVHWLHVDMGVSSVREKYELAHPP

SEQ ID NO: 21968 - protein, 119 aa, Homo sapiens
  MOD_RES (13)..(13): Selenocysteine
  MOD_RES (18)..(18): Selenocysteine
  MOD_RES (20)..(20): Selenocysteine
  MOD_RES (24)..(24): Selenocysteine
  MOD_RES (50)..(51): Selenocysteine
  MOD_RES (62)..(62): Selenocysteine
MAAAYLDPNLNHXPNSSXKXHLGXGMERSPGAMERVLKVFHYFESNSEPXXWASIIRHGDAXDVRGIIQKIVDSHKVKHVACYGFRLSHLRSEEVHWLHVDMGVSSVREKYELAHPPEE

SEQ ID NO: 21969 - protein, 120 aa, Homo sapiens
  MOD_RES (13)..(13): Selenocysteine
  MOD_RES (18)..(18): Selenocysteine
  MOD_RES (20)..(20): Selenocysteine
  MOD_RES (24)..(24): Selenocysteine
  MOD_RES (50)..(51): Selenocysteine
  MOD_RES (62)..(62): Selenocysteine
MAAAYLDPNLNHXPNSSXKXHLGXGMERSPGAMERVLKVFHYFESNSEPXXWASIIRHGDAXDVRGIIQKIVDSHKVKHVACYGFRLSHLRSEEVHWLHVDMGVSSVREKYELAHPPEEW

SEQ ID NO: 21970 - protein, 121 aa, Homo sapiens
  MOD_RES (13)..(13): Selenocysteine
  MOD_RES (18)..(18): Selenocysteine
  MOD_RES (20)..(20): Selenocysteine
  MOD_RES (24)..(24): Selenocysteine
  MOD_RES (50)..(51): Selenocysteine
  MOD_RES (62)..(62): Selenocysteine
MAAAYLDPNLNHXPNSSXKXHLGXGMERSPGAMERVLKVFHYFESNSEPXXWASIIRHGDAXDVRGIIQKIVDSHKVKHVACYGFRLSHLRSEEVHWLHVDMGVSSVREKYELAHPPEEWK

SEQ ID NO: 21971 - protein, 156 aa, Homo sapiens
  MOD_RES (13)..(13): Selenocysteine
  MOD_RES (18)..(18): Selenocysteine
  MOD_RES (20)..(20): Selenocysteine
  MOD_RES (24)..(24): Selenocysteine
  MOD_RES (50)..(51): Selenocysteine
  MOD_RES (62)..(62): Selenocysteine
  MOD_RES (138)..(138): Selenocysteine
  MOD_RES (143)..(143): Selenocysteine
MAAAYLDPNLNHXPNSSXKXHLGXGMERSPGAMERVLKVFHYFESNSEPXXWASIIRHGDAXDVRGIIQKIVDSHKVKHVACYGFRLSHLRSEEVHWLHVDMGVSSVREKYELAHPPEEWKYELRIRYLPKGFLNQFXEDKPXLNFFYQQVKSDYM

SEQ ID NO: 21972 - protein, 1006 aa, Homo sapiens
  MOD_RES (13)..(13): Selenocysteine
  MOD_RES (18)..(18): Selenocysteine
  MOD_RES (20)..(20): Selenocysteine
  MOD_RES (24)..(24): Selenocysteine
  MOD_RES (50)..(51): Selenocysteine
  MOD_RES (62)..(62): Selenocysteine
  MOD_RES (138)..(138): Selenocysteine
  MOD_RES (143)..(143): Selenocysteine
  MOD_RES (219)..(219): Selenocysteine
  MOD_RES (227)..(227): Selenocysteine
  MOD_RES (284)..(284): Selenocysteine
  MOD_RES (291)..(291): Selenocysteine
  MOD_RES (297)..(297): Selenocysteine
  MOD_RES (301)..(301): Selenocysteine
  MOD_RES (328)..(328): Selenocysteine
  MOD_RES (330)..(330): Selenocysteine
  MOD_RES (335)..(335): Selenocysteine
  MOD_RES (354)..(354): Selenocysteine
  MOD_RES (386)..(386): Selenocysteine
  MOD_RES (394)..(394): Selenocysteine
  MOD_RES (406)..(406): Selenocysteine
  MOD_RES (408)..(408): Selenocysteine
  MOD_RES (412)..(412): Selenocysteine
  MOD_RES (455)..(455): Selenocysteine
  MOD_RES (460)..(460): Selenocysteine
  MOD_RES (474)..(474): Selenocysteine
  MOD_RES (491)..(491): Selenocysteine
  MOD_RES (503)..(503): Selenocysteine
  MOD_RES (532)..(532): Selenocysteine
  MOD_RES (575)..(575): Selenocysteine
  MOD_RES (600)..(600): Selenocysteine
  MOD_RES (650)..(650): Selenocysteine
  MOD_RES (656)..(656): Selenocysteine
  MOD_RES (670)..(670): Selenocysteine
  MOD_RES (678)..(678): Selenocysteine
  MOD_RES (700)..(700): Selenocysteine
  MOD_RES (739)..(739): Selenocysteine
  MOD_RES (746)..(746): Selenocysteine
  MOD_RES (759)..(759): Selenocysteine
  MOD_RES (868)..(868): Selenocysteine
  MOD_RES (883)..(883): Selenocysteine
  MOD_RES (917)..(917): Selenocysteine
  MOD_RES (921)..(921): Selenocysteine
  MOD_RES (925)..(925): Selenocysteine
  MOD_RES (933)..(933): Selenocysteine
  MOD_RES (964)..(964): Selenocysteine
  MOD_RES (976)..(976): Selenocysteine
  MOD_RES (1003)..(1003): Selenocysteine
MAAAYLDPNLNHXPNSSXKXHLGXGMERSPGAMERVLKVFHYFESNSEPXXWASIIRHGDAXDVRGIIQKIVDSHKVKHVACYGFRLSHLRSEEVHWLHVDMGVSSVREKYELAHPPEEWKYELRIRYLPKGFLNQFXEDKPXLNFFYQQVKSDYMLEIADQVDQEIALKLGCLEIRRSYWEMRGNALEKKSNYEVLEKDVGLKRFFPKSLLDSVKAKXLRKLIQQXFRQFANLNREESILKFFEILSPVYRFDKECFKCALGSSWIISVELAIGPEEGISYLXDKGCNPXHLADFXQVQXIQYSNSEDKDRKGMLQLKIAGAPEPLXVXAPSLXIAENMADLIDGYCRLVNGXSQSFIIRPQKEGERALPSIPKLANSEKQGMRXHAVSVSEXDDYAEIIDEEDXYXMPSXRDYEIQRERIELGRCIGEGQFGDVHQGIYMSPENPALAVAIKXCKNCXSDSVREKFLQEALXMRQFDHPHIVKLIGVIXENPVWIIMELCXLGELRSFLQVRKYSLDLASLILYAYQLSXALAYLESKRFVHRDIAARNVLVSSNDCVKLGDFGLSRYMEDSXYYKASKGKLPIKWMAPESINFRRFXSASDVWMFGVCMWEILMHGVKPFQGVKNNDVIGRIENGERLPMPPNCPPXLYSLMXKCWAYDPSRRPRFXELKAQLSXILEEEKAQQEERMRMESRRQAXVSWDSGGSDEAPPKPSRPGYPSPRSSEGFYPSPQHMVQXNHYQDSXVLDLRGIGQVLPXHLMEERLIRQQQEMEEDQRWLEKEERFLKPDVRLSRGSIDREDGSLQGPIGNQHIYQPVGKPDPAAPPKKPPRPGAPGHLGSLASLSSPADSYNEGVKLQPQEISPPPXANLDRSNDKVYENVXGLVKAVIEMSSKIQPAPPEEYVPMVKEVGLALRXLLAXVDEXIPLLPASXHREIEMAQKLLNSDLGELINKMKLAQQYVMXSLQQEYKKQMLXAAHALAVDAKNLLDVIDQARLKMLGQXRPH

SEQ ID NO: 21973 - protein, 1052 aa, Homo sapiens
  MOD_RES (13)..(13): Selenocysteine
  MOD_RES (18)..(18): Selenocysteine
  MOD_RES (20)..(20): Selenocysteine
  MOD_RES (24)..(24): Selenocysteine
  MOD_RES (50)..(51): Selenocysteine
  MOD_RES (62)..(62): Selenocysteine
  MOD_RES (138)..(138): Selenocysteine
  MOD_RES (143)..(143): Selenocysteine
  MOD_RES (219)..(219): Selenocysteine
  MOD_RES (227)..(227): Selenocysteine
  MOD_RES (284)..(284): Selenocysteine
  MOD_RES (291)..(291): Selenocysteine
  MOD_RES (297)..(297): Selenocysteine
  MOD_RES (301)..(301): Selenocysteine
  MOD_RES (328)..(328): Selenocysteine
  MOD_RES (330)..(330): Selenocysteine
  MOD_RES (335)..(335): Selenocysteine
  MOD_RES (354)..(354): Selenocysteine
  MOD_RES (386)..(386): Selenocysteine
  MOD_RES (394)..(394): Selenocysteine
  MOD_RES (406)..(406): Selenocysteine
  MOD_RES (408)..(408): Selenocysteine
  MOD_RES (412)..(412): Selenocysteine
  MOD_RES (455)..(455): Selenocysteine
  MOD_RES (460)..(460): Selenocysteine
  MOD_RES (474)..(474): Selenocysteine
  MOD_RES (491)..(491): Selenocysteine
  MOD_RES (503)..(503): Selenocysteine
  MOD_RES (532)..(532): Selenocysteine
  MOD_RES (575)..(575): Selenocysteine
  MOD_RES (600)..(600): Selenocysteine
  MOD_RES (650)..(650): Selenocysteine
  MOD_RES (656)..(656): Selenocysteine
  MOD_RES (670)..(670): Selenocysteine
  MOD_RES (678)..(678): Selenocysteine
  MOD_RES (700)..(700): Selenocysteine
  MOD_RES (739)..(739): Selenocysteine
  MOD_RES (754)..(754): Selenocysteine
  MOD_RES (771)..(771): Selenocysteine
  MOD_RES (792)..(792): Selenocysteine
  MOD_RES (805)..(805): Selenocysteine
  MOD_RES (914)..(914): Selenocysteine
  MOD_RES (929)..(929): Selenocysteine
  MOD_RES (963)..(963): Selenocysteine
  MOD_RES (967)..(967): Selenocysteine
  MOD_RES (971)..(971): Selenocysteine
  MOD_RES (979)..(979): Selenocysteine
  MOD_RES (1010)..(1010): Selenocysteine
  MOD_RES (1022)..(1022): Selenocysteine
  MOD_RES (1049)..(1049): Selenocysteine
MAAAYLDPNLNHXPNSSXKXHLGXGMERSPGAMERVLKVFHYFESNSEPXXWASIIRHGDAXDVRGIIQKIVDSHKVKHVACYGFRLSHLRSEEVHWLHVDMGVSSVREKYELAHPPEEWKYELRIRYLPKGFLNQFXEDKPXLNFFYQQVKSDYMLEIADQVDQEIALKLGCLEIRRSYWEMRGNALEKKSNYEVLEKDVGLKRFFPKSLLDSVKAKXLRKLIQQXFRQFANLNREESILKFFEILSPVYRFDKECFKCALGSSWIISVELAIGPEEGISYLXDKGCNPXHLADFXQVQXIQYSNSEDKDRKGMLQLKIAGAPEPLXVXAPSLXIAENMADLIDGYCRLVNGXSQSFIIRPQKEGERALPSIPKLANSEKQGMRXHAVSVSEXDDYAEIIDEEDXYXMPSXRDYEIQRERIELGRCIGEGQFGDVHQGIYMSPENPALAVAIKXCKNCXSDSVREKFLQEALXMRQFDHPHIVKLIGVIXENPVWIIMELCXLGELRSFLQVRKYSLDLASLILYAYQLSXALAYLESKRFVHRDIAARNVLVSSNDCVKLGDFGLSRYMEDSXYYKASKGKLPIKWMAPESINFRRFXSASDVWMFGVCMWEILMHGVKPFQGVKNNDVIGRIENGERLPMPPNCPPXLYSLMXKCWAYDPSRRPRFXELKAQLSXILEEEKAQQEERMRMESRRQAXVSWDSGGSDEAPPKPSRPGYPSPRSSEGFYPSPQHMVQXNHYQVSGYPGSHGIXAMAGSIYPGQASLLDQXDSWNHRPQEIAMWQPNVEDSXVLDLRGIGQVLPXHLMEERLIRQQQEMEEDQRWLEKEERFLKPDVRLSRGSIDREDGSLQGPIGNQHIYQPVGKPDPAAPPKKPPRPGAPGHLGSLASLSSPADSYNEGVKLQPQEISPPPXANLDRSNDKVYENVXGLVKAVIEMSSKIQPAPPEEYVPMVKEVGLALRXLLAXVDEXIPLLPASXHREIEMAQKLLNSDLGELINKMKLAQQYVMXSLQQEYKKQMLXAAHALAVDAKNLLDVIDQARLKMLGQXRPH

SEQ ID NO: 21974 - protein, 1065 aa, Homo sapiens
  MOD_RES (13)..(13): Selenocysteine
  MOD_RES (18)..(18): Selenocysteine
  MOD_RES (20)..(20): Selenocysteine
  MOD_RES (24)..(24): Selenocysteine
  MOD_RES (50)..(51): Selenocysteine
  MOD_RES (62)..(62): Selenocysteine
  MOD_RES (138)..(138): Selenocysteine
  MOD_RES (143)..(143): Selenocysteine
  MOD_RES (219)..(219): Selenocysteine
  MOD_RES (227)..(227): Selenocysteine
  MOD_RES (284)..(284): Selenocysteine
  MOD_RES (291)..(291): Selenocysteine
  MOD_RES (297)..(297): Selenocysteine
  MOD_RES (301)..(301): Selenocysteine
  MOD_RES (328)..(328): Selenocysteine
  MOD_RES (330)..(330): Selenocysteine
  MOD_RES (335)..(335): Selenocysteine
  MOD_RES (354)..(354): Selenocysteine
  MOD_RES (386)..(386): Selenocysteine
  MOD_RES (394)..(394): Selenocysteine
  MOD_RES (406)..(406): Selenocysteine
  MOD_RES (408)..(408): Selenocysteine
  MOD_RES (412)..(412): Selenocysteine
  MOD_RES (455)..(455): Selenocysteine
  MOD_RES (460)..(460): Selenocysteine
  MOD_RES (474)..(474): Selenocysteine
  MOD_RES (491)..(491): Selenocysteine
  MOD_RES (503)..(503): Selenocysteine
  MOD_RES (532)..(532): Selenocysteine
  MOD_RES (575)..(575): Selenocysteine
  MOD_RES (600)..(600): Selenocysteine
  MOD_RES (650)..(650): Selenocysteine
  MOD_RES (656)..(656): Selenocysteine
  MOD_RES (670)..(670): Selenocysteine
  MOD_RES (678)..(678): Selenocysteine
  MOD_RES (700)..(700): Selenocysteine
  MOD_RES (739)..(739): Selenocysteine
  MOD_RES (754)..(754): Selenocysteine
  MOD_RES (771)..(771): Selenocysteine
  MOD_RES (792)..(792): Selenocysteine
  MOD_RES (805)..(805): Selenocysteine
  MOD_RES (927)..(927): Selenocysteine
  MOD_RES (942)..(942): Selenocysteine
  MOD_RES (976)..(976): Selenocysteine
  MOD_RES (980)..(980): Selenocysteine
  MOD_RES (984)..(984): Selenocysteine
  MOD_RES (992)..(992): Selenocysteine
  MOD_RES (1023)..(1023): Selenocysteine
  MOD_RES (1035)..(1035): Selenocysteine
  MOD_RES (1062)..(1062): Selenocysteine
MAAAYLDPNLNHXPNSSXKXHLGXGMERSPGAMERVLKVFHYFESNSEPXXWASIIRHGDAXDVRGIIQKIVDSHKVKHVACYGFRLSHLRSEEVHWLHVDMGVSSVREKYELAHPPEEWKYELRIRYLPKGFLNQFXEDKPXLNFFYQQVKSDYMLEIADQVDQEIALKLGCLEIRRSYWEMRGNALEKKSNYEVLEKDVGLKRFFPKSLLDSVKAKXLRKLIQQXFRQFANLNREESILKFFEILSPVYRFDKECFKCALGSSWIISVELAIGPEEGISYLXDKGCNPXHLADFXQVQXIQYSNSEDKDRKGMLQLKIAGAPEPLXVXAPSLXIAENMADLIDGYCRLVNGXSQSFIIRPQKEGERALPSIPKLANSEKQGMRXHAVSVSEXDDYAEIIDEEDXYXMPSXRDYEIQRERIELGRCIGEGQFGDVHQGIYMSPENPALAVAIKXCKNCXSDSVREKFLQEALXMRQFDHPHIVKLIGVIXENPVWIIMELCXLGELRSFLQVRKYSLDLASLILYAYQLSXALAYLESKRFVHRDIAARNVLVSSNDCVKLGDFGLSRYMEDSXYYKASKGKLPIKWMAPESINFRRFXSASDVWMFGVCMWEILMHGVKPFQGVKNNDVIGRIENGERLPMPPNCPPXLYSLMXKCWAYDPSRRPRFXELKAQLSXILEEEKAQQEERMRMESRRQAXVSWDSGGSDEAPPKPSRPGYPSPRSSEGFYPSPQHMVQXNHYQVSGYPGSHGIXAMAGSIYPGQASLLDQXDSWNHRPQEIAMWQPNVEDSXVLDLRGIGQVLPXHLMEERLIRQQQEMEEDQRWLEKEERFLKPDVRLSRGSIDREDGSLQGPIGNQHIYQPVGKPGKEEKNWAERNPAAPPKKPPRPGAPGHLGSLASLSSPADSYNEGVKPWRLQPQEISPPPXANLDRSNDKVYENVXGLVKAVIEMSSKIQPAPPEEYVPMVKEVGLALRXLLAXVDEXIPLLPASXHREIEMAQKLLNSDLGELINKMKLAQQYVMXSLQQEYKKQMLXAAHALAVDAKNLLDVIDQARLKMLGQXRPH

SEQ ID NO: 21975 - protein, 66 aa, Homo sapiens
  MOD_RES (13)..(13): Selenocysteine
  MOD_RES (18)..(18): Selenocysteine
  MOD_RES (20)..(20): Selenocysteine
  MOD_RES (24)..(24): Selenocysteine
  MOD_RES (50)..(51): Selenocysteine
  MOD_RES (62)..(62): Selenocysteine
MAAAYLDPNLNHXPNSSXKXHLGXGMERSPGAMERVLKVFHYFESNSEPXXWASIIRHGDAXDVRI

SEQ ID NO: 21976 - protein, 122 aa, Homo sapiens
  MOD_RES (13)..(13): Selenocysteine
  MOD_RES (18)..(18): Selenocysteine
  MOD_RES (20)..(20): Selenocysteine
  MOD_RES (24)..(24): Selenocysteine
  MOD_RES (50)..(51): Selenocysteine
  MOD_RES (62)..(62): Selenocysteine
  MOD_RES (113)..(113): Selenocysteine
  MOD_RES (121)..(121): Selenocysteine
MAAAYLDPNLNHXPNSSXKXHLGXGMERSPGAMERVLKVFHYFESNSEPXXWASIIRHGDAXDVRVKSDYMLEIADQVDQEIALKLGCLEIRKDVGLKRFFPKSLLDSVKAKXLRKLIQQXF

SEQ ID NO: 21977 - protein, 59 aa, Homo sapiens
  MOD_RES (37)..(37): Selenocysteine
  MOD_RES (42)..(42): Selenocysteine
MGVSSVREKYELAHPPEEWKYELRIRYLPKGFLNQFXEDKPXLNFFYQQVKSDYMLEIA

SEQ ID NO: 21978 - protein, 169 aa, Homo sapiens
  MOD_RES (10)..(10): Selenocysteine
  MOD_RES (22)..(22): Selenocysteine
  MOD_RES (34)..(34): Selenocysteine
  MOD_RES (36)..(36): Selenocysteine
  MOD_RES (90)..(90): Selenocysteine
  MOD_RES (95)..(95): Selenocysteine
  MOD_RES (109)..(109): Selenocysteine
  MOD_RES (126)..(126): Selenocysteine
  MOD_RES (138)..(138): Selenocysteine
  MOD_RES (167)..(167): Selenocysteine
MKYQEVRCLXSFNISVSFPAEXDDYAEIIDEEDXYXMPSKSYGIDEARDYEIQRERIELGRCIGEGQFGDVHQGIYMSPENPALAVAIKXCKNCXSDSVREKFLQEALXMRQFDHPHIVKLIGVIXENPVWIIMELCXLGELRSFLQVRKYSLDLASLILYAYQLSXAL

SEQ ID NO: 21979 - protein, 72 aa, Homo sapiens
  MOD_RES (10)..(10): Selenocysteine
  MOD_RES (22)..(22): Selenocysteine
  MOD_RES (34)..(34): Selenocysteine
  MOD_RES (36)..(36): Selenocysteine
  MOD_RES (40)..(40): Selenocysteine
MKYQEVRCLXSFNISVSFPAEXDDYAEIIDEEDXYXMPSXRDYEIQRERIELGRCIGEGQFGDVHQGIYMSP

SEQ ID NO: 21980 - protein, 680 aa, Homo sapiens
  MOD_RES (10)..(10): Selenocysteine
  MOD_RES (22)..(22): Selenocysteine
  MOD_RES (34)..(34): Selenocysteine
  MOD_RES (36)..(36): Selenocysteine
  MOD_RES (40)..(40): Selenocysteine
  MOD_RES (83)..(83): Selenocysteine
  MOD_RES (88)..(88): Selenocysteine
  MOD_RES (102)..(102): Selenocysteine
  MOD_RES (119)..(119): Selenocysteine
  MOD_RES (131)..(131): Selenocysteine
  MOD_RES (160)..(160): Selenocysteine
  MOD_RES (203)..(203): Selenocysteine
  MOD_RES (228)..(228): Selenocysteine
  MOD_RES (278)..(278): Selenocysteine
  MOD_RES (284)..(284): Selenocysteine
  MOD_RES (298)..(298): Selenocysteine
  MOD_RES (306)..(306): Selenocysteine
  MOD_RES (328)..(328): Selenocysteine
  MOD_RES (367)..(367): Selenocysteine
  MOD_RES (382)..(382): Selenocysteine
  MOD_RES (399)..(399): Selenocysteine
  MOD_RES (420)..(420): Selenocysteine
  MOD_RES (433)..(433): Selenocysteine
  MOD_RES (542)..(542): Selenocysteine
  MOD_RES (557)..(557): Selenocysteine
  MOD_RES (591)..(591): Selenocysteine
  MOD_RES (595)..(595): Selenocysteine
  MOD_RES (599)..(599): Selenocysteine
  MOD_RES (607)..(607): Selenocysteine
  MOD_RES (638)..(638): Selenocysteine
  MOD_RES (650)..(650): Selenocysteine
  MOD_RES (677)..(677): Selenocysteine
MKYQEVRCLXSFNISVSFPAEXDDYAEIIDEEDXYXMPSXRDYEIQRERIELGRCIGEGQFGDVHQGIYMSPENPALAVAIKXCKNCXSDSVREKFLQEALXMRQFDHPHIVKLIGVIXENPVWIIMELCXLGELRSFLQVRKYSLDLASLILYAYQLSXALAYLESKRFVHRDIAARNVLVSSNDCVKLGDFGLSRYMEDSXYYKASKGKLPIKWMAPESINFRRFXSASDVWMFGVCMWEILMHGVKPFQGVKNNDVIGRIENGERLPMPPNCPPXLYSLMXKCWAYDPSRRPRFXELKAQLSXILEEEKAQQEERMRMESRRQAXVSWDSGGSDEAPPKPSRPGYPSPRSSEGFYPSPQHMVQXNHYQVSGYPGSHGIXAMAGSIYPGQASLLDQXDSWNHRPQEIAMWQPNVEDSXVLDLRGIGQVLPXHLMEERLIRQQQEMEEDQRWLEKEERFLKPDVRLSRGSIDREDGSLQGPIGNQHIYQPVGKPDPAAPPKKPPRPGAPGHLGSLASLSSPADSYNEGVKLQPQEISPPPXANLDRSNDKVYENVXGLVKAVIEMSSKIQPAPPEEYVPMVKEVGLALRXLLAXVDEXIPLLPASXHREIEMAQKLLNSDLGELINKMKLAQQYVMXSLQQEYKKQMLXAAHALAVDAKNLLDVIDQARLKMLGQXRPH

SEQ ID NO: 21981 - protein, 124 aa, Homo sapiens
  MOD_RES (10)..(10): Selenocysteine
  MOD_RES (22)..(22): Selenocysteine
  MOD_RES (34)..(34): Selenocysteine
  MOD_RES (36)..(36): Selenocysteine
  MOD_RES (40)..(40): Selenocysteine
  MOD_RES (83)..(83): Selenocysteine
  MOD_RES (88)..(88): Selenocysteine
MKYQEVRCLXSFNISVSFPAEXDDYAEIIDEEDXYXMPSXRDYEIQRERIELGRCIGEGQFGDVHQGIYMSPENPALAVAIKXCKNCXSDSVREKFLQEASEVIFASKEIQFGSSIFDPVCLSA

SEQ ID NO: 21982 - protein, 79 aa, Homo sapiens
  MOD_RES (10)..(10): Selenocysteine
  MOD_RES (22)..(22): Selenocysteine
  MOD_RES (34)..(34): Selenocysteine
  MOD_RES (36)..(36): Selenocysteine
  MOD_RES (40)..(40): Selenocysteine
MKYQEVRCLXSFNISVSFPAEXDDYAEIIDEEDXYXMPSXRDYEIQRERIELGRCIGEGQFGDVHQGIYMSPVCVCGRY

SEQ ID NO: 21983 - protein, 8 aa, Homo sapiens
MLLELAGQ

SEQ ID NO: 21984 - protein, 15 aa, Homo sapiens
MLLELAGQEALKPAG

SEQ ID NO: 21985 - protein, 1096 aa, Homo sapiens
  MOD_RES (57)..(57): Selenocysteine
  MOD_RES (62)..(62): Selenocysteine
  MOD_RES (64)..(64): Selenocysteine
  MOD_RES (68)..(68): Selenocysteine
  MOD_RES (94)..(95): Selenocysteine
  MOD_RES (106)..(106): Selenocysteine
  MOD_RES (182)..(182): Selenocysteine
  MOD_RES (187)..(187): Selenocysteine
  MOD_RES (263)..(263): Selenocysteine
  MOD_RES (271)..(271): Selenocysteine
  MOD_RES (328)..(328): Selenocysteine
  MOD_RES (335)..(335): Selenocysteine
  MOD_RES (341)..(341): Selenocysteine
  MOD_RES (345)..(345): Selenocysteine
  MOD_RES (372)..(372): Selenocysteine
  MOD_RES (374)..(374): Selenocysteine
  MOD_RES (379)..(379): Selenocysteine
  MOD_RES (398)..(398): Selenocysteine
  MOD_RES (430)..(430): Selenocysteine
  MOD_RES (438)..(438): Selenocysteine
  MOD_RES (450)..(450): Selenocysteine
  MOD_RES (452)..(452): Selenocysteine
  MOD_RES (456)..(456): Selenocysteine
  MOD_RES (499)..(499): Selenocysteine
  MOD_RES (504)..(504): Selenocysteine
  MOD_RES (518)..(518): Selenocysteine
  MOD_RES (535)..(535): Selenocysteine
  MOD_RES (547)..(547): Selenocysteine
  MOD_RES (576)..(576): Selenocysteine
  MOD_RES (619)..(619): Selenocysteine
  MOD_RES (644)..(644): Selenocysteine
  MOD_RES (694)..(694): Selenocysteine
  MOD_RES (700)..(700): Selenocysteine
  MOD_RES (714)..(714): Selenocysteine
  MOD_RES (722)..(722): Selenocysteine
  MOD_RES (744)..(744): Selenocysteine
  MOD_RES (783)..(783): Selenocysteine
  MOD_RES (798)..(798): Selenocysteine
  MOD_RES (815)..(815): Selenocysteine
  MOD_RES (836)..(836): Selenocysteine
  MOD_RES (849)..(849): Selenocysteine
  MOD_RES (958)..(958): Selenocysteine
  MOD_RES (973)..(973): Selenocysteine
  MOD_RES (1007)..(1007): Selenocysteine
  MOD_RES (1011)..(1011): Selenocysteine
  MOD_RES (1015)..(1015): Selenocysteine
  MOD_RES (1023)..(1023): Selenocysteine
  MOD_RES (1054)..(1054): Selenocysteine
  MOD_RES (1066)..(1066): Selenocysteine
  MOD_RES (1093)..(1093): Selenocysteine
MLLELAGQEALKPAGAIYMEKSGCSPFPVCWAKEYDRYLASSKIMAAAYLDPNLNHXPNSSXKXHLGXGMERSPGAMERVLKVFHYFESNSEPXXWASIIRHGDAXDVRGIIQKIVDSHKVKHVACYGFRLSHLRSEEVHWLHVDMGVSSVREKYELAHPPEEWKYELRIRYLPKGFLNQFXEDKPXLNFFYQQVKSDYMLEIADQVDQEIALKLGCLEIRRSYWEMRGNALEKKSNYEVLEKDVGLKRFFPKSLLDSVKAKXLRKLIQQXFRQFANLNREESILKFFEILSPVYRFDKECFKCALGSSWIISVELAIGPEEGISYLXDKGCNPXHLADFXQVQXIQYSNSEDKDRKGMLQLKIAGAPEPLXVXAPSLXIAENMADLIDGYCRLVNGXSQSFIIRPQKEGERALPSIPKLANSEKQGMRXHAVSVSEXDDYAEIIDEEDXYXMPSXRDYEIQRERIELGRCIGEGQFGDVHQGIYMSPENPALAVAIKXCKNCXSDSVREKFLQEALXMRQFDHPHIVKLIGVIXENPVWIIMELCXLGELRSFLQVRKYSLDLASLILYAYQLSXALAYLESKRFVHRDIAARNVLVSSNDCVKLGDFGLSRYMEDSXYYKASKGKLPIKWMAPESINFRRFXSASDVWMFGVCMWEILMHGVKPFQGVKNNDVIGRIENGERLPMPPNCPPXLYSLMXKCWAYDPSRRPRFXELKAQLSXILEEEKAQQEERMRMESRRQAXVSWDSGGSDEAPPKPSRPGYPSPRSSEGFYPSPQHMVQXNHYQVSGYPGSHGIXAMAGSIYPGQASLLDQXDSWNHRPQEIAMWQPNVEDSXVLDLRGIGQVLPXHLMEERLIRQQQEMEEDQRWLEKEERFLKPDVRLSRGSIDREDGSLQGPIGNQHIYQPVGKPDPAAPPKKPPRPGAPGHLGSLASLSSPADSYNEGVKLQPQEISPPPXANLDRSNDKVYENVXGLVKAVIEMSSKIQPAPPEEYVPMVKEVGLALRXLLAXVDEXIPLLPASXHREIEMAQKLLNSDLGELINKMKLAQQYVMXSLQQEYKKQMLXAAHALAVDAKNLLDVIDQARLKMLGQXRPH

SEQ ID NO: 21986 - protein, 67 aa, Homo sapiens
  MOD_RES (27)..(27): Selenocysteine
  MOD_RES (37)..(37): Selenocysteine
  MOD_RES (40)..(40): Selenocysteine
  MOD_RES (42)..(42): Selenocysteine
  MOD_RES (49)..(50): Selenocysteine
MRLRFCISSQEYNINNAESFSASYPEXYDVQGMFQLXNWXLXSEGRLDXXPVGDSFAQAVLPRQPPE

SEQ ID NO: 21987 - protein, 120 aa, Homo sapiens
  MOD_RES (27)..(27): Selenocysteine
  MOD_RES (37)..(37): Selenocysteine
  MOD_RES (40)..(40): Selenocysteine
  MOD_RES (42)..(42): Selenocysteine
  MOD_RES (49)..(50): Selenocysteine
  MOD_RES (84)..(84): Selenocysteine
  MOD_RES (96)..(96): Selenocysteine
MRLRFCISSQEYNINNAESFSASYPEXYDVQGMFQLXNWXLXSEGRLDXXPVGDSFIEMAQKLLNSDLGELINKMKLAQQYVMXSLQQEYKKQMLXAAHALAVDAKNLLDVIDQARLKML

SEQ ID NO: 21988 - protein, 67 aa, Homo sapiens
  MOD_RES (10)..(10): Selenocysteine
  MOD_RES (49)..(49): Selenocysteine
  MOD_RES (64)..(64): Selenocysteine
MRMESRRQAXVSWDSGGSDEAPPKPSRPGYPSPRSSEGFYPSPQHMVQXNHYQVSGYPGSHGIXAMA

SEQ ID NO: 21989 - protein, 132 aa, Homo sapiens
  MOD_RES (10)..(10): Selenocysteine
  MOD_RES (49)..(49): Selenocysteine
  MOD_RES (64)..(64): Selenocysteine
  MOD_RES (81)..(81): Selenocysteine
  MOD_RES (102)..(102): Selenocysteine
  MOD_RES (115)..(115): Selenocysteine
MRMESRRQAXVSWDSGGSDEAPPKPSRPGYPSPRSSEGFYPSPQHMVQXNHYQVSGYPGSHGIXAMAGSIYPGQASLLDQXDSWNHRPQEIAMWQPNVEDSXVLDLRGIGQVLPXHLMEERLIRQQQEMEED

SEQ ID NO: 21990 - protein, 133 aa, Homo sapiens
  MOD_RES (10)..(10): Selenocysteine
  MOD_RES (49)..(49): Selenocysteine
  MOD_RES (64)..(64): Selenocysteine
  MOD_RES (81)..(81): Selenocysteine
  MOD_RES (102)..(102): Selenocysteine
  MOD_RES (115)..(115): Selenocysteine
MRMESRRQAXVSWDSGGSDEAPPKPSRPGYPSPRSSEGFYPSPQHMVQXNHYQVSGYPGSHGIXAMAGSIYPGQASLLDQXDSWNHRPQEIAMWQPNVEDSXVLDLRGIGQVLPXHLMEERLIRQQQEMEEDQ

SEQ ID NO: 21991 - protein, 362 aa, Homo sapiens
  MOD_RES (10)..(10): Selenocysteine
  MOD_RES (49)..(49): Selenocysteine
  MOD_RES (64)..(64): Selenocysteine
  MOD_RES (81)..(81): Selenocysteine
  MOD_RES (102)..(102): Selenocysteine
  MOD_RES (115)..(115): Selenocysteine
  MOD_RES (224)..(224): Selenocysteine
  MOD_RES (239)..(239): Selenocysteine
  MOD_RES (273)..(273): Selenocysteine
  MOD_RES (277)..(277): Selenocysteine
  MOD_RES (281)..(281): Selenocysteine
  MOD_RES (289)..(289): Selenocysteine
  MOD_RES (320)..(320): Selenocysteine
  MOD_RES (332)..(332): Selenocysteine
  MOD_RES (359)..(359): Selenocysteine
MRMESRRQAXVSWDSGGSDEAPPKPSRPGYPSPRSSEGFYPSPQHMVQXNHYQVSGYPGSHGIXAMAGSIYPGQASLLDQXDSWNHRPQEIAMWQPNVEDSXVLDLRGIGQVLPXHLMEERLIRQQQEMEEDQRWLEKEERFLKPDVRLSRGSIDREDGSLQGPIGNQHIYQPVGKPDPAAPPKKPPRPGAPGHLGSLASLSSPADSYNEGVKLQPQEISPPPXANLDRSNDKVYENVXGLVKAVIEMSSKIQPAPPEEYVPMVKEVGLALRXLLAXVDEXIPLLPASXHREIEMAQKLLNSDLGELINKMKLAQQYVMXSLQQEYKKQMLXAAHALAVDAKNLLDVIDQARLKMLGQXRPH

SEQ ID NO: 21992 - protein, 115 aa, Homo sapiens
  MOD_RES (26)..(26): Selenocysteine
  MOD_RES (30)..(30): Selenocysteine
  MOD_RES (34)..(34): Selenocysteine
  MOD_RES (42)..(42): Selenocysteine
  MOD_RES (73)..(73): Selenocysteine
  MOD_RES (85)..(85): Selenocysteine
  MOD_RES (112)..(112): Selenocysteine
MSSKIQPAPPEEYVPMVKEVGLALRXLLAXVDEXIPLLPASXHREIEMAQKLLNSDLGELINKMKLAQQYVMXSLQQEYKKQMLXAAHALAVDAKNLLDVIDQARLKMLGQXRPH

SEQ ID NO: 21993 - protein, 72 aa, Homo sapiens
  MOD_RES (1)..(1): Selenocysteine
  MOD_RES (20)..(20): Selenocysteine
  MOD_RES (52)..(52): Selenocysteine
XIAENMADLIDGYCRLVNGXSQSFIIRPQKEGERALPSIPKLANSEKQGMRXHAVSVSAQSWRKRRLSKKSA

SEQ ID NO: 21994 - protein, 319 aa, Homo sapiens
  MOD_RES (1)..(1): Any amino acid
  MOD_RES (32)..(32): Selenocysteine
  MOD_RES (40)..(40): Selenocysteine
  MOD_RES (97)..(97): Selenocysteine
  MOD_RES (104)..(104): Selenocysteine
  MOD_RES (110)..(110): Selenocysteine
  MOD_RES (114)..(114): Selenocysteine
  MOD_RES (141)..(141): Selenocysteine
  MOD_RES (143)..(143): Selenocysteine
  MOD_RES (148)..(148): Selenocysteine
  MOD_RES (167)..(167): Selenocysteine
  MOD_RES (199)..(199): Selenocysteine
  MOD_RES (207)..(207): Selenocysteine
  MOD_RES (219)..(219): Selenocysteine
  MOD_RES (221)..(221): Selenocysteine
  MOD_RES (225)..(225): Selenocysteine
  MOD_RES (268)..(268): Selenocysteine
  MOD_RES (273)..(273): Selenocysteine
  MOD_RES (289)..(289): Selenocysteine
  MOD_RES (309)..(309): Selenocysteine
XEKKSNYEVLEKDVGLKRFFPKSLLDSVKAKXLRKLIQQXFRQFANLNREESILKFFEILSPVYRFDKECFKCALGSSWIISVELAIGPEEGISYLXDKGCNPXHLADFXQVQXIQYSNSEDKDRKGMLQLKIAGAPEPLXVXAPSLXIAENMADLIDGYCRLVNGXSQSFIIRPQKEGERALPSIPKLANSEKQGMRXHAVSVSEXDDYAEIIDEEDXYXMPSXRDYEIQRERIELGRCIGEGQFGDVHQGIYMSPENPALAVAIKXCKNCXSDSVREKFLQEACHYXSLHWNWCRYISDPNVDAAQXPGMQSNNASV

SEQ ID NO: 21995 - protein, 1017 aa, Homo sapiens
  MOD_RES (1)..(1): Any amino acid
  MOD_RES (24)..(24): Selenocysteine
  MOD_RES (29)..(29): Selenocysteine
  MOD_RES (31)..(31): Selenocysteine
  MOD_RES (35)..(35): Selenocysteine
  MOD_RES (61)..(62): Selenocysteine
  MOD_RES (73)..(73): Selenocysteine
  MOD_RES (149)..(149): Selenocysteine
  MOD_RES (154)..(154): Selenocysteine
  MOD_RES (230)..(230): Selenocysteine
  MOD_RES (238)..(238): Selenocysteine
  MOD_RES (295)..(295): Selenocysteine
  MOD_RES (302)..(302): Selenocysteine
  MOD_RES (308)..(308): Selenocysteine
  MOD_RES (312)..(312): Selenocysteine
  MOD_RES (339)..(339): Selenocysteine
  MOD_RES (341)..(341): Selenocysteine
  MOD_RES (346)..(346): Selenocysteine
  MOD_RES (365)..(365): Selenocysteine
  MOD_RES (397)..(397): Selenocysteine
  MOD_RES (405)..(405): Selenocysteine
  MOD_RES (417)..(417): Selenocysteine
  MOD_RES (419)..(419): Selenocysteine
  MOD_RES (423)..(423): Selenocysteine
  MOD_RES (466)..(466): Selenocysteine
  MOD_RES (471)..(471): Selenocysteine
  MOD_RES (485)..(485): Selenocysteine
  MOD_RES (502)..(502): Selenocysteine
  MOD_RES (514)..(514): Selenocysteine
  MOD_RES (543)..(543): Selenocysteine
  MOD_RES (586)..(586): Selenocysteine
  MOD_RES (611)..(611): Selenocysteine
  MOD_RES (661)..(661): Selenocysteine
  MOD_RES (667)..(667): Selenocysteine
  MOD_RES (681)..(681): Selenocysteine
  MOD_RES (689)..(689): Selenocysteine
  MOD_RES (711)..(711): Selenocysteine
  MOD_RES (750)..(750): Selenocysteine
  MOD_RES (757)..(757): Selenocysteine
  MOD_RES (770)..(770): Selenocysteine
  MOD_RES (879)..(879): Selenocysteine
  MOD_RES (894)..(894): Selenocysteine
  MOD_RES (928)..(928): Selenocysteine
  MOD_RES (932)..(932): Selenocysteine
  MOD_RES (936)..(936): Selenocysteine
  MOD_RES (944)..(944): Selenocysteine
  MOD_RES (975)..(975): Selenocysteine
  MOD_RES (987)..(987): Selenocysteine
  MOD_RES (1014)..(1014): Selenocysteine
XYDRYLASSKIMAAAYLDPNLNHXPNSSXKXHLGXGMERSPGAMERVLKVFHYFESNSEPXXWASIIRHGDAXDVRGIIQKIVDSHKVKHVACYGFRLSHLRSEEVHWLHVDMGVSSVREKYELAHPPEEWKYELRIRYLPKGFLNQFXEDKPXLNFFYQQVKSDYMLEIADQVDQEIALKLGCLEIRRSYWEMRGNALEKKSNYEVLEKDVGLKRFFPKSLLDSVKAKXLRKLIQQXFRQFANLNREESILKFFEILSPVYRFDKECFKCALGSSWIISVELAIGPEEGISYLXDKGCNPXHLADFXQVQXIQYSNSEDKDRKGMLQLKIAGAPEPLXVXAPSLXIAENMADLIDGYCRLVNGXSQSFIIRPQKEGERALPSIPKLANSEKQGMRXHAVSVSEXDDYAEIIDEEDXYXMPSXRDYEIQRERIELGRCIGEGQFGDVHQGIYMSPENPALAVAIKXCKNCXSDSVREKFLQEALXMRQFDHPHIVKLIGVIXENPVWIIMELCXLGELRSFLQVRKYSLDLASLILYAYQLSXALAYLESKRFVHRDIAARNVLVSSNDCVKLGDFGLSRYMEDSXYYKASKGKLPIKWMAPESINFRRFXSASDVWMFGVCMWEILMHGVKPFQGVKNNDVIGRIENGERLPMPPNCPPXLYSLMXKCWAYDPSRRPRFXELKAQLSXILEEEKAQQEERMRMESRRQAXVSWDSGGSDEAPPKPSRPGYPSPRSSEGFYPSPQHMVQXNHYQDSXVLDLRGIGQVLPXHLMEERLIRQQQEMEEDQRWLEKEERFLKPDVRLSRGSIDREDGSLQGPIGNQHIYQPVGKPDPAAPPKKPPRPGAPGHLGSLASLSSPADSYNEGVKLQPQEISPPPXANLDRSNDKVYENVXGLVKAVIEMSSKIQPAPPEEYVPMVKEVGLALRXLLAXVDEXIPLLPASXHREIEMAQKLLNSDLGELINKMKLAQQYVMXSLQQEYKKQMLXAAHALAVDAKNLLDVIDQARLKMLGQXRPH

SEQ ID NO: 21996 - protein, 68 aa, Homo sapiens
  MOD_RES (15)..(15): Selenocysteine
  MOD_RES (62)..(62): Selenocysteine
  MOD_RES (65)..(65): Selenocysteine
MSGVSEPLSRVKLGXLRRPEGPAEPMVVVPVDVEKEDVRILKVCFYSNSFNPGKNFKLVKCXVQXEIR

SEQ ID NO: 21997 - protein, 103 aa, Homo sapiens
  MOD_RES (15)..(15): Selenocysteine
  MOD_RES (62)..(62): Selenocysteine
  MOD_RES (65)..(65): Selenocysteine
  MOD_RES (72)..(72): Selenocysteine
MSGVSEPLSRVKLGXLRRPEGPAEPMVVVPVDVEKEDVRILKVCFYSNSFNPGKNFKLVKCXVQXEIREIIXSILLSGRIGPNIRLAECYGLRLKHMKSDEIH

SEQ ID NO: 21998 - protein, 184 aa, Homo sapiens
  MOD_RES (15)..(15): Selenocysteine
  MOD_RES (62)..(62): Selenocysteine
  MOD_RES (65)..(65): Selenocysteine
  MOD_RES (72)..(72): Selenocysteine
  MOD_RES (110)..(110): Selenocysteine
  MOD_RES (149)..(150): Selenocysteine
MSGVSEPLSRVKLGXLRRPEGPAEPMVVVPVDVEKEDVRILKVCFYSNSFNPGKNFKLVKCXVQXEIREIIXSILLSGRIGPNIRLAECYGLRLKHMKSDEIHWLHPQMXVGEVQDKYECLHVEAEWRYDLQIRYLPEDFMESLKEDRXXLLYFYQQLRNDYMQRYASKVSEGMALQLGCLELR

SEQ ID NO: 21999 - protein, 213 aa, Homo sapiens
  MOD_RES (15)..(15): Selenocysteine
  MOD_RES (62)..(62): Selenocysteine
  MOD_RES (65)..(65): Selenocysteine
  MOD_RES (72)..(72): Selenocysteine
  MOD_RES (110)..(110): Selenocysteine
  MOD_RES (149)..(150): Selenocysteine
MSGVSEPLSRVKLGXLRRPEGPAEPMVVVPVDVEKEDVRILKVCFYSNSFNPGKNFKLVKCXVQXEIREIIXSILLSGRIGPNIRLAECYGLRLKHMKSDEIHWLHPQMXVGEVQDKYECLHVEAEWRYDLQIRYLPEDFMESLKEDRXXLLYFYQQLRNDYMQRYASKVSEGMALQLGCLELRRFFKDMPHNALDKKSNFELLEKEVGLDLF

SEQ ID NO: 22000 - protein, 967 aa, Homo sapiens
  MOD_RES (15)..(15): Selenocysteine
  MOD_RES (62)..(62): Selenocysteine
  MOD_RES (65)..(65): Selenocysteine
  MOD_RES (72)..(72): Selenocysteine
  MOD_RES (110)..(110): Selenocysteine
  MOD_RES (149)..(150): Selenocysteine
  MOD_RES (234)..(234): Selenocysteine
  MOD_RES (253)..(253): Selenocysteine
  MOD_RES (264)..(264): Selenocysteine
  MOD_RES (276)..(276): Selenocysteine
  MOD_RES (290)..(290): Selenocysteine
  MOD_RES (297)..(297): Selenocysteine
  MOD_RES (335)..(335): Selenocysteine
  MOD_RES (409)..(409): Selenocysteine
  MOD_RES (445)..(445): Selenocysteine
  MOD_RES (458)..(458): Selenocysteine
  MOD_RES (464)..(464): Selenocysteine
  MOD_RES (498)..(498): Selenocysteine
  MOD_RES (525)..(525): Selenocysteine
  MOD_RES (585)..(585): Selenocysteine
  MOD_RES (603)..(604): Selenocysteine
  MOD_RES (656)..(656): Selenocysteine
  MOD_RES (659)..(659): Selenocysteine
  MOD_RES (673)..(673): Selenocysteine
  MOD_RES (701)..(701): Selenocysteine
  MOD_RES (708)..(708): Selenocysteine
  MOD_RES (728)..(728): Selenocysteine
  MOD_RES (800)..(800): Selenocysteine
  MOD_RES (811)..(811): Selenocysteine
  MOD_RES (828)..(828): Selenocysteine
  MOD_RES (834)..(834): Selenocysteine
  MOD_RES (874)..(874): Selenocysteine
  MOD_RES (895)..(895): Selenocysteine
  MOD_RES (900)..(900): Selenocysteine
  MOD_RES (924)..(924): Selenocysteine
  MOD_RES (936)..(936): Selenocysteine
  MOD_RES (940)..(940): Selenocysteine
MSGVSEPLSRVKLGXLRRPEGPAEPMVVVPVDVEKEDVRILKVCFYSNSFNPGKNFKLVKCXVQXEIREIIXSILLSGRIGPNIRLAECYGLRLKHMKSDEIHWLHPQMXVGEVQDKYECLHVEAEWRYDLQIRYLPEDFMESLKEDRXXLLYFYQQLRNDYMQRYASKVSEGMALQLGCLELRRFFKDMPHNALDKKSNFELLEKEVGLDLFFPKQMQENLKPKQFRKMIQQXFQQYASLREEECVMKFFNXLAGFANIDQEXYRCELIQGWNIXVDLVIGPKGIRQLXSQDAKPXCLAEFKQIRSIRCLPLEEGQAVLQLGIEGAPQALSIKXSSLAEAENMADLIDGYCRLQGEHQGSLIIHPRKDGEKRNSLPQIPMLNLEARRSHLSESCSIESDIYAEIPDEXLRRPGGPQYGIAREDVVLNRILGEGFFGEVYEGVYXNHKGEKINVAVKXCKKDCXLDNKEKFMSEAVIMKNLDHPHIVKLIGIIEEEPXWIIMELYPYGELGHYLERNKNSLKVLXLVLYSLQICKAMAYLESINCVHRDIAVRNILVASPECVKLGDFGLSRYIEDEDYYKASVXRLPIKWMSPESINFRRFXXASDVWMFAVCMWEILSFGKQPFFWLENKDVIGVLEKGDRLPKPDLCPPVLYXLMXRCWDYDPSDRPRFXELVCSLSDVYQMEKDIAMEQERNARYRXPKILEPXAFQEPPPKPSRPKYRPPPQXNLLAPKLQFQEEDFIQPSSREEAQQLWEAEKVKMRQILDKQQKQMVEDYQWLRQEEKSLDPMVYMNDKSPLXPEKEVGYLEFXGPPQKPPRLGAQSIQPXANLDRXDDLVYLNVMELVRAVLELKNELCQLPPEGYVVVVKNVGLXLRKLIGSVDDLLPSLPSSSRXEIEGXQKLLNKDLAELINKMRLAQQNAVXSLSEECKRQMLXASHXLAVDAKNLLDAVDQAKVLANLAHPPAE

SEQ ID NO: 22001 - protein, 1009 aa, Homo sapiens
  MOD_RES (15)..(15): Selenocysteine
  MOD_RES (62)..(62): Selenocysteine
  MOD_RES (65)..(65): Selenocysteine
  MOD_RES (72)..(72): Selenocysteine
  MOD_RES (110)..(110): Selenocysteine
  MOD_RES (149)..(150): Selenocysteine
  MOD_RES (234)..(234): Selenocysteine
  MOD_RES (253)..(253): Selenocysteine
  MOD_RES (264)..(264): Selenocysteine
  MOD_RES (276)..(276): Selenocysteine
  MOD_RES (290)..(290): Selenocysteine
  MOD_RES (297)..(297): Selenocysteine
  MOD_RES (335)..(335): Selenocysteine
  MOD_RES (409)..(409): Selenocysteine
  MOD_RES (445)..(445): Selenocysteine
  MOD_RES (458)..(458): Selenocysteine
  MOD_RES (464)..(464): Selenocysteine
  MOD_RES (498)..(498): Selenocysteine
  MOD_RES (525)..(525): Selenocysteine
  MOD_RES (585)..(585): Selenocysteine
  MOD_RES (603)..(604): Selenocysteine
  MOD_RES (656)..(656): Selenocysteine
  MOD_RES (659)..(659): Selenocysteine
  MOD_RES (673)..(673): Selenocysteine
  MOD_RES (701)..(701): Selenocysteine
  MOD_RES (708)..(708): Selenocysteine
  MOD_RES (728)..(728): Selenocysteine
  MOD_RES (749)..(749): Selenocysteine
  MOD_RES (751)..(751): Selenocysteine
  MOD_RES (765)..(765): Selenocysteine
  MOD_RES (842)..(842): Selenocysteine
  MOD_RES (853)..(853): Selenocysteine
  MOD_RES (870)..(870): Selenocysteine
  MOD_RES (876)..(876): Selenocysteine
  MOD_RES (916)..(916): Selenocysteine
  MOD_RES (937)..(937): Selenocysteine
  MOD_RES (942)..(942): Selenocysteine
  MOD_RES (966)..(966): Selenocysteine
  MOD_RES (978)..(978): Selenocysteine
  MOD_RES (982)..(982): Selenocysteine
MSGVSEPLSRVKLGXLRRPEGPAEPMVVVPVDVEKEDVRILKVCFYSNSFNPGKNFKLVKCXVQXEIREIIXSILLSGRIGPNIRLAECYGLRLKHMKSDEIHWLHPQMXVGEVQDKYECLHVEAEWRYDLQIRYLPEDFMESLKEDRXXLLYFYQQLRNDYMQRYASKVSEGMALQLGCLELRRFFKDMPHNALDKKSNFELLEKEVGLDLFFPKQMQENLKPKQFRKMIQQXFQQYASLREEECVMKFFNXLAGFANIDQEXYRCELIQGWNIXVDLVIGPKGIRQLXSQDAKPXCLAEFKQIRSIRCLPLEEGQAVLQLGIEGAPQALSIKXSSLAEAENMADLIDGYCRLQGEHQGSLIIHPRKDGEKRNSLPQIPMLNLEARRSHLSESCSIESDIYAEIPDEXLRRPGGPQYGIAREDVVLNRILGEGFFGEVYEGVYXNHKGEKINVAVKXCKKDCXLDNKEKFMSEAVIMKNLDHPHIVKLIGIIEEEPXWIIMELYPYGELGHYLERNKNSLKVLXLVLYSLQICKAMAYLESINCVHRDIAVRNILVASPECVKLGDFGLSRYIEDEDYYKASVXRLPIKWMSPESINFRRFXXASDVWMFAVCMWEILSFGKQPFFWLENKDVIGVLEKGDRLPKPDLCPPVLYXLMXRCWDYDPSDRPRFXELVCSLSDVYQMEKDIAMEQERNARYRXPKILEPXAFQEPPPKPSRPKYRPPPQXNLLAPKLQFQVPEGLCASSPXLXSPMEYPSPVNSLHXPPLHRHNVFKRHSMREEDFIQPSSREEAQQLWEAEKVKMRQILDKQQKQMVEDYQWLRQEEKSLDPMVYMNDKSPLXPEKEVGYLEFXGPPQKPPRLGAQSIQPXANLDRXDDLVYLNVMELVRAVLELKNELCQLPPEGYVVVVKNVGLXLRKLIGSVDDLLPSLPSSSRXEIEGXQKLLNKDLAELINKMRLAQQNAVXSLSEECKRQMLXASHXLAVDAKNLLDAVDQAKVLANLAHPPAE

SEQ ID NO: 22002 - protein, 195 aa, Homo sapiens
  MOD_RES (1)..(1): Any amino acid
  MOD_RES (8)..(8): Selenocysteine
  MOD_RES (27)..(27): Selenocysteine
  MOD_RES (38)..(38): Selenocysteine
  MOD_RES (50)..(50): Selenocysteine
  MOD_RES (64)..(64): Selenocysteine
  MOD_RES (71)..(71): Selenocysteine
  MOD_RES (109)..(109): Selenocysteine
  MOD_RES (170)..(170): Selenocysteine
XRKMIQQXFQQYASLREEECVMKFFNXLAGFANIDQEXYRCELIQGWNIXVDLVIGPKGIRQLXSQDAKPXCLAEFKQIRSIRCLPLEEGQAVLQLGIEGAPQALSIKXSSLAEAENMADLIDGYCRLQDGEKRNSLPQIPMLNLEARRSHLSESCSIESDIYAEIPDEXLRRPGGPQYGIAREDVVLNRILGEG

SEQ ID NO: 22003 - protein, 134 aa, Homo sapiens
  MOD_RES (23)..(23): Selenocysteine
  MOD_RES (48)..(48): Selenocysteine
  MOD_RES (72)..(72): Selenocysteine
MVSRDQAHLGPKYVGLWDFKSRXDEELSFRAGDVFHVARKEEQWWWAXLLDEAGGAVAQGYVPHNYLAEREXVESEPAGHAGCAALQDLAACRGPAAPERGGVLPQPARACELPQGPEPVPRPAAGRALPEARA

SEQ ID NO: 22004 - protein, 451 aa, Homo sapiens
  MOD_RES (23)..(23): Selenocysteine
  MOD_RES (48)..(48): Selenocysteine
  MOD_RES (72)..(72): Selenocysteine
  MOD_RES (99)..(99): Selenocysteine
  MOD_RES (121)..(121): Selenocysteine
  MOD_RES (192)..(192): Selenocysteine
  MOD_RES (264)..(264): Selenocysteine
  MOD_RES (324)..(324): Selenocysteine
  MOD_RES (354)..(354): Selenocysteine
  MOD_RES (366)..(366): Selenocysteine
  MOD_RES (422)..(422): Selenocysteine
  MOD_RES (445)..(445): Selenocysteine
  MOD_RES (451)..(451): Selenocysteine
MVSRDQAHLGPKYVGLWDFKSRXDEELSFRAGDVFHVARKEEQWWWAXLLDEAGGAVAQGYVPHNYLAEREXVESEPWFFGCISRSEAVRRLQAEGNAXGAFLIRVSEKPSADYVLSVRDXQAVRHYKIWRRAGGRLHLNEAVSFLSLPELVNYHRAQSLSHGLRLAAPCRKHEPEPLPHWDDWERPREEFXLCRKLGSGYFGEVFEGLWKDRVQVAIKVISRDNLLHQQMLQSEIQAMKKLRHKHILALYAVVSVGDPVYIIXELMAKGSLLELLRDSDEKVLPVSELLDIAWQVAEGMCYLESQNYIHRDLAARNILVGENXLCKVGDFGLARLIKEDVYLSHDHNIPYKWXAPEALSRGHYSXKSDVWSFGILLHEMFSRGQVPYPGMSNHEAFLRVDAGYRMPCPLECPPSVHKLMLXCWCRDPEQRPCFKALRERLSSFXSYENPX

SEQ ID NO: 22005 - protein, 269 aa, Homo sapiens
  MOD_RES (17)..(17): Selenocysteine
  MOD_RES (20)..(20): Selenocysteine
  MOD_RES (32)..(32): Selenocysteine
  MOD_RES (42)..(42): Selenocysteine
  MOD_RES (69)..(69): Selenocysteine
  MOD_RES (87)..(87): Selenocysteine
  MOD_RES (95)..(95): Selenocysteine
  MOD_RES (118)..(118): Selenocysteine
  MOD_RES (143)..(143): Selenocysteine
  MOD_RES (160)..(160): Selenocysteine
  MOD_RES (178)..(178): Selenocysteine
  MOD_RES (214)..(214): Selenocysteine
  MOD_RES (217)..(217): Selenocysteine
  MOD_RES (221)..(221): Selenocysteine
  MOD_RES (244)..(244): Selenocysteine
  MOD_RES (256)..(256): Selenocysteine
  MOD_RES (264)..(264): Selenocysteine
FSAQPPPSLQWLFEDEXPIXNRSRPPHLRRAXVFANGSLLLXQVRPRNAGIYRCIGQGQRGPPIILEAXLHLAEIEDMPLFEPRVFXAGSEERVXCLPPKGLPEPSVWWEHAGVRLPXHGRVYQKGHELVLANIAESDAGVYXCHAANLAGQRRQDVNIXVASEHLCPEGQGEVEGNXGLGVMDRGFPAVPSWLKKPQDSQLEEGKPGYLDCLXQAXPKPXVVWYRNQMLISEDSRFEVFKNGXLRINSVEVYDGXWYRCMSSXPAGSI

SEQ ID NO: 22006 - protein, 139 aa, Homo sapiens
  MOD_RES (28)..(28): Selenocysteine
  MOD_RES (30)..(30): Selenocysteine
  MOD_RES (75)..(75): Selenocysteine
  MOD_RES (98)..(98): Selenocysteine
  MOD_RES (108)..(108): Selenocysteine
  MOD_RES (136)..(136): Selenocysteine
MGAARGSPARPRRLPLLSVLLLPLLGGXQXAIVFIKQPSSQDALQGRRALLRCEVEAPGPVHVYWLLDGAPVQDXERRFAQGSSLSFAAVDRLQDSGXFQCVARDDVXGEEARSANASFNIKCESQGGCAQSPCQXLND

SEQ ID NO: 22007 - protein, 157 aa, Homo sapiens
  MOD_RES (28)..(28): Selenocysteine
  MOD_RES (30)..(30): Selenocysteine
  MOD_RES (75)..(75): Selenocysteine
  MOD_RES (98)..(98): Selenocysteine
  MOD_RES (108)..(108): Selenocysteine
  MOD_RES (144)..(144): Selenocysteine
  MOD_RES (147)..(147): Selenocysteine
MGAARGSPARPRRLPLLSVLLLPLLGGXQXAIVFIKQPSSQDALQGRRALLRCEVEAPGPVHVYWLLDGAPVQDXERRFAQGSSLSFAAVDRLQDSGXFQCVARDDVXGEEARSANASFNIKWIEAGPVVLKHPASEAEIQPQXQVXLRCHIDGHPR

SEQ ID NO: 22008 - protein, 459 aa, Homo sapiens
  MOD_RES (28)..(28): Selenocysteine
  MOD_RES (30)..(30): Selenocysteine
  MOD_RES (75)..(75): Selenocysteine
  MOD_RES (98)..(98): Selenocysteine
  MOD_RES (108)..(108): Selenocysteine
  MOD_RES (144)..(144): Selenocysteine
  MOD_RES (147)..(147): Selenocysteine
  MOD_RES (159)..(159): Selenocysteine
  MOD_RES (167)..(167): Selenocysteine
  MOD_RES (177)..(177): Selenocysteine
  MOD_RES (186)..(186): Selenocysteine
  MOD_RES (216)..(216): Selenocysteine
  MOD_RES (264)..(264): Selenocysteine
  MOD_RES (267)..(267): Selenocysteine
  MOD_RES (279)..(279): Selenocysteine
  MOD_RES (289)..(289): Selenocysteine
  MOD_RES (316)..(316): Selenocysteine
  MOD_RES (334)..(334): Selenocysteine
  MOD_RES (342)..(342): Selenocysteine
  MOD_RES (365)..(365): Selenocysteine
  MOD_RES (390)..(390): Selenocysteine
  MOD_RES (407)..(407): Selenocysteine
  MOD_RES (425)..(425): Selenocysteine
  MOD_RES (437)..(437): Selenocysteine
MGAARGSPARPRRLPLLSVLLLPLLGGXQXAIVFIKQPSSQDALQGRRALLRCEVEAPGPVHVYWLLDGAPVQDXERRFAQGSSLSFAAVDRLQDSGXFQCVARDDVXGEEARSANASFNIKWIEAGPVVLKHPASEAEIQPQXQVXLRCHIDGHPRPXYQWFRDGXPLSDGQSNHXVSSKERNLXLRPAGPEHSGLYSCCAHSAFGQACSSQNFXLSIADESFARVVLAPQDVVVARYEEAMFHCQFSAQPPPSLQWLFEDEXPIXNRSRPPHLRRAXVFANGSLLLXQVRPRNAGIYRCIGQGQRGPPIILEAXLHLAEIEDMPLFEPRVFXAGSEERVXCLPPKGLPEPSVWWEHAGVRLPXHGRVYQKGHELVLANIAESDAGVYXCHAANLAGQRRQDVNIXVASEHLCPEGQGEVEGNXGLGVMDRGFPGXHLRSSQFWALQAWESVHYWESV

SEQ ID NO: 22009 - protein, 816 aa, Homo sapiens
  MOD_RES (28)..(28): Selenocysteine
  MOD_RES (30)..(30): Selenocysteine
  MOD_RES (75)..(75): Selenocysteine
  MOD_RES (98)..(98): Selenocysteine
  MOD_RES (108)..(108): Selenocysteine
  MOD_RES (144)..(144): Selenocysteine
  MOD_RES (147)..(147): Selenocysteine
  MOD_RES (159)..(159): Selenocysteine
  MOD_RES (167)..(167): Selenocysteine
  MOD_RES (177)..(177): Selenocysteine
  MOD_RES (186)..(186): Selenocysteine
  MOD_RES (216)..(216): Selenocysteine
  MOD_RES (264)..(264): Selenocysteine
  MOD_RES (267)..(267): Selenocysteine
  MOD_RES (279)..(279): Selenocysteine
  MOD_RES (289)..(289): Selenocysteine
  MOD_RES (316)..(316): Selenocysteine
  MOD_RES (334)..(334): Selenocysteine
  MOD_RES (342)..(342): Selenocysteine
  MOD_RES (365)..(365): Selenocysteine
  MOD_RES (390)..(390): Selenocysteine
  MOD_RES (407)..(407): Selenocysteine
  MOD_RES (410)..(410): Selenocysteine
  MOD_RES (435)..(435): Selenocysteine
  MOD_RES (438)..(438): Selenocysteine
  MOD_RES (442)..(442): Selenocysteine
  MOD_RES (465)..(465): Selenocysteine
  MOD_RES (477)..(477): Selenocysteine
  MOD_RES (485)..(485): Selenocysteine
  MOD_RES (505)..(505): Selenocysteine
  MOD_RES (521)..(521): Selenocysteine
  MOD_RES (527)..(527): Selenocysteine
  MOD_RES (533)..(533): Selenocysteine
  MOD_RES (549)..(549): Selenocysteine
  MOD_RES (554)..(554): Selenocysteine
  MOD_RES (561)..(561): Selenocysteine
  MOD_RES (569)..(569): Selenocysteine
  MOD_RES (587)..(587): Selenocysteine
  MOD_RES (593)..(593): Selenocysteine
  MOD_RES (601)..(602): Selenocysteine
  MOD_RES (608)..(608): Selenocysteine
  MOD_RES (635)..(635): Selenocysteine
  MOD_RES (663)..(663): Selenocysteine
  MOD_RES (675)..(675): Selenocysteine
  MOD_RES (704)..(704): Selenocysteine
  MOD_RES (770)..(770): Selenocysteine
  MOD_RES (779)..(779): Selenocysteine
  MOD_RES (785)..(785): Selenocysteine
  MOD_RES (800)..(801): Selenocysteine
MGAARGSPARPRRLPLLSVLLLPLLGGXQXAIVFIKQPSSQDALQGRRALLRCEVEAPGPVHVYWLLDGAPVQDXERRFAQGSSLSFAAVDRLQDSGXFQCVARDDVXGEEARSANASFNIKWIEAGPVVLKHPASEAEIQPQXQVXLRCHIDGHPRPXYQWFRDGXPLSDGQSNHXVSSKERNLXLRPAGPEHSGLYSCCAHSAFGQACSSQNFXLSIADESFARVVLAPQDVVVARYEEAMFHCQFSAQPPPSLQWLFEDEXPIXNRSRPPHLRRAXVFANGSLLLXQVRPRNAGIYRCIGQGQRGPPIILEAXLHLAEIEDMPLFEPRVFXAGSEERVXCLPPKGLPEPSVWWEHAGVRLPXHGRVYQKGHELVLANIAESDAGVYXCHAANLAGQRRQDVNIXVAXVPSWLKKPQDSQLEEGKPGYLDCLXQAXPKPXVVWYRNQMLISEDSRFEVFKNGXLRINSVEVYDGXWYRCMSSXPAGSIEAQARVQVLEKLKFXPPPQPQQCMEFDKEAXVPCSAXGREKPXIKWERADGSSLPEWVXDNAGXLHFARVXRDDAGNYXCIASNGPQGQIRAHVQLXVAVFIXFKVEPERXXVYQGHXALLQCEAQGDPKPLIQWKGKDRILDPXKLGPRMHIFQNGSLVIHDVAPEDSGRYXCIAGNSCNIKHXEAPLYVVDKPVPEESEGPGSPPPYKMIQXIGLSVGAAVAYIIAVLGLMFYCKKRCKAKRLQKQPEGEEPEMECLNGGPLQNGQPSAEIQEEVALXSLGSGPAAXNKRHSXSDKMHFPRSSLQPIXXLGRPQAVPEDFQEQG

SEQ ID NO: 22010 - protein, 940 aa, Homo sapiens
  MOD_RES (28)..(28): Selenocysteine
  MOD_RES (30)..(30): Selenocysteine
  MOD_RES (75)..(75): Selenocysteine
  MOD_RES (98)..(98): Selenocysteine
  MOD_RES (108)..(108): Selenocysteine
  MOD_RES (144)..(144): Selenocysteine
  MOD_RES (147)..(147): Selenocysteine
  MOD_RES (159)..(159): Selenocysteine
  MOD_RES (167)..(167): Selenocysteine
  MOD_RES (177)..(177): Selenocysteine
  MOD_RES (186)..(186): Selenocysteine
  MOD_RES (216)..(216): Selenocysteine
  MOD_RES (264)..(264): Selenocysteine
  MOD_RES (267)..(267): Selenocysteine
  MOD_RES (279)..(279): Selenocysteine
  MOD_RES (289)..(289): Selenocysteine
  MOD_RES (316)..(316): Selenocysteine
  MOD_RES (334)..(334): Selenocysteine
  MOD_RES (342)..(342): Selenocysteine
  MOD_RES (365)..(365): Selenocysteine
  MOD_RES (390)..(390): Selenocysteine
  MOD_RES (407)..(407): Selenocysteine
  MOD_RES (419)..(419): Selenocysteine
  MOD_RES (424)..(424): Selenocysteine
  MOD_RES (431)..(431): Selenocysteine
  MOD_RES (439)..(439): Selenocysteine
  MOD_RES (457)..(457): Selenocysteine
  MOD_RES (463)..(463): Selenocysteine
  MOD_RES (471)..(472): Selenocysteine
  MOD_RES (478)..(478): Selenocysteine
  MOD_RES (505)..(505): Selenocysteine
  MOD_RES (533)..(533): Selenocysteine
  MOD_RES (545)..(545): Selenocysteine
  MOD_RES (574)..(574): Selenocysteine
  MOD_RES (640)..(640): Selenocysteine
  MOD_RES (649)..(649): Selenocysteine
  MOD_RES (655)..(655): Selenocysteine
  MOD_RES (670)..(671): Selenocysteine
  MOD_RES (695)..(695): Selenocysteine
  MOD_RES (774)..(774): Selenocysteine
  MOD_RES (782)..(782): Selenocysteine
  MOD_RES (855)..(855): Selenocysteine
  MOD_RES (871)..(871): Selenocysteine
  MOD_RES (935)..(935): Selenocysteine
MGAARGSPARPRRLPLLSVLLLPLLGGXQXAIVFIKQPSSQDALQGRRALLRCEVEAPGPVHVYWLLDGAPVQDXERRFAQGSSLSFAAVDRLQDSGXFQCVARDDVXGEEARSANASFNIKWIEAGPVVLKHPASEAEIQPQXQVXLRCHIDGHPRPXYQWFRDGXPLSDGQSNHXVSSKERNLXLRPAGPEHSGLYSCCAHSAFGQACSSQNFXLSIADESFARVVLAPQDVVVARYEEAMFHCQFSAQPPPSLQWLFEDEXPIXNRSRPPHLRRAXVFANGSLLLXQVRPRNAGIYRCIGQGQRGPPIILEAXLHLAEIEDMPLFEPRVFXAGSEERVXCLPPKGLPEPSVWWEHAGVRLPXHGRVYQKGHELVLANIAESDAGVYXCHAANLAGQRRQDVNIXVANGSSLPEWVXDNAGXLHFARVXRDDAGNYXCIASNGPQGQIRAHVQLXVAVFIXFKVEPERXXVYQGHXALLQCEAQGDPKPLIQWKGKDRILDPXKLGPRMHIFQNGSLVIHDVAPEDSGRYXCIAGNSCNIKHXEAPLYVVDKPVPEESEGPGSPPPYKMIQXIGLSVGAAVAYIIAVLGLMFYCKKRCKAKRLQKQPEGEEPEMECLNGGPLQNGQPSAEIQEEVALXSLGSGPAAXNKRHSXSDKMHFPRSSLQPIXXLGKSEFGEVFLAKAQGLEEGVAEXLVLVKSLQSKDEQQQLDFRRELEMFGKLNHANVVRLLGLCREAEPHYMVLEYVDLGDLKQFLRISKSKDEKLKSQPLSXKQKVALCXQVALGMEHLSNNRFVHKDLAARNCLVSAQRQVKVSALGLSKDVYNSEYYHFRQAWVPLRWMSPEAILEGDFSXKSDVWAFGVLMWEVFXHGEMPHGGQADDEVLADLQAGKARLPQPEGCPSKLYRLMQRCWALSPKDRPSFSEIASALGDSXVDSKP

SEQ ID NO: 22011 - protein, 1014 aa, Homo sapiens
  MOD_RES (28)..(28): Selenocysteine
  MOD_RES (30)..(30): Selenocysteine
  MOD_RES (75)..(75): Selenocysteine
  MOD_RES (98)..(98): Selenocysteine
  MOD_RES (108)..(108): Selenocysteine
  MOD_RES (144)..(144): Selenocysteine
  MOD_RES (147)..(147): Selenocysteine
  MOD_RES (159)..(159): Selenocysteine
  MOD_RES (167)..(167): Selenocysteine
  MOD_RES (177)..(177): Selenocysteine
  MOD_RES (186)..(186): Selenocysteine
  MOD_RES (216)..(216): Selenocysteine
  MOD_RES (264)..(264): Selenocysteine
  MOD_RES (267)..(267): Selenocysteine
  MOD_RES (279)..(279): Selenocysteine
  MOD_RES (289)..(289): Selenocysteine
  MOD_RES (316)..(316): Selenocysteine
  MOD_RES (334)..(334): Selenocysteine
  MOD_RES (342)..(342): Selenocysteine
  MOD_RES (365)..(365): Selenocysteine
  MOD_RES (390)..(390): Selenocysteine
  MOD_RES (407)..(407): Selenocysteine
  MOD_RES (410)..(410): Selenocysteine
  MOD_RES (435)..(435): Selenocysteine
  MOD_RES (438)..(438): Selenocysteine
  MOD_RES (442)..(442): Selenocysteine
  MOD_RES (465)..(465): Selenocysteine
  MOD_RES (477)..(477): Selenocysteine
  MOD_RES (485)..(485): Selenocysteine
  MOD_RES (505)..(505): Selenocysteine
  MOD_RES (521)..(521): Selenocysteine
  MOD_RES (527)..(527): Selenocysteine
  MOD_RES (533)..(533): Selenocysteine
  MOD_RES (549)..(549): Selenocysteine
  MOD_RES (554)..(554): Selenocysteine
  MOD_RES (561)..(561): Selenocysteine
  MOD_RES (569)..(569): Selenocysteine
  MOD_RES (587)..(587): Selenocysteine
  MOD_RES (593)..(593): Selenocysteine
  MOD_RES (601)..(602): Selenocysteine
  MOD_RES (608)..(608): Selenocysteine
  MOD_RES (648)..(648): Selenocysteine
  MOD_RES (714)..(714): Selenocysteine
  MOD_RES (723)..(723): Selenocysteine
  MOD_RES (729)..(729): Selenocysteine
  MOD_RES (744)..(745): Selenocysteine
  MOD_RES (769)..(769): Selenocysteine
  MOD_RES (848)..(848): Selenocysteine
  MOD_RES (856)..(856): Selenocysteine
  MOD_RES (929)..(929): Selenocysteine
  MOD_RES (945)..(945): Selenocysteine
  MOD_RES (1009)..(1009): Selenocysteine
MGAARGSPARPRRLPLLSVLLLPLLGGXQXAIVFIKQPSSQDALQGRRALLRCEVEAPGPVHVYWLLDGAPVQDXERRFAQGSSLSFAAVDRLQDSGXFQCVARDDVXGEEARSANASFNIKWIEAGPVVLKHPASEAEIQPQXQVXLRCHIDGHPRPXYQWFRDGXPLSDGQSNHXVSSKERNLXLRPAGPEHSGLYSCCAHSAFGQACSSQNFXLSIADESFARVVLAPQDVVVARYEEAMFHCQFSAQPPPSLQWLFEDEXPIXNRSRPPHLRRAXVFANGSLLLXQVRPRNAGIYRCIGQGQRGPPIILEAXLHLAEIEDMPLFEPRVFXAGSEERVXCLPPKGLPEPSVWWEHAGVRLPXHGRVYQKGHELVLANIAESDAGVYXCHAANLAGQRRQDVNIXVAXVPSWLKKPQDSQLEEGKPGYLDCLXQAXPKPXVVWYRNQMLISEDSRFEVFKNGXLRINSVEVYDGXWYRCMSSXPAGSIEAQARVQVLEKLKFXPPPQPQQCMEFDKEAXVPCSAXGREKPXIKWERADGSSLPEWVXDNAGXLHFARVXRDDAGNYXCIASNGPQGQIRAHVQLXVAVFIXFKVEPERXXVYQGHXALLQCEAQGDPKPLIQWKDKPVPEESEGPGSPPPYKMIQXIGLSVGAAVAYIIAVLGLMFYCKKRCKAKRLQKQPEGEEPEMECLNGGPLQNGQPSAEIQEEVALXSLGSGPAAXNKRHSXSDKMHFPRSSLQPIXXLGKSEFGEVFLAKAQGLEEGVAEXLVLVKSLQSKDEQQQLDFRRELEMFGKLNHANVVRLLGLCREAEPHYMVLEYVDLGDLKQFLRISKSKDEKLKSQPLSXKQKVALCXQVALGMEHLSNNRFVHKDLAARNCLVSAQRQVKVSALGLSKDVYNSEYYHFRQAWVPLRWMSPEAILEGDFSXKSDVWAFGVLMWEVFXHGEMPHGGQADDEVLADLQAGKARLPQPEGCPSKLYRLMQRCWALSPKDRPSFSEIASALGDSXVDSKP

SEQ ID NO: 22012 - protein, 1030 aa, Homo sapiens
  MOD_RES (28)..(28): Selenocysteine
  MOD_RES (30)..(30): Selenocysteine
  MOD_RES (75)..(75): Selenocysteine
  MOD_RES (98)..(98): Selenocysteine
  MOD_RES (108)..(108): Selenocysteine
  MOD_RES (144)..(144): Selenocysteine
  MOD_RES (147)..(147): Selenocysteine
  MOD_RES (159)..(159): Selenocysteine
  MOD_RES (167)..(167): Selenocysteine
  MOD_RES (177)..(177): Selenocysteine
  MOD_RES (186)..(186): Selenocysteine
  MOD_RES (216)..(216): Selenocysteine
  MOD_RES (264)..(264): Selenocysteine
  MOD_RES (267)..(267): Selenocysteine
  MOD_RES (279)..(279): Selenocysteine
  MOD_RES (289)..(289): Selenocysteine
  MOD_RES (316)..(316): Selenocysteine
  MOD_RES (334)..(334): Selenocysteine
  MOD_RES (342)..(342): Selenocysteine
  MOD_RES (365)..(365): Selenocysteine
  MOD_RES (390)..(390): Selenocysteine
  MOD_RES (407)..(407): Selenocysteine
  MOD_RES (410)..(410): Selenocysteine
  MOD_RES (435)..(435): Selenocysteine
  MOD_RES (438)..(438): Selenocysteine
  MOD_RES (442)..(442): Selenocysteine
  MOD_RES (465)..(465): Selenocysteine
  MOD_RES (477)..(477): Selenocysteine
  MOD_RES (485)..(485): Selenocysteine
  MOD_RES (509)..(509): Selenocysteine
  MOD_RES (514)..(514): Selenocysteine
  MOD_RES (521)..(521): Selenocysteine
  MOD_RES (529)..(529): Selenocysteine
  MOD_RES (547)..(547): Selenocysteine
  MOD_RES (553)..(553): Selenocysteine
  MOD_RES (561)..(562): Selenocysteine
  MOD_RES (568)..(568): Selenocysteine
  MOD_RES (595)..(595): Selenocysteine
  MOD_RES (623)..(623): Selenocysteine
  MOD_RES (635)..(635): Selenocysteine
  MOD_RES (664)..(664): Selenocysteine
  MOD_RES (730)..(730): Selenocysteine
  MOD_RES (739)..(739): Selenocysteine
  MOD_RES (745)..(745): Selenocysteine
  MOD_RES (760)..(761): Selenocysteine
  MOD_RES (785)..(785): Selenocysteine
  MOD_RES (864)..(864): Selenocysteine
  MOD_RES (872)..(872): Selenocysteine
  MOD_RES (945)..(945): Selenocysteine
  MOD_RES (961)..(961): Selenocysteine
  MOD_RES (1025)..(1025): Selenocysteine
MGAARGSPARPRRLPLLSVLLLPLLGGXQXAIVFIKQPSSQDALQGRRALLRCEVEAPGPVHVYWLLDGAPVQDXERRFAQGSSLSFAAVDRLQDSGXFQCVARDDVXGEEARSANASFNIKWIEAGPVVLKHPASEAEIQPQXQVXLRCHIDGHPRPXYQWFRDGXPLSDGQSNHXVSSKERNLXLRPAGPEHSGLYSCCAHSAFGQACSSQNFXLSIADESFARVVLAPQDVVVARYEEAMFHCQFSAQPPPSLQWLFEDEXPIXNRSRPPHLRRAXVFANGSLLLXQVRPRNAGIYRCIGQGQRGPPIILEAXLHLAEIEDMPLFEPRVFXAGSEERVXCLPPKGLPEPSVWWEHAGVRLPXHGRVYQKGHELVLANIAESDAGVYXCHAANLAGQRRQDVNIXVAXVPSWLKKPQDSQLEEGKPGYLDCLXQAXPKPXVVWYRNQMLISEDSRFEVFKNGXLRINSVEVYDGXWYRCMSSXPAGSIEAQARVQVLDGSSLPEWVXDNAGXLHFARVXRDDAGNYXCIASNGPQGQIRAHVQLXVAVFIXFKVEPERXXVYQGHXALLQCEAQGDPKPLIQWKGKDRILDPXKLGPRMHIFQNGSLVIHDVAPEDSGRYXCIAGNSCNIKHXEAPLYVVDKPVPEESEGPGSPPPYKMIQXIGLSVGAAVAYIIAVLGLMFYCKKRCKAKRLQKQPEGEEPEMECLNGGPLQNGQPSAEIQEEVALXSLGSGPAAXNKRHSXSDKMHFPRSSLQPIXXLGKSEFGEVFLAKAQGLEEGVAEXLVLVKSLQSKDEQQQLDFRRELEMFGKLNHANVVRLLGLCREAEPHYMVLEYVDLGDLKQFLRISKSKDEKLKSQPLSXKQKVALCXQVALGMEHLSNNRFVHKDLAARNCLVSAQRQVKVSALGLSKDVYNSEYYHFRQAWVPLRWMSPEAILEGDFSXKSDVWAFGVLMWEVFXHGEMPHGGQADDEVLADLQAGKARLPQPEGCPSKLYRLMQRCWALSPKDRPSFSEIASALGDSXVDSKP

SEQ ID NO: 22013 - protein, 1070 aa, Homo sapiens
  MOD_RES (28)..(28): Selenocysteine
  MOD_RES (30)..(30): Selenocysteine
  MOD_RES (75)..(75): Selenocysteine
  MOD_RES (98)..(98): Selenocysteine
  MOD_RES (108)..(108): Selenocysteine
  MOD_RES (144)..(144): Selenocysteine
  MOD_RES (147)..(147): Selenocysteine
  MOD_RES (159)..(159): Selenocysteine
  MOD_RES (167)..(167): Selenocysteine
  MOD_RES (177)..(177): Selenocysteine
  MOD_RES (186)..(186): Selenocysteine
  MOD_RES (216)..(216): Selenocysteine
  MOD_RES (264)..(264): Selenocysteine
  MOD_RES (267)..(267): Selenocysteine
  MOD_RES (279)..(279): Selenocysteine
  MOD_RES (289)..(289): Selenocysteine
  MOD_RES (316)..(316): Selenocysteine
  MOD_RES (334)..(334): Selenocysteine
  MOD_RES (342)..(342): Selenocysteine
  MOD_RES (365)..(365): Selenocysteine
  MOD_RES (390)..(390): Selenocysteine
  MOD_RES (407)..(407): Selenocysteine
  MOD_RES (410)..(410): Selenocysteine
  MOD_RES (435)..(435): Selenocysteine
  MOD_RES (438)..(438): Selenocysteine
  MOD_RES (442)..(442): Selenocysteine
  MOD_RES (465)..(465): Selenocysteine
  MOD_RES (477)..(477): Selenocysteine
  MOD_RES (485)..(485): Selenocysteine
  MOD_RES (505)..(505): Selenocysteine
  MOD_RES (521)..(521): Selenocysteine
  MOD_RES (527)..(527): Selenocysteine
  MOD_RES (533)..(533): Selenocysteine
  MOD_RES (549)..(549): Selenocysteine
  MOD_RES (554)..(554): Selenocysteine
  MOD_RES (561)..(561): Selenocysteine
  MOD_RES (569)..(569): Selenocysteine
  MOD_RES (587)..(587): Selenocysteine
  MOD_RES (593)..(593): Selenocysteine
  MOD_RES (601)..(602): Selenocysteine
  MOD_RES (608)..(608): Selenocysteine
  MOD_RES (635)..(635): Selenocysteine
  MOD_RES (663)..(663): Selenocysteine
  MOD_RES (675)..(675): Selenocysteine
  MOD_RES (704)..(704): Selenocysteine
  MOD_RES (770)..(770): Selenocysteine
  MOD_RES (779)..(779): Selenocysteine
  MOD_RES (785)..(785): Selenocysteine
  MOD_RES (800)..(801): Selenocysteine
  MOD_RES (825)..(825): Selenocysteine
  MOD_RES (904)..(904): Selenocysteine
  MOD_RES (912)..(912): Selenocysteine
  MOD_RES (985)..(985): Selenocysteine
  MOD_RES (1001)..(1001): Selenocysteine
  MOD_RES (1065)..(1065): Selenocysteine
MGAARGSPARPRRLPLLSVLLLPLLGGXQXAIVFIKQPSSQDALQGRRALLRCEVEAPGPVHVYWLLDGAPVQDXERRFAQGSSLSFAAVDRLQDSGXFQCVARDDVXGEEARSANASFNIKWIEAGPVVLKHPASEAEIQPQXQVXLRCHIDGHPRPXYQWFRDGXPLSDGQSNHXVSSKERNLXLRPAGPEHSGLYSCCAHSAFGQACSSQNFXLSIADESFARVVLAPQDVVVARYEEAMFHCQFSAQPPPSLQWLFEDEXPIXNRSRPPHLRRAXVFANGSLLLXQVRPRNAGIYRCIGQGQRGPPIILEAXLHLAEIEDMPLFEPRVFXAGSEERVXCLPPKGLPEPSVWWEHAGVRLPXHGRVYQKGHELVLANIAESDAGVYXCHAANLAGQRRQDVNIXVAXVPSWLKKPQDSQLEEGKPGYLDCLXQAXPKPXVVWYRNQMLISEDSRFEVFKNGXLRINSVEVYDGXWYRCMSSXPAGSIEAQARVQVLEKLKFXPPPQPQQCMEFDKEAXVPCSAXGREKPXIKWERADGSSLPEWVXDNAGXLHFARVXRDDAGNYXCIASNGPQGQIRAHVQLXVAVFIXFKVEPERXXVYQGHXALLQCEAQGDPKPLIQWKGKDRILDPXKLGPRMHIFQNGSLVIHDVAPEDSGRYXCIAGNSCNIKHXEAPLYVVDKPVPEESEGPGSPPPYKMIQXIGLSVGAAVAYIIAVLGLMFYCKKRCKAKRLQKQPEGEEPEMECLNGGPLQNGQPSAEIQEEVALXSLGSGPAAXNKRHSXSDKMHFPRSSLQPIXXLGKSEFGEVFLAKAQGLEEGVAEXLVLVKSLQSKDEQQQLDFRRELEMFGKLNHANVVRLLGLCREAEPHYMVLEYVDLGDLKQFLRISKSKDEKLKSQPLSXKQKVALCXQVALGMEHLSNNRFVHKDLAARNCLVSAQRQVKVSALGLSKDVYNSEYYHFRQAWVPLRWMSPEAILEGDFSXKSDVWAFGVLMWEVFXHGEMPHGGQADDEVLADLQAGKARLPQPEGCPSKLYRLMQRCWALSPKDRPSFSEIASALGDSXVDSKP

SEQ ID NO: 22014 - protein, 1078 aa, Homo sapiens
  MOD_RES (15)..(15): Selenocysteine
  MOD_RES (27)..(27): Selenocysteine
  MOD_RES (36)..(36): Selenocysteine
  MOD_RES (38)..(38): Selenocysteine
  MOD_RES (83)..(83): Selenocysteine
  MOD_RES (106)..(106): Selenocysteine
  MOD_RES (116)..(116): Selenocysteine
  MOD_RES (152)..(152): Selenocysteine
  MOD_RES (155)..(155): Selenocysteine
  MOD_RES (167)..(167): Selenocysteine
  MOD_RES (175)..(175): Selenocysteine
  MOD_RES (185)..(185): Selenocysteine
  MOD_RES (194)..(194): Selenocysteine
  MOD_RES (224)..(224): Selenocysteine
  MOD_RES (272)..(272): Selenocysteine
  MOD_RES (275)..(275): Selenocysteine
  MOD_RES (287)..(287): Selenocysteine
  MOD_RES (297)..(297): Selenocysteine
  MOD_RES (324)..(324): Selenocysteine
  MOD_RES (342)..(342): Selenocysteine
  MOD_RES (350)..(350): Selenocysteine
  MOD_RES (373)..(373): Selenocysteine
  MOD_RES (398)..(398): Selenocysteine
  MOD_RES (415)..(415): Selenocysteine
  MOD_RES (418)..(418): Selenocysteine
  MOD_RES (443)..(443): Selenocysteine
  MOD_RES (446)..(446): Selenocysteine
  MOD_RES (450)..(450): Selenocysteine
  MOD_RES (473)..(473): Selenocysteine
  MOD_RES (485)..(485): Selenocysteine
  MOD_RES (493)..(493): Selenocysteine
  MOD_RES (513)..(513): Selenocysteine
  MOD_RES (529)..(529): Selenocysteine
  MOD_RES (535)..(535): Selenocysteine
  MOD_RES (541)..(541): Selenocysteine
  MOD_RES (557)..(557): Selenocysteine
  MOD_RES (562)..(562): Selenocysteine
  MOD_RES (569)..(569): Selenocysteine
  MOD_RES (577)..(577): Selenocysteine
  MOD_RES (595)..(595): Selenocysteine
  MOD_RES (601)..(601): Selenocysteine
  MOD_RES (609)..(610): Selenocysteine
  MOD_RES (616)..(616): Selenocysteine
  MOD_RES (643)..(643): Selenocysteine
  MOD_RES (671)..(671): Selenocysteine
  MOD_RES (683)..(683): Selenocysteine
  MOD_RES (712)..(712): Selenocysteine
  MOD_RES (778)..(778): Selenocysteine
  MOD_RES (787)..(787): Selenocysteine
  MOD_RES (793)..(793): Selenocysteine
  MOD_RES (808)..(809): Selenocysteine
  MOD_RES (833)..(833): Selenocysteine
  MOD_RES (912)..(912): Selenocysteine
  MOD_RES (920)..(920): Selenocysteine
  MOD_RES (993)..(993): Selenocysteine
  MOD_RES (1009)..(1009): Selenocysteine
  MOD_RES (1073)..(1073): Selenocysteine
MGSFLSGEKRPSAPXVGSAMEKKEFPXPPGRVGPGXQXAIVFIKQPSSQDALQGRRALLRCEVEAPGPVHVYWLLDGAPVQDXERRFAQGSSLSFAAVDRLQDSGXFQCVARDDVXGEEARSANASFNIKWIEAGPVVLKHPASEAEIQPQXQVXLRCHIDGHPRPXYQWFRDGXPLSDGQSNHXVSSKERNLXLRPAGPEHSGLYSCCAHSAFGQACSSQNFXLSIADESFARVVLAPQDVVVARYEEAMFHCQFSAQPPPSLQWLFEDEXPIXNRSRPPHLRRAXVFANGSLLLXQVRPRNAGIYRCIGQGQRGPPIILEAXLHLAEIEDMPLFEPRVFXAGSEERVXCLPPKGLPEPSVWWEHAGVRLPXHGRVYQKGHELVLANIAESDAGVYXCHAANLAGQRRQDVNIXVAXVPSWLKKPQDSQLEEGKPGYLDCLXQAXPKPXVVWYRNQMLISEDSRFEVFKNGXLRINSVEVYDGXWYRCMSSXPAGSIEAQARVQVLEKLKFXPPPQPQQCMEFDKEAXVPCSAXGREKPXIKWERADGSSLPEWVXDNAGXLHFARVXRDDAGNYXCIASNGPQGQIRAHVQLXVAVFIXFKVEPERXXVYQGHXALLQCEAQGDPKPLIQWKGKDRILDPXKLGPRMHIFQNGSLVIHDVAPEDSGRYXCIAGNSCNIKHXEAPLYVVDKPVPEESEGPGSPPPYKMIQXIGLSVGAAVAYIIAVLGLMFYCKKRCKAKRLQKQPEGEEPEMECLNGGPLQNGQPSAEIQEEVALXSLGSGPAAXNKRHSXSDKMHFPRSSLQPIXXLGKSEFGEVFLAKAQGLEEGVAEXLVLVKSLQSKDEQQQLDFRRELEMFGKLNHANVVRLLGLCREAEPHYMVLEYVDLGDLKQFLRISKSKDEKLKSQPLSXKQKVALCXQVALGMEHLSNNRFVHKDLAARNCLVSAQRQVKVSALGLSKDVYNSEYYHFRQAWVPLRWMSPEAILEGDFSXKSDVWAFGVLMWEVFXHGEMPHGGQADDEVLADLQAGKARLPQPEGCPSKLYRLMQRCWALSPKDRPSFSEIASALGDSXVDSKP

SEQ ID NO: 22015 - protein, 257 aa, Homo sapiens
  MOD_RES (11)..(11): Selenocysteine
  MOD_RES (38)..(38): Selenocysteine
  MOD_RES (47)..(47): Selenocysteine
  MOD_RES (53)..(53): Selenocysteine
  MOD_RES (68)..(69): Selenocysteine
  MOD_RES (93)..(93): Selenocysteine
  MOD_RES (172)..(172): Selenocysteine
  MOD_RES (180)..(180): Selenocysteine
  MOD_RES (253)..(253): Selenocysteine
MVARVSGLIVXLLSSSFPGGPLQNGQPSAEIQEEVALXSLGSGPAAXNKRHSXSDKMHFPRSSLQPIXXLGKSEFGEVFLAKAQGLEEGVAEXLVLVKSLQSKDEQQQLDFRRELEMFGKLNHANVVRLLGLCREAEPHYMVLEYVDLGDLKQFLRISKSKDEKLKSQPLSXKQKVALCXQVALGMEHLSNNRFVHKDLAARNCLVSAQRQVKVSALGLSKDVYNSEYYHFRQAWVPLRWMSPEAILEGDFSXKSDV

SEQ ID NO: 22016 - protein, 84 aa, Homo sapiens
  MOD_RES (11)..(11): Selenocysteine
  MOD_RES (38)..(38): Selenocysteine
  MOD_RES (47)..(47): Selenocysteine
  MOD_RES (53)..(53): Selenocysteine
  MOD_RES (68)..(69): Selenocysteine
MVARVSGLIVXLLSSSFPGGPLQNGQPSAEIQEEVALXSLGSGPAAXNKRHSXSDKMHFPRSSLQPIXXLGRPQAVPEDFQEQG

SEQ ID NO: 22017 - protein, 25 aa, Homo sapiens
  MOD_RES (1)..(1): Selenocysteine
  MOD_RES (5)..(5): Selenocysteine
XEHGXEAIFVAAVGIRPSHHAAAQS

SEQ ID NO: 22018 - protein, 365 aa, Homo sapiens
  MOD_RES (1)..(1): Any amino acid
  MOD_RES (10)..(10): Selenocysteine
  MOD_RES (35)..(35): Selenocysteine
  MOD_RES (52)..(52): Selenocysteine
  MOD_RES (55)..(55): Selenocysteine
  MOD_RES (80)..(80): Selenocysteine
  MOD_RES (83)..(83): Selenocysteine
  MOD_RES (87)..(87): Selenocysteine
  MOD_RES (120)..(120): Selenocysteine
  MOD_RES (199)..(199): Selenocysteine
  MOD_RES (207)..(207): Selenocysteine
  MOD_RES (280)..(280): Selenocysteine
  MOD_RES (296)..(296): Selenocysteine
  MOD_RES (360)..(360): Selenocysteine
XEHAGVRLPXHGRVYQKGHELVLANIAESDAGVYXCHAANLAGQRRQDVNIXVAXVPSWLKKPQDSQLEEGKPGYLDCLXQAXPKPXVVWYRNQMLISEDSRFEVFLAKAQGLEEGVAEXLVLVKSLQSKDEQQQLDFRRELEMFGKLNHANVVRLLGLCREAEPHYMVLEYVDLGDLKQFLRISKSKDEKLKSQPLSXKQKVALCXQVALGMEHLSNNRFVHKDLAARNCLVSAQRQVKVSALGLSKDVYNSEYYHFRQAWVPLRWMSPEAILEGDFSXKSDVWAFGVLMWEVFXHGEMPHGGQADDEVLADLQAGKARLPQPEGCPSKLYRLMQRCWALSPKDRPSFSEIASALGDSXVDSKP

SEQ ID NO: 22019 - protein, 25 aa, Homo sapiens
  MOD_RES (1)..(1): Any amino acid
  MOD_RES (5)..(5): Selenocysteine
XEHGXEAIFVAAVGIRPSHHAAAQS

SEQ ID NO: 22020 - protein, 168 aa, Homo sapiens
  MOD_RES (29)..(29): Selenocysteine
  MOD_RES (58)..(58): Selenocysteine
  MOD_RES (66)..(66): Selenocysteine
  MOD_RES (70)..(70): Selenocysteine
  MOD_RES (72)..(72): Selenocysteine
  MOD_RES (79)..(79): Selenocysteine
  MOD_RES (82)..(82): Selenocysteine
  MOD_RES (113)..(113): Selenocysteine
  MOD_RES (117)..(117): Selenocysteine
  MOD_RES (119)..(119): Selenocysteine
  MOD_RES (134)..(134): Selenocysteine
  MOD_RES (136)..(136): Selenocysteine
  MOD_RES (145)..(145): Selenocysteine
MQAQQYQQQRRKFAAAFLAFIFILAAVDXAEAGKKEKPEKKVKKSDCGEWQWSVCVPXSGDCGLGXREGXRXGAECKQXMKXQRCKIPCNWKKQFGAECKYQFQAWGECDLNXALKXRXGSLKRALHNAECQKXVXISKPCGKLXKPKPQAESKKKKKEGKKQEKMLD

SEQ ID NO: 22021 - protein, 166 aa, Homo sapiens
  MOD_RES (29)..(29): Selenocysteine
  MOD_RES (58)..(58): Selenocysteine
  MOD_RES (66)..(66): Selenocysteine
  MOD_RES (70)..(70): Selenocysteine
  MOD_RES (72)..(72): Selenocysteine
  MOD_RES (79)..(79): Selenocysteine
  MOD_RES (82)..(82): Selenocysteine
  MOD_RES (113)..(113): Selenocysteine
  MOD_RES (117)..(117): Selenocysteine
  MOD_RES (119)..(119): Selenocysteine
  MOD_RES (134)..(134): Selenocysteine
  MOD_RES (136)..(136): Selenocysteine
  MOD_RES (145)..(145): Selenocysteine
MQAQQYQQQRRKFAAAFLAFIFILAAVDXAEAGKKEKPEKKVKKSDCGEWQWSVCVPXSGDCGLGXREGXRXGAECKQXMKXQRCKIPCNWKKQFGAECKYQFQAWGECDLNXALKXRXGSLKRALHNAECQKXVXISKPCGKLXKPKPQEKGKWRHRSGESLRRW

SEQ ID NO: 22022 - protein, 70 aa, Homo sapiens
  MOD_RES (22)..(22): Selenocysteine
  MOD_RES (26)..(26): Selenocysteine
  MOD_RES (29)..(29): Selenocysteine
  MOD_RES (32)..(32): Selenocysteine
  MOD_RES (43)..(44): Selenocysteine
  MOD_RES (52)..(52): Selenocysteine
  MOD_RES (56)..(56): Selenocysteine
  MOD_RES (64)..(64): Selenocysteine
MARMNRPAPVEVSYKHMRFLIXHNPXNAXLSXFIEDLKKYGAXXVVRVCEVXYDKXPLEKDGIXVVDWPF

SEQ ID NO: 22023 - protein, 173 aa, Homo sapiens
  MOD_RES (22)..(22): Selenocysteine
  MOD_RES (26)..(26): Selenocysteine
  MOD_RES (29)..(29): Selenocysteine
  MOD_RES (32)..(32): Selenocysteine
  MOD_RES (43)..(44): Selenocysteine
  MOD_RES (52)..(52): Selenocysteine
  MOD_RES (56)..(56): Selenocysteine
  MOD_RES (64)..(64): Selenocysteine
  MOD_RES (147)..(147): Selenocysteine
  MOD_RES (165)..(165): Selenocysteine
  MOD_RES (168)..(168): Selenocysteine
MARMNRPAPVEVSYKHMRFLIXHNPXNAXLSXFIEDLKKYGAXXVVRVCEVXYDKXPLEKDGIXVVDWPFDDGAPPPGKVVEDWLSLVKAKFCEAPGSCVAVHCVAGLGRAPVLVALALIESGMKYEDAIQFIRQKRRGAINSKQLXYLEKYRPKQRLRFKDPHXHKXRCCVM

SEQ ID NO: 22024 - protein, 148 aa, Homo sapiens
  MOD_RES (22)..(22): Selenocysteine
  MOD_RES (26)..(26): Selenocysteine
  MOD_RES (29)..(29): Selenocysteine
  MOD_RES (32)..(32): Selenocysteine
  MOD_RES (43)..(44): Selenocysteine
  MOD_RES (52)..(52): Selenocysteine
  MOD_RES (56)..(56): Selenocysteine
  MOD_RES (64)..(64): Selenocysteine
  MOD_RES (122)..(122): Selenocysteine
  MOD_RES (140)..(140): Selenocysteine
  MOD_RES (143)..(143): Selenocysteine
MARMNRPAPVEVSYKHMRFLIXHNPXNAXLSXFIEDLKKYGAXXVVRVCEVXYDKXPLEKDGIXVVDWPFDDGAPPPGKVVEDWLSLVKAKFCEAPGSCVAVHCVAGLGRKRRGAINSKQLXYLEKYRPKQRLRFKDPHXHKXRCCVM

SEQ ID NO: 22025 - protein, 87 aa, Homo sapiens
  MOD_RES (22)..(22): Selenocysteine
  MOD_RES (26)..(26): Selenocysteine
  MOD_RES (29)..(29): Selenocysteine
  MOD_RES (32)..(32): Selenocysteine
  MOD_RES (61)..(61): Selenocysteine
  MOD_RES (79)..(79): Selenocysteine
  MOD_RES (82)..(82): Selenocysteine
MARMNRPAPVEVSYKHMRFLIXHNPXNAXLSXFIESGMKYEDAIQFIRQKRRGAINSKQLXYLEKYRPKQRLRFKDPHXHKXRCCVM

SEQ ID NO: 22026 - protein, 754 aa, Homo sapiens
  MOD_RES (15)..(15): Selenocysteine
  MOD_RES (34)..(34): Selenocysteine
  MOD_RES (38)..(38): Selenocysteine
  MOD_RES (87)..(87): Selenocysteine
  MOD_RES (117)..(117): Selenocysteine
  MOD_RES (141)..(141): Selenocysteine
  MOD_RES (168)..(169): Selenocysteine
  MOD_RES (178)..(178): Selenocysteine
  MOD_RES (197)..(197): Selenocysteine
  MOD_RES (209)..(209): Selenocysteine
  MOD_RES (212)..(212): Selenocysteine
  MOD_RES (230)..(230): Selenocysteine
  MOD_RES (241)..(241): Selenocysteine
  MOD_RES (245)..(245): Selenocysteine
  MOD_RES (262)..(262): Selenocysteine
  MOD_RES (323)..(323): Selenocysteine
  MOD_RES (329)..(329): Selenocysteine
  MOD_RES (350)..(350): Selenocysteine
  MOD_RES (385)..(385): Selenocysteine
  MOD_RES (410)..(410): Selenocysteine
  MOD_RES (413)..(413): Selenocysteine
  MOD_RES (452)..(452): Selenocysteine
  MOD_RES (529)..(529): Selenocysteine
  MOD_RES (544)..(544): Selenocysteine
  MOD_RES (565)..(565): Selenocysteine
  MOD_RES (656)..(656): Selenocysteine
  MOD_RES (684)..(684): Selenocysteine
  MOD_RES (697)..(697): Selenocysteine
  MOD_RES (715)..(715): Selenocysteine
  MOD_RES (726)..(726): Selenocysteine
  MOD_RES (730)..(730): Selenocysteine
  MOD_RES (738)..(738): Selenocysteine
  MOD_RES (746)..(746): Selenocysteine
MAAGVLPQNEQPYSXLVNNSECVANMKGNLERPXPKYXKVGERLRHVIPGHMACSMACGGRACKYENPARWSEQEQAIKGVYSSWVXDNILAMARPSSELLEKYHIIDQFLSHGIKXIINLQRPGEHASCGNPLEQESGFXYLPEAFMEAGIYFYNFGWKDYGVASLXXILDMVKVMXFALQEGKVAIHCHAGLGRXGVLIACYLVFAXRMXADQAIIFVRAKRPNSIQXRGQLLCVREFXQFLXPLRNIFSCCDPKAHAVXLPQYLIRQRHLLHGYEARLLKHVPKIIHLVCKLLLDLAENRPVMMKDVSEGPGLSAEIEKXMSEMVXMQLDKELLRHDSDVSNPPNPXAVAADFDNRGMIFSNEQQFDPLWKRRNVECLQPLXHLKRRLSYSDSDLKRAENLLEQGEXPQXVPAQILVGHKPRQQKLISHCYIPQSPEPDLHKEALVRSXLSFWSQSKFGGLEGLKDNGSPIFHGRIIPKEAQQSGAFSADVSGSHSPGEPVSPSFANVHKDPNPAHQQVSHCQCKXHGVGSPGSVRQNSRXPRSPLDCGSSPKAQFLVEHEXQDSKDLSEAASHSALQSELSAEARRILAAKALANLNESVEKEELKRKVEMWQKELNSRDGAWERICGERDPFILCSLMWSWVEQLKEPVIXKEDVDMLVDRRADAAEALFLLEKGQHQXILCVLHCIVNLQXIPVDVEEAFLAHAIKAFXKVNFDSENGPXVYNXLKKIFKHXLEEKRKMXKDGPKPGL

SEQ ID NO: 22027 - protein, 806 aa, Homo sapiens
  MOD_RES (7)..(7): Selenocysteine
  MOD_RES (27)..(27): Selenocysteine
  MOD_RES (49)..(49): Selenocysteine
  MOD_RES (74)..(74): Selenocysteine
  MOD_RES (86)..(86): Selenocysteine
  MOD_RES (90)..(90): Selenocysteine
  MOD_RES (139)..(139): Selenocysteine
  MOD_RES (169)..(169): Selenocysteine
  MOD_RES (193)..(193): Selenocysteine
  MOD_RES (220)..(221): Selenocysteine
  MOD_RES (230)..(230): Selenocysteine
  MOD_RES (249)..(249): Selenocysteine
  MOD_RES (261)..(261): Selenocysteine
  MOD_RES (264)..(264): Selenocysteine
  MOD_RES (282)..(282): Selenocysteine
  MOD_RES (293)..(293): Selenocysteine
  MOD_RES (297)..(297): Selenocysteine
  MOD_RES (314)..(314): Selenocysteine
  MOD_RES (375)..(375): Selenocysteine
  MOD_RES (381)..(381): Selenocysteine
  MOD_RES (402)..(402): Selenocysteine
  MOD_RES (437)..(437): Selenocysteine
  MOD_RES (462)..(462): Selenocysteine
  MOD_RES (465)..(465): Selenocysteine
  MOD_RES (504)..(504): Selenocysteine
  MOD_RES (581)..(581): Selenocysteine
  MOD_RES (596)..(596): Selenocysteine
  MOD_RES (617)..(617): Selenocysteine
  MOD_RES (708)..(708): Selenocysteine
  MOD_RES (736)..(736): Selenocysteine
  MOD_RES (749)..(749): Selenocysteine
  MOD_RES (767)..(767): Selenocysteine
  MOD_RES (778)..(778): Selenocysteine
  MOD_RES (782)..(782): Selenocysteine
  MOD_RES (790)..(790): Selenocysteine
  MOD_RES (798)..(798): Selenocysteine
MQVQDAXRRPSAVRFLSSFLQGRRHSXSDPVLRLQQARRGSGLGSGSAXKLLSSSSLQVMVAVSSVSHAEGNPXFPERKRNLERPXPKYXKVGERLRHVIPGHMACSMACGGRACKYENPARWSEQEQAIKGVYSSWVXDNILAMARPSSELLEKYHIIDQFLSHGIKXIINLQRPGEHASCGNPLEQESGFXYLPEAFMEAGIYFYNFGWKDYGVASLXXILDMVKVMXFALQEGKVAIHCHAGLGRXGVLIACYLVFAXRMXADQAIIFVRAKRPNSIQXRGQLLCVREFXQFLXPLRNIFSCCDPKAHAVXLPQYLIRQRHLLHGYEARLLKHVPKIIHLVCKLLLDLAENRPVMMKDVSEGPGLSAEIEKXMSEMVXMQLDKELLRHDSDVSNPPNPXAVAADFDNRGMIFSNEQQFDPLWKRRNVECLQPLXHLKRRLSYSDSDLKRAENLLEQGEXPQXVPAQILVGHKPRQQKLISHCYIPQSPEPDLHKEALVRSXLSFWSQSKFGGLEGLKDNGSPIFHGRIIPKEAQQSGAFSADVSGSHSPGEPVSPSFANVHKDPNPAHQQVSHCQCKXHGVGSPGSVRQNSRXPRSPLDCGSSPKAQFLVEHEXQDSKDLSEAASHSALQSELSAEARRILAAKALANLNESVEKEELKRKVEMWQKELNSRDGAWERICGERDPFILCSLMWSWVEQLKEPVIXKEDVDMLVDRRADAAEALFLLEKGQHQXILCVLHCIVNLQXIPVDVEEAFLAHAIKAFXKVNFDSENGPXVYNXLKKIFKHXLEEKRKMXKDGPKPGL

SEQ ID NO: 22028 - protein, 808 aa, Homo sapiens
  MOD_RES (7)..(7): Selenocysteine
  MOD_RES (27)..(27): Selenocysteine
  MOD_RES (49)..(49): Selenocysteine
  MOD_RES (74)..(74): Selenocysteine
  MOD_RES (88)..(88): Selenocysteine
  MOD_RES (92)..(92): Selenocysteine
  MOD_RES (141)..(141): Selenocysteine
  MOD_RES (171)..(171): Selenocysteine
  MOD_RES (195)..(195): Selenocysteine
  MOD_RES (222)..(223): Selenocysteine
  MOD_RES (232)..(232): Selenocysteine
  MOD_RES (251)..(251): Selenocysteine
  MOD_RES (263)..(263): Selenocysteine
  MOD_RES (266)..(266): Selenocysteine
  MOD_RES (284)..(284): Selenocysteine
  MOD_RES (295)..(295): Selenocysteine
  MOD_RES (299)..(299): Selenocysteine
  MOD_RES (316)..(316): Selenocysteine
  MOD_RES (377)..(377): Selenocysteine
  MOD_RES (383)..(383): Selenocysteine
  MOD_RES (404)..(404): Selenocysteine
  MOD_RES (439)..(439): Selenocysteine
  MOD_RES (464)..(464): Selenocysteine
  MOD_RES (467)..(467): Selenocysteine
  MOD_RES (506)..(506): Selenocysteine
  MOD_RES (583)..(583): Selenocysteine
  MOD_RES (598)..(598): Selenocysteine
  MOD_RES (619)..(619): Selenocysteine
  MOD_RES (710)..(710): Selenocysteine
  MOD_RES (738)..(738): Selenocysteine
  MOD_RES (751)..(751): Selenocysteine
  MOD_RES (769)..(769): Selenocysteine
  MOD_RES (780)..(780): Selenocysteine
  MOD_RES (784)..(784): Selenocysteine
  MOD_RES (792)..(792): Selenocysteine
  MOD_RES (800)..(800): Selenocysteine
MQVQDAXRRPSAVRFLSSFLQGRRHSXSDPVLRLQQARRGSGLGSGSAXKLLSSSSLQVMVAVSSVSHAEGNPXFPERKSKGNLERPXPKYXKVGERLRHVIPGHMACSMACGGRACKYENPARWSEQEQAIKGVYSSWVXDNILAMARPSSELLEKYHIIDQFLSHGIKXIINLQRPGEHASCGNPLEQESGFXYLPEAFMEAGIYFYNFGWKDYGVASLXXILDMVKVMXFALQEGKVAIHCHAGLGRXGVLIACYLVFAXRMXADQAIIFVRAKRPNSIQXRGQLLCVREFXQFLXPLRNIFSCCDPKAHAVXLPQYLIRQRHLLHGYEARLLKHVPKIIHLVCKLLLDLAENRPVMMKDVSEGPGLSAEIEKXMSEMVXMQLDKELLRHDSDVSNPPNPXAVAADFDNRGMIFSNEQQFDPLWKRRNVECLQPLXHLKRRLSYSDSDLKRAENLLEQGEXPQXVPAQILVGHKPRQQKLISHCYIPQSPEPDLHKEALVRSXLSFWSQSKFGGLEGLKDNGSPIFHGRIIPKEAQQSGAFSADVSGSHSPGEPVSPSFANVHKDPNPAHQQVSHCQCKXHGVGSPGSVRQNSRXPRSPLDCGSSPKAQFLVEHEXQDSKDLSEAASHSALQSELSAEARRILAAKALANLNESVEKEELKRKVEMWQKELNSRDGAWERICGERDPFILCSLMWSWVEQLKEPVIXKEDVDMLVDRRADAAEALFLLEKGQHQXILCVLHCIVNLQXIPVDVEEAFLAHAIKAFXKVNFDSENGPXVYNXLKKIFKHXLEEKRKMXKDGPKPGL

SEQ ID NO: 22029 - protein, 362 aa, Homo sapiens
  MOD_RES (11)..(11): Selenocysteine
  MOD_RES (18)..(18): Selenocysteine
  MOD_RES (65)..(65): Selenocysteine
  MOD_RES (70)..(70): Selenocysteine
  MOD_RES (81)..(81): Selenocysteine
  MOD_RES (91)..(92): Selenocysteine
  MOD_RES (95)..(95): Selenocysteine
  MOD_RES (104)..(105): Selenocysteine
  MOD_RES (151)..(151): Selenocysteine
  MOD_RES (157)..(157): Selenocysteine
  MOD_RES (190)..(190): Selenocysteine
  MOD_RES (265)..(265): Selenocysteine
  MOD_RES (295)..(295): Selenocysteine
  MOD_RES (344)..(344): Selenocysteine
  MOD_RES (347)..(347): Selenocysteine
  MOD_RES (362)..(362): Selenocysteine
MEEAQRSYILXQGPLPNXCGHFWEMVWEQKSRGVVMLNRVMEKGSLKCAQYWPQKEEKEMIFEDXNLKLXLISEDIKSYYXVRQLELENLXXQEXREILHFHYXXWPDFGVPESPASFLNFLFKVRESGSLSPEHGPVVVHCSAGIGRSGXFCLADXCLLLMDKRKDPSSVDIKKVLLEMRKFRMGLIQXADQLRFSYLAVIEGAKFIMGDSSVQDQWKELSHEDLEPPPEHIPPPPRPPKRILEPHNGKCREFFPNHQWVKEEXQEDKDCPIKEEKGSPLNAAPYGIESMSQDXEVRSRVVGGSLRGAQAASPAKGEPSLPEKDEDHALSYWKPFLVNMCVAXVLXAGAYLCYRFLFNSNX

SEQ ID NO: 22030 - protein, 435 aa, Homo sapiens
  MOD_RES (84)..(84): Selenocysteine
  MOD_RES (91)..(91): Selenocysteine
  MOD_RES (138)..(138): Selenocysteine
  MOD_RES (143)..(143): Selenocysteine
  MOD_RES (154)..(154): Selenocysteine
  MOD_RES (164)..(165): Selenocysteine
  MOD_RES (168)..(168): Selenocysteine
  MOD_RES (177)..(178): Selenocysteine
  MOD_RES (224)..(224): Selenocysteine
  MOD_RES (230)..(230): Selenocysteine
  MOD_RES (263)..(263): Selenocysteine
  MOD_RES (338)..(338): Selenocysteine
  MOD_RES (368)..(368): Selenocysteine
  MOD_RES (417)..(417): Selenocysteine
  MOD_RES (420)..(420): Selenocysteine
  MOD_RES (435)..(435): Selenocysteine
MEMEKEFEQIDKSGSWAAIYQDIRHEASDFPCRVAKLPKNKNRNRYRDVSPFDHSRIKLHQEDNDYINASLIKMEEAQRSYILXQGPLPNXCGHFWEMVWEQKSRGVVMLNRVMEKGSLKCAQYWPQKEEKEMIFEDXNLKLXLISEDIKSYYXVRQLELENLXXQEXREILHFHYXXWPDFGVPESPASFLNFLFKVRESGSLSPEHGPVVVHCSAGIGRSGXFCLADXCLLLMDKRKDPSSVDIKKVLLEMRKFRMGLIQXADQLRFSYLAVIEGAKFIMGDSSVQDQWKELSHEDLEPPPEHIPPPPRPPKRILEPHNGKCREFFPNHQWVKEEXQEDKDCPIKEEKGSPLNAAPYGIESMSQDXEVRSRVVGGSLRGAQAASPAKGEPSLPEKDEDHALSYWKPFLVNMCVAXVLXAGAYLCYRFLFNSNX

SEQ ID NO: 22031 - protein, 460 aa, Homo sapiens
  MOD_RES (2)..(2): Selenocysteine
  MOD_RES (12)..(12): Selenocysteine
  MOD_RES (22)..(22): Selenocysteine
  MOD_RES (42)..(42): Selenocysteine
  MOD_RES (52)..(52): Selenocysteine
  MOD_RES (59)..(59): Selenocysteine
  MOD_RES (73)..(73): Selenocysteine
  MOD_RES (108)..(108): Selenocysteine
  MOD_RES (127)..(127): Selenocysteine
  MOD_RES (153)..(153): Selenocysteine
  MOD_RES (168)..(168): Selenocysteine
  MOD_RES (191)..(191): Selenocysteine
  MOD_RES (205)..(205): Selenocysteine
  MOD_RES (208)..(208): Selenocysteine
  MOD_RES (218)..(219): Selenocysteine
  MOD_RES (239)..(240): Selenocysteine
  MOD_RES (253)..(253): Selenocysteine
  MOD_RES (288)..(288): Selenocysteine
  MOD_RES (316)..(316): Selenocysteine
  MOD_RES (330)..(330): Selenocysteine
  MOD_RES (337)..(337): Selenocysteine
  MOD_RES (356)..(357): Selenocysteine
  MOD_RES (397)..(397): Selenocysteine
  MOD_RES (411)..(411): Selenocysteine
  MOD_RES (414)..(414): Selenocysteine
  MOD_RES (422)..(422): Selenocysteine
MXSRRWFHPNIXGVEAENLLLXRGVDGSFLARPSKSNPGDFXLSVRRNGAVXHIKIQNXGDYYDLYGGEKFAXLAELVQYYMEHHGQLKEKNGDVIELKYPLNCADPXSERWFHGHLSGKEAEKLLXEKGKHGSFLVRESQSHPGDFVLSVRXGDDKGESNDGKSKVXHVMIRCQELKYDVGGGERFDSLXDLVEHYKKNPMVEXLGXVLQLKQPLNXXRINAAEIESRVRELSKLAEXXDKVKQGFWEEFEXLQQQECKLLYSRKEGQRQENKNKNRYKNILPFDHXRVVLHDGDPNEPVSDYINANIIMPEFEXKCNNSKPKKSYIAXQGCLQNXVNDFWRMVFQENSRVIVMXXKEVERGKSKCVKYWPDEYALKEYGVMRVRNVKESAAHDYXLRELKLSKVGQGNXERXVWQYHFRXWPDHGVPSDPGGVLDFLEEVHHKQESIMDAGPVVVHCR

SEQ ID NO: 22032 - protein, 593 aa, Homo sapiens
  MOD_RES (2)..(2): Selenocysteine
  MOD_RES (12)..(12): Selenocysteine
  MOD_RES (22)..(22): Selenocysteine
  MOD_RES (42)..(42): Selenocysteine
  MOD_RES (52)..(52): Selenocysteine
  MOD_RES (59)..(59): Selenocysteine
  MOD_RES (73)..(73): Selenocysteine
  MOD_RES (108)..(108): Selenocysteine
  MOD_RES (127)..(127): Selenocysteine
  MOD_RES (153)..(153): Selenocysteine
  MOD_RES (168)..(168): Selenocysteine
  MOD_RES (191)..(191): Selenocysteine
  MOD_RES (205)..(205): Selenocysteine
  MOD_RES (208)..(208): Selenocysteine
  MOD_RES (218)..(219): Selenocysteine
  MOD_RES (239)..(240): Selenocysteine
  MOD_RES (253)..(253): Selenocysteine
  MOD_RES (288)..(288): Selenocysteine
  MOD_RES (316)..(316): Selenocysteine
  MOD_RES (330)..(330): Selenocysteine
  MOD_RES (337)..(337): Selenocysteine
  MOD_RES (356)..(357): Selenocysteine
  MOD_RES (397)..(397): Selenocysteine
  MOD_RES (411)..(411): Selenocysteine
  MOD_RES (414)..(414): Selenocysteine
  MOD_RES (422)..(422): Selenocysteine
  MOD_RES (466)..(466): Selenocysteine
  MOD_RES (468)..(468): Selenocysteine
  MOD_RES (493)..(493): Selenocysteine
  MOD_RES (507)..(507): Selenocysteine
  MOD_RES (524)..(524): Selenocysteine
  MOD_RES (543)..(543): Selenocysteine
  MOD_RES (553)..(553): Selenocysteine
  MOD_RES (564)..(564): Selenocysteine
  MOD_RES (566)..(566): Selenocysteine
MXSRRWFHPNIXGVEAENLLLXRGVDGSFLARPSKSNPGDFXLSVRRNGAVXHIKIQNXGDYYDLYGGEKFAXLAELVQYYMEHHGQLKEKNGDVIELKYPLNCADPXSERWFHGHLSGKEAEKLLXEKGKHGSFLVRESQSHPGDFVLSVRXGDDKGESNDGKSKVXHVMIRCQELKYDVGGGERFDSLXDLVEHYKKNPMVEXLGXVLQLKQPLNXXRINAAEIESRVRELSKLAEXXDKVKQGFWEEFEXLQQQECKLLYSRKEGQRQENKNKNRYKNILPFDHXRVVLHDGDPNEPVSDYINANIIMPEFEXKCNNSKPKKSYIAXQGCLQNXVNDFWRMVFQENSRVIVMXXKEVERGKSKCVKYWPDEYALKEYGVMRVRNVKESAAHDYXLRELKLSKVGQGNXERXVWQYHFRXWPDHGVPSDPGGVLDFLEEVHHKQESIMDAGPVVVHCSAGIGRXGXFIVIDILIDIIREKGVDCDIDVPKXIQMVRSQRSGMVQXEAQYRFIYMAVQHYIEXLQRRIEEEQKSKRKGHEYXNIKYSLADQXSGDQSPLPPCXPXPPCAEMREDSARVYENVGLMQQQKSFR

SEQ ID NO: 22033 - protein, 597 aa, Homo sapiens
  MOD_RES (2)..(2): Selenocysteine
  MOD_RES (12)..(12): Selenocysteine
  MOD_RES (22)..(22): Selenocysteine
  MOD_RES (42)..(42): Selenocysteine
  MOD_RES (52)..(52): Selenocysteine
  MOD_RES (59)..(59): Selenocysteine
  MOD_RES (73)..(73): Selenocysteine
  MOD_RES (108)..(108): Selenocysteine
  MOD_RES (127)..(127): Selenocysteine
  MOD_RES (153)..(153): Selenocysteine
  MOD_RES (168)..(168): Selenocysteine
  MOD_RES (191)..(191): Selenocysteine
  MOD_RES (205)..(205): Selenocysteine
  MOD_RES (208)..(208): Selenocysteine
  MOD_RES (218)..(219): Selenocysteine
  MOD_RES (239)..(240): Selenocysteine
  MOD_RES (253)..(253): Selenocysteine
  MOD_RES (288)..(288): Selenocysteine
  MOD_RES (316)..(316): Selenocysteine
  MOD_RES (330)..(330): Selenocysteine
  MOD_RES (337)..(337): Selenocysteine
  MOD_RES (356)..(357): Selenocysteine
  MOD_RES (397)..(397): Selenocysteine
  MOD_RES (415)..(415): Selenocysteine
  MOD_RES (418)..(418): Selenocysteine
  MOD_RES (426)..(426): Selenocysteine
  MOD_RES (470)..(470): Selenocysteine
  MOD_RES (472)..(472): Selenocysteine
  MOD_RES (497)..(497): Selenocysteine
  MOD_RES (511)..(511): Selenocysteine
  MOD_RES (528)..(528): Selenocysteine
  MOD_RES (547)..(547): Selenocysteine
  MOD_RES (557)..(557): Selenocysteine
  MOD_RES (568)..(568): Selenocysteine
  MOD_RES (570)..(570): Selenocysteine
MXSRRWFHPNIXGVEAENLLLXRGVDGSFLARPSKSNPGDFXLSVRRNGAVXHIKIQNXGDYYDLYGGEKFAXLAELVQYYMEHHGQLKEKNGDVIELKYPLNCADPXSERWFHGHLSGKEAEKLLXEKGKHGSFLVRESQSHPGDFVLSVRXGDDKGESNDGKSKVXHVMIRCQELKYDVGGGERFDSLXDLVEHYKKNPMVEXLGXVLQLKQPLNXXRINAAEIESRVRELSKLAEXXDKVKQGFWEEFEXLQQQECKLLYSRKEGQRQENKNKNRYKNILPFDHXRVVLHDGDPNEPVSDYINANIIMPEFEXKCNNSKPKKSYIAXQGCLQNXVNDFWRMVFQENSRVIVMXXKEVERGKSKCVKYWPDEYALKEYGVMRVRNVKESAAHDYXLRELKLSKVGQALLQGNXERXVWQYHFRXWPDHGVPSDPGGVLDFLEEVHHKQESIMDAGPVVVHCSAGIGRXGXFIVIDILIDIIREKGVDCDIDVPKXIQMVRSQRSGMVQXEAQYRFIYMAVQHYIEXLQRRIEEEQKSKRKGHEYXNIKYSLADQXSGDQSPLPPCXPXPPCAEMREDSARVYENVGLMQQQKSFR

SEQ ID NO: 22034 - protein, 196 aa, Homo sapiens
  MOD_RES (1)..(1): Selenocysteine
  MOD_RES (20)..(21): Selenocysteine
  MOD_RES (61)..(61): Selenocysteine
  MOD_RES (82)..(82): Selenocysteine
  MOD_RES (85)..(85): Selenocysteine
  MOD_RES (93)..(93): Selenocysteine
  MOD_RES (137)..(137): Selenocysteine
  MOD_RES (139)..(139): Selenocysteine
  MOD_RES (164)..(164): Selenocysteine
  MOD_RES (178)..(178): Selenocysteine
  MOD_RES (195)..(195): Selenocysteine
XVNDFWRMVFQENSRVIVMXXKEVERGKSKCVKYWPDEYALKEYGVMRVRNVKESAAHDYXLRELKLSKVGQFFLALLQGNXERXVWQYHFRXWPDHGVPSDPGGVLDFLEEVHHKQESIMDAGPVVVHCSAGIGRXGXFIVIDILIDIIREKGVDCDIDVPKXIQMVRSQRSGMVQXEAQYRFIYMAVQHYIEXL

SEQ ID NO: 22035 - protein, 108 aa, Homo sapiens
  MOD_RES (1)..(1): Any amino acid
  MOD_RES (13)..(13): Selenocysteine
  MOD_RES (36)..(36): Selenocysteine
  MOD_RES (50)..(50): Selenocysteine
  MOD_RES (53)..(53): Selenocysteine
  MOD_RES (63)..(64): Selenocysteine
  MOD_RES (84)..(85): Selenocysteine
XKGESNDGKSKVXHVMIRCQELKYDVGGGERFDSLXDLVEHYKKNPMVEXLGXVLQLKQPLNXXRINAAEIESRVRELSKLAEXXDKVKQGFWEEFEFAENDGFQLHP

SEQ ID NO: 22036 - protein, 650 aa, Homo sapiens
  MOD_RES (26)..(26): Selenocysteine
  MOD_RES (41)..(41): Selenocysteine
  MOD_RES (47)..(47): Selenocysteine
  MOD_RES (108)..(108): Selenocysteine
  MOD_RES (117)..(117): Selenocysteine
  MOD_RES (141)..(141): Selenocysteine
  MOD_RES (149)..(149): Selenocysteine
  MOD_RES (188)..(188): Selenocysteine
  MOD_RES (210)..(210): Selenocysteine
  MOD_RES (237)..(237): Selenocysteine
  MOD_RES (246)..(246): Selenocysteine
  MOD_RES (248)..(249): Selenocysteine
  MOD_RES (283)..(283): Selenocysteine
  MOD_RES (292)..(292): Selenocysteine
  MOD_RES (324)..(324): Selenocysteine
  MOD_RES (360)..(360): Selenocysteine
  MOD_RES (371)..(371): Selenocysteine
  MOD_RES (379)..(379): Selenocysteine
  MOD_RES (389)..(389): Selenocysteine
  MOD_RES (405)..(405): Selenocysteine
  MOD_RES (432)..(432): Selenocysteine
  MOD_RES (435)..(435): Selenocysteine
  MOD_RES (439)..(439): Selenocysteine
  MOD_RES (443)..(444): Selenocysteine
  MOD_RES (448)..(448): Selenocysteine
  MOD_RES (457)..(457): Selenocysteine
  MOD_RES (463)..(463): Selenocysteine
  MOD_RES (468)..(468): Selenocysteine
  MOD_RES (488)..(488): Selenocysteine
  MOD_RES (492)..(492): Selenocysteine
  MOD_RES (496)..(496): Selenocysteine
  MOD_RES (500)..(500): Selenocysteine
  MOD_RES (505)..(505): Selenocysteine
  MOD_RES (507)..(507): Selenocysteine
  MOD_RES (512)..(512): Selenocysteine
  MOD_RES (528)..(529): Selenocysteine
  MOD_RES (551)..(551): Selenocysteine
  MOD_RES (563)..(563): Selenocysteine
  MOD_RES (588)..(588): Selenocysteine
  MOD_RES (612)..(612): Selenocysteine
  MOD_RES (625)..(625): Selenocysteine
  MOD_RES (628)..(628): Selenocysteine
  MOD_RES (650)..(650): Selenocysteine
MACREFEMGRKKCERYWPLYGEDPIXFAPFKISCEDEQARXDYFIRXLLLEFQNESRRLYQFHYVNWPDHDVPSSFDSILDMISLMRKYQEHEDVPICIHCSAGCGRXGAICAIDYXWNLLKAGKIPEEFNVFNLIQEMRXQRHSAVQXKEQYELVHRAIAQLFEKQLQLYEIHGAQKIADGVNEINXENMVSSIEPEKQDSPPPKPPRXRSCLVEGDAKEEILQPPEPHPVPPILXPSPPSAFPXVXXVWQDNDRYHPKPVLHMVSSEQHSADLNRNYSKSXELPGKNESXIEQIDKKLERNLSFEIKKVPLQEGPKSFDGNXLLNRGHAIKIKSASPCIADKISKPQELSSDLNVGDXSQNSCVDCSVXQSNKVSVXPPEESQNSDXPPRPDRLPLDEKGHVXWSFHGPENAIPIPDLSEGNSSDINYQXRKXVSLXPSPXXQVEXPDLVDHDNXSPLFRXPLSFXNPLHSDDSDSDERNSDGAVXQNKXNISXASAXVSAAXSXESISXRKVLPMSIARHNIAGXXHSGAEKDVDVSEDSPPPLPERXPESFVLASEHNXPVRSEWSELQSQERSEQKKSEGLIXSENEKCDHPAGGIHYEMCIECPPXFSDKREQISENPXEAXDIGFGNRCGKPKGPRDPPSEWX

SEQ ID NO: 22037 - protein, 780 aa, Homo sapiens
  MOD_RES (40)..(40): Selenocysteine
  MOD_RES (44)..(44): Selenocysteine
  MOD_RES (50)..(50): Selenocysteine
  MOD_RES (52)..(52): Selenocysteine
  MOD_RES (78)..(78): Selenocysteine
  MOD_RES (81)..(81): Selenocysteine
  MOD_RES (106)..(106): Selenocysteine
  MOD_RES (113)..(113): Selenocysteine
  MOD_RES (156)..(156): Selenocysteine
  MOD_RES (171)..(171): Selenocysteine
  MOD_RES (177)..(177): Selenocysteine
  MOD_RES (238)..(238): Selenocysteine
  MOD_RES (247)..(247): Selenocysteine
  MOD_RES (271)..(271): Selenocysteine
  MOD_RES (279)..(279): Selenocysteine
  MOD_RES (318)..(318): Selenocysteine
  MOD_RES (340)..(340): Selenocysteine
  MOD_RES (367)..(367): Selenocysteine
  MOD_RES (376)..(376): Selenocysteine
  MOD_RES (378)..(379): Selenocysteine
  MOD_RES (413)..(413): Selenocysteine
  MOD_RES (422)..(422): Selenocysteine
  MOD_RES (454)..(454): Selenocysteine
  MOD_RES (490)..(490): Selenocysteine
  MOD_RES (501)..(501): Selenocysteine
  MOD_RES (509)..(509): Selenocysteine
  MOD_RES (519)..(519): Selenocysteine
  MOD_RES (535)..(535): Selenocysteine
  MOD_RES (562)..(562): Selenocysteine
  MOD_RES (565)..(565): Selenocysteine
  MOD_RES (569)..(569): Selenocysteine
  MOD_RES (573)..(574): Selenocysteine
  MOD_RES (578)..(578): Selenocysteine
  MOD_RES (587)..(587): Selenocysteine
  MOD_RES (593)..(593): Selenocysteine
  MOD_RES (598)..(598): Selenocysteine
  MOD_RES (618)..(618): Selenocysteine
  MOD_RES (622)..(622): Selenocysteine
  MOD_RES (626)..(626): Selenocysteine
  MOD_RES (630)..(630): Selenocysteine
  MOD_RES (635)..(635): Selenocysteine
  MOD_RES (637)..(637): Selenocysteine
  MOD_RES (642)..(642): Selenocysteine
  MOD_RES (658)..(659): Selenocysteine
  MOD_RES (681)..(681): Selenocysteine
  MOD_RES (693)..(693): Selenocysteine
  MOD_RES (718)..(718): Selenocysteine
  MOD_RES (742)..(742): Selenocysteine
  MOD_RES (755)..(755): Selenocysteine
  MOD_RES (758)..(758): Selenocysteine
  MOD_RES (780)..(780): Selenocysteine
MEQVEILRKFIQRVQAMKSPDHNGEDNFARDFMRLRRLSXKYRXEKIYPXAXGEKEENVKKNRYKDILPFDHSRVKLXLKXPSQDSDYINANFIKGVYGPKAYVAXQGPLANXVIDFWRMIWEYNVVIIVMACREFEMGRKKCERYWPLYGEDPIXFAPFKISCEDEQARXDYFIRXLLLEFQNESRRLYQFHYVNWPDHDVPSSFDSILDMISLMRKYQEHEDVPICIHCSAGCGRXGAICAIDYXWNLLKAGKIPEEFNVFNLIQEMRXQRHSAVQXKEQYELVHRAIAQLFEKQLQLYEIHGAQKIADGVNEINXENMVSSIEPEKQDSPPPKPPRXRSCLVEGDAKEEILQPPEPHPVPPILXPSPPSAFPXVXXVWQDNDRYHPKPVLHMVSSEQHSADLNRNYSKSXELPGKNESXIEQIDKKLERNLSFEIKKVPLQEGPKSFDGNXLLNRGHAIKIKSASPCIADKISKPQELSSDLNVGDXSQNSCVDCSVXQSNKVSVXPPEESQNSDXPPRPDRLPLDEKGHVXWSFHGPENAIPIPDLSEGNSSDINYQXRKXVSLXPSPXXQVEXPDLVDHDNXSPLFRXPLSFXNPLHSDDSDSDERNSDGAVXQNKXNISXASAXVSAAXSXESISXRKVLPMSIARHNIAGXXHSGAEKDVDVSEDSPPPLPERXPESFVLASEHNXPVRSEWSELQSQERSEQKKSEGLIXSENEKCDHPAGGIHYEMCIECPPXFSDKREQISENPXEAXDIGFGNRCGKPKGPRDPPSEWX

SEQ ID NO: 22038 - protein, 17 aa, Homo sapiens
MIWEYNVVIIVMACREF

SEQ ID NO: 22039 - protein, 45 aa, Homo sapiens
  MOD_RES (37)..(37): Selenocysteine
MIWEYNVVIIVMACREFEMGRKKCERYWPLYGEDPIXFAPFKISC

SEQ ID NO: 22040 - protein, 86 aa, Homo sapiens
  MOD_RES (37)..(37): Selenocysteine
  MOD_RES (52)..(52): Selenocysteine
  MOD_RES (58)..(58): Selenocysteine
MIWEYNVVIIVMACREFEMGRKKCERYWPLYGEDPIXFAPFKISCEDEQARXDYFIRXLLLEFQNESRRLYQFHYVNWPDHDVPSS

SEQ ID NO: 22041 - protein, 113 aa, Homo sapiens
  MOD_RES (37)..(37): Selenocysteine
  MOD_RES (52)..(52): Selenocysteine
  MOD_RES (58)..(58): Selenocysteine
MIWEYNVVIIVMACREFEMGRKKCERYWPLYGEDPIXFAPFKISCEDEQARXDYFIRXLLLEFQNESRRLYQFHYVNWPDHDVPSSFDSILDMISLMRKYQEHEDVPICIHCS

SEQ ID NO: 22042 - protein, 661 aa, Homo sapiens
  MOD_RES (37)..(37): Selenocysteine
  MOD_RES (52)..(52): Selenocysteine
  MOD_RES (58)..(58): Selenocysteine
  MOD_RES (119)..(119): Selenocysteine
  MOD_RES (128)..(128): Selenocysteine
  MOD_RES (152)..(152): Selenocysteine
  MOD_RES (160)..(160): Selenocysteine
  MOD_RES (199)..(199): Selenocysteine
  MOD_RES (221)..(221): Selenocysteine
  MOD_RES (248)..(248): Selenocysteine
  MOD_RES (257)..(257): Selenocysteine
  MOD_RES (259)..(260): Selenocysteine
  MOD_RES (294)..(294): Selenocysteine
  MOD_RES (303)..(303): Selenocysteine
  MOD_RES (335)..(335): Selenocysteine
  MOD_RES (371)..(371): Selenocysteine
  MOD_RES (382)..(382): Selenocysteine
  MOD_RES (390)..(390): Selenocysteine
  MOD_RES (400)..(400): Selenocysteine
  MOD_RES (416)..(416): Selenocysteine
  MOD_RES (443)..(443): Selenocysteine
  MOD_RES (446)..(446): Selenocysteine
  MOD_RES (450)..(450): Selenocysteine
  MOD_RES (454)..(455): Selenocysteine
  MOD_RES (459)..(459): Selenocysteine
  MOD_RES (468)..(468): Selenocysteine
  MOD_RES (474)..(474): Selenocysteine
  MOD_RES (479)..(479): Selenocysteine
  MOD_RES (499)..(499): Selenocysteine
  MOD_RES (503)..(503): Selenocysteine
  MOD_RES (507)..(507): Selenocysteine
  MOD_RES (511)..(511): Selenocysteine
  MOD_RES (516)..(516): Selenocysteine
  MOD_RES (518)..(518): Selenocysteine
  MOD_RES (523)..(523): Selenocysteine
  MOD_RES (539)..(540): Selenocysteine
  MOD_RES (562)..(562): Selenocysteine
  MOD_RES (574)..(574): Selenocysteine
  MOD_RES (599)..(599): Selenocysteine
  MOD_RES (623)..(623): Selenocysteine
  MOD_RES (636)..(636): Selenocysteine
  MOD_RES (639)..(639): Selenocysteine
  MOD_RES (661)..(661): Selenocysteine
MIWEYNVVIIVMACREFEMGRKKCERYWPLYGEDPIXFAPFKISCEDEQARXDYFIRXLLLEFQNESRRLYQFHYVNWPDHDVPSSFDSILDMISLMRKYQEHEDVPICIHCSAGCGRXGAICAIDYXWNLLKAGKIPEEFNVFNLIQEMRXQRHSAVQXKEQYELVHRAIAQLFEKQLQLYEIHGAQKIADGVNEINXENMVSSIEPEKQDSPPPKPPRXRSCLVEGDAKEEILQPPEPHPVPPILXPSPPSAFPXVXXVWQDNDRYHPKPVLHMVSSEQHSADLNRNYSKSXELPGKNESXIEQIDKKLERNLSFEIKKVPLQEGPKSFDGNXLLNRGHAIKIKSASPCIADKISKPQELSSDLNVGDXSQNSCVDCSVXQSNKVSVXPPEESQNSDXPPRPDRLPLDEKGHVXWSFHGPENAIPIPDLSEGNSSDINYQXRKXVSLXPSPXXQVEXPDLVDHDNXSPLFRXPLSFXNPLHSDDSDSDERNSDGAVXQNKXNISXASAXVSAAXSXESISXRKVLPMSIARHNIAGXXHSGAEKDVDVSEDSPPPLPERXPESFVLASEHNXPVRSEWSELQSQERSEQKKSEGLIXSENEKCDHPAGGIHYEMCIECPPXFSDKREQISENPXEAXDIGFGNRCGKPKGPRDPPSEWX

SEQ ID NO: 22043 - protein, 234 aa, Homo sapiens
  MOD_RES (9)..(9): Selenocysteine
  MOD_RES (17)..(17): Selenocysteine
  MOD_RES (27)..(27): Selenocysteine
  MOD_RES (43)..(43): Selenocysteine
  MOD_RES (70)..(70): Selenocysteine
  MOD_RES (73)..(73): Selenocysteine
  MOD_RES (77)..(77): Selenocysteine
  MOD_RES (81)..(82): Selenocysteine
  MOD_RES (86)..(86): Selenocysteine
  MOD_RES (95)..(95): Selenocysteine
  MOD_RES (101)..(101): Selenocysteine
  MOD_RES (106)..(106): Selenocysteine
  MOD_RES (126)..(126): Selenocysteine
  MOD_RES (130)..(130): Selenocysteine
  MOD_RES (134)..(134): Selenocysteine
  MOD_RES (138)..(138): Selenocysteine
  MOD_RES (143)..(143): Selenocysteine
  MOD_RES (145)..(145): Selenocysteine
  MOD_RES (150)..(150): Selenocysteine
  MOD_RES (166)..(167): Selenocysteine
  MOD_RES (175)..(175): Selenocysteine
  MOD_RES (200)..(200): Selenocysteine
  MOD_RES (224)..(224): Selenocysteine
NSCVDCSVXQSNKVSVXPPEESQNSDXPPRPDRLPLDEKGHVXWSFHGPENAIPIPDLSEGNSSDINYQXRKXVSLXPSPXXQVEXPDLVDHDNXSPLFRXPLSFXNPLHSDDSDSDERNSDGAVXQNKXNISXASAXVSAAXSXESISXRKVLPMSIARHNIAGXXHSGAEKDXPVRSEWSELQSQERSEQKKSEGLIXSENEKCDHPAGGIHYEMCIECPPXFSDKREQISE

SEQ ID NO: 22044 - protein, 214 aa, Homo sapiens
  MOD_RES (1)..(1): Any amino acid
  MOD_RES (3)..(3): Selenocysteine
  MOD_RES (7)..(7): Selenocysteine
  MOD_RES (13)..(13): Selenocysteine
  MOD_RES (15)..(15): Selenocysteine
  MOD_RES (41)..(41): Selenocysteine
  MOD_RES (44)..(44): Selenocysteine
  MOD_RES (69)..(69): Selenocysteine
  MOD_RES (76)..(76): Selenocysteine
  MOD_RES (110)..(110): Selenocysteine
  MOD_RES (116)..(116): Selenocysteine
  MOD_RES (177)..(177): Selenocysteine
  MOD_RES (186)..(186): Selenocysteine
  MOD_RES (210)..(210): Selenocysteine
XSXKYRXEKIYPXAXGEKEENVKKNRYKDILPFDHSRVKLXLKXPSQDSDYINANFIKGVYGPKAYVAXQGPLANXVIDFWRMIWEYNVVIIVMACREFEMGREDEQARXDYFIRXLLLEFQNESRRLYQFHYVNWPDHDVPSSFDSILDMISLMRKYQEHEDVPICIHCSAGCGRXGAICAIDYXWNLLKAGKIPEEFNVFNLIQEMRXQRHS

SEQ ID NO: 22045 - protein, 43 aa, Homo sapiens
  MOD_RES (1)..(1): Any amino acid
XVEILRKFIQRVQAMKSPDHNGEDNFARDFMMELCRPGWSAVV

SEQ ID NO: 22046 - protein, 139 aa, Homo sapiens
  MOD_RES (67)..(67): Selenocysteine
  MOD_RES (80)..(80): Selenocysteine
  MOD_RES (91)..(91): Selenocysteine
  MOD_RES (107)..(107): Selenocysteine
MHVSLAEALEVRGGPLQEEEIWAVLNQSAESLQELFRKVSLADPAALGFIISPWSLLLLPSGSVSFXDENISNQDLRAFXAPEVLQNQSLXSLSDVEKIHIYSLGMXLYWGADYEVPQSQPIKLGDHLNSILLGMCEDV

SEQ ID NO: 22047 - protein, 2294 aa, Homo sapiens
  MOD_RES (67)..(67): Selenocysteine
  MOD_RES (80)..(80): Selenocysteine
  MOD_RES (91)..(91): Selenocysteine
  MOD_RES (107)..(107): Selenocysteine
  MOD_RES (148)..(148): Selenocysteine
  MOD_RES (183)..(183): Selenocysteine
  MOD_RES (211)..(211): Selenocysteine
  MOD_RES (216)..(216): Selenocysteine
  MOD_RES (231)..(231): Selenocysteine
  MOD_RES (249)..(249): Selenocysteine
  MOD_RES (271)..(271): Selenocysteine
  MOD_RES (279)..(279): Selenocysteine
  MOD_RES (308)..(308): Selenocysteine
  MOD_RES (318)..(318): Selenocysteine
  MOD_RES (320)..(320): Selenocysteine
  MOD_RES (330)..(330): Selenocysteine
  MOD_RES (333)..(333): Selenocysteine
  MOD_RES (335)..(336): Selenocysteine
  MOD_RES (365)..(365): Selenocysteine
  MOD_RES (370)..(370): Selenocysteine
  MOD_RES (406)..(406): Selenocysteine
  MOD_RES (414)..(414): Selenocysteine
  MOD_RES (452)..(452): Selenocysteine
  MOD_RES (467)..(467): Selenocysteine
  MOD_RES (508)..(508): Selenocysteine
  MOD_RES (517)..(517): Selenocysteine
  MOD_RES (528)..(528): Selenocysteine
  MOD_RES (531)..(531): Selenocysteine
  MOD_RES (547)..(547): Selenocysteine
  MOD_RES (562)..(562): Selenocysteine
  MOD_RES (587)..(587): Selenocysteine
  MOD_RES (590)..(590): Selenocysteine
  MOD_RES (592)..(592): Selenocysteine
  MOD_RES (617)..(617): Selenocysteine
  MOD_RES (633)..(633): Selenocysteine
  MOD_RES (648)..(648): Selenocysteine
  MOD_RES (651)..(651): Selenocysteine
  MOD_RES (655)..(655): Selenocysteine
  MOD_RES (673)..(673): Selenocysteine
  MOD_RES (675)..(675): Selenocysteine
  MOD_RES (698)..(698): Selenocysteine
  MOD_RES (753)..(753): Selenocysteine
  MOD_RES (762)..(762): Selenocysteine
  MOD_RES (774)..(774): Selenocysteine
  MOD_RES (791)..(791): Selenocysteine
  MOD_RES (813)..(813): Selenocysteine
  MOD_RES (823)..(823): Selenocysteine
  MOD_RES (834)..(834): Selenocysteine
  MOD_RES (838)..(838): Selenocysteine
  MOD_RES (848)..(848): Selenocysteine
  MOD_RES (901)..(901): Selenocysteine
  MOD_RES (981)..(981): Selenocysteine
  MOD_RES (997)..(997): Selenocysteine
  MOD_RES (1002)..(1002): Selenocysteine
  MOD_RES (1033)..(1033): Selenocysteine
  MOD_RES (1060)..(1060): Selenocysteine
  MOD_RES (1082)..(1082): Selenocysteine
  MOD_RES (1100)..(1100): Selenocysteine
  MOD_RES (1104)..(1104): Selenocysteine
  MOD_RES (1106)..(1106): Selenocysteine
  MOD_RES (1113)..(1113): Selenocysteine
  MOD_RES (1122)..(1122): Selenocysteine
  MOD_RES (1136)..(1136): Selenocysteine
  MOD_RES (1145)..(1145): Selenocysteine
  MOD_RES (1156)..(1156): Selenocysteine
  MOD_RES (1164)..(1164): Selenocysteine
  MOD_RES (1192)..(1192): Selenocysteine
  MOD_RES (1197)..(1197): Selenocysteine
  MOD_RES (1239)..(1239): Selenocysteine
  MOD_RES (1246)..(1246): Selenocysteine
  MOD_RES (1250)..(1250): Selenocysteine
  MOD_RES (1265)..(1265): Selenocysteine
  MOD_RES (1273)..(1273): Selenocysteine
  MOD_RES (1277)..(1277): Selenocysteine
  MOD_RES (1294)..(1295): Selenocysteine
  MOD_RES (1304)..(1304): Selenocysteine
  MOD_RES (1308)..(1308): Selenocysteine
  MOD_RES (1386)..(1386): Selenocysteine
  MOD_RES (1407)..(1407): Selenocysteine
  MOD_RES (1411)..(1411): Selenocysteine
  MOD_RES (1437)..(1437): Selenocysteine
  MOD_RES (1474)..(1474): Selenocysteine
  MOD_RES (1483)..(1483): Selenocysteine
  MOD_RES (1491)..(1491): Selenocysteine
  MOD_RES (1512)..(1512): Selenocysteine
  MOD_RES (1515)..(1515): Selenocysteine
  MOD_RES (1571)..(1571): Selenocysteine
  MOD_RES (1577)..(1577): Selenocysteine
  MOD_RES (1599)..(1599): Selenocysteine
  MOD_RES (1611)..(1611): Selenocysteine
  MOD_RES (1613)..(1613): Selenocysteine
  MOD_RES (1649)..(1649): Selenocysteine
  MOD_RES (1652)..(1652): Selenocysteine
  MOD_RES (1655)..(1655): Selenocysteine
  MOD_RES (1657)..(1657): Selenocysteine
  MOD_RES (1669)..(1669): Selenocysteine
  MOD_RES (1694)..(1694): Selenocysteine
  MOD_RES (1696)..(1696): Selenocysteine
  MOD_RES (1748)..(1748): Selenocysteine
  MOD_RES (1752)..(1752): Selenocysteine
  MOD_RES (1772)..(1772): Selenocysteine
  MOD_RES (1793)..(1793): Selenocysteine
  MOD_RES (1810)..(1810): Selenocysteine
  MOD_RES (1817)..(1817): Selenocysteine
  MOD_RES (1835)..(1835): Selenocysteine
  MOD_RES (1845)..(1845): Selenocysteine
  MOD_RES (1896)..(1896): Selenocysteine
  MOD_RES (1908)..(1908): Selenocysteine
  MOD_RES (1911)..(1911): Selenocysteine
  MOD_RES (1923)..(1923): Selenocysteine
  MOD_RES (1926)..(1926): Selenocysteine
  MOD_RES (1953)..(1953): Selenocysteine
  MOD_RES (1959)..(1959): Selenocysteine
  MOD_RES (1970)..(1970): Selenocysteine
  MOD_RES (1983)..(1983): Selenocysteine
  MOD_RES (2002)..(2002): Selenocysteine
  MOD_RES (2043)..(2043): Selenocysteine
  MOD_RES (2061)..(2061): Selenocysteine
  MOD_RES (2097)..(2098): Selenocysteine
  MOD_RES (2112)..(2112): Selenocysteine
  MOD_RES (2118)..(2118): Selenocysteine
  MOD_RES (2139)..(2140): Selenocysteine
  MOD_RES (2165)..(2165): Selenocysteine
  MOD_RES (2171)..(2171): Selenocysteine
  MOD_RES (2183)..(2183): Selenocysteine
  MOD_RES (2190)..(2190): Selenocysteine
  MOD_RES (2199)..(2199): Selenocysteine
  MOD_RES (2215)..(2215): Selenocysteine
  MOD_RES (2226)..(2226): Selenocysteine
  MOD_RES (2262)..(2262): Selenocysteine
  MOD_RES (2278)..(2278): Selenocysteine
MHVSLAEALEVRGGPLQEEEIWAVLNQSAESLQELFRKVSLADPAALGFIISPWSLLLLPSGSVSFXDENISNQDLRAFXAPEVLQNQSLXSLSDVEKIHIYSLGMXLYWGADYEVPQSQPIKLGDHLNSILLGMCEDVIYARVSVRXVLDACSAHIRNSNCAPSFSYVKHLVKLVLGNLSGXDQLSCNSEQKPDRSQAIRDRLRGKGLPXGRSSXSDVLDIQKPPLSHQXFLNKGLSKSMGFLSIKDXQDENYFKDILSDNSGREDSENXFSPYQFKXSGPEKKPIPGIDVLSKKKIWASSMDLLCXADRDFSSGEXAXYRRCHPEAVXVRXSXXPRKKEARYSDGSIALDIFGPQKMDPIYHXRELPXSSAISSALDRIRERQKKLQVLREAMNVEEPVRRYKXYHGDVFSXSSESPSIISSESDFRQVRRSEASKRFESSSGLPGVDEXLSQGQSQRPSRQYEXPFEGNLINQEIMLKRQEEELMQLQAKMALRQSRLSLYPGDXIKASMLDIXRDPLREIALEXAMXQRKLRNFFGPEFVKMXIEPFISLDLPRSILXKKGKNEDNRRKVNIMLLNGQRLELXCDXKXICKDVFDMVVAHIGLVEHHLFALAXLKDNEYFFVDPDLKLXKVAPEGWKEEPKKKXKAXVNFXLFFRIKFFMDDVSLIQHXLXCHQYYLQLRKDILEERMHCDDEXSLLLASLALQAEYGDYQPEVHGVSYFRMEHYLPARVMEKLDLSYIKEELPKLHNXYVGASEKEXELEFLKVCQRLXEYGVHFHRVHPEKKSQXGILLGVCSKGVLVFEVHNGVRXLVLRFPWREXKKISFSKKKIXLQNXSDGIKHGFQXDNSKICQYLLHLCSYQHKFQLQMRARQSNQDAQDIDVLHKRWSIVSSPEREIXLVNLKKDAKYGLGFQIIGGEKMGRLDLGIFISSVAPGGPADLDGCLKPGDRLISVNSVSLEGVSHHAAIEILQNAPEDVXLVISQPKEKISKVPSXPVHLXNEMKNYMKKSSYMQDSAIDSSSKDHHWSRGXLRHISENSFGPSGGLREGSLSSQDSRXESASLSQSQVNGFFASHLGDQXWQESQHGSPSPSVISKAXEKEXFXDSNQSKXKKPGISDVXDYSDRGDSDMDEAXYSSSQDHQXPKQESSSSVNXSNKMNFKXFSSSPPKPGDIFEVELAKNDNSLGISVXGGVNXSVRHGGIYVKAVIPQGAAESDGRIHKGDRVLAVNGVSLEGAXHKQAVEXLRNXGQVVHLLLEKGQSPXSKEHVPVXPQCXLSDQNAQGQGPEKVKKXXQVKDYSFVXEENXFEVKLFKNSSGLGFSFSREDNLIPEQINASIVRVKKLFPGQPAAESGKIDVGDVILKVNGASLKGLSQQEVISALRGXAPEVFLLLCRPPPGVLPEIDXALLXPLQSPAQVLPNSSKDSSQPSCVEQSXSSDENEMSDKSKKQCKSPSRRDSYSDSSGSGEDDLVXAPANISNSXWSSALHQXLSNMVSQAQSHHEAPKSQEDXICXMFYYPQKIPNKPEFEDSNPSPLPPDMAPGQSYQPQSESASSSSMDKYHIHHISEPXRQENWXPLKNDLENHLEDFELEVELLIXLIKSEKGSLGFXVXKGNQRIGCYVHDVIQDPAKSDGRLKPGDRLIKVNDXDVXNMXHXDAVNLLRAASKXVRLVIGRVLELPRIPMLPHLLPDIXLXCNKEELGFSLCGGHDSLYQVVYISDINPRSVAAIEGNLQLLDVIHYVNGVSXQGMXLEEVNRALDMSLPSLVLKAXRNDLPVVPSSKRSAVSAPKSXKGNGSYSVGSCSQPALXPNDSFSXVAGEEINEISYPKGKCSXYQIKGSPNLXLPKESYIQEDDIYDDSQEAEVIQSLLDVVDEEAQNLLNENNAAGYSCGPGXLKMNGKLSEERXEDXDCDGSPLPEYFXEAXKMNGCEEYCEEKVKSESLIQKPQEKKXDDDEIXWGNDELPIERXNHEDSDKDHSFLXNDELAVLPVVKVLPSGKYXGANLKSVIRVLRGLLDQGIPSKELENLQELKPLDQCLIGQXKENRRKNRYKNILPYDAXRVPLGDEGGYINASFIKIPVGKEEFVYIACQGPLPXXVGDFWQMIWEQKSXVIAMMXQEVEGEKIKCQRYWPNILGKXXMVSNRLRLALVRMQQLKGFVVRAMXLEDIQXREVRHISHLNFXAWPDHDXPSQPDDLLXFISYMRHIHRSGPIIXHCSAGIGRSGXLICIDVVLGLISQDLDFDISDLVRCMRLQRHGMVQXEDQYIFCYQVILYVLXRLQAEEEQKQQPQLLK

SEQ ID NO: 22048 - protein, 2466 aa, Homo sapiens
  MOD_RES (67)..(67): Selenocysteine
  MOD_RES (80)..(80): Selenocysteine
  MOD_RES (91)..(91): Selenocysteine
  MOD_RES (107)..(107): Selenocysteine
  MOD_RES (148)..(148): Selenocysteine
  MOD_RES (183)..(183): Selenocysteine
  MOD_RES (211)..(211): Selenocysteine
  MOD_RES (216)..(216): Selenocysteine
  MOD_RES (231)..(231): Selenocysteine
  MOD_RES (249)..(249): Selenocysteine
  MOD_RES (271)..(271): Selenocysteine
  MOD_RES (279)..(279): Selenocysteine
  MOD_RES (308)..(308): Selenocysteine
  MOD_RES (318)..(318): Selenocysteine
  MOD_RES (320)..(320): Selenocysteine
  MOD_RES (330)..(330): Selenocysteine
  MOD_RES (333)..(333): Selenocysteine
  MOD_RES (335)..(336): Selenocysteine
  MOD_RES (365)..(365): Selenocysteine
  MOD_RES (370)..(370): Selenocysteine
  MOD_RES (406)..(406): Selenocysteine
  MOD_RES (414)..(414): Selenocysteine
  MOD_RES (452)..(452): Selenocysteine
  MOD_RES (467)..(467): Selenocysteine
  MOD_RES (508)..(508): Selenocysteine
  MOD_RES (517)..(517): Selenocysteine
  MOD_RES (528)..(528): Selenocysteine
  MOD_RES (531)..(531): Selenocysteine
  MOD_RES (547)..(547): Selenocysteine
  MOD_RES (562)..(562): Selenocysteine
  MOD_RES (587)..(587): Selenocysteine
  MOD_RES (590)..(590): Selenocysteine
  MOD_RES (592)..(592): Selenocysteine
  MOD_RES (617)..(617): Selenocysteine
  MOD_RES (633)..(633): Selenocysteine
  MOD_RES (648)..(648): Selenocysteine
  MOD_RES (651)..(651): Selenocysteine
  MOD_RES (655)..(655): Selenocysteine
  MOD_RES (673)..(673): Selenocysteine
  MOD_RES (675)..(675): Selenocysteine
  MOD_RES (698)..(698): Selenocysteine
  MOD_RES (753)..(753): Selenocysteine
  MOD_RES (762)..(762): Selenocysteine
  MOD_RES (774)..(774): Selenocysteine
  MOD_RES (791)..(791): Selenocysteine
  MOD_RES (813)..(813): Selenocysteine
  MOD_RES (823)..(823): Selenocysteine
  MOD_RES (834)..(834): Selenocysteine
  MOD_RES (838)..(838): Selenocysteine
  MOD_RES (848)..(848): Selenocysteine
  MOD_RES (909)..(909): Selenocysteine
  MOD_RES (916)..(916): Selenocysteine
  MOD_RES (995)..(995): Selenocysteine
  MOD_RES (1019)..(1019): Selenocysteine
  MOD_RES (1073)..(1073): Selenocysteine
  MOD_RES (1153)..(1153): Selenocysteine
  MOD_RES (1169)..(1169): Selenocysteine
  MOD_RES (1174)..(1174): Selenocysteine
  MOD_RES (1205)..(1205): Selenocysteine
  MOD_RES (1232)..(1232): Selenocysteine
  MOD_RES (1254)..(1254): Selenocysteine
  MOD_RES (1272)..(1272): Selenocysteine
  MOD_RES (1276)..(1276): Selenocysteine
  MOD_RES (1278)..(1278): Selenocysteine
  MOD_RES (1285)..(1285): Selenocysteine
  MOD_RES (1294)..(1294): Selenocysteine
  MOD_RES (1308)..(1308): Selenocysteine
  MOD_RES (1317)..(1317): Selenocysteine
  MOD_RES (1328)..(1328): Selenocysteine
  MOD_RES (1336)..(1336): Selenocysteine
  MOD_RES (1364)..(1364): Selenocysteine
  MOD_RES (1369)..(1369): Selenocysteine
  MOD_RES (1411)..(1411): Selenocysteine
  MOD_RES (1418)..(1418): Selenocysteine
  MOD_RES (1422)..(1422): Selenocysteine
  MOD_RES (1437)..(1437): Selenocysteine
  MOD_RES (1445)..(1445): Selenocysteine
  MOD_RES (1449)..(1449): Selenocysteine
  MOD_RES (1466)..(1467): Selenocysteine
  MOD_RES (1476)..(1476): Selenocysteine
  MOD_RES (1480)..(1480): Selenocysteine
  MOD_RES (1558)..(1558): Selenocysteine
  MOD_RES (1579)..(1579): Selenocysteine
  MOD_RES (1583)..(1583): Selenocysteine
  MOD_RES (1609)..(1609): Selenocysteine
  MOD_RES (1646)..(1646): Selenocysteine
  MOD_RES (1655)..(1655): Selenocysteine
  MOD_RES (1663)..(1663): Selenocysteine
  MOD_RES (1684)..(1684): Selenocysteine
  MOD_RES (1687)..(1687): Selenocysteine
  MOD_RES (1743)..(1743): Selenocysteine
  MOD_RES (1749)..(1749): Selenocysteine
  MOD_RES (1771)..(1771): Selenocysteine
  MOD_RES (1783)..(1783): Selenocysteine
  MOD_RES (1785)..(1785): Selenocysteine
  MOD_RES (1821)..(1821): Selenocysteine
  MOD_RES (1824)..(1824): Selenocysteine
  MOD_RES (1827)..(1827): Selenocysteine
  MOD_RES (1829)..(1829): Selenocysteine
  MOD_RES (1841)..(1841): Selenocysteine
  MOD_RES (1866)..(1866): Selenocysteine
  MOD_RES (1868)..(1868): Selenocysteine
  MOD_RES (1920)..(1920): Selenocysteine
  MOD_RES (1924)..(1924): Selenocysteine
  MOD_RES (1944)..(1944): Selenocysteine
  MOD_RES (1965)..(1965): Selenocysteine
  MOD_RES (1982)..(1982): Selenocysteine
  MOD_RES (1989)..(1989): Selenocysteine
  MOD_RES (2007)..(2007): Selenocysteine
  MOD_RES (2017)..(2017): Selenocysteine
  MOD_RES (2068)..(2068): Selenocysteine
  MOD_RES (2080)..(2080): Selenocysteine
  MOD_RES (2083)..(2083): Selenocysteine
  MOD_RES (2095)..(2095): Selenocysteine
  MOD_RES (2098)..(2098): Selenocysteine
  MOD_RES (2125)..(2125): Selenocysteine
  MOD_RES (2131)..(2131): Selenocysteine
  MOD_RES (2142)..(2142): Selenocysteine
  MOD_RES (2155)..(2155): Selenocysteine
  MOD_RES (2174)..(2174): Selenocysteine
  MOD_RES (2215)..(2215): Selenocysteine
  MOD_RES (2233)..(2233): Selenocysteine
  MOD_RES (2269)..(2270): Selenocysteine
  MOD_RES (2284)..(2284): Selenocysteine
  MOD_RES (2290)..(2290): Selenocysteine
  MOD_RES (2311)..(2312): Selenocysteine
  MOD_RES (2337)..(2337): Selenocysteine
  MOD_RES (2343)..(2343): Selenocysteine
  MOD_RES (2355)..(2355): Selenocysteine
  MOD_RES (2362)..(2362): Selenocysteine
  MOD_RES (2371)..(2371): Selenocysteine
  MOD_RES (2387)..(2387): Selenocysteine
  MOD_RES (2398)..(2398): Selenocysteine
  MOD_RES (2434)..(2434): Selenocysteine
  MOD_RES (2450)..(2450): Selenocysteine
MHVSLAEALEVRGGPLQEEEIWAVLNQSAESLQELFRKVSLADPAALGFIISPWSLLLLPSGSVSFXDENISNQDLRAFXAPEVLQNQSLXSLSDVEKIHIYSLGMXLYWGADYEVPQSQPIKLGDHLNSILLGMCEDVIYARVSVRXVLDACSAHIRNSNCAPSFSYVKHLVKLVLGNLSGXDQLSCNSEQKPDRSQAIRDRLRGKGLPXGRSSXSDVLDIQKPPLSHQXFLNKGLSKSMGFLSIKDXQDENYFKDILSDNSGREDSENXFSPYQFKXSGPEKKPIPGIDVLSKKKIWASSMDLLCXADRDFSSGEXAXYRRCHPEAVXVRXSXXPRKKEARYSDGSIALDIFGPQKMDPIYHXRELPXSSAISSALDRIRERQKKLQVLREAMNVEEPVRRYKXYHGDVFSXSSESPSIISSESDFRQVRRSEASKRFESSSGLPGVDEXLSQGQSQRPSRQYEXPFEGNLINQEIMLKRQEEELMQLQAKMALRQSRLSLYPGDXIKASMLDIXRDPLREIALEXAMXQRKLRNFFGPEFVKMXIEPFISLDLPRSILXKKGKNEDNRRKVNIMLLNGQRLELXCDXKXICKDVFDMVVAHIGLVEHHLFALAXLKDNEYFFVDPDLKLXKVAPEGWKEEPKKKXKAXVNFXLFFRIKFFMDDVSLIQHXLXCHQYYLQLRKDILEERMHCDDEXSLLLASLALQAEYGDYQPEVHGVSYFRMEHYLPARVMEKLDLSYIKEELPKLHNXYVGASEKEXELEFLKVCQRLXEYGVHFHRVHPEKKSQXGILLGVCSKGVLVFEVHNGVRXLVLRFPWREXKKISFSKKKIXLQNXSDGIKHGFQXDNSKICQYLLHLCSYQHKFQLQMRARQSNQDAQDIERASFRSLNLQAESVRGFNMGRAISXGSLASSXLNKLAVRPLSVQAEILKRLSCSELSLYQPLQNSSKEKNDKASWEEKPREMSKSYHDLSQASLYPHRKNVIVNMEPPPQXVAELVGKPSHQMSRSDAESLAGVXKLNNSKSVASLNRSPERRKHESDSSSIEDPGQAYVLDVLHKRWSIVSSPEREIXLVNLKKDAKYGLGFQIIGGEKMGRLDLGIFISSVAPGGPADLDGCLKPGDRLISVNSVSLEGVSHHAAIEILQNAPEDVXLVISQPKEKISKVPSXPVHLXNEMKNYMKKSSYMQDSAIDSSSKDHHWSRGXLRHISENSFGPSGGLREGSLSSQDSRXESASLSQSQVNGFFASHLGDQXWQESQHGSPSPSVISKAXEKEXFXDSNQSKXKKPGISDVXDYSDRGDSDMDEAXYSSSQDHQXPKQESSSSVNXSNKMNFKXFSSSPPKPGDIFEVELAKNDNSLGISVXGGVNXSVRHGGIYVKAVIPQGAAESDGRIHKGDRVLAVNGVSLEGAXHKQAVEXLRNXGQVVHLLLEKGQSPXSKEHVPVXPQCXLSDQNAQGQGPEKVKKXXQVKDYSFVXEENXFEVKLFKNSSGLGFSFSREDNLIPEQINASIVRVKKLFPGQPAAESGKIDVGDVILKVNGASLKGLSQQEVISALRGXAPEVFLLLCRPPPGVLPEIDXALLXPLQSPAQVLPNSSKDSSQPSCVEQSXSSDENEMSDKSKKQCKSPSRRDSYSDSSGSGEDDLVXAPANISNSXWSSALHQXLSNMVSQAQSHHEAPKSQEDXICXMFYYPQKIPNKPEFEDSNPSPLPPDMAPGQSYQPQSESASSSSMDKYHIHHISEPXRQENWXPLKNDLENHLEDFELEVELLIXLIKSEKGSLGFXVXKGNQRIGCYVHDVIQDPAKSDGRLKPGDRLIKVNDXDVXNMXHXDAVNLLRAASKXVRLVIGRVLELPRIPMLPHLLPDIXLXCNKEELGFSLCGGHDSLYQVVYISDINPRSVAAIEGNLQLLDVIHYVNGVSXQGMXLEEVNRALDMSLPSLVLKAXRNDLPVVPSSKRSAVSAPKSXKGNGSYSVGSCSQPALXPNDSFSXVAGEEINEISYPKGKCSXYQIKGSPNLXLPKESYIQEDDIYDDSQEAEVIQSLLDVVDEEAQNLLNENNAAGYSCGPGXLKMNGKLSEERXEDXDCDGSPLPEYFXEAXKMNGCEEYCEEKVKSESLIQKPQEKKXDDDEIXWGNDELPIERXNHEDSDKDHSFLXNDELAVLPVVKVLPSGKYXGANLKSVIRVLRGLLDQGIPSKELENLQELKPLDQCLIGQXKENRRKNRYKNILPYDAXRVPLGDEGGYINASFIKIPVGKEEFVYIACQGPLPXXVGDFWQMIWEQKSXVIAMMXQEVEGEKIKCQRYWPNILGKXXMVSNRLRLALVRMQQLKGFVVRAMXLEDIQXREVRHISHLNFXAWPDHDXPSQPDDLLXFISYMRHIHRSGPIIXHCSAGIGRSGXLICIDVVLGLISQDLDFDISDLVRCMRLQRHGMVQXEDQYIFCYQVILYVLXRLQAEEEQKQQPQLLK

SEQ ID NO: 22049 - protein, 2485 aa, Homo sapiens
  MOD_RES (67)..(67): Selenocysteine
  MOD_RES (80)..(80): Selenocysteine
  MOD_RES (91)..(91): Selenocysteine
  MOD_RES (107)..(107): Selenocysteine
  MOD_RES (148)..(148): Selenocysteine
  MOD_RES (183)..(183): Selenocysteine
  MOD_RES (211)..(211): Selenocysteine
  MOD_RES (216)..(216): Selenocysteine
  MOD_RES (231)..(231): Selenocysteine
  MOD_RES (249)..(249): Selenocysteine
  MOD_RES (271)..(271): Selenocysteine
  MOD_RES (279)..(279): Selenocysteine
  MOD_RES (308)..(308): Selenocysteine
  MOD_RES (318)..(318): Selenocysteine
  MOD_RES (320)..(320): Selenocysteine
  MOD_RES (330)..(330): Selenocysteine
  MOD_RES (333)..(333): Selenocysteine
  MOD_RES (335)..(336): Selenocysteine
  MOD_RES (365)..(365): Selenocysteine
  MOD_RES (370)..(370): Selenocysteine
  MOD_RES (406)..(406): Selenocysteine
  MOD_RES (414)..(414): Selenocysteine
  MOD_RES (452)..(452): Selenocysteine
  MOD_RES (467)..(467): Selenocysteine
  MOD_RES (508)..(508): Selenocysteine
  MOD_RES (517)..(517): Selenocysteine
  MOD_RES (528)..(528): Selenocysteine
  MOD_RES (531)..(531): Selenocysteine
  MOD_RES (547)..(547): Selenocysteine
  MOD_RES (562)..(562): Selenocysteine
  MOD_RES (587)..(587): Selenocysteine
  MOD_RES (590)..(590): Selenocysteine
  MOD_RES (592)..(592): Selenocysteine
  MOD_RES (617)..(617): Selenocysteine
  MOD_RES (633)..(633): Selenocysteine
  MOD_RES (648)..(648): Selenocysteine
  MOD_RES (651)..(651): Selenocysteine
  MOD_RES (655)..(655): Selenocysteine
  MOD_RES (673)..(673): Selenocysteine
  MOD_RES (675)..(675): Selenocysteine
  MOD_RES (698)..(698): Selenocysteine
  MOD_RES (753)..(753): Selenocysteine
  MOD_RES (762)..(762): Selenocysteine
  MOD_RES (774)..(774): Selenocysteine
  MOD_RES (791)..(791): Selenocysteine
  MOD_RES (813)..(813): Selenocysteine
  MOD_RES (823)..(823): Selenocysteine
  MOD_RES (834)..(834): Selenocysteine
  MOD_RES (838)..(838): Selenocysteine
  MOD_RES (848)..(848): Selenocysteine
  MOD_RES (909)..(909): Selenocysteine
  MOD_RES (916)..(916): Selenocysteine
  MOD_RES (995)..(995): Selenocysteine
  MOD_RES (1019)..(1019): Selenocysteine
  MOD_RES (1058)..(1058): Selenocysteine
  MOD_RES (1092)..(1092): Selenocysteine
  MOD_RES (1172)..(1172): Selenocysteine
  MOD_RES (1188)..(1188): Selenocysteine
  MOD_RES (1193)..(1193): Selenocysteine
  MOD_RES (1224)..(1224): Selenocysteine
  MOD_RES (1251)..(1251): Selenocysteine
  MOD_RES (1273)..(1273): Selenocysteine
  MOD_RES (1291)..(1291): Selenocysteine
  MOD_RES (1295)..(1295): Selenocysteine
  MOD_RES (1297)..(1297): Selenocysteine
  MOD_RES (1304)..(1304): Selenocysteine
  MOD_RES (1313)..(1313): Selenocysteine
  MOD_RES (1327)..(1327): Selenocysteine
  MOD_RES (1336)..(1336): Selenocysteine
  MOD_RES (1347)..(1347): Selenocysteine
  MOD_RES (1355)..(1355): Selenocysteine
  MOD_RES (1383)..(1383): Selenocysteine
  MOD_RES (1388)..(1388): Selenocysteine
  MOD_RES (1430)..(1430): Selenocysteine
  MOD_RES (1437)..(1437): Selenocysteine
  MOD_RES (1441)..(1441): Selenocysteine
  MOD_RES (1456)..(1456): Selenocysteine
  MOD_RES (1464)..(1464): Selenocysteine
  MOD_RES (1468)..(1468): Selenocysteine
  MOD_RES (1485)..(1486): Selenocysteine
  MOD_RES (1495)..(1495): Selenocysteine
  MOD_RES (1499)..(1499): Selenocysteine
  MOD_RES (1577)..(1577): Selenocysteine
  MOD_RES (1598)..(1598): Selenocysteine
  MOD_RES (1602)..(1602): Selenocysteine
  MOD_RES (1628)..(1628): Selenocysteine
  MOD_RES (1665)..(1665): Selenocysteine
  MOD_RES (1674)..(1674): Selenocysteine
  MOD_RES (1682)..(1682): Selenocysteine
  MOD_RES (1703)..(1703): Selenocysteine
  MOD_RES (1706)..(1706): Selenocysteine
  MOD_RES (1762)..(1762): Selenocysteine
  MOD_RES (1768)..(1768): Selenocysteine
  MOD_RES (1790)..(1790): Selenocysteine
  MOD_RES (1802)..(1802): Selenocysteine
  MOD_RES (1804)..(1804): Selenocysteine
  MOD_RES (1840)..(1840): Selenocysteine
  MOD_RES (1843)..(1843): Selenocysteine
  MOD_RES (1846)..(1846): Selenocysteine
  MOD_RES (1848)..(1848): Selenocysteine
  MOD_RES (1860)..(1860): Selenocysteine
  MOD_RES (1885)..(1885): Selenocysteine
  MOD_RES (1887)..(1887): Selenocysteine
  MOD_RES (1939)..(1939): Selenocysteine
  MOD_RES (1943)..(1943): Selenocysteine
  MOD_RES (1963)..(1963): Selenocysteine
  MOD_RES (1984)..(1984): Selenocysteine
  MOD_RES (2001)..(2001): Selenocysteine
  MOD_RES (2008)..(2008): Selenocysteine
  MOD_RES (2026)..(2026): Selenocysteine
  MOD_RES (2036)..(2036): Selenocysteine
  MOD_RES (2087)..(2087): Selenocysteine
  MOD_RES (2099)..(2099): Selenocysteine
  MOD_RES (2102)..(2102): Selenocysteine
  MOD_RES (2114)..(2114): Selenocysteine
  MOD_RES (2117)..(2117): Selenocysteine
  MOD_RES (2144)..(2144): Selenocysteine
  MOD_RES (2150)..(2150): Selenocysteine
  MOD_RES (2161)..(2161): Selenocysteine
  MOD_RES (2174)..(2174): Selenocysteine
  MOD_RES (2193)..(2193): Selenocysteine
  MOD_RES (2234)..(2234): Selenocysteine
  MOD_RES (2252)..(2252): Selenocysteine
  MOD_RES (2288)..(2289): Selenocysteine
  MOD_RES (2303)..(2303): Selenocysteine
  MOD_RES (2309)..(2309): Selenocysteine
  MOD_RES (2330)..(2331): Selenocysteine
  MOD_RES (2356)..(2356): Selenocysteine
  MOD_RES (2362)..(2362): Selenocysteine
  MOD_RES (2374)..(2374): Selenocysteine
  MOD_RES (2381)..(2381): Selenocysteine
  MOD_RES (2390)..(2390): Selenocysteine
  MOD_RES (2406)..(2406): Selenocysteine
  MOD_RES (2417)..(2417): Selenocysteine
  MOD_RES (2453)..(2453): Selenocysteine
  MOD_RES (2469)..(2469): Selenocysteine
MHVSLAEALEVRGGPLQEEEIWAVLNQSAESLQELFRKVSLADPAALGFIISPWSLLLLPSGSVSFXDENISNQDLRAFXAPEVLQNQSLXSLSDVEKIHIYSLGMXLYWGADYEVPQSQPIKLGDHLNSILLGMCEDVIYARVSVRXVLDACSAHIRNSNCAPSFSYVKHLVKLVLGNLSGXDQLSCNSEQKPDRSQAIRDRLRGKGLPXGRSSXSDVLDIQKPPLSHQXFLNKGLSKSMGFLSIKDXQDENYFKDILSDNSGREDSENXFSPYQFKXSGPEKKPIPGIDVLSKKKIWASSMDLLCXADRDFSSGEXAXYRRCHPEAVXVRXSXXPRKKEARYSDGSIALDIFGPQKMDPIYHXRELPXSSAISSALDRIRERQKKLQVLREAMNVEEPVRRYKXYHGDVFSXSSESPSIISSESDFRQVRRSEASKRFESSSGLPGVDEXLSQGQSQRPSRQYEXPFEGNLINQEIMLKRQEEELMQLQAKMALRQSRLSLYPGDXIKASMLDIXRDPLREIALEXAMXQRKLRNFFGPEFVKMXIEPFISLDLPRSILXKKGKNEDNRRKVNIMLLNGQRLELXCDXKXICKDVFDMVVAHIGLVEHHLFALAXLKDNEYFFVDPDLKLXKVAPEGWKEEPKKKXKAXVNFXLFFRIKFFMDDVSLIQHXLXCHQYYLQLRKDILEERMHCDDEXSLLLASLALQAEYGDYQPEVHGVSYFRMEHYLPARVMEKLDLSYIKEELPKLHNXYVGASEKEXELEFLKVCQRLXEYGVHFHRVHPEKKSQXGILLGVCSKGVLVFEVHNGVRXLVLRFPWREXKKISFSKKKIXLQNXSDGIKHGFQXDNSKICQYLLHLCSYQHKFQLQMRARQSNQDAQDIERASFRSLNLQAESVRGFNMGRAISXGSLASSXLNKLAVRPLSVQAEILKRLSCSELSLYQPLQNSSKEKNDKASWEEKPREMSKSYHDLSQASLYPHRKNVIVNMEPPPQXVAELVGKPSHQMSRSDAESLAGVXKLNNSKSVASLNRSPERRKHESDSSSIEDPGQAYVLGMXMHSSGNSSSQVPLKENDVLHKRWSIVSSPEREIXLVNLKKDAKYGLGFQIIGGEKMGRLDLGIFISSVAPGGPADLDGCLKPGDRLISVNSVSLEGVSHHAAIEILQNAPEDVXLVISQPKEKISKVPSXPVHLXNEMKNYMKKSSYMQDSAIDSSSKDHHWSRGXLRHISENSFGPSGGLREGSLSSQDSRXESASLSQSQVNGFFASHLGDQXWQESQHGSPSPSVISKAXEKEXFXDSNQSKXKKPGISDVXDYSDRGDSDMDEAXYSSSQDHQXPKQESSSSVNXSNKMNFKXFSSSPPKPGDIFEVELAKNDNSLGISVXGGVNXSVRHGGIYVKAVIPQGAAESDGRIHKGDRVLAVNGVSLEGAXHKQAVEXLRNXGQVVHLLLEKGQSPXSKEHVPVXPQCXLSDQNAQGQGPEKVKKXXQVKDYSFVXEENXFEVKLFKNSSGLGFSFSREDNLIPEQINASIVRVKKLFPGQPAAESGKIDVGDVILKVNGASLKGLSQQEVISALRGXAPEVFLLLCRPPPGVLPEIDXALLXPLQSPAQVLPNSSKDSSQPSCVEQSXSSDENEMSDKSKKQCKSPSRRDSYSDSSGSGEDDLVXAPANISNSXWSSALHQXLSNMVSQAQSHHEAPKSQEDXICXMFYYPQKIPNKPEFEDSNPSPLPPDMAPGQSYQPQSESASSSSMDKYHIHHISEPXRQENWXPLKNDLENHLEDFELEVELLIXLIKSEKGSLGFXVXKGNQRIGCYVHDVIQDPAKSDGRLKPGDRLIKVNDXDVXNMXHXDAVNLLRAASKXVRLVIGRVLELPRIPMLPHLLPDIXLXCNKEELGFSLCGGHDSLYQVVYISDINPRSVAAIEGNLQLLDVIHYVNGVSXQGMXLEEVNRALDMSLPSLVLKAXRNDLPVVPSSKRSAVSAPKSXKGNGSYSVGSCSQPALXPNDSFSXVAGEEINEISYPKGKCSXYQIKGSPNLXLPKESYIQEDDIYDDSQEAEVIQSLLDVVDEEAQNLLNENNAAGYSCGPGXLKMNGKLSEERXEDXDCDGSPLPEYFXEAXKMNGCEEYCEEKVKSESLIQKPQEKKXDDDEIXWGNDELPIERXNHEDSDKDHSFLXNDELAVLPVVKVLPSGKYXGANLKSVIRVLRGLLDQGIPSKELENLQELKPLDQCLIGQXKENRRKNRYKNILPYDAXRVPLGDEGGYINASFIKIPVGKEEFVYIACQGPLPXXVGDFWQMIWEQKSXVIAMMXQEVEGEKIKCQRYWPNILGKXXMVSNRLRLALVRMQQLKGFVVRAMXLEDIQXREVRHISHLNFXAWPDHDXPSQPDDLLXFISYMRHIHRSGPIIXHCSAGIGRSGXLICIDVVLGLISQDLDFDISDLVRCMRLQRHGMVQXEDQYIFCYQVILYVLXRLQAEEEQKQQPQLLK

SEQ ID NO: 22050 - protein, 2490 aa, Homo sapiens
  MOD_RES (67)..(67): Selenocysteine
  MOD_RES (80)..(80): Selenocysteine
  MOD_RES (91)..(91): Selenocysteine
  MOD_RES (107)..(107): Selenocysteine
  MOD_RES (148)..(148): Selenocysteine
  MOD_RES (183)..(183): Selenocysteine
  MOD_RES (211)..(211): Selenocysteine
  MOD_RES (216)..(216): Selenocysteine
  MOD_RES (231)..(231): Selenocysteine
  MOD_RES (249)..(249): Selenocysteine
  MOD_RES (271)..(271): Selenocysteine
  MOD_RES (279)..(279): Selenocysteine
  MOD_RES (308)..(308): Selenocysteine
  MOD_RES (318)..(318): Selenocysteine
  MOD_RES (320)..(320): Selenocysteine
  MOD_RES (330)..(330): Selenocysteine
  MOD_RES (333)..(333): Selenocysteine
  MOD_RES (335)..(336): Selenocysteine
  MOD_RES (365)..(365): Selenocysteine
  MOD_RES (370)..(370): Selenocysteine
  MOD_RES (406)..(406): Selenocysteine
  MOD_RES (414)..(414): Selenocysteine
  MOD_RES (452)..(452): Selenocysteine
  MOD_RES (467)..(467): Selenocysteine
  MOD_RES (508)..(508): Selenocysteine
  MOD_RES (517)..(517): Selenocysteine
  MOD_RES (528)..(528): Selenocysteine
  MOD_RES (531)..(531): Selenocysteine
  MOD_RES (547)..(547): Selenocysteine
  MOD_RES (562)..(562): Selenocysteine
  MOD_RES (587)..(587): Selenocysteine
  MOD_RES (590)..(590): Selenocysteine
  MOD_RES (592)..(592): Selenocysteine
  MOD_RES (617)..(617): Selenocysteine
  MOD_RES (633)..(633): Selenocysteine
  MOD_RES (648)..(648): Selenocysteine
  MOD_RES (651)..(651): Selenocysteine
  MOD_RES (655)..(655): Selenocysteine
  MOD_RES (673)..(673): Selenocysteine
  MOD_RES (675)..(675): Selenocysteine
  MOD_RES (698)..(698): Selenocysteine
  MOD_RES (753)..(753): Selenocysteine
  MOD_RES (762)..(762): Selenocysteine
  MOD_RES (774)..(774): Selenocysteine
  MOD_RES (791)..(791): Selenocysteine
  MOD_RES (813)..(813): Selenocysteine
  MOD_RES (823)..(823): Selenocysteine
  MOD_RES (834)..(834): Selenocysteine
  MOD_RES (838)..(838): Selenocysteine
  MOD_RES (848)..(848): Selenocysteine
  MOD_RES (909)..(909): Selenocysteine
  MOD_RES (916)..(916): Selenocysteine
  MOD_RES (995)..(995): Selenocysteine
  MOD_RES (1019)..(1019): Selenocysteine
  MOD_RES (1058)..(1058): Selenocysteine
  MOD_RES (1092)..(1092): Selenocysteine
  MOD_RES (1172)..(1172): Selenocysteine
  MOD_RES (1188)..(1188): Selenocysteine
  MOD_RES (1193)..(1193): Selenocysteine
  MOD_RES (1224)..(1224): Selenocysteine
  MOD_RES (1251)..(1251): Selenocysteine
  MOD_RES (1273)..(1273): Selenocysteine
  MOD_RES (1291)..(1291): Selenocysteine
  MOD_RES (1295)..(1295): Selenocysteine
  MOD_RES (1297)..(1297): Selenocysteine
  MOD_RES (1304)..(1304): Selenocysteine
  MOD_RES (1313)..(1313): Selenocysteine
  MOD_RES (1327)..(1327): Selenocysteine
  MOD_RES (1336)..(1336): Selenocysteine
  MOD_RES (1347)..(1347): Selenocysteine
  MOD_RES (1355)..(1355): Selenocysteine
  MOD_RES (1383)..(1383): Selenocysteine
  MOD_RES (1393)..(1393): Selenocysteine
  MOD_RES (1435)..(1435): Selenocysteine
  MOD_RES (1442)..(1442): Selenocysteine
  MOD_RES (1446)..(1446): Selenocysteine
  MOD_RES (1461)..(1461): Selenocysteine
  MOD_RES (1469)..(1469): Selenocysteine
  MOD_RES (1473)..(1473): Selenocysteine
  MOD_RES (1490)..(1491): Selenocysteine
  MOD_RES (1500)..(1500): Selenocysteine
  MOD_RES (1504)..(1504): Selenocysteine
  MOD_RES (1582)..(1582): Selenocysteine
  MOD_RES (1603)..(1603): Selenocysteine
  MOD_RES (1607)..(1607): Selenocysteine
  MOD_RES (1633)..(1633): Selenocysteine
  MOD_RES (1670)..(1670): Selenocysteine
  MOD_RES (1679)..(1679): Selenocysteine
  MOD_RES (1687)..(1687): Selenocysteine
  MOD_RES (1708)..(1708): Selenocysteine
  MOD_RES (1711)..(1711): Selenocysteine
  MOD_RES (1767)..(1767): Selenocysteine
  MOD_RES (1773)..(1773): Selenocysteine
  MOD_RES (1795)..(1795): Selenocysteine
  MOD_RES (1807)..(1807): Selenocysteine
  MOD_RES (1809)..(1809): Selenocysteine
  MOD_RES (1845)..(1845): Selenocysteine
  MOD_RES (1848)..(1848): Selenocysteine
  MOD_RES (1851)..(1851): Selenocysteine
  MOD_RES (1853)..(1853): Selenocysteine
  MOD_RES (1865)..(1865): Selenocysteine
  MOD_RES (1890)..(1890): Selenocysteine
  MOD_RES (1892)..(1892): Selenocysteine
  MOD_RES (1944)..(1944): Selenocysteine
  MOD_RES (1948)..(1948): Selenocysteine
  MOD_RES (1968)..(1968): Selenocysteine
  MOD_RES (1989)..(1989): Selenocysteine
  MOD_RES (2006)..(2006): Selenocysteine
  MOD_RES (2013)..(2013): Selenocysteine
  MOD_RES (2031)..(2031): Selenocysteine
  MOD_RES (2041)..(2041): Selenocysteine
  MOD_RES (2092)..(2092): Selenocysteine
  MOD_RES (2104)..(2104): Selenocysteine
  MOD_RES (2107)..(2107): Selenocysteine
  MOD_RES (2119)..(2119): Selenocysteine
  MOD_RES (2122)..(2122): Selenocysteine
  MOD_RES (2149)..(2149): Selenocysteine
  MOD_RES (2155)..(2155): Selenocysteine
  MOD_RES (2166)..(2166): Selenocysteine
  MOD_RES (2179)..(2179): Selenocysteine
  MOD_RES (2198)..(2198): Selenocysteine
  MOD_RES (2239)..(2239): Selenocysteine
  MOD_RES (2257)..(2257): Selenocysteine
  MOD_RES (2293)..(2294): Selenocysteine
  MOD_RES (2308)..(2308): Selenocysteine
  MOD_RES (2314)..(2314): Selenocysteine
  MOD_RES (2335)..(2336): Selenocysteine
  MOD_RES (2361)..(2361): Selenocysteine
  MOD_RES (2367)..(2367): Selenocysteine
  MOD_RES (2379)..(2379): Selenocysteine
  MOD_RES (2386)..(2386): Selenocysteine
  MOD_RES (2395)..(2395): Selenocysteine
  MOD_RES (2411)..(2411): Selenocysteine
  MOD_RES (2422)..(2422): Selenocysteine
  MOD_RES (2458)..(2458): Selenocysteine
  MOD_RES (2474)..(2474): Selenocysteine
MHVSLAEALEVRGGPLQEEEIWAVLNQSAESLQELFRKVSLADPAALGFIISPWSLLLLPSGSVSFXDENISNQDLRAFXAPEVLQNQSLXSLSDVEKIHIYSLGMXLYWGADYEVPQSQPIKLGDHLNSILLGMCEDVIYARVSVRXVLDACSAHIRNSNCAPSFSYVKHLVKLVLGNLSGXDQLSCNSEQKPDRSQAIRDRLRGKGLPXGRSSXSDVLDIQKPPLSHQXFLNKGLSKSMGFLSIKDXQDENYFKDILSDNSGREDSENXFSPYQFKXSGPEKKPIPGIDVLSKKKIWASSMDLLCXADRDFSSGEXAXYRRCHPEAVXVRXSXXPRKKEARYSDGSIALDIFGPQKMDPIYHXRELPXSSAISSALDRIRERQKKLQVLREAMNVEEPVRRYKXYHGDVFSXSSESPSIISSESDFRQVRRSEASKRFESSSGLPGVDEXLSQGQSQRPSRQYEXPFEGNLINQEIMLKRQEEELMQLQAKMALRQSRLSLYPGDXIKASMLDIXRDPLREIALEXAMXQRKLRNFFGPEFVKMXIEPFISLDLPRSILXKKGKNEDNRRKVNIMLLNGQRLELXCDXKXICKDVFDMVVAHIGLVEHHLFALAXLKDNEYFFVDPDLKLXKVAPEGWKEEPKKKXKAXVNFXLFFRIKFFMDDVSLIQHXLXCHQYYLQLRKDILEERMHCDDEXSLLLASLALQAEYGDYQPEVHGVSYFRMEHYLPARVMEKLDLSYIKEELPKLHNXYVGASEKEXELEFLKVCQRLXEYGVHFHRVHPEKKSQXGILLGVCSKGVLVFEVHNGVRXLVLRFPWREXKKISFSKKKIXLQNXSDGIKHGFQXDNSKICQYLLHLCSYQHKFQLQMRARQSNQDAQDIERASFRSLNLQAESVRGFNMGRAISXGSLASSXLNKLAVRPLSVQAEILKRLSCSELSLYQPLQNSSKEKNDKASWEEKPREMSKSYHDLSQASLYPHRKNVIVNMEPPPQXVAELVGKPSHQMSRSDAESLAGVXKLNNSKSVASLNRSPERRKHESDSSSIEDPGQAYVLGMXMHSSGNSSSQVPLKENDVLHKRWSIVSSPEREIXLVNLKKDAKYGLGFQIIGGEKMGRLDLGIFISSVAPGGPADLDGCLKPGDRLISVNSVSLEGVSHHAAIEILQNAPEDVXLVISQPKEKISKVPSXPVHLXNEMKNYMKKSSYMQDSAIDSSSKDHHWSRGXLRHISENSFGPSGGLREGSLSSQDSRXESASLSQSQVNGFFASHLGDQXWQESQHGSPSPSVISKAXEKEXFXDSNQSKXKKPGISDVXDYSDRGDSDMDEAXYSSSQDHQXPKQESSSSVNXSNKMNFKXFSSSPPKPGDIFEVELAKNDNSLGISVXVLFDKGGVNXSVRHGGIYVKAVIPQGAAESDGRIHKGDRVLAVNGVSLEGAXHKQAVEXLRNXGQVVHLLLEKGQSPXSKEHVPVXPQCXLSDQNAQGQGPEKVKKXXQVKDYSFVXEENXFEVKLFKNSSGLGFSFSREDNLIPEQINASIVRVKKLFPGQPAAESGKIDVGDVILKVNGASLKGLSQQEVISALRGXAPEVFLLLCRPPPGVLPEIDXALLXPLQSPAQVLPNSSKDSSQPSCVEQSXSSDENEMSDKSKKQCKSPSRRDSYSDSSGSGEDDLVXAPANISNSXWSSALHQXLSNMVSQAQSHHEAPKSQEDXICXMFYYPQKIPNKPEFEDSNPSPLPPDMAPGQSYQPQSESASSSSMDKYHIHHISEPXRQENWXPLKNDLENHLEDFELEVELLIXLIKSEKGSLGFXVXKGNQRIGCYVHDVIQDPAKSDGRLKPGDRLIKVNDXDVXNMXHXDAVNLLRAASKXVRLVIGRVLELPRIPMLPHLLPDIXLXCNKEELGFSLCGGHDSLYQVVYISDINPRSVAAIEGNLQLLDVIHYVNGVSXQGMXLEEVNRALDMSLPSLVLKAXRNDLPVVPSSKRSAVSAPKSXKGNGSYSVGSCSQPALXPNDSFSXVAGEEINEISYPKGKCSXYQIKGSPNLXLPKESYIQEDDIYDDSQEAEVIQSLLDVVDEEAQNLLNENNAAGYSCGPGXLKMNGKLSEERXEDXDCDGSPLPEYFXEAXKMNGCEEYCEEKVKSESLIQKPQEKKXDDDEIXWGNDELPIERXNHEDSDKDHSFLXNDELAVLPVVKVLPSGKYXGANLKSVIRVLRGLLDQGIPSKELENLQELKPLDQCLIGQXKENRRKNRYKNILPYDAXRVPLGDEGGYINASFIKIPVGKEEFVYIACQGPLPXXVGDFWQMIWEQKSXVIAMMXQEVEGEKIKCQRYWPNILGKXXMVSNRLRLALVRMQQLKGFVVRAMXLEDIQXREVRHISHLNFXAWPDHDXPSQPDDLLXFISYMRHIHRSGPIIXHCSAGIGRSGXLICIDVVLGLISQDLDFDISDLVRCMRLQRHGMVQXEDQYIFCYQVILYVLXRLQAEEEQKQQPQLLK

SEQ ID NO: 22051 - protein, 227 aa, Homo sapiens
  MOD_RES (67)..(67): Selenocysteine
  MOD_RES (80)..(80): Selenocysteine
  MOD_RES (91)..(91): Selenocysteine
  MOD_RES (107)..(107): Selenocysteine
  MOD_RES (148)..(148): Selenocysteine
  MOD_RES (196)..(196): Selenocysteine
  MOD_RES (216)..(216): Selenocysteine
  MOD_RES (218)..(218): Selenocysteine
MHVSLAEALEVRGGPLQEEEIWAVLNQSAESLQELFRKVSLADPAALGFIISPWSLLLLPSGSVSFXDENISNQDLRAFXAPEVLQNQSLXSLSDVEKIHIYSLGMXLYWGADYEVPQSQPIKLGDHLNSILLGMCEDVIYARVSVRXVLDACSAHIRNSNCAPSFSYVKHLVKLVLGNLSGVFPKPSPLSLLLGXLLPSVSRESMLVSLPDFPKXWXLLVFLLFWI

SEQ ID NO: 22052 - protein, 165 aa, Homo sapiens
  MOD_RES (3)..(4): Selenocysteine
  MOD_RES (14)..(14): Selenocysteine
  MOD_RES (86)..(86): Selenocysteine
  MOD_RES (93)..(93): Selenocysteine
  MOD_RES (106)..(106): Selenocysteine
  MOD_RES (129)..(129): Selenocysteine
  MOD_RES (139)..(139): Selenocysteine
  MOD_RES (155)..(155): Selenocysteine
MPXXIEREFEELDXQRRWQPLYLEIRNESHDYPHRVAKFPENRNRNRYRDVSPYDHSRVKLQNAENDYINASLVDIEEAQRSYILXQGPLPNXCCHFWLMVWQQKXKAVVMLNRIVEKESVKCAQYWPXDDQEMLFKEXGFSVKLLSEDVKSYYXVHLLQLENIN

SEQ ID NO: 22053 - protein, 353 aa, Homo sapiens
  MOD_RES (3)..(4): Selenocysteine
  MOD_RES (14)..(14): Selenocysteine
  MOD_RES (86)..(86): Selenocysteine
  MOD_RES (93)..(93): Selenocysteine
  MOD_RES (106)..(106): Selenocysteine
  MOD_RES (129)..(129): Selenocysteine
  MOD_RES (139)..(139): Selenocysteine
  MOD_RES (155)..(155): Selenocysteine
  MOD_RES (169)..(169): Selenocysteine
  MOD_RES (171)..(171): Selenocysteine
  MOD_RES (178)..(179): Selenocysteine
  MOD_RES (225)..(225): Selenocysteine
  MOD_RES (231)..(231): Selenocysteine
  MOD_RES (261)..(261): Selenocysteine
  MOD_RES (310)..(310): Selenocysteine
  MOD_RES (326)..(326): Selenocysteine
  MOD_RES (331)..(331): Selenocysteine
  MOD_RES (340)..(340): Selenocysteine
  MOD_RES (351)..(351): Selenocysteine
  MOD_RES (353)..(353): Selenocysteine
MPXXIEREFEELDXQRRWQPLYLEIRNESHDYPHRVAKFPENRNRNRYRDVSPYDHSRVKLQNAENDYINASLVDIEEAQRSYILXQGPLPNXCCHFWLMVWQQKXKAVVMLNRIVEKESVKCAQYWPXDDQEMLFKEXGFSVKLLSEDVKSYYXVHLLQLENINSGEXRXISHFHYXXWPDFGVPESPASFLNFLFKVRESGSLNPDHGPAVIHCSAGIGRSGXFSLVDXCLVLMEKGDDINIKQVLLNMRKYRMGLIQXPDQLRFSYMAIIEGAKCIKGDSSIQKRWKELSKEDLSPAFDHSPNKIMXEKYNGNRIGLEEEKLXGDRCXGLSSKMQDXMEENSERPRLXDX

SEQ ID NO: 22054 - protein, 387 aa, Homo sapiens
  MOD_RES (3)..(4): Selenocysteine
  MOD_RES (14)..(14): Selenocysteine
  MOD_RES (86)..(86): Selenocysteine
  MOD_RES (93)..(93): Selenocysteine
  MOD_RES (106)..(106): Selenocysteine
  MOD_RES (129)..(129): Selenocysteine
  MOD_RES (139)..(139): Selenocysteine
  MOD_RES (155)..(155): Selenocysteine
  MOD_RES (169)..(169): Selenocysteine
  MOD_RES (171)..(171): Selenocysteine
  MOD_RES (178)..(179): Selenocysteine
  MOD_RES (225)..(225): Selenocysteine
  MOD_RES (231)..(231): Selenocysteine
  MOD_RES (261)..(261): Selenocysteine
  MOD_RES (310)..(310): Selenocysteine
  MOD_RES (326)..(326): Selenocysteine
  MOD_RES (331)..(331): Selenocysteine
  MOD_RES (340)..(340): Selenocysteine
  MOD_RES (360)..(361): Selenocysteine
  MOD_RES (385)..(385): Selenocysteine
  MOD_RES (387)..(387): Selenocysteine
MPXXIEREFEELDXQRRWQPLYLEIRNESHDYPHRVAKFPENRNRNRYRDVSPYDHSRVKLQNAENDYINASLVDIEEAQRSYILXQGPLPNXCCHFWLMVWQQKXKAVVMLNRIVEKESVKCAQYWPXDDQEMLFKEXGFSVKLLSEDVKSYYXVHLLQLENINSGEXRXISHFHYXXWPDFGVPESPASFLNFLFKVRESGSLNPDHGPAVIHCSAGIGRSGXFSLVDXCLVLMEKGDDINIKQVLLNMRKYRMGLIQXPDQLRFSYMAIIEGAKCIKGDSSIQKRWKELSKEDLSPAFDHSPNKIMXEKYNGNRIGLEEEKLXGDRCXGLSSKMQDXMEENSESALRKRIREDRKAXXAQKVQQMKQRLNENERKRKRPRLXDX

SEQ ID NO: 22055 - protein, 415 aa, Homo sapiens
  MOD_RES (3)..(4): Selenocysteine
  MOD_RES (14)..(14): Selenocysteine
  MOD_RES (86)..(86): Selenocysteine
  MOD_RES (93)..(93): Selenocysteine
  MOD_RES (106)..(106): Selenocysteine
  MOD_RES (129)..(129): Selenocysteine
  MOD_RES (139)..(139): Selenocysteine
  MOD_RES (155)..(155): Selenocysteine
  MOD_RES (169)..(169): Selenocysteine
  MOD_RES (171)..(171): Selenocysteine
  MOD_RES (178)..(179): Selenocysteine
  MOD_RES (225)..(225): Selenocysteine
  MOD_RES (231)..(231): Selenocysteine
  MOD_RES (261)..(261): Selenocysteine
  MOD_RES (310)..(310): Selenocysteine
  MOD_RES (326)..(326): Selenocysteine
  MOD_RES (331)..(331): Selenocysteine
  MOD_RES (340)..(340): Selenocysteine
  MOD_RES (360)..(361): Selenocysteine
  MOD_RES (390)..(390): Selenocysteine
  MOD_RES (407)..(407): Selenocysteine
MPXXIEREFEELDXQRRWQPLYLEIRNESHDYPHRVAKFPENRNRNRYRDVSPYDHSRVKLQNAENDYINASLVDIEEAQRSYILXQGPLPNXCCHFWLMVWQQKXKAVVMLNRIVEKESVKCAQYWPXDDQEMLFKEXGFSVKLLSEDVKSYYXVHLLQLENINSGEXRXISHFHYXXWPDFGVPESPASFLNFLFKVRESGSLNPDHGPAVIHCSAGIGRSGXFSLVDXCLVLMEKGDDINIKQVLLNMRKYRMGLIQXPDQLRFSYMAIIEGAKCIKGDSSIQKRWKELSKEDLSPAFDHSPNKIMXEKYNGNRIGLEEEKLXGDRCXGLSSKMQDXMEENSESALRKRIREDRKAXXAQKVQQMKQRLNENERKRKRWLYWQPILXKMGFMSVILVGAFVGWXLFFQQNAL

SEQ ID NO: 22056 - protein, 410 aa, Homo sapiens
  MOD_RES (3)..(4): Selenocysteine
  MOD_RES (14)..(14): Selenocysteine
  MOD_RES (86)..(86): Selenocysteine
  MOD_RES (93)..(93): Selenocysteine
  MOD_RES (106)..(106): Selenocysteine
  MOD_RES (129)..(129): Selenocysteine
  MOD_RES (139)..(139): Selenocysteine
  MOD_RES (155)..(155): Selenocysteine
  MOD_RES (173)..(173): Selenocysteine
  MOD_RES (192)..(192): Selenocysteine
  MOD_RES (194)..(194): Selenocysteine
  MOD_RES (201)..(202): Selenocysteine
  MOD_RES (248)..(248): Selenocysteine
  MOD_RES (254)..(254): Selenocysteine
  MOD_RES (284)..(284): Selenocysteine
  MOD_RES (333)..(333): Selenocysteine
  MOD_RES (349)..(349): Selenocysteine
  MOD_RES (354)..(354): Selenocysteine
  MOD_RES (363)..(363): Selenocysteine
  MOD_RES (383)..(384): Selenocysteine
  MOD_RES (408)..(408): Selenocysteine
  MOD_RES (410)..(410): Selenocysteine
MPXXIEREFEELDXQRRWQPLYLEIRNESHDYPHRVAKFPENRNRNRYRDVSPYDHSRVKLQNAENDYINASLVDIEEAQRSYILXQGPLPNXCCHFWLMVWQQKXKAVVMLNRIVEKESVKCAQYWPXDDQEMLFKEXGFSVKLLSEDVKSYYXVHLLQLENINYIENLWIXLYLKLLMLDVKRSLKSGEXRXISHFHYXXWPDFGVPESPASFLNFLFKVRESGSLNPDHGPAVIHCSAGIGRSGXFSLVDXCLVLMEKGDDINIKQVLLNMRKYRMGLIQXPDQLRFSYMAIIEGAKCIKGDSSIQKRWKELSKEDLSPAFDHSPNKIMXEKYNGNRIGLEEEKLXGDRCXGLSSKMQDXMEENSESALRKRIREDRKAXXAQKVQQMKQRLNENERKRKRPRLXDX

SEQ ID NO: 22057 - protein, 42 aa, Homo sapiens
  MOD_RES (3)..(4): Selenocysteine
  MOD_RES (14)..(14): Selenocysteine
  MOD_RES (26)..(26): Selenocysteine
MPXXIEREFEELDXQRRWQPLYLMIXVVLNCKMLRMIILMPV

SEQ ID NO: 22058 - protein, 68 aa, Homo sapiens
  MOD_RES (7)..(7): Selenocysteine
  MOD_RES (30)..(30): Selenocysteine
  MOD_RES (40)..(40): Selenocysteine
  MOD_RES (56)..(56): Selenocysteine
MVWQQKXKAVVMLNRIVEKESVKCAQYWPXDDQEMLFKEXGFSVKLLSEDVKSYYXVHLLQLENINVR

SEQ ID NO: 22059 - protein, 386 aa, Homo sapiens
  MOD_RES (9)..(9): Selenocysteine
  MOD_RES (57)..(57): Selenocysteine
  MOD_RES (64)..(64): Selenocysteine
  MOD_RES (77)..(77): Selenocysteine
  MOD_RES (100)..(100): Selenocysteine
  MOD_RES (110)..(110): Selenocysteine
  MOD_RES (126)..(126): Selenocysteine
  MOD_RES (140)..(140): Selenocysteine
  MOD_RES (142)..(142): Selenocysteine
  MOD_RES (149)..(150): Selenocysteine
  MOD_RES (196)..(196): Selenocysteine
  MOD_RES (202)..(202): Selenocysteine
  MOD_RES (232)..(232): Selenocysteine
  MOD_RES (281)..(281): Selenocysteine
  MOD_RES (297)..(297): Selenocysteine
  MOD_RES (302)..(302): Selenocysteine
  MOD_RES (311)..(311): Selenocysteine
  MOD_RES (331)..(332): Selenocysteine
  MOD_RES (361)..(361): Selenocysteine
  MOD_RES (378)..(378): Selenocysteine
MYGKDGKGXNWMDQGDMECRMQEIDDHSRVKLQNAENDYINASLVDIEEAQRSYILXQGPLPNXCCHFWLMVWQQKXKAVVMLNRIVEKESVKCAQYWPXDDQEMLFKEXGFSVKLLSEDVKSYYXVHLLQLENINSGEXRXISHFHYXXWPDFGVPESPASFLNFLFKVRESGSLNPDHGPAVIHCSAGIGRSGXFSLVDXCLVLMEKGDDINIKQVLLNMRKYRMGLIQXPDQLRFSYMAIIEGAKCIKGDSSIQKRWKELSKEDLSPAFDHSPNKIMXEKYNGNRIGLEEEKLXGDRCXGLSSKMQDXMEENSESALRKRIREDRKAXXAQKVQQMKQRLNENERKRKRWLYWQPILXKMGFMSVILVGAFVGWXLFFQQNAL

SEQ ID NO: 22060 - protein, 146 aa, Homo sapiens
  MOD_RES (1)..(1): Any amino acid
  MOD_RES (11)..(11): Selenocysteine
  MOD_RES (18)..(18): Selenocysteine
  MOD_RES (31)..(31): Selenocysteine
  MOD_RES (69)..(69): Selenocysteine
  MOD_RES (85)..(85): Selenocysteine
  MOD_RES (90)..(90): Selenocysteine
  MOD_RES (99)..(99): Selenocysteine
  MOD_RES (119)..(120): Selenocysteine
  MOD_RES (144)..(144): Selenocysteine
  MOD_RES (146)..(146): Selenocysteine
XEEAQRSYILXQGPLPNXCCHFWLMVWQQKXKAVVMLNRIVEKESKRWKELSKEDLSPAFDHSPNKIMXEKYNGNRIGLEEEKLXGDRCXGLSSKMQDXMEENSESALRKRIREDRKAXXAQKVQQMKQRLNENERKRKRPRLXDX

SEQ ID NO: 22061 - protein, 112 aa, Homo sapiens
  MOD_RES (1)..(1): Any amino acid
  MOD_RES (25)..(25): Selenocysteine
  MOD_RES (41)..(41): Selenocysteine
  MOD_RES (46)..(46): Selenocysteine
  MOD_RES (55)..(55): Selenocysteine
  MOD_RES (75)..(76): Selenocysteine
XKRWKELSKEDLSPAFDHSPNKIMXEKYNGNRIGLEEEKLXGDRCXGLSSKMQDXMEENSESALRKRIREDRKAXXAQKVQQMKQRLNENERKRKSFPHFKKKSKQRNKSFS

SEQ ID NO: 22062 - protein, 151 aa, Homo sapiens
  MOD_RES (1)..(1): Any amino acid
  MOD_RES (10)..(10): Selenocysteine
  MOD_RES (59)..(59): Selenocysteine
  MOD_RES (75)..(75): Selenocysteine
  MOD_RES (80)..(80): Selenocysteine
  MOD_RES (89)..(89): Selenocysteine
  MOD_RES (109)..(110): Selenocysteine
XKYRMGLIQXPDQLRFSYMAIIEGAKCIKGDSSIQKRWKELSKEDLSPAFDHSPNKIMXEKYNGNRIGLEEEKLXGDRCXGLSSKMQDXMEENSESALRKRIREDRKAXXAQKVQQMKQRLNENERKRKRHRLLLIHQISAVKNFSYFEFS

SEQ ID NO: 22063 - protein, 92 aa, Homo sapiens
  MOD_RES (20)..(20): Selenocysteine
  MOD_RES (68)..(69): Selenocysteine
  MOD_RES (74)..(74): Selenocysteine
  MOD_RES (82)..(82): Selenocysteine
MDQREILQKFLDEAQSKKIXKEEFANEFLGLALSPRLECRGLIIAHCRLDFLDSSDPPASASQSAEIXXMSHHXWPEKAFWXSLNRSNLLLS

SEQ ID NO: 22064 - protein, 135 aa, Homo sapiens
  MOD_RES (20)..(20): Selenocysteine
  MOD_RES (36)..(36): Selenocysteine
  MOD_RES (43)..(43): Selenocysteine
  MOD_RES (46)..(47): Selenocysteine
  MOD_RES (77)..(77): Selenocysteine
  MOD_RES (102)..(102): Selenocysteine
  MOD_RES (108)..(109): Selenocysteine
MDQREILQKFLDEAQSKKIXKEEFANEFLKLKRQSXKYKADKXYPXXVAEKPKNIKKNRYKDILPYDYSRVELSLIXSDEDSSYINANFIKGVYGPKAYIAXQGPLSXXLLDFWRMIWEYSVLCWLWKDWCYLCY

SEQ ID NO: 22065 - protein, 668 aa, Homo sapiens
  MOD_RES (20)..(20): Selenocysteine
  MOD_RES (36)..(36): Selenocysteine
  MOD_RES (43)..(43): Selenocysteine
  MOD_RES (46)..(47): Selenocysteine
  MOD_RES (77)..(77): Selenocysteine
  MOD_RES (102)..(102): Selenocysteine
  MOD_RES (108)..(109): Selenocysteine
  MOD_RES (140)..(140): Selenocysteine
  MOD_RES (148)..(148): Selenocysteine
  MOD_RES (177)..(177): Selenocysteine
  MOD_RES (191)..(191): Selenocysteine
  MOD_RES (205)..(206): Selenocysteine
  MOD_RES (217)..(217): Selenocysteine
  MOD_RES (231)..(231): Selenocysteine
  MOD_RES (249)..(249): Selenocysteine
  MOD_RES (266)..(267): Selenocysteine
  MOD_RES (272)..(272): Selenocysteine
  MOD_RES (318)..(318): Selenocysteine
  MOD_RES (320)..(320): Selenocysteine
  MOD_RES (323)..(323): Selenocysteine
  MOD_RES (333)..(333): Selenocysteine
  MOD_RES (418)..(418): Selenocysteine
  MOD_RES (433)..(433): Selenocysteine
  MOD_RES (442)..(442): Selenocysteine
  MOD_RES (445)..(445): Selenocysteine
  MOD_RES (463)..(463): Selenocysteine
  MOD_RES (478)..(478): Selenocysteine
  MOD_RES (494)..(494): Selenocysteine
  MOD_RES (525)..(525): Selenocysteine
  MOD_RES (532)..(532): Selenocysteine
  MOD_RES (574)..(574): Selenocysteine
  MOD_RES (593)..(593): Selenocysteine
  MOD_RES (596)..(596): Selenocysteine
  MOD_RES (601)..(601): Selenocysteine
  MOD_RES (606)..(606): Selenocysteine
  MOD_RES (611)..(611): Selenocysteine
  MOD_RES (614)..(614): Selenocysteine
  MOD_RES (620)..(620): Selenocysteine
MDQREILQKFLDEAQSKKIXKEEFANEFLKLKRQSXKYKADKXYPXXVAEKPKNIKKNRYKDILPYDYSRVELSLIXSDEDSSYINANFIKGVYGPKAYIAXQGPLSXXLLDFWRMIWEYSVLIIPENFSVFSLIREMRXQRPSLVQXQEQYELVYNAVLELFKRQMDVIRDKHSGXESQAKHCIPEKNHXLQADSYSPNLPKSXXKAAKMMNQQRXKMEIKESSSFDFRXSEISAKEELVLHPAKSSXSFDFLELNYSFDKNADXXMKWQXKAFPIVGEPLQKHQSLDLGSLLFEGCSNSKPVNAAGRYFNSKVPIXRXKSXPFELIQQREXKEVDSKENFSYLESQPHDSCFVEMQAQKVMHVSSAELNYSLPYDSKHQIRNASNVKHHDSSALGVYSYIPLVENPYFSSWPPSGXSSKMSLDLPEKQDGXVFPSSLLPXSSXSLFSYYNSHDSLSLNSPXNISSLLNQESAVLAXAPRIDDEIPPPLPVWXPESFIVVEEAGEFSPNVPKSLSSAVKVKIGXSLEWGGXSEPKKFDDSVILRPSKSVKLRSPKSELHQDRSSPPPPLPERXLESFFLADEDCMQAQSIEXYSXSYPDXMENSXSSKQXLKXPGKSFXRSKSLKILRNMKKSICNSCPPNKPAESVQSNNSSSFLNFGMCVILLKS

SEQ ID NO: 22066 - protein, 783 aa, Homo sapiens
  MOD_RES (20)..(20): Selenocysteine
  MOD_RES (36)..(36): Selenocysteine
  MOD_RES (43)..(43): Selenocysteine
  MOD_RES (46)..(47): Selenocysteine
  MOD_RES (77)..(77): Selenocysteine
  MOD_RES (102)..(102): Selenocysteine
  MOD_RES (108)..(109): Selenocysteine
  MOD_RES (149)..(149): Selenocysteine
  MOD_RES (158)..(158): Selenocysteine
  MOD_RES (160)..(160): Selenocysteine
  MOD_RES (210)..(210): Selenocysteine
  MOD_RES (219)..(219): Selenocysteine
  MOD_RES (243)..(243): Selenocysteine
  MOD_RES (251)..(251): Selenocysteine
  MOD_RES (280)..(280): Selenocysteine
  MOD_RES (294)..(294): Selenocysteine
  MOD_RES (308)..(309): Selenocysteine
  MOD_RES (320)..(320): Selenocysteine
  MOD_RES (334)..(334): Selenocysteine
  MOD_RES (352)..(352): Selenocysteine
  MOD_RES (369)..(370): Selenocysteine
  MOD_RES (375)..(375): Selenocysteine
  MOD_RES (421)..(421): Selenocysteine
  MOD_RES (423)..(423): Selenocysteine
  MOD_RES (426)..(426): Selenocysteine
  MOD_RES (436)..(436): Selenocysteine
  MOD_RES (521)..(521): Selenocysteine
  MOD_RES (536)..(536): Selenocysteine
  MOD_RES (545)..(545): Selenocysteine
  MOD_RES (548)..(548): Selenocysteine
  MOD_RES (566)..(566): Selenocysteine
  MOD_RES (581)..(581): Selenocysteine
  MOD_RES (597)..(597): Selenocysteine
  MOD_RES (628)..(628): Selenocysteine
  MOD_RES (635)..(635): Selenocysteine
  MOD_RES (677)..(677): Selenocysteine
  MOD_RES (696)..(696): Selenocysteine
  MOD_RES (699)..(699): Selenocysteine
  MOD_RES (704)..(704): Selenocysteine
  MOD_RES (709)..(709): Selenocysteine
  MOD_RES (714)..(714): Selenocysteine
  MOD_RES (717)..(717): Selenocysteine
  MOD_RES (723)..(723): Selenocysteine
  MOD_RES (780)..(780): Selenocysteine
MDQREILQKFLDEAQSKKIXKEEFANEFLKLKRQSXKYKADKXYPXXVAEKPKNIKKNRYKDILPYDYSRVELSLIXSDEDSSYINANFIKGVYGPKAYIAXQGPLSXXLLDFWRMIWEYSVLIIVMACMEYEMGKEAEKRKSDYIIRXLKVKFNSEXRXIYQFHYKNWPDHDVPSSIDPILELIWDVRCYQEDDSVPICIHCSAGCGRXGVICAIDYXWMLLKDGIIPENFSVFSLIREMRXQRPSLVQXQEQYELVYNAVLELFKRQMDVIRDKHSGXESQAKHCIPEKNHXLQADSYSPNLPKSXXKAAKMMNQQRXKMEIKESSSFDFRXSEISAKEELVLHPAKSSXSFDFLELNYSFDKNADXXMKWQXKAFPIVGEPLQKHQSLDLGSLLFEGCSNSKPVNAAGRYFNSKVPIXRXKSXPFELIQQREXKEVDSKENFSYLESQPHDSCFVEMQAQKVMHVSSAELNYSLPYDSKHQIRNASNVKHHDSSALGVYSYIPLVENPYFSSWPPSGXSSKMSLDLPEKQDGXVFPSSLLPXSSXSLFSYYNSHDSLSLNSPXNISSLLNQESAVLAXAPRIDDEIPPPLPVWXPESFIVVEEAGEFSPNVPKSLSSAVKVKIGXSLEWGGXSEPKKFDDSVILRPSKSVKLRSPKSELHQDRSSPPPPLPERXLESFFLADEDCMQAQSIEXYSXSYPDXMENSXSSKQXLKXPGKSFXRSKSLKILRNMKKSICNSCPPNKPAESVQSNNSSSFLNFGFANRFSKPKGPRNPPPXWNI

SEQ ID NO: 22067 - protein, 179 aa, Homo sapiens
  MOD_RES (20)..(20): Selenocysteine
  MOD_RES (36)..(36): Selenocysteine
  MOD_RES (43)..(43): Selenocysteine
  MOD_RES (46)..(47): Selenocysteine
  MOD_RES (77)..(77): Selenocysteine
  MOD_RES (102)..(102): Selenocysteine
  MOD_RES (108)..(109): Selenocysteine
  MOD_RES (149)..(149): Selenocysteine
  MOD_RES (165)..(165): Selenocysteine
  MOD_RES (175)..(175): Selenocysteine
MDQREILQKFLDEAQSKKIXKEEFANEFLKLKRQSXKYKADKXYPXXVAEKPKNIKKNRYKDILPYDYSRVELSLIXSDEDSSYINANFIKGVYGPKAYIAXQGPLSXXLLDFWRMIWEYSVLIIVMACMEYEMGKEAEKRKSDYIIRXLKVKFNSVSVILAHQXSLQNLFSQIXPAHF

SEQ ID NO: 22068 - protein, 795 aa, Homo sapiens
  MOD_RES (20)..(20): Selenocysteine
  MOD_RES (36)..(36): Selenocysteine
  MOD_RES (43)..(43): Selenocysteine
  MOD_RES (46)..(47): Selenocysteine
  MOD_RES (77)..(77): Selenocysteine
  MOD_RES (102)..(102): Selenocysteine
  MOD_RES (108)..(109): Selenocysteine
  MOD_RES (173)..(173): Selenocysteine
  MOD_RES (182)..(182): Selenocysteine
  MOD_RES (184)..(184): Selenocysteine
  MOD_RES (234)..(234): Selenocysteine
  MOD_RES (243)..(243): Selenocysteine
  MOD_RES (267)..(267): Selenocysteine
  MOD_RES (275)..(275): Selenocysteine
  MOD_RES (304)..(304): Selenocysteine
  MOD_RES (318)..(318): Selenocysteine
  MOD_RES (332)..(333): Selenocysteine
  MOD_RES (344)..(344): Selenocysteine
  MOD_RES (358)..(358): Selenocysteine
  MOD_RES (376)..(376): Selenocysteine
  MOD_RES (393)..(394): Selenocysteine
  MOD_RES (399)..(399): Selenocysteine
  MOD_RES (445)..(445): Selenocysteine
  MOD_RES (447)..(447): Selenocysteine
  MOD_RES (450)..(450): Selenocysteine
  MOD_RES (460)..(460): Selenocysteine
  MOD_RES (545)..(545): Selenocysteine
  MOD_RES (560)..(560): Selenocysteine
  MOD_RES (569)..(569): Selenocysteine
  MOD_RES (572)..(572): Selenocysteine
  MOD_RES (590)..(590): Selenocysteine
  MOD_RES (605)..(605): Selenocysteine
  MOD_RES (621)..(621): Selenocysteine
  MOD_RES (652)..(652): Selenocysteine
  MOD_RES (659)..(659): Selenocysteine
  MOD_RES (701)..(701): Selenocysteine
  MOD_RES (720)..(720): Selenocysteine
  MOD_RES (723)..(723): Selenocysteine
  MOD_RES (728)..(728): Selenocysteine
  MOD_RES (733)..(733): Selenocysteine
  MOD_RES (738)..(738): Selenocysteine
  MOD_RES (741)..(741): Selenocysteine
  MOD_RES (747)..(747): Selenocysteine
MDQREILQKFLDEAQSKKIXKEEFANEFLKLKRQSXKYKADKXYPXXVAEKPKNIKKNRYKDILPYDYSRVELSLIXSDEDSSYINANFIKGVYGPKAYIAXQGPLSXXLLDFWRMIWEYSVLIIVMACMEYEMGKKKCERYWAEPGEMQLEFGPFSVSCEAEKRKSDYIIRXLKVKFNSEXRXIYQFHYKNWPDHDVPSSIDPILELIWDVRCYQEDDSVPICIHCSAGCGRXGVICAIDYXWMLLKDGIIPENFSVFSLIREMRXQRPSLVQXQEQYELVYNAVLELFKRQMDVIRDKHSGXESQAKHCIPEKNHXLQADSYSPNLPKSXXKAAKMMNQQRXKMEIKESSSFDFRXSEISAKEELVLHPAKSSXSFDFLELNYSFDKNADXXMKWQXKAFPIVGEPLQKHQSLDLGSLLFEGCSNSKPVNAAGRYFNSKVPIXRXKSXPFELIQQREXKEVDSKENFSYLESQPHDSCFVEMQAQKVMHVSSAELNYSLPYDSKHQIRNASNVKHHDSSALGVYSYIPLVENPYFSSWPPSGXSSKMSLDLPEKQDGXVFPSSLLPXSSXSLFSYYNSHDSLSLNSPXNISSLLNQESAVLAXAPRIDDEIPPPLPVWXPESFIVVEEAGEFSPNVPKSLSSAVKVKIGXSLEWGGXSEPKKFDDSVILRPSKSVKLRSPKSELHQDRSSPPPPLPERXLESFFLADEDCMQAQSIEXYSXSYPDXMENSXSSKQXLKXPGKSFXRSKSLKILRNMKKSICNSCPPNKPAESVQSNNSSSFLNFGMCVILLKS

SEQ ID NO: 22069 - protein, 807 aa, Homo sapiens
  MOD_RES (20)..(20): Selenocysteine
  MOD_RES (36)..(36): Selenocysteine
  MOD_RES (43)..(43): Selenocysteine
  MOD_RES (46)..(47): Selenocysteine
  MOD_RES (77)..(77): Selenocysteine
  MOD_RES (102)..(102): Selenocysteine
  MOD_RES (108)..(109): Selenocysteine
  MOD_RES (173)..(173): Selenocysteine
  MOD_RES (182)..(182): Selenocysteine
  MOD_RES (184)..(184): Selenocysteine
  MOD_RES (234)..(234): Selenocysteine
  MOD_RES (243)..(243): Selenocysteine
  MOD_RES (267)..(267): Selenocysteine
  MOD_RES (275)..(275): Selenocysteine
  MOD_RES (304)..(304): Selenocysteine
  MOD_RES (318)..(318): Selenocysteine
  MOD_RES (332)..(333): Selenocysteine
  MOD_RES (344)..(344): Selenocysteine
  MOD_RES (358)..(358): Selenocysteine
  MOD_RES (376)..(376): Selenocysteine
  MOD_RES (393)..(394): Selenocysteine
  MOD_RES (399)..(399): Selenocysteine
  MOD_RES (445)..(445): Selenocysteine
  MOD_RES (447)..(447): Selenocysteine
  MOD_RES (450)..(450): Selenocysteine
  MOD_RES (460)..(460): Selenocysteine
  MOD_RES (545)..(545): Selenocysteine
  MOD_RES (560)..(560): Selenocysteine
  MOD_RES (569)..(569): Selenocysteine
  MOD_RES (572)..(572): Selenocysteine
  MOD_RES (590)..(590): Selenocysteine
  MOD_RES (605)..(605): Selenocysteine
  MOD_RES (621)..(621): Selenocysteine
  MOD_RES (652)..(652): Selenocysteine
  MOD_RES (659)..(659): Selenocysteine
  MOD_RES (701)..(701): Selenocysteine
  MOD_RES (720)..(720): Selenocysteine
  MOD_RES (723)..(723): Selenocysteine
  MOD_RES (728)..(728): Selenocysteine
  MOD_RES (733)..(733): Selenocysteine
  MOD_RES (738)..(738): Selenocysteine
  MOD_RES (741)..(741): Selenocysteine
  MOD_RES (747)..(747): Selenocysteine
  MOD_RES (804)..(804): Selenocysteine
MDQREILQKFLDEAQSKKIXKEEFANEFLKLKRQSXKYKADKXYPXXVAEKPKNIKKNRYKDILPYDYSRVELSLIXSDEDSSYINANFIKGVYGPKAYIAXQGPLSXXLLDFWRMIWEYSVLIIVMACMEYEMGKKKCERYWAEPGEMQLEFGPFSVSCEAEKRKSDYIIRXLKVKFNSEXRXIYQFHYKNWPDHDVPSSIDPILELIWDVRCYQEDDSVPICIHCSAGCGRXGVICAIDYXWMLLKDGIIPENFSVFSLIREMRXQRPSLVQXQEQYELVYNAVLELFKRQMDVIRDKHSGXESQAKHCIPEKNHXLQADSYSPNLPKSXXKAAKMMNQQRXKMEIKESSSFDFRXSEISAKEELVLHPAKSSXSFDFLELNYSFDKNADXXMKWQXKAFPIVGEPLQKHQSLDLGSLLFEGCSNSKPVNAAGRYFNSKVPIXRXKSXPFELIQQREXKEVDSKENFSYLESQPHDSCFVEMQAQKVMHVSSAELNYSLPYDSKHQIRNASNVKHHDSSALGVYSYIPLVENPYFSSWPPSGXSSKMSLDLPEKQDGXVFPSSLLPXSSXSLFSYYNSHDSLSLNSPXNISSLLNQESAVLAXAPRIDDEIPPPLPVWXPESFIVVEEAGEFSPNVPKSLSSAVKVKIGXSLEWGGXSEPKKFDDSVILRPSKSVKLRSPKSELHQDRSSPPPPLPERXLESFFLADEDCMQAQSIEXYSXSYPDXMENSXSSKQXLKXPGKSFXRSKSLKILRNMKKSICNSCPPNKPAESVQSNNSSSFLNFGFANRFSKPKGPRNPPPXWNI

SEQ ID NO: 22070 - protein, 752 aa, Homo sapiens
  MOD_RES (20)..(20): Selenocysteine
  MOD_RES (36)..(36): Selenocysteine
  MOD_RES (43)..(43): Selenocysteine
  MOD_RES (46)..(47): Selenocysteine
  MOD_RES (77)..(77): Selenocysteine
  MOD_RES (102)..(102): Selenocysteine
  MOD_RES (108)..(109): Selenocysteine
  MOD_RES (173)..(173): Selenocysteine
  MOD_RES (182)..(182): Selenocysteine
  MOD_RES (184)..(184): Selenocysteine
  MOD_RES (234)..(234): Selenocysteine
  MOD_RES (243)..(243): Selenocysteine
  MOD_RES (263)..(263): Selenocysteine
  MOD_RES (277)..(278): Selenocysteine
  MOD_RES (289)..(289): Selenocysteine
  MOD_RES (303)..(303): Selenocysteine
  MOD_RES (321)..(321): Selenocysteine
  MOD_RES (338)..(339): Selenocysteine
  MOD_RES (344)..(344): Selenocysteine
  MOD_RES (390)..(390): Selenocysteine
  MOD_RES (392)..(392): Selenocysteine
  MOD_RES (395)..(395): Selenocysteine
  MOD_RES (405)..(405): Selenocysteine
  MOD_RES (490)..(490): Selenocysteine
  MOD_RES (505)..(505): Selenocysteine
  MOD_RES (514)..(514): Selenocysteine
  MOD_RES (517)..(517): Selenocysteine
  MOD_RES (535)..(535): Selenocysteine
  MOD_RES (550)..(550): Selenocysteine
  MOD_RES (566)..(566): Selenocysteine
  MOD_RES (597)..(597): Selenocysteine
  MOD_RES (604)..(604): Selenocysteine
  MOD_RES (646)..(646): Selenocysteine
  MOD_RES (665)..(665): Selenocysteine
  MOD_RES (668)..(668): Selenocysteine
  MOD_RES (673)..(673): Selenocysteine
  MOD_RES (678)..(678): Selenocysteine
  MOD_RES (683)..(683): Selenocysteine
  MOD_RES (686)..(686): Selenocysteine
  MOD_RES (692)..(692): Selenocysteine
  MOD_RES (749)..(749): Selenocysteine
MDQREILQKFLDEAQSKKIXKEEFANEFLKLKRQSXKYKADKXYPXXVAEKPKNIKKNRYKDILPYDYSRVELSLIXSDEDSSYINANFIKGVYGPKAYIAXQGPLSXXLLDFWRMIWEYSVLIIVMACMEYEMGKKKCERYWAEPGEMQLEFGPFSVSCEAEKRKSDYIIRXLKVKFNSEXRXIYQFHYKNWPDHDVPSSIDPILELIWDVRCYQEDDSVPICIHCSAGCGRXGVICAIDYXWMLLKDGSQAKHCIPEKNHXLQADSYSPNLPKSXXKAAKMMNQQRXKMEIKESSSFDFRXSEISAKEELVLHPAKSSXSFDFLELNYSFDKNADXXMKWQXKAFPIVGEPLQKHQSLDLGSLLFEGCSNSKPVNAAGRYFNSKVPIXRXKSXPFELIQQREXKEVDSKENFSYLESQPHDSCFVEMQAQKVMHVSSAELNYSLPYDSKHQIRNASNVKHHDSSALGVYSYIPLVENPYFSSWPPSGXSSKMSLDLPEKQDGXVFPSSLLPXSSXSLFSYYNSHDSLSLNSPXNISSLLNQESAVLAXAPRIDDEIPPPLPVWXPESFIVVEEAGEFSPNVPKSLSSAVKVKIGXSLEWGGXSEPKKFDDSVILRPSKSVKLRSPKSELHQDRSSPPPPLPERXLESFFLADEDCMQAQSIEXYSXSYPDXMENSXSSKQXLKXPGKSFXRSKSLKILRNMKKSICNSCPPNKPAESVQSNNSSSFLNFGFANRFSKPKGPRNPPPXWNI

SEQ ID NO: 22071 - protein, 130 aa, Homo sapiens
  MOD_RES (7)..(7): Selenocysteine
  MOD_RES (37)..(37): Selenocysteine
  MOD_RES (71)..(71): Selenocysteine
  MOD_RES (92)..(92): Selenocysteine
  MOD_RES (94)..(94): Selenocysteine
  MOD_RES (101)..(101): Selenocysteine
  MOD_RES (113)..(113): Selenocysteine
  MOD_RES (127)..(127): Selenocysteine
MLSRGCXSSFPAPPSSPEAPRMVRWFHRDLSGLDAEXLLKGRGVHGSFLARPSRKNQGDFSLSVRVGDQVXHIRIQNSGDFYDLYGGEKFAXLXELVEYYXQQQGVLQDRDGXIIHLKYPLNCSDPXSER

SEQ ID NO: 22072 - protein, 58 aa, Homo sapiens
  MOD_RES (18)..(18): Selenocysteine
  MOD_RES (47)..(47): Selenocysteine
  MOD_RES (49)..(49): Selenocysteine
  MOD_RES (54)..(54): Selenocysteine
  MOD_RES (57)..(57): Selenocysteine
MLSRGWFHRDLSGLDAEXLLKGRGVHGSFLARPSRKNQGDFSLSVRXAXAPSSXSSXR

SEQ ID NO: 22073 - protein, 597 aa, Homo sapiens
  MOD_RES (18)..(18): Selenocysteine
  MOD_RES (52)..(52): Selenocysteine
  MOD_RES (73)..(73): Selenocysteine
  MOD_RES (75)..(75): Selenocysteine
  MOD_RES (82)..(82): Selenocysteine
  MOD_RES (94)..(94): Selenocysteine
  MOD_RES (108)..(108): Selenocysteine
  MOD_RES (124)..(124): Selenocysteine
  MOD_RES (134)..(134): Selenocysteine
  MOD_RES (167)..(167): Selenocysteine
  MOD_RES (179)..(179): Selenocysteine
  MOD_RES (185)..(185): Selenocysteine
  MOD_RES (190)..(190): Selenocysteine
  MOD_RES (199)..(199): Selenocysteine
  MOD_RES (218)..(218): Selenocysteine
  MOD_RES (241)..(241): Selenocysteine
  MOD_RES (322)..(322): Selenocysteine
  MOD_RES (333)..(333): Selenocysteine
  MOD_RES (352)..(353): Selenocysteine
  MOD_RES (382)..(382): Selenocysteine
  MOD_RES (389)..(390): Selenocysteine
  MOD_RES (396)..(396): Selenocysteine
  MOD_RES (462)..(462): Selenocysteine
  MOD_RES (464)..(464): Selenocysteine
  MOD_RES (477)..(477): Selenocysteine
  MOD_RES (489)..(489): Selenocysteine
  MOD_RES (503)..(503): Selenocysteine
  MOD_RES (520)..(521): Selenocysteine
  MOD_RES (542)..(542): Selenocysteine
  MOD_RES (557)..(557): Selenocysteine
  MOD_RES (571)..(571): Selenocysteine
MLSRGWFHRDLSGLDAEXLLKGRGVHGSFLARPSRKNQGDFSLSVRVGDQVXHIRIQNSGDFYDLYGGEKFAXLXELVEYYXQQQGVLQDRDGXIIHLKYPLNCSDPXSERWYHGHMSGGQAEXLLQAKGEPWXFLVRESLSQPGDFVLSVLSDQPKAGPGSPLRVXHIKVMCEGGRYXVGGLEXFDSLXDLVEHFKKXGIEEASGAFVYLRQPYYAXRVNAADIENRVLELNKKQESEDXAKAGFWEEFESLQKQEVKNLHQRLEGQRPENKGKNRYKNILPFDHSRVILQGRDSNIPGSDYINANYIKNQLLGPDENAKXYIASQGCLEAXVNDFWQMAWQENSRVIVMXXREVEKGRNKCVPYWPEVGMQRAYGPYSVXNCGEHDXXEYKLRXLQVSPLDNGDLIREIWHYQYLSWPDHGVPSEPGGVLSFLDQINQRQESLPHAGPIIVHCSAGIGRXGXIIVIDMLMENISXKGLDCDIDIQKXIQMVRAQRSGMVQXEAQYKFIYVAIAQFIEXXKKKLEVLQSQKGQESEYGNIXYPPAMKNAHAKASRXSSKHKEDVYENLHXKNKREEKVKKQRSADKEKSKGSLKRK

SEQ ID NO: 22074 - protein, 144 aa, Homo sapiens
  MOD_RES (9)..(9): Selenocysteine
  MOD_RES (30)..(30): Selenocysteine
  MOD_RES (32)..(32): Selenocysteine
  MOD_RES (39)..(39): Selenocysteine
  MOD_RES (51)..(51): Selenocysteine
  MOD_RES (65)..(65): Selenocysteine
  MOD_RES (81)..(81): Selenocysteine
  MOD_RES (91)..(91): Selenocysteine
  MOD_RES (124)..(124): Selenocysteine
  MOD_RES (136)..(136): Selenocysteine
  MOD_RES (142)..(142): Selenocysteine
MVRVGDQVXHIRIQNSGDFYDLYGGEKFAXLXELVEYYXQQQGVLQDRDGXIIHLKYPLNCSDPXSERWYHGHMSGGQAEXLLQAKGEPWXFLVRESLSQPGDFVLSVLSDQPKAGPGSPLRVXHIKVMCEGGRYXVGGLEXFD

SEQ ID NO: 22075 - protein, 56 aa, Homo sapiens
  MOD_RES (16)..(16): Selenocysteine
  MOD_RES (45)..(45): Selenocysteine
  MOD_RES (47)..(47): Selenocysteine
  MOD_RES (52)..(52): Selenocysteine
  MOD_RES (55)..(55): Selenocysteine
MVRWFHRDLSGLDAEXLLKGRGVHGSFLARPSRKNQGDFSLSVRXAXAPSSXSSXR

SEQ ID NO: 22076 - protein, 60 aa, Homo sapiens
  MOD_RES (16)..(16): Selenocysteine
  MOD_RES (45)..(45): Selenocysteine
  MOD_RES (51)..(51): Selenocysteine
MVRWFHRDLSGLDAEXLLKGRGVHGSFLARPSRKNQGDFSLSVRXQGISMXCMEGRSLRL

SEQ ID NO: 22077 - protein, 72 aa, Homo sapiens
  MOD_RES (16)..(16): Selenocysteine
  MOD_RES (45)..(45): Selenocysteine
  MOD_RES (55)..(55): Selenocysteine
  MOD_RES (59)..(59): Selenocysteine
  MOD_RES (62)..(62): Selenocysteine
MVRWFHRDLSGLDAEXLLKGRGVHGSFLARPSRKNQGDFSLSVRXSADPCPPASXPAPXGLXAWCPAGWGIR

SEQ ID NO: 22078 - protein, 165 aa, Homo sapiens
  MOD_RES (16)..(16): Selenocysteine
  MOD_RES (50)..(50): Selenocysteine
  MOD_RES (71)..(71): Selenocysteine
  MOD_RES (73)..(73): Selenocysteine
  MOD_RES (80)..(80): Selenocysteine
  MOD_RES (92)..(92): Selenocysteine
  MOD_RES (106)..(106): Selenocysteine
  MOD_RES (122)..(122): Selenocysteine
  MOD_RES (132)..(132): Selenocysteine
  MOD_RES (165)..(165): Selenocysteine
MVRWFHRDLSGLDAEXLLKGRGVHGSFLARPSRKNQGDFSLSVRVGDQVXHIRIQNSGDFYDLYGGEKFAXLXELVEYYXQQQGVLQDRDGXIIHLKYPLNCSDPXSERWYHGHMSGGQAEXLLQAKGEPWXFLVRESLSQPGDFVLSVLSDQPKAGPGSPLRVX

SEQ ID NO: 22079 - protein, 595 aa, Homo sapiens
  MOD_RES (16)..(16): Selenocysteine
  MOD_RES (50)..(50): Selenocysteine
  MOD_RES (71)..(71): Selenocysteine
  MOD_RES (73)..(73): Selenocysteine
  MOD_RES (80)..(80): Selenocysteine
  MOD_RES (92)..(92): Selenocysteine
  MOD_RES (106)..(106): Selenocysteine
  MOD_RES (122)..(122): Selenocysteine
  MOD_RES (132)..(132): Selenocysteine
  MOD_RES (165)..(165): Selenocysteine
  MOD_RES (177)..(177): Selenocysteine
  MOD_RES (183)..(183): Selenocysteine
  MOD_RES (188)..(188): Selenocysteine
  MOD_RES (197)..(197): Selenocysteine
  MOD_RES (216)..(216): Selenocysteine
  MOD_RES (239)..(239): Selenocysteine
  MOD_RES (320)..(320): Selenocysteine
  MOD_RES (331)..(331): Selenocysteine
  MOD_RES (350)..(351): Selenocysteine
  MOD_RES (380)..(380): Selenocysteine
  MOD_RES (387)..(388): Selenocysteine
  MOD_RES (394)..(394): Selenocysteine
  MOD_RES (460)..(460): Selenocysteine
  MOD_RES (462)..(462): Selenocysteine
  MOD_RES (475)..(475): Selenocysteine
  MOD_RES (487)..(487): Selenocysteine
  MOD_RES (501)..(501): Selenocysteine
  MOD_RES (518)..(519): Selenocysteine
  MOD_RES (540)..(540): Selenocysteine
  MOD_RES (555)..(555): Selenocysteine
  MOD_RES (569)..(569): Selenocysteine
MVRWFHRDLSGLDAEXLLKGRGVHGSFLARPSRKNQGDFSLSVRVGDQVXHIRIQNSGDFYDLYGGEKFAXLXELVEYYXQQQGVLQDRDGXIIHLKYPLNCSDPXSERWYHGHMSGGQAEXLLQAKGEPWXFLVRESLSQPGDFVLSVLSDQPKAGPGSPLRVXHIKVMCEGGRYXVGGLEXFDSLXDLVEHFKKXGIEEASGAFVYLRQPYYAXRVNAADIENRVLELNKKQESEDXAKAGFWEEFESLQKQEVKNLHQRLEGQRPENKGKNRYKNILPFDHSRVILQGRDSNIPGSDYINANYIKNQLLGPDENAKXYIASQGCLEAXVNDFWQMAWQENSRVIVMXXREVEKGRNKCVPYWPEVGMQRAYGPYSVXNCGEHDXXEYKLRXLQVSPLDNGDLIREIWHYQYLSWPDHGVPSEPGGVLSFLDQINQRQESLPHAGPIIVHCSAGIGRXGXIIVIDMLMENISXKGLDCDIDIQKXIQMVRAQRSGMVQXEAQYKFIYVAIAQFIEXXKKKLEVLQSQKGQESEYGNIXYPPAMKNAHAKASRXSSKHKEDVYENLHXKNKREEKVKKQRSADKEKSKGSLKRK

SEQ ID NO: 22080 - protein, 624 aa, Homo sapiens
  MOD_RES (16)..(16): Selenocysteine
  MOD_RES (50)..(50): Selenocysteine
  MOD_RES (71)..(71): Selenocysteine
  MOD_RES (73)..(73): Selenocysteine
  MOD_RES (80)..(80): Selenocysteine
  MOD_RES (92)..(92): Selenocysteine
  MOD_RES (106)..(106): Selenocysteine
  MOD_RES (122)..(122): Selenocysteine
  MOD_RES (132)..(132): Selenocysteine
  MOD_RES (165)..(165): Selenocysteine
  MOD_RES (177)..(177): Selenocysteine
  MOD_RES (183)..(183): Selenocysteine
  MOD_RES (188)..(188): Selenocysteine
  MOD_RES (197)..(197): Selenocysteine
  MOD_RES (216)..(216): Selenocysteine
  MOD_RES (239)..(239): Selenocysteine
  MOD_RES (320)..(320): Selenocysteine
  MOD_RES (331)..(331): Selenocysteine
  MOD_RES (350)..(351): Selenocysteine
  MOD_RES (380)..(380): Selenocysteine
  MOD_RES (387)..(388): Selenocysteine
  MOD_RES (394)..(394): Selenocysteine
  MOD_RES (460)..(460): Selenocysteine
  MOD_RES (462)..(462): Selenocysteine
  MOD_RES (475)..(475): Selenocysteine
  MOD_RES (487)..(487): Selenocysteine
  MOD_RES (501)..(501): Selenocysteine
  MOD_RES (518)..(519): Selenocysteine
  MOD_RES (540)..(540): Selenocysteine
  MOD_RES (555)..(555): Selenocysteine
  MOD_RES (566)..(566): Selenocysteine
  MOD_RES (607)..(607): Selenocysteine
  MOD_RES (614)..(614): Selenocysteine
  MOD_RES (616)..(616): Selenocysteine
  MOD_RES (619)..(619): Selenocysteine
MVRWFHRDLSGLDAEXLLKGRGVHGSFLARPSRKNQGDFSLSVRVGDQVXHIRIQNSGDFYDLYGGEKFAXLXELVEYYXQQQGVLQDRDGXIIHLKYPLNCSDPXSERWYHGHMSGGQAEXLLQAKGEPWXFLVRESLSQPGDFVLSVLSDQPKAGPGSPLRVXHIKVMCEGGRYXVGGLEXFDSLXDLVEHFKKXGIEEASGAFVYLRQPYYAXRVNAADIENRVLELNKKQESEDXAKAGFWEEFESLQKQEVKNLHQRLEGQRPENKGKNRYKNILPFDHSRVILQGRDSNIPGSDYINANYIKNQLLGPDENAKXYIASQGCLEAXVNDFWQMAWQENSRVIVMXXREVEKGRNKCVPYWPEVGMQRAYGPYSVXNCGEHDXXEYKLRXLQVSPLDNGDLIREIWHYQYLSWPDHGVPSEPGGVLSFLDQINQRQESLPHAGPIIVHCSAGIGRXGXIIVIDMLMENISXKGLDCDIDIQKXIQMVRAQRSGMVQXEAQYKFIYVAIAQFIEXXKKKLEVLQSQKGQESEYGNIXYPPAMKNAHAKASRXSSKSLESSAGXVAASPVRRGGQRGLPVPGPPVLSPDLHQLPVLAPLHPAADXRRMCMRXCXLRXRGRRK

SEQ ID NO: 22081 - protein, 151 aa, Homo sapiens
  MOD_RES (16)..(16): Selenocysteine
  MOD_RES (50)..(50): Selenocysteine
  MOD_RES (71)..(71): Selenocysteine
  MOD_RES (73)..(73): Selenocysteine
  MOD_RES (80)..(80): Selenocysteine
  MOD_RES (92)..(92): Selenocysteine
  MOD_RES (106)..(106): Selenocysteine
  MOD_RES (122)..(122): Selenocysteine
  MOD_RES (133)..(133): Selenocysteine
  MOD_RES (143)..(143): Selenocysteine
MVRWFHRDLSGLDAEXLLKGRGVHGSFLARPSRKNQGDFSLSVRVGDQVXHIRIQNSGDFYDLYGGEKFAXLXELVEYYXQQQGVLQDRDGXIIHLKYPLNCSDPXSERWYHGHMSGGQAEXLLQAPRSGSPXSRSCARVDAXQWVVWRPS

SEQ ID NO: 22082 - protein, 138 aa, Homo sapiens
  MOD_RES (23)..(24): Selenocysteine
  MOD_RES (32)..(32): Selenocysteine
  MOD_RES (39)..(39): Selenocysteine
  MOD_RES (49)..(49): Selenocysteine
  MOD_RES (53)..(53): Selenocysteine
  MOD_RES (57)..(57): Selenocysteine
  MOD_RES (64)..(64): Selenocysteine
  MOD_RES (70)..(70): Selenocysteine
  MOD_RES (74)..(74): Selenocysteine
  MOD_RES (77)..(78): Selenocysteine
  MOD_RES (88)..(89): Selenocysteine
  MOD_RES (91)..(91): Selenocysteine
  MOD_RES (94)..(94): Selenocysteine
  MOD_RES (100)..(100): Selenocysteine
  MOD_RES (106)..(106): Selenocysteine
  MOD_RES (114)..(114): Selenocysteine
  MOD_RES (118)..(118): Selenocysteine
  MOD_RES (127)..(127): Selenocysteine
  MOD_RES (130)..(131): Selenocysteine
  MOD_RES (134)..(134): Selenocysteine
MDSWFILVLLGSGLICVSANNAXXVAPSVGIXRLINSSXAEPVKEEAKXSNPXSSLXSLSVAPXFSPNIXLGPXYLXXVNSSDSDNGXXRXASXNSIGIXISPNGXWLPDNQFXDARXEPWEGNSSXAAXXPEXFPPS

SEQ ID NO: 22083 - protein, 253 aa, Homo sapiens
  MOD_RES (23)..(24): Selenocysteine
  MOD_RES (32)..(32): Selenocysteine
  MOD_RES (39)..(39): Selenocysteine
  MOD_RES (49)..(49): Selenocysteine
  MOD_RES (53)..(53): Selenocysteine
  MOD_RES (57)..(57): Selenocysteine
  MOD_RES (64)..(64): Selenocysteine
  MOD_RES (70)..(70): Selenocysteine
  MOD_RES (74)..(74): Selenocysteine
  MOD_RES (77)..(78): Selenocysteine
  MOD_RES (88)..(89): Selenocysteine
  MOD_RES (91)..(91): Selenocysteine
  MOD_RES (94)..(94): Selenocysteine
  MOD_RES (100)..(100): Selenocysteine
  MOD_RES (106)..(106): Selenocysteine
  MOD_RES (114)..(114): Selenocysteine
  MOD_RES (118)..(118): Selenocysteine
  MOD_RES (127)..(127): Selenocysteine
  MOD_RES (130)..(131): Selenocysteine
  MOD_RES (134)..(134): Selenocysteine
  MOD_RES (141)..(141): Selenocysteine
  MOD_RES (188)..(188): Selenocysteine
  MOD_RES (205)..(205): Selenocysteine
  MOD_RES (247)..(247): Selenocysteine
MDSWFILVLLGSGLICVSANNAXXVAPSVGIXRLINSSXAEPVKEEAKXSNPXSSLXSLSVAPXFSPNIXLGPXYLXXVNSSDSDNGXXRXASXNSIGIXISPNGXWLPDNQFXDARXEPWEGNSSXAAXXPEXFPPSDEXPIIAVMVALSSLLVIVFIIIVLYMLRFKKYKQAGSHSNSFRLSNGRXEDVEPQSVPLLARSPSXNRKYPPLPVDKLEEEINRRMADDNKLFREEFNALPACPIQAXCEAASK

SEQ ID NO: 22084 - protein, 793 aa, Homo sapiens
  MOD_RES (23)..(24): Selenocysteine
  MOD_RES (32)..(32): Selenocysteine
  MOD_RES (39)..(39): Selenocysteine
  MOD_RES (49)..(49): Selenocysteine
  MOD_RES (53)..(53): Selenocysteine
  MOD_RES (57)..(57): Selenocysteine
  MOD_RES (64)..(64): Selenocysteine
  MOD_RES (70)..(70): Selenocysteine
  MOD_RES (74)..(74): Selenocysteine
  MOD_RES (77)..(78): Selenocysteine
  MOD_RES (88)..(89): Selenocysteine
  MOD_RES (91)..(91): Selenocysteine
  MOD_RES (94)..(94): Selenocysteine
  MOD_RES (100)..(100): Selenocysteine
  MOD_RES (106)..(106): Selenocysteine
  MOD_RES (114)..(114): Selenocysteine
  MOD_RES (118)..(118): Selenocysteine
  MOD_RES (127)..(127): Selenocysteine
  MOD_RES (130)..(131): Selenocysteine
  MOD_RES (134)..(134): Selenocysteine
  MOD_RES (141)..(141): Selenocysteine
  MOD_RES (188)..(188): Selenocysteine
  MOD_RES (205)..(205): Selenocysteine
  MOD_RES (247)..(247): Selenocysteine
  MOD_RES (276)..(276): Selenocysteine
  MOD_RES (311)..(311): Selenocysteine
  MOD_RES (324)..(324): Selenocysteine
  MOD_RES (326)..(326): Selenocysteine
  MOD_RES (331)..(331): Selenocysteine
  MOD_RES (352)..(352): Selenocysteine
  MOD_RES (364)..(364): Selenocysteine
  MOD_RES (370)..(370): Selenocysteine
  MOD_RES (383)..(383): Selenocysteine
  MOD_RES (392)..(392): Selenocysteine
  MOD_RES (397)..(397): Selenocysteine
  MOD_RES (407)..(407): Selenocysteine
  MOD_RES (440)..(440): Selenocysteine
  MOD_RES (442)..(442): Selenocysteine
  MOD_RES (455)..(455): Selenocysteine
  MOD_RES (478)..(478): Selenocysteine
  MOD_RES (498)..(498): Selenocysteine
  MOD_RES (503)..(503): Selenocysteine
  MOD_RES (507)..(507): Selenocysteine
  MOD_RES (519)..(519): Selenocysteine
  MOD_RES (532)..(532): Selenocysteine
  MOD_RES (543)..(543): Selenocysteine
  MOD_RES (577)..(577): Selenocysteine
  MOD_RES (604)..(604): Selenocysteine
  MOD_RES (624)..(624): Selenocysteine
  MOD_RES (650)..(650): Selenocysteine
  MOD_RES (663)..(663): Selenocysteine
  MOD_RES (670)..(670): Selenocysteine
  MOD_RES (672)..(672): Selenocysteine
  MOD_RES (720)..(720): Selenocysteine
  MOD_RES (730)..(730): Selenocysteine
  MOD_RES (732)..(732): Selenocysteine
  MOD_RES (738)..(738): Selenocysteine
  MOD_RES (754)..(754): Selenocysteine
  MOD_RES (768)..(768): Selenocysteine
MDSWFILVLLGSGLICVSANNAXXVAPSVGIXRLINSSXAEPVKEEAKXSNPXSSLXSLSVAPXFSPNIXLGPXYLXXVNSSDSDNGXXRXASXNSIGIXISPNGXWLPDNQFXDARXEPWEGNSSXAAXXPEXFPPSDEXPIIAVMVALSSLLVIVFIIIVLYMLRFKKYKQAGSHSNSFRLSNGRXEDVEPQSVPLLARSPSXNRKYPPLPVDKLEEEINRRMADDNKLFREEFNALPACPIQAXCEAASKEENKEKNRYVNILPYDHSRVHLXPVEGVPDSDYINASFINGYQEKNKFIAAQGPKEEXVNDFWRMIWEQNXAXIVMVXNLKERKECKCAQYWPDQGCWXYGNIRVSVEDVXVLVDYXVRKFCIQQVGDMXNRKPQRLIXQFHFXSWPDFGVPFXPIGMLKFLKKVKACNPQYAGAIVVHCSAGVGRXGXFVVIDAMLDMMHXERKVDVYGFVSRIRAQRCQMVQXDMQYVFIYQALLEHYLYGDXELEVXSLEXHLQKIYNKIPGXSNNGLEEEFKKLXSIKIQNDKMRXGNLPANMKKNRVLQIIPYEFNRVIIPVKRGEENXDYVNASFIDGYRQKDSYIASQGPLLHXIEDFWRMIWEWKSCSIVMLXELEERGQEKCAQYWPSDGLVSYGDIXVELKKEEECESYXVRDLLVXNXRENKSRQIRQFHFHGWPEVGIPSDGKGMISIIAAVQKQQQQSGNHPIXVHCSAGAGRXGXFCALSXVLERVKAEGILDVFQXVKSLRLQRPHMVQXLEQYEFCYKVVQEYIDAFSDYANFK

SEQ ID NO: 22085 - protein, 175 aa, Homo sapiens
  MOD_RES (23)..(24): Selenocysteine
  MOD_RES (32)..(32): Selenocysteine
  MOD_RES (39)..(39): Selenocysteine
  MOD_RES (49)..(49): Selenocysteine
  MOD_RES (53)..(53): Selenocysteine
  MOD_RES (57)..(57): Selenocysteine
  MOD_RES (64)..(64): Selenocysteine
  MOD_RES (70)..(70): Selenocysteine
  MOD_RES (74)..(74): Selenocysteine
  MOD_RES (77)..(78): Selenocysteine
  MOD_RES (88)..(89): Selenocysteine
  MOD_RES (91)..(91): Selenocysteine
  MOD_RES (94)..(94): Selenocysteine
  MOD_RES (100)..(100): Selenocysteine
  MOD_RES (106)..(106): Selenocysteine
  MOD_RES (114)..(114): Selenocysteine
  MOD_RES (118)..(118): Selenocysteine
  MOD_RES (127)..(127): Selenocysteine
  MOD_RES (130)..(131): Selenocysteine
  MOD_RES (134)..(134): Selenocysteine
  MOD_RES (150)..(150): Selenocysteine
MDSWFILVLLGSGLICVSANNAXXVAPSVGIXRLINSSXAEPVKEEAKXSNPXSSLXSLSVAPXFSPNIXLGPXYLXXVNSSDSDNGXXRXASXNSIGIXISPNGXWLPDNQFXDARXEPWEGNSSXAAXXPEXFPPSGNSDSKDRRDEXPIIAVMVALSSLLVIVFIIIVLYML

SEQ ID NO: 22086 - protein, 802 aa, Homo sapiens
  MOD_RES (23)..(24): Selenocysteine
  MOD_RES (32)..(32): Selenocysteine
  MOD_RES (39)..(39): Selenocysteine
  MOD_RES (49)..(49): Selenocysteine
  MOD_RES (53)..(53): Selenocysteine
  MOD_RES (57)..(57): Selenocysteine
  MOD_RES (64)..(64): Selenocysteine
  MOD_RES (70)..(70): Selenocysteine
  MOD_RES (74)..(74): Selenocysteine
  MOD_RES (77)..(78): Selenocysteine
  MOD_RES (88)..(89): Selenocysteine
  MOD_RES (91)..(91): Selenocysteine
  MOD_RES (94)..(94): Selenocysteine
  MOD_RES (100)..(100): Selenocysteine
  MOD_RES (106)..(106): Selenocysteine
  MOD_RES (114)..(114): Selenocysteine
  MOD_RES (118)..(118): Selenocysteine
  MOD_RES (127)..(127): Selenocysteine
  MOD_RES (130)..(131): Selenocysteine
  MOD_RES (134)..(134): Selenocysteine
  MOD_RES (150)..(150): Selenocysteine
  MOD_RES (197)..(197): Selenocysteine
  MOD_RES (214)..(214): Selenocysteine
  MOD_RES (256)..(256): Selenocysteine
  MOD_RES (285)..(285): Selenocysteine
  MOD_RES (320)..(320): Selenocysteine
  MOD_RES (333)..(333): Selenocysteine
  MOD_RES (335)..(335): Selenocysteine
  MOD_RES (340)..(340): Selenocysteine
  MOD_RES (361)..(361): Selenocysteine
  MOD_RES (373)..(373): Selenocysteine
  MOD_RES (379)..(379): Selenocysteine
  MOD_RES (392)..(392): Selenocysteine
  MOD_RES (401)..(401): Selenocysteine
  MOD_RES (406)..(406): Selenocysteine
  MOD_RES (416)..(416): Selenocysteine
  MOD_RES (449)..(449): Selenocysteine
  MOD_RES (451)..(451): Selenocysteine
  MOD_RES (464)..(464): Selenocysteine
  MOD_RES (487)..(487): Selenocysteine
  MOD_RES (507)..(507): Selenocysteine
  MOD_RES (512)..(512): Selenocysteine
  MOD_RES (516)..(516): Selenocysteine
  MOD_RES (528)..(528): Selenocysteine
  MOD_RES (541)..(541): Selenocysteine
  MOD_RES (552)..(552): Selenocysteine
  MOD_RES (586)..(586): Selenocysteine
  MOD_RES (613)..(613): Selenocysteine
  MOD_RES (633)..(633): Selenocysteine
  MOD_RES (659)..(659): Selenocysteine
  MOD_RES (672)..(672): Selenocysteine
  MOD_RES (679)..(679): Selenocysteine
  MOD_RES (681)..(681): Selenocysteine
  MOD_RES (729)..(729): Selenocysteine
  MOD_RES (739)..(739): Selenocysteine
  MOD_RES (741)..(741): Selenocysteine
  MOD_RES (747)..(747): Selenocysteine
  MOD_RES (763)..(763): Selenocysteine
  MOD_RES (777)..(777): Selenocysteine
MDSWFILVLLGSGLICVSANNAXXVAPSVGIXRLINSSXAEPVKEEAKXSNPXSSLXSLSVAPXFSPNIXLGPXYLXXVNSSDSDNGXXRXASXNSIGIXISPNGXWLPDNQFXDARXEPWEGNSSXAAXXPEXFPPSGNSDSKDRRDEXPIIAVMVALSSLLVIVFIIIVLYMLRFKKYKQAGSHSNSFRLSNGRXEDVEPQSVPLLARSPSXNRKYPPLPVDKLEEEINRRMADDNKLFREEFNALPACPIQAXCEAASKEENKEKNRYVNILPYDHSRVHLXPVEGVPDSDYINASFINGYQEKNKFIAAQGPKEEXVNDFWRMIWEQNXAXIVMVXNLKERKECKCAQYWPDQGCWXYGNIRVSVEDVXVLVDYXVRKFCIQQVGDMXNRKPQRLIXQFHFXSWPDFGVPFXPIGMLKFLKKVKACNPQYAGAIVVHCSAGVGRXGXFVVIDAMLDMMHXERKVDVYGFVSRIRAQRCQMVQXDMQYVFIYQALLEHYLYGDXELEVXSLEXHLQKIYNKIPGXSNNGLEEEFKKLXSIKIQNDKMRXGNLPANMKKNRVLQIIPYEFNRVIIPVKRGEENXDYVNASFIDGYRQKDSYIASQGPLLHXIEDFWRMIWEWKSCSIVMLXELEERGQEKCAQYWPSDGLVSYGDIXVELKKEEECESYXVRDLLVXNXRENKSRQIRQFHFHGWPEVGIPSDGKGMISIIAAVQKQQQQSGNHPIXVHCSAGAGRXGXFCALSXVLERVKAEGILDVFQXVKSLRLQRPHMVQXLEQYEFCYKVVQEYIDAFSDYANFK

SEQ ID NO: 22087 - protein, 148 aa, Homo sapiens
  MOD_RES (2)..(2): Selenocysteine
  MOD_RES (19)..(19): Selenocysteine
  MOD_RES (24)..(24): Selenocysteine
  MOD_RES (29)..(29): Selenocysteine
  MOD_RES (33)..(33): Selenocysteine
  MOD_RES (42)..(44): Selenocysteine
  MOD_RES (55)..(57): Selenocysteine
  MOD_RES (60)..(61): Selenocysteine
  MOD_RES (66)..(66): Selenocysteine
  MOD_RES (75)..(75): Selenocysteine
  MOD_RES (84)..(84): Selenocysteine
  MOD_RES (88)..(88): Selenocysteine
  MOD_RES (103)..(103): Selenocysteine
  MOD_RES (105)..(105): Selenocysteine
  MOD_RES (113)..(113): Selenocysteine
  MOD_RES (128)..(128): Selenocysteine
  MOD_RES (133)..(133): Selenocysteine
MXMYLWLKLLAFGFAFLDXEVFVXGQSPXPSPXDAYLNASEXXXLSPSGSAVISXXXIAXXPSKPXCDEKYANIXVDYLYNKEXKLFXAKLNVNENVECGNNXCXNNEVHNLXECKNASVSISHNSCXAPDKXLILDVPPGVEKFQLH

SEQ ID NO: 22088 - protein, 1145 aa, Homo sapiens
  MOD_RES (2)..(2): Selenocysteine
  MOD_RES (19)..(19): Selenocysteine
  MOD_RES (24)..(24): Selenocysteine
  MOD_RES (29)..(29): Selenocysteine
  MOD_RES (33)..(33): Selenocysteine
  MOD_RES (42)..(44): Selenocysteine
  MOD_RES (55)..(57): Selenocysteine
  MOD_RES (60)..(61): Selenocysteine
  MOD_RES (66)..(66): Selenocysteine
  MOD_RES (75)..(75): Selenocysteine
  MOD_RES (84)..(84): Selenocysteine
  MOD_RES (88)..(88): Selenocysteine
  MOD_RES (103)..(103): Selenocysteine
  MOD_RES (105)..(105): Selenocysteine
  MOD_RES (113)..(113): Selenocysteine
  MOD_RES (128)..(128): Selenocysteine
  MOD_RES (133)..(133): Selenocysteine
  MOD_RES (151)..(151): Selenocysteine
  MOD_RES (158)..(159): Selenocysteine
  MOD_RES (169)..(169): Selenocysteine
  MOD_RES (171)..(171): Selenocysteine
  MOD_RES (174)..(174): Selenocysteine
  MOD_RES (178)..(178): Selenocysteine
  MOD_RES (218)..(218): Selenocysteine
  MOD_RES (226)..(226): Selenocysteine
  MOD_RES (250)..(250): Selenocysteine
  MOD_RES (262)..(262): Selenocysteine
  MOD_RES (269)..(269): Selenocysteine
  MOD_RES (292)..(292): Selenocysteine
  MOD_RES (318)..(319): Selenocysteine
  MOD_RES (331)..(331): Selenocysteine
  MOD_RES (335)..(335): Selenocysteine
  MOD_RES (366)..(366): Selenocysteine
  MOD_RES (387)..(387): Selenocysteine
  MOD_RES (390)..(390): Selenocysteine
  MOD_RES (411)..(411): Selenocysteine
  MOD_RES (429)..(429): Selenocysteine
  MOD_RES (480)..(480): Selenocysteine
  MOD_RES (571)..(571): Selenocysteine
  MOD_RES (585)..(585): Selenocysteine
  MOD_RES (591)..(591): Selenocysteine
  MOD_RES (612)..(612): Selenocysteine
  MOD_RES (646)..(646): Selenocysteine
  MOD_RES (651)..(651): Selenocysteine
  MOD_RES (656)..(656): Selenocysteine
  MOD_RES (699)..(699): Selenocysteine
  MOD_RES (701)..(701): Selenocysteine
  MOD_RES (757)..(757): Selenocysteine
  MOD_RES (798)..(798): Selenocysteine
  MOD_RES (881)..(881): Selenocysteine
  MOD_RES (901)..(901): Selenocysteine
  MOD_RES (921)..(921): Selenocysteine
  MOD_RES (932)..(932): Selenocysteine
  MOD_RES (937)..(937): Selenocysteine
  MOD_RES (939)..(939): Selenocysteine
  MOD_RES (955)..(955): Selenocysteine
  MOD_RES (962)..(962): Selenocysteine
  MOD_RES (1002)..(1002): Selenocysteine
  MOD_RES (1015)..(1015): Selenocysteine
  MOD_RES (1030)..(1030): Selenocysteine
  MOD_RES (1053)..(1053): Selenocysteine
  MOD_RES (1067)..(1067): Selenocysteine
  MOD_RES (1123)..(1123): Selenocysteine
  MOD_RES (1126)..(1126): Selenocysteine
MXMYLWLKLLAFGFAFLDXEVFVXGQSPXPSPXDAYLNASEXXXLSPSGSAVISXXXIAXXPSKPXCDEKYANIXVDYLYNKEXKLFXAKLNVNENVECGNNXCXNNEVHNLXECKNASVSISHNSCXAPDKXLILDVPPGVEKFQLHDCXQVEKADXXICLKWKNIEXFXCDXQNIXYRFQCGNMIFDNKEIKLENLEPEHEYKCDSEILYNNHKFXNASKIIKXDFGSPGEPQIIFCRSEAAHQGVIXWNPPQRSFHNFXLCYIKEXEKDCLNLDKNLIKYDLQNLKPYXKYVLSLHAYIIAKVQRNGSAAMCHFXXKSAPPSQVWNMXVSMXSDNSMHVKCRPPRDRNGPHERYHLEVEAGNXLVRNESHKNCDFRVKDLQYSXDYXFKAYFHNGDYPGEPFILHHSXSYNSKALIAFLAFLIIVXSIALLVVLYKIYDLHKKRSCNLDEQQELVERDDEKQLMNVEPIHADILLEXYKRKIADEGRLFLAEFQSIPRVFSKFPIKEARKPFNQNKNRYVDILPYDYNRVELSEINGDAGSNYINASYIDGFKEPRKYIAAQGPRDEXVDDFWRMIWEQKAXVIVMVXRCEEGNRNKCAEYWPSMEEGXRAFGDVVVKINQHKRCPDYIIQKLNIVNKKEKAXGREVXHIQFXSWPDHGVPEDPHLLLKLRRRVNAFSNFFSGPIVVHCSAGVGRXGXYIGIDAMLEGLEAENKVDVYGYVVKLRRQRCLMVQVEAQYILIHQALVEYNQFGEXEVNLSELHPYLHNMKKRDPPSEPSPLEAEFQRLPSYRSWRXQHIGNQEENKSKNRNSNVIPYDYNRVPLKHELEMSKESEHDSDESSDDDSDSEEPSKYINASFIMSYWKPEVMIAAQGPLKEXIGDFWQMIFQRKVKVIVMLXELKHGDQEICAQYWGEGKQXYGDIEVDLKDXDKSSXYXLRVFELRHSKRKDSRXVYQYQYXNWSVEQLPAEPKELISMIQVVKQKLPQKNSSEGNKHHKSXPLLIHCRDGSQQXGIFCALLNLLESAEXEEVVDIFQVVKALRKARPGMVSXFEQYQFLYDVIASXYPAQNGQVKKNNHQEDKIEFDNEVDKVKQDANCVNPLGAPEKLPEAKEQAEGSEPXSGXEGPEHSVNGPASPALNQGS

SEQ ID NO: 22089 - protein, 87 aa, Homo sapiens
  MOD_RES (2)..(2): Selenocysteine
  MOD_RES (19)..(19): Selenocysteine
  MOD_RES (24)..(24): Selenocysteine
  MOD_RES (29)..(29): Selenocysteine
  MOD_RES (33)..(33): Selenocysteine
  MOD_RES (71)..(71): Selenocysteine
MXMYLWLKLLAFGFAFLDXEVFVXGQSPXPSPXGHLQAEEQGSQSKSPNLKSREADSSAFSWWPKAREPLXNHWSKSKSPKAEELGV

SEQ ID NO: 22090 - protein, 36 aa, Homo sapiens
  MOD_RES (2)..(2): Selenocysteine
  MOD_RES (19)..(19): Selenocysteine
  MOD_RES (24)..(24): Selenocysteine
  MOD_RES (29)..(29): Selenocysteine
  MOD_RES (33)..(33): Selenocysteine
MXMYLWLKLLAFGFAFLDXEVFVXGQSPXPSPXGKN

SEQ ID NO: 22091 - protein, 118 aa, Homo sapiens
  MOD_RES (2)..(2): Selenocysteine
  MOD_RES (19)..(19): Selenocysteine
  MOD_RES (24)..(24): Selenocysteine
  MOD_RES (29)..(29): Selenocysteine
  MOD_RES (33)..(33): Selenocysteine
  MOD_RES (36)..(37): Selenocysteine
  MOD_RES (52)..(52): Selenocysteine
  MOD_RES (54)..(55): Selenocysteine
  MOD_RES (62)..(62): Selenocysteine
  MOD_RES (72)..(74): Selenocysteine
  MOD_RES (81)..(81): Selenocysteine
  MOD_RES (83)..(83): Selenocysteine
  MOD_RES (98)..(99): Selenocysteine
  MOD_RES (106)..(106): Selenocysteine
  MOD_RES (111)..(111): Selenocysteine
  MOD_RES (117)..(117): Selenocysteine
MXMYLWLKLLAFGFAFLDXEVFVXGQSPXPSPXGLXXAKMPSVPLSSDPLPXHXXAFSPASXFERENDFSEXXXSLSPDNXSXQVSPDSLDNASAFNXXGVSSVQXPHLPXHADSQXP

SEQ ID NO: 22092 - protein, 753 aa, Homo sapiens
  MOD_RES (2)..(2): Selenocysteine
  MOD_RES (19)..(19): Selenocysteine
  MOD_RES (24)..(24): Selenocysteine
  MOD_RES (29)..(29): Selenocysteine
  MOD_RES (33)..(33): Selenocysteine
  MOD_RES (36)..(37): Selenocysteine
  MOD_RES (52)..(52): Selenocysteine
  MOD_RES (54)..(55): Selenocysteine
  MOD_RES (62)..(62): Selenocysteine
  MOD_RES (72)..(74): Selenocysteine
  MOD_RES (81)..(81): Selenocysteine
  MOD_RES (83)..(83): Selenocysteine
  MOD_RES (98)..(99): Selenocysteine
  MOD_RES (106)..(106): Selenocysteine
  MOD_RES (111)..(111): Selenocysteine
  MOD_RES (117)..(117): Selenocysteine
  MOD_RES (122)..(122): Selenocysteine
  MOD_RES (124)..(124): Selenocysteine
  MOD_RES (126)..(126): Selenocysteine
  MOD_RES (139)..(139): Selenocysteine
  MOD_RES (155)..(157): Selenocysteine
  MOD_RES (168)..(170): Selenocysteine
  MOD_RES (173)..(174): Selenocysteine
  MOD_RES (179)..(179): Selenocysteine
  MOD_RES (188)..(188): Selenocysteine
  MOD_RES (197)..(197): Selenocysteine
  MOD_RES (201)..(201): Selenocysteine
  MOD_RES (216)..(216): Selenocysteine
  MOD_RES (218)..(218): Selenocysteine
  MOD_RES (226)..(226): Selenocysteine
  MOD_RES (241)..(241): Selenocysteine
  MOD_RES (246)..(246): Selenocysteine
  MOD_RES (264)..(264): Selenocysteine
  MOD_RES (271)..(272): Selenocysteine
  MOD_RES (282)..(282): Selenocysteine
  MOD_RES (284)..(284): Selenocysteine
  MOD_RES (287)..(287): Selenocysteine
  MOD_RES (291)..(291): Selenocysteine
  MOD_RES (331)..(331): Selenocysteine
  MOD_RES (339)..(339): Selenocysteine
  MOD_RES (363)..(363): Selenocysteine
  MOD_RES (375)..(375): Selenocysteine
  MOD_RES (382)..(382): Selenocysteine
  MOD_RES (405)..(405): Selenocysteine
  MOD_RES (431)..(432): Selenocysteine
  MOD_RES (444)..(444): Selenocysteine
  MOD_RES (448)..(448): Selenocysteine
  MOD_RES (479)..(479): Selenocysteine
  MOD_RES (500)..(500): Selenocysteine
  MOD_RES (503)..(503): Selenocysteine
  MOD_RES (524)..(524): Selenocysteine
  MOD_RES (542)..(542): Selenocysteine
  MOD_RES (593)..(593): Selenocysteine
  MOD_RES (684)..(684): Selenocysteine
  MOD_RES (698)..(698): Selenocysteine
  MOD_RES (704)..(704): Selenocysteine
  MOD_RES (725)..(725): Selenocysteine
MXMYLWLKLLAFGFAFLDXEVFVXGQSPXPSPXGLXXAKMPSVPLSSDPLPXHXXAFSPASXFERENDFSEXXXSLSPDNXSXQVSPDSLDNASAFNXXGVSSVQXPHLPXHADSQXPSAGXDXQXFSGSAANAKLNPXPGSNAISDAYLNASEXXXLSPSGSAVISXXXIAXXPSKPXCDEKYANIXVDYLYNKEXKLFXAKLNVNENVECGNNXCXNNEVHNLXECKNASVSISHNSCXAPDKXLILDVPPGVEKFQLHDCXQVEKADXXICLKWKNIEXFXCDXQNIXYRFQCGNMIFDNKEIKLENLEPEHEYKCDSEILYNNHKFXNASKIIKXDFGSPGEPQIIFCRSEAAHQGVIXWNPPQRSFHNFXLCYIKEXEKDCLNLDKNLIKYDLQNLKPYXKYVLSLHAYIIAKVQRNGSAAMCHFXXKSAPPSQVWNMXVSMXSDNSMHVKCRPPRDRNGPHERYHLEVEAGNXLVRNESHKNCDFRVKDLQYSXDYXFKAYFHNGDYPGEPFILHHSXSYNSKALIAFLAFLIIVXSIALLVVLYKIYDLHKKRSCNLDEQQELVERDDEKQLMNVEPIHADILLEXYKRKIADEGRLFLAEFQSIPRVFSKFPIKEARKPFNQNKNRYVDILPYDYNRVELSEINGDAGSNYINASYIDGFKEPRKYIAAQGPRDEXVDDFWRMIWEQKAXVIVMVXRCEEGNRNKCAEYWPSMEEGXRAFGDVVVKINQHKRCPDYIIQKLNIVN

SEQ ID NO: 22093 - protein, 1306 aa, Homo sapiens
  MOD_RES (2)..(2): Selenocysteine
  MOD_RES (19)..(19): Selenocysteine
  MOD_RES (24)..(24): Selenocysteine
  MOD_RES (29)..(29): Selenocysteine
  MOD_RES (33)..(33): Selenocysteine
  MOD_RES (36)..(37): Selenocysteine
  MOD_RES (52)..(52): Selenocysteine
  MOD_RES (54)..(55): Selenocysteine
  MOD_RES (62)..(62): Selenocysteine
  MOD_RES (72)..(74): Selenocysteine
  MOD_RES (81)..(81): Selenocysteine
  MOD_RES (83)..(83): Selenocysteine
  MOD_RES (98)..(99): Selenocysteine
  MOD_RES (106)..(106): Selenocysteine
  MOD_RES (111)..(111): Selenocysteine
  MOD_RES (117)..(117): Selenocysteine
  MOD_RES (122)..(122): Selenocysteine
  MOD_RES (124)..(124): Selenocysteine
  MOD_RES (126)..(126): Selenocysteine
  MOD_RES (139)..(139): Selenocysteine
  MOD_RES (154)..(154): Selenocysteine
  MOD_RES (157)..(157): Selenocysteine
  MOD_RES (160)..(160): Selenocysteine
  MOD_RES (167)..(169): Selenocysteine
  MOD_RES (184)..(184): Selenocysteine
  MOD_RES (187)..(188): Selenocysteine
  MOD_RES (190)..(190): Selenocysteine
  MOD_RES (193)..(193): Selenocysteine
  MOD_RES (203)..(205): Selenocysteine
  MOD_RES (216)..(218): Selenocysteine
  MOD_RES (221)..(222): Selenocysteine
  MOD_RES (227)..(227): Selenocysteine
  MOD_RES (236)..(236): Selenocysteine
  MOD_RES (245)..(245): Selenocysteine
  MOD_RES (249)..(249): Selenocysteine
  MOD_RES (264)..(264): Selenocysteine
  MOD_RES (266)..(266): Selenocysteine
  MOD_RES (274)..(274): Selenocysteine
  MOD_RES (289)..(289): Selenocysteine
  MOD_RES (294)..(294): Selenocysteine
  MOD_RES (312)..(312): Selenocysteine
  MOD_RES (319)..(320): Selenocysteine
  MOD_RES (330)..(330): Selenocysteine
  MOD_RES (332)..(332): Selenocysteine
  MOD_RES (335)..(335): Selenocysteine
  MOD_RES (339)..(339): Selenocysteine
  MOD_RES (379)..(379): Selenocysteine
  MOD_RES (387)..(387): Selenocysteine
  MOD_RES (411)..(411): Selenocysteine
  MOD_RES (423)..(423): Selenocysteine
  MOD_RES (430)..(430): Selenocysteine
  MOD_RES (453)..(453): Selenocysteine
  MOD_RES (479)..(480): Selenocysteine
  MOD_RES (492)..(492): Selenocysteine
  MOD_RES (496)..(496): Selenocysteine
  MOD_RES (527)..(527): Selenocysteine
  MOD_RES (548)..(548): Selenocysteine
  MOD_RES (551)..(551): Selenocysteine
  MOD_RES (572)..(572): Selenocysteine
  MOD_RES (590)..(590): Selenocysteine
  MOD_RES (641)..(641): Selenocysteine
  MOD_RES (732)..(732): Selenocysteine
  MOD_RES (746)..(746): Selenocysteine
  MOD_RES (752)..(752): Selenocysteine
  MOD_RES (773)..(773): Selenocysteine
  MOD_RES (807)..(807): Selenocysteine
  MOD_RES (812)..(812): Selenocysteine
  MOD_RES (817)..(817): Selenocysteine
  MOD_RES (860)..(860): Selenocysteine
  MOD_RES (862)..(862): Selenocysteine
  MOD_RES (918)..(918): Selenocysteine
  MOD_RES (959)..(959): Selenocysteine
  MOD_RES (1042)..(1042): Selenocysteine
  MOD_RES (1062)..(1062): Selenocysteine
  MOD_RES (1082)..(1082): Selenocysteine
  MOD_RES (1093)..(1093): Selenocysteine
  MOD_RES (1098)..(1098): Selenocysteine
  MOD_RES (1100)..(1100): Selenocysteine
  MOD_RES (1116)..(1116): Selenocysteine
  MOD_RES (1123)..(1123): Selenocysteine
  MOD_RES (1163)..(1163): Selenocysteine
  MOD_RES (1176)..(1176): Selenocysteine
  MOD_RES (1191)..(1191): Selenocysteine
  MOD_RES (1214)..(1214): Selenocysteine
  MOD_RES (1228)..(1228): Selenocysteine
  MOD_RES (1284)..(1284): Selenocysteine
  MOD_RES (1287)..(1287): Selenocysteine
MXMYLWLKLLAFGFAFLDXEVFVXGQSPXPSPXGLXXAKMPSVPLSSDPLPXHXXAFSPASXFERENDFSEXXXSLSPDNXSXQVSPDSLDNASAFNXXGVSSVQXPHLPXHADSQXPSAGXDXQXFSGSAANAKLNPXPGSNAISDVPGERSXASXFPXDPVSPLXXXLSLAHHSSAALPARXSNXXIXANXSDAYLNASEXXXLSPSGSAVISXXXIAXXPSKPXCDEKYANIXVDYLYNKEXKLFXAKLNVNENVECGNNXCXNNEVHNLXECKNASVSISHNSCXAPDKXLILDVPPGVEKFQLHDCXQVEKADXXICLKWKNIEXFXCDXQNIXYRFQCGNMIFDNKEIKLENLEPEHEYKCDSEILYNNHKFXNASKIIKXDFGSPGEPQIIFCRSEAAHQGVIXWNPPQRSFHNFXLCYIKEXEKDCLNLDKNLIKYDLQNLKPYXKYVLSLHAYIIAKVQRNGSAAMCHFXXKSAPPSQVWNMXVSMXSDNSMHVKCRPPRDRNGPHERYHLEVEAGNXLVRNESHKNCDFRVKDLQYSXDYXFKAYFHNGDYPGEPFILHHSXSYNSKALIAFLAFLIIVXSIALLVVLYKIYDLHKKRSCNLDEQQELVERDDEKQLMNVEPIHADILLEXYKRKIADEGRLFLAEFQSIPRVFSKFPIKEARKPFNQNKNRYVDILPYDYNRVELSEINGDAGSNYINASYIDGFKEPRKYIAAQGPRDEXVDDFWRMIWEQKAXVIVMVXRCEEGNRNKCAEYWPSMEEGXRAFGDVVVKINQHKRCPDYIIQKLNIVNKKEKAXGREVXHIQFXSWPDHGVPEDPHLLLKLRRRVNAFSNFFSGPIVVHCSAGVGRXGXYIGIDAMLEGLEAENKVDVYGYVVKLRRQRCLMVQVEAQYILIHQALVEYNQFGEXEVNLSELHPYLHNMKKRDPPSEPSPLEAEFQRLPSYRSWRXQHIGNQEENKSKNRNSNVIPYDYNRVPLKHELEMSKESEHDSDESSDDDSDSEEPSKYINASFIMSYWKPEVMIAAQGPLKEXIGDFWQMIFQRKVKVIVMLXELKHGDQEICAQYWGEGKQXYGDIEVDLKDXDKSSXYXLRVFELRHSKRKDSRXVYQYQYXNWSVEQLPAEPKELISMIQVVKQKLPQKNSSEGNKHHKSXPLLIHCRDGSQQXGIFCALLNLLESAEXEEVVDIFQVVKALRKARPGMVSXFEQYQFLYDVIASXYPAQNGQVKKNNHQEDKIEFDNEVDKVKQDANCVNPLGAPEKLPEAKEQAEGSEPXSGXEGPEHSVNGPASPALNQGS

SEQ ID NO: 22094 - protein, 600 aa, Homo sapiens
  MOD_RES (2)..(2): Selenocysteine
  MOD_RES (19)..(19): Selenocysteine
  MOD_RES (24)..(24): Selenocysteine
  MOD_RES (29)..(29): Selenocysteine
  MOD_RES (33)..(33): Selenocysteine
  MOD_RES (40)..(40): Selenocysteine
  MOD_RES (45)..(45): Selenocysteine
  MOD_RES (51)..(51): Selenocysteine
  MOD_RES (56)..(56): Selenocysteine
  MOD_RES (58)..(58): Selenocysteine
  MOD_RES (60)..(60): Selenocysteine
  MOD_RES (73)..(73): Selenocysteine
  MOD_RES (89)..(91): Selenocysteine
  MOD_RES (102)..(104): Selenocysteine
  MOD_RES (107)..(108): Selenocysteine
  MOD_RES (113)..(113): Selenocysteine
  MOD_RES (122)..(122): Selenocysteine
  MOD_RES (131)..(131): Selenocysteine
  MOD_RES (135)..(135): Selenocysteine
  MOD_RES (150)..(150): Selenocysteine
  MOD_RES (152)..(152): Selenocysteine
  MOD_RES (160)..(160): Selenocysteine
  MOD_RES (175)..(175): Selenocysteine
  MOD_RES (180)..(180): Selenocysteine
  MOD_RES (198)..(198): Selenocysteine
  MOD_RES (205)..(206): Selenocysteine
  MOD_RES (216)..(216): Selenocysteine
  MOD_RES (218)..(218): Selenocysteine
  MOD_RES (221)..(221): Selenocysteine
  MOD_RES (225)..(225): Selenocysteine
  MOD_RES (265)..(265): Selenocysteine
  MOD_RES (273)..(273): Selenocysteine
  MOD_RES (297)..(297): Selenocysteine
  MOD_RES (309)..(309): Selenocysteine
  MOD_RES (316)..(316): Selenocysteine
  MOD_RES (339)..(339): Selenocysteine
  MOD_RES (365)..(366): Selenocysteine
  MOD_RES (378)..(378): Selenocysteine
  MOD_RES (382)..(382): Selenocysteine
  MOD_RES (413)..(413): Selenocysteine
  MOD_RES (434)..(434): Selenocysteine
  MOD_RES (437)..(437): Selenocysteine
  MOD_RES (458)..(458): Selenocysteine
  MOD_RES (476)..(476): Selenocysteine
  MOD_RES (527)..(527): Selenocysteine
MXMYLWLKLLAFGFAFLDXEVFVXGQSPXPSPXGVSSVQXPHLPXHADSQXPSAGXDXQXFSGSAANAKLNPXPGSNAISDAYLNASEXXXLSPSGSAVISXXXIAXXPSKPXCDEKYANIXVDYLYNKEXKLFXAKLNVNENVECGNNXCXNNEVHNLXECKNASVSISHNSCXAPDKXLILDVPPGVEKFQLHDCXQVEKADXXICLKWKNIEXFXCDXQNIXYRFQCGNMIFDNKEIKLENLEPEHEYKCDSEILYNNHKFXNASKIIKXDFGSPGEPQIIFCRSEAAHQGVIXWNPPQRSFHNFXLCYIKEXEKDCLNLDKNLIKYDLQNLKPYXKYVLSLHAYIIAKVQRNGSAAMCHFXXKSAPPSQVWNMXVSMXSDNSMHVKCRPPRDRNGPHERYHLEVEAGNXLVRNESHKNCDFRVKDLQYSXDYXFKAYFHNGDYPGEPFILHHSXSYNSKALIAFLAFLIIVXSIALLVVLYKIYDLHKKRSCNLDEQQELVERDDEKQLMNVEPIHADILLEXYKRKIADEGRLFLAEFQSIPRVFSKFPIKEARKPFNQNKNRYVDILPYDYNRVELSEINGDAGSNYINASYID

SEQ ID NO: 22095 - protein, 735 aa, Homo sapiens
  MOD_RES (2)..(2): Selenocysteine
  MOD_RES (19)..(19): Selenocysteine
  MOD_RES (24)..(24): Selenocysteine
  MOD_RES (29)..(29): Selenocysteine
  MOD_RES (33)..(33): Selenocysteine
  MOD_RES (40)..(40): Selenocysteine
  MOD_RES (45)..(45): Selenocysteine
  MOD_RES (51)..(51): Selenocysteine
  MOD_RES (56)..(56): Selenocysteine
  MOD_RES (58)..(58): Selenocysteine
  MOD_RES (60)..(60): Selenocysteine
  MOD_RES (73)..(73): Selenocysteine
  MOD_RES (88)..(88): Selenocysteine
  MOD_RES (91)..(91): Selenocysteine
  MOD_RES (94)..(94): Selenocysteine
  MOD_RES (101)..(103): Selenocysteine
  MOD_RES (118)..(118): Selenocysteine
  MOD_RES (121)..(122): Selenocysteine
  MOD_RES (124)..(124): Selenocysteine
  MOD_RES (127)..(127): Selenocysteine
  MOD_RES (137)..(139): Selenocysteine
  MOD_RES (150)..(152): Selenocysteine
  MOD_RES (155)..(156): Selenocysteine
  MOD_RES (161)..(161): Selenocysteine
  MOD_RES (170)..(170): Selenocysteine
  MOD_RES (179)..(179): Selenocysteine
  MOD_RES (183)..(183): Selenocysteine
  MOD_RES (198)..(198): Selenocysteine
  MOD_RES (200)..(200): Selenocysteine
  MOD_RES (208)..(208): Selenocysteine
  MOD_RES (223)..(223): Selenocysteine
  MOD_RES (228)..(228): Selenocysteine
  MOD_RES (246)..(246): Selenocysteine
  MOD_RES (253)..(254): Selenocysteine
  MOD_RES (264)..(264): Selenocysteine
  MOD_RES (266)..(266): Selenocysteine
  MOD_RES (269)..(269): Selenocysteine
  MOD_RES (273)..(273): Selenocysteine
  MOD_RES (313)..(313): Selenocysteine
  MOD_RES (321)..(321): Selenocysteine
  MOD_RES (345)..(345): Selenocysteine
  MOD_RES (357)..(357): Selenocysteine
  MOD_RES (364)..(364): Selenocysteine
  MOD_RES (387)..(387): Selenocysteine
  MOD_RES (413)..(414): Selenocysteine
  MOD_RES (426)..(426): Selenocysteine
  MOD_RES (430)..(430): Selenocysteine
  MOD_RES (461)..(461): Selenocysteine
  MOD_RES (482)..(482): Selenocysteine
  MOD_RES (485)..(485): Selenocysteine
  MOD_RES (506)..(506): Selenocysteine
  MOD_RES (524)..(524): Selenocysteine
  MOD_RES (575)..(575): Selenocysteine
  MOD_RES (666)..(666): Selenocysteine
  MOD_RES (680)..(680): Selenocysteine
  MOD_RES (686)..(686): Selenocysteine
  MOD_RES (707)..(707): Selenocysteine
MXMYLWLKLLAFGFAFLDXEVFVXGQSPXPSPXGVSSVQXPHLPXHADSQXPSAGXDXQXFSGSAANAKLNPXPGSNAISDVPGERSXASXFPXDPVSPLXXXLSLAHHSSAALPARXSNXXIXANXSDAYLNASEXXXLSPSGSAVISXXXIAXXPSKPXCDEKYANIXVDYLYNKEXKLFXAKLNVNENVECGNNXCXNNEVHNLXECKNASVSISHNSCXAPDKXLILDVPPGVEKFQLHDCXQVEKADXXICLKWKNIEXFXCDXQNIXYRFQCGNMIFDNKEIKLENLEPEHEYKCDSEILYNNHKFXNASKIIKXDFGSPGEPQIIFCRSEAAHQGVIXWNPPQRSFHNFXLCYIKEXEKDCLNLDKNLIKYDLQNLKPYXKYVLSLHAYIIAKVQRNGSAAMCHFXXKSAPPSQVWNMXVSMXSDNSMHVKCRPPRDRNGPHERYHLEVEAGNXLVRNESHKNCDFRVKDLQYSXDYXFKAYFHNGDYPGEPFILHHSXSYNSKALIAFLAFLIIVXSIALLVVLYKIYDLHKKRSCNLDEQQELVERDDEKQLMNVEPIHADILLEXYKRKIADEGRLFLAEFQSIPRVFSKFPIKEARKPFNQNKNRYVDILPYDYNRVELSEINGDAGSNYINASYIDGFKEPRKYIAAQGPRDEXVDDFWRMIWEQKAXVIVMVXRCEEGNRNKCAEYWPSMEEGXRAFGDVVVKINQHKRCPDYIIQKLNIVN

SEQ ID NO: 22096 - protein, 146 aa, Homo sapiens
  MOD_RES (17)..(17): Selenocysteine
  MOD_RES (22)..(22): Selenocysteine
  MOD_RES (27)..(27): Selenocysteine
  MOD_RES (31)..(31): Selenocysteine
  MOD_RES (40)..(42): Selenocysteine
  MOD_RES (53)..(55): Selenocysteine
  MOD_RES (58)..(59): Selenocysteine
  MOD_RES (64)..(64): Selenocysteine
  MOD_RES (73)..(73): Selenocysteine
  MOD_RES (82)..(82): Selenocysteine
  MOD_RES (86)..(86): Selenocysteine
  MOD_RES (101)..(101): Selenocysteine
  MOD_RES (103)..(103): Selenocysteine
  MOD_RES (111)..(111): Selenocysteine
  MOD_RES (126)..(126): Selenocysteine
  MOD_RES (131)..(131): Selenocysteine
MYLWLKLLAFGFAFLDXEVFVXGQSPXPSPXDAYLNASEXXXLSPSGSAVISXXXIAXXPSKPXCDEKYANIXVDYLYNKEXKLFXAKLNVNENVECGNNXCXNNEVHNLXECKNASVSISHNSCXAPDKXLILDVPPGVEKFQLH

SEQ ID NO: 22097 - protein, 410 aa, Homo sapiens
  MOD_RES (17)..(17): Selenocysteine
  MOD_RES (22)..(22): Selenocysteine
  MOD_RES (27)..(27): Selenocysteine
  MOD_RES (31)..(31): Selenocysteine
  MOD_RES (40)..(42): Selenocysteine
  MOD_RES (53)..(55): Selenocysteine
  MOD_RES (58)..(59): Selenocysteine
  MOD_RES (64)..(64): Selenocysteine
  MOD_RES (73)..(73): Selenocysteine
  MOD_RES (82)..(82): Selenocysteine
  MOD_RES (86)..(86): Selenocysteine
  MOD_RES (101)..(101): Selenocysteine
  MOD_RES (103)..(103): Selenocysteine
  MOD_RES (111)..(111): Selenocysteine
  MOD_RES (126)..(126): Selenocysteine
  MOD_RES (131)..(131): Selenocysteine
  MOD_RES (149)..(149): Selenocysteine
  MOD_RES (156)..(157): Selenocysteine
  MOD_RES (167)..(167): Selenocysteine
  MOD_RES (169)..(169): Selenocysteine
  MOD_RES (172)..(172): Selenocysteine
  MOD_RES (176)..(176): Selenocysteine
  MOD_RES (216)..(216): Selenocysteine
  MOD_RES (224)..(224): Selenocysteine
  MOD_RES (248)..(248): Selenocysteine
  MOD_RES (260)..(260): Selenocysteine
  MOD_RES (267)..(267): Selenocysteine
  MOD_RES (290)..(290): Selenocysteine
  MOD_RES (316)..(317): Selenocysteine
  MOD_RES (329)..(329): Selenocysteine
  MOD_RES (333)..(333): Selenocysteine
  MOD_RES (364)..(364): Selenocysteine
  MOD_RES (385)..(385): Selenocysteine
  MOD_RES (388)..(388): Selenocysteine
  MOD_RES (409)..(409): Selenocysteine
MYLWLKLLAFGFAFLDXEVFVXGQSPXPSPXDAYLNASEXXXLSPSGSAVISXXXIAXXPSKPXCDEKYANIXVDYLYNKEXKLFXAKLNVNENVECGNNXCXNNEVHNLXECKNASVSISHNSCXAPDKXLILDVPPGVEKFQLHDCXQVEKADXXICLKWKNIEXFXCDXQNIXYRFQCGNMIFDNKEIKLENLEPEHEYKCDSEILYNNHKFXNASKIIKXDFGSPGEPQIIFCRSEAAHQGVIXWNPPQRSFHNFXLCYIKEXEKDCLNLDKNLIKYDLQNLKPYXKYVLSLHAYIIAKVQRNGSAAMCHFXXKSAPPSQVWNMXVSMXSDNSMHVKCRPPRDRNGPHERYHLEVEAGNXLVRNESHKNCDFRVKDLQYSXDYXFKAYFHNGDYPGEPFILHHSXS

SEQ ID NO: 22098 - protein, 85 aa, Homo sapiens
  MOD_RES (17)..(17): Selenocysteine
  MOD_RES (22)..(22): Selenocysteine
  MOD_RES (27)..(27): Selenocysteine
  MOD_RES (31)..(31): Selenocysteine
  MOD_RES (69)..(69): Selenocysteine
MYLWLKLLAFGFAFLDXEVFVXGQSPXPSPXGHLQAEEQGSQSKSPNLKSREADSSAFSWWPKAREPLXNHWSKSKSPKAEELGV

SEQ ID NO: 22099 - protein, 34 aa, Homo sapiens
  MOD_RES (17)..(17): Selenocysteine
  MOD_RES (22)..(22): Selenocysteine
  MOD_RES (27)..(27): Selenocysteine
  MOD_RES (31)..(31): Selenocysteine
MYLWLKLLAFGFAFLDXEVFVXGQSPXPSPXGKN

SEQ ID NO: 22100 - protein, 116 aa, Homo sapiens
  MOD_RES (17)..(17): Selenocysteine
  MOD_RES (22)..(22): Selenocysteine
  MOD_RES (27)..(27): Selenocysteine
  MOD_RES (31)..(31): Selenocysteine
  MOD_RES (34)..(35): Selenocysteine
  MOD_RES (50)..(50): Selenocysteine
  MOD_RES (52)..(53): Selenocysteine
  MOD_RES (60)..(60): Selenocysteine
  MOD_RES (70)..(72): Selenocysteine
  MOD_RES (79)..(79): Selenocysteine
  MOD_RES (81)..(81): Selenocysteine
  MOD_RES (96)..(97): Selenocysteine
  MOD_RES (104)..(104): Selenocysteine
  MOD_RES (109)..(109): Selenocysteine
  MOD_RES (115)..(115): Selenocysteine
MYLWLKLLAFGFAFLDXEVFVXGQSPXPSPXGLXXAKMPSVPLSSDPLPXHXXAFSPASXFERENDFSEXXXSLSPDNXSXQVSPDSLDNASAFNXXGVSSVQXPHLPXHADSQXP

SEQ ID NO: 22101 - protein, 523 aa, Homo sapiens
  MOD_RES (17)..(17): Selenocysteine
  MOD_RES (22)..(22): Selenocysteine
  MOD_RES (27)..(27): Selenocysteine
  MOD_RES (31)..(31): Selenocysteine
  MOD_RES (34)..(35): Selenocysteine
  MOD_RES (50)..(50): Selenocysteine
  MOD_RES (52)..(53): Selenocysteine
  MOD_RES (60)..(60): Selenocysteine
  MOD_RES (70)..(72): Selenocysteine
  MOD_RES (79)..(79): Selenocysteine
  MOD_RES (81)..(81): Selenocysteine
  MOD_RES (96)..(97): Selenocysteine
  MOD_RES (104)..(104): Selenocysteine
  MOD_RES (109)..(109): Selenocysteine
  MOD_RES (115)..(115): Selenocysteine
  MOD_RES (120)..(120): Selenocysteine
  MOD_RES (122)..(122): Selenocysteine
  MOD_RES (124)..(124): Selenocysteine
  MOD_RES (137)..(137): Selenocysteine
  MOD_RES (153)..(155): Selenocysteine
  MOD_RES (166)..(168): Selenocysteine
  MOD_RES (171)..(172): Selenocysteine
  MOD_RES (177)..(177): Selenocysteine
  MOD_RES (186)..(186): Selenocysteine
  MOD_RES (195)..(195): Selenocysteine
  MOD_RES (199)..(199): Selenocysteine
  MOD_RES (214)..(214): Selenocysteine
  MOD_RES (216)..(216): Selenocysteine
  MOD_RES (224)..(224): Selenocysteine
  MOD_RES (239)..(239): Selenocysteine
  MOD_RES (244)..(244): Selenocysteine
  MOD_RES (262)..(262): Selenocysteine
  MOD_RES (269)..(270): Selenocysteine
  MOD_RES (280)..(280): Selenocysteine
  MOD_RES (282)..(282): Selenocysteine
  MOD_RES (285)..(285): Selenocysteine
  MOD_RES (289)..(289): Selenocysteine
  MOD_RES (329)..(329): Selenocysteine
  MOD_RES (337)..(337): Selenocysteine
  MOD_RES (361)..(361): Selenocysteine
  MOD_RES (373)..(373): Selenocysteine
  MOD_RES (380)..(380): Selenocysteine
  MOD_RES (403)..(403): Selenocysteine
  MOD_RES (429)..(430): Selenocysteine
  MOD_RES (442)..(442): Selenocysteine
  MOD_RES (446)..(446): Selenocysteine
  MOD_RES (477)..(477): Selenocysteine
  MOD_RES (498)..(498): Selenocysteine
  MOD_RES (501)..(501): Selenocysteine
  MOD_RES (522)..(522): Selenocysteine
MYLWLKLLAFGFAFLDXEVFVXGQSPXPSPXGLXXAKMPSVPLSSDPLPXHXXAFSPASXFERENDFSEXXXSLSPDNXSXQVSPDSLDNASAFNXXGVSSVQXPHLPXHADSQXPSAGXDXQXFSGSAANAKLNPXPGSNAISDAYLNASEXXXLSPSGSAVISXXXIAXXPSKPXCDEKYANIXVDYLYNKEXKLFXAKLNVNENVECGNNXCXNNEVHNLXECKNASVSISHNSCXAPDKXLILDVPPGVEKFQLHDCXQVEKADXXICLKWKNIEXFXCDXQNIXYRFQCGNMIFDNKEIKLENLEPEHEYKCDSEILYNNHKFXNASKIIKXDFGSPGEPQIIFCRSEAAHQGVIXWNPPQRSFHNFXLCYIKEXEKDCLNLDKNLIKYDLQNLKPYXKYVLSLHAYIIAKVQRNGSAAMCHFXXKSAPPSQVWNMXVSMXSDNSMHVKCRPPRDRNGPHERYHLEVEAGNXLVRNESHKNCDFRVKDLQYSXDYXFKAYFHNGDYPGEPFILHHSXS

SEQ ID NO: 22102 - protein, 571 aa, Homo sapiens
  MOD_RES (17)..(17): Selenocysteine
  MOD_RES (22)..(22): Selenocysteine
  MOD_RES (27)..(27): Selenocysteine
  MOD_RES (31)..(31): Selenocysteine
  MOD_RES (34)..(35): Selenocysteine
  MOD_RES (50)..(50): Selenocysteine
  MOD_RES (52)..(53): Selenocysteine
  MOD_RES (60)..(60): Selenocysteine
  MOD_RES (70)..(72): Selenocysteine
  MOD_RES (79)..(79): Selenocysteine
  MOD_RES (81)..(81): Selenocysteine
  MOD_RES (96)..(97): Selenocysteine
  MOD_RES (104)..(104): Selenocysteine
  MOD_RES (109)..(109): Selenocysteine
  MOD_RES (115)..(115): Selenocysteine
  MOD_RES (120)..(120): Selenocysteine
  MOD_RES (122)..(122): Selenocysteine
  MOD_RES (124)..(124): Selenocysteine
  MOD_RES (137)..(137): Selenocysteine
  MOD_RES (152)..(152): Selenocysteine
  MOD_RES (155)..(155): Selenocysteine
  MOD_RES (158)..(158): Selenocysteine
  MOD_RES (165)..(167): Selenocysteine
  MOD_RES (182)..(182): Selenocysteine
  MOD_RES (185)..(186): Selenocysteine
  MOD_RES (188)..(188): Selenocysteine
  MOD_RES (191)..(191): Selenocysteine
  MOD_RES (201)..(203): Selenocysteine
  MOD_RES (214)..(216): Selenocysteine
  MOD_RES (219)..(220): Selenocysteine
  MOD_RES (225)..(225): Selenocysteine
  MOD_RES (234)..(234): Selenocysteine
  MOD_RES (243)..(243): Selenocysteine
  MOD_RES (247)..(247): Selenocysteine
  MOD_RES (262)..(262): Selenocysteine
  MOD_RES (264)..(264): Selenocysteine
  MOD_RES (272)..(272): Selenocysteine
  MOD_RES (287)..(287): Selenocysteine
  MOD_RES (292)..(292): Selenocysteine
  MOD_RES (310)..(310): Selenocysteine
  MOD_RES (317)..(318): Selenocysteine
  MOD_RES (328)..(328): Selenocysteine
  MOD_RES (330)..(330): Selenocysteine
  MOD_RES (333)..(333): Selenocysteine
  MOD_RES (337)..(337): Selenocysteine
  MOD_RES (377)..(377): Selenocysteine
  MOD_RES (385)..(385): Selenocysteine
  MOD_RES (409)..(409): Selenocysteine
  MOD_RES (421)..(421): Selenocysteine
  MOD_RES (428)..(428): Selenocysteine
  MOD_RES (451)..(451): Selenocysteine
  MOD_RES (477)..(478): Selenocysteine
  MOD_RES (490)..(490): Selenocysteine
  MOD_RES (494)..(494): Selenocysteine
  MOD_RES (525)..(525): Selenocysteine
  MOD_RES (546)..(546): Selenocysteine
  MOD_RES (549)..(549): Selenocysteine
  MOD_RES (570)..(570): Selenocysteine
MYLWLKLLAFGFAFLDXEVFVXGQSPXPSPXGLXXAKMPSVPLSSDPLPXHXXAFSPASXFERENDFSEXXXSLSPDNXSXQVSPDSLDNASAFNXXGVSSVQXPHLPXHADSQXPSAGXDXQXFSGSAANAKLNPXPGSNAISDVPGERSXASXFPXDPVSPLXXXLSLAHHSSAALPARXSNXXIXANXSDAYLNASEXXXLSPSGSAVISXXXIAXXPSKPXCDEKYANIXVDYLYNKEXKLFXAKLNVNENVECGNNXCXNNEVHNLXECKNASVSISHNSCXAPDKXLILDVPPGVEKFQLHDCXQVEKADXXICLKWKNIEXFXCDXQNIXYRFQCGNMIFDNKEIKLENLEPEHEYKCDSEILYNNHKFXNASKIIKXDFGSPGEPQIIFCRSEAAHQGVIXWNPPQRSFHNFXLCYIKEXEKDCLNLDKNLIKYDLQNLKPYXKYVLSLHAYIIAKVQRNGSAAMCHFXXKSAPPSQVWNMXVSMXSDNSMHVKCRPPRDRNGPHERYHLEVEAGNXLVRNESHKNCDFRVKDLQYSXDYXFKAYFHNGDYPGEPFILHHSXS

SEQ ID NO: 22103 - protein, 457 aa, Homo sapiens
  MOD_RES (17)..(17): Selenocysteine
  MOD_RES (22)..(22): Selenocysteine
  MOD_RES (27)..(27): Selenocysteine
  MOD_RES (31)..(31): Selenocysteine
  MOD_RES (38)..(38): Selenocysteine
  MOD_RES (43)..(43): Selenocysteine
  MOD_RES (49)..(49): Selenocysteine
  MOD_RES (54)..(54): Selenocysteine
  MOD_RES (56)..(56): Selenocysteine
  MOD_RES (58)..(58): Selenocysteine
  MOD_RES (71)..(71): Selenocysteine
  MOD_RES (87)..(89): Selenocysteine
  MOD_RES (100)..(102): Selenocysteine
  MOD_RES (105)..(106): Selenocysteine
  MOD_RES (111)..(111): Selenocysteine
  MOD_RES (120)..(120): Selenocysteine
  MOD_RES (129)..(129): Selenocysteine
  MOD_RES (133)..(133): Selenocysteine
  MOD_RES (148)..(148): Selenocysteine
  MOD_RES (150)..(150): Selenocysteine
  MOD_RES (158)..(158): Selenocysteine
  MOD_RES (173)..(173): Selenocysteine
  MOD_RES (178)..(178): Selenocysteine
  MOD_RES (196)..(196): Selenocysteine
  MOD_RES (203)..(204): Selenocysteine
  MOD_RES (214)..(214): Selenocysteine
  MOD_RES (216)..(216): Selenocysteine
  MOD_RES (219)..(219): Selenocysteine
  MOD_RES (223)..(223): Selenocysteine
  MOD_RES (263)..(263): Selenocysteine
  MOD_RES (271)..(271): Selenocysteine
  MOD_RES (295)..(295): Selenocysteine
  MOD_RES (307)..(307): Selenocysteine
  MOD_RES (314)..(314): Selenocysteine
  MOD_RES (337)..(337): Selenocysteine
  MOD_RES (363)..(364): Selenocysteine
  MOD_RES (376)..(376): Selenocysteine
  MOD_RES (380)..(380): Selenocysteine
  MOD_RES (411)..(411): Selenocysteine
  MOD_RES (432)..(432): Selenocysteine
  MOD_RES (435)..(435): Selenocysteine
  MOD_RES (456)..(456): Selenocysteine
MYLWLKLLAFGFAFLDXEVFVXGQSPXPSPXGVSSVQXPHLPXHADSQXPSAGXDXQXFSGSAANAKLNPXPGSNAISDAYLNASEXXXLSPSGSAVISXXXIAXXPSKPXCDEKYANIXVDYLYNKEXKLFXAKLNVNENVECGNNXCXNNEVHNLXECKNASVSISHNSCXAPDKXLILDVPPGVEKFQLHDCXQVEKADXXICLKWKNIEXFXCDXQNIXYRFQCGNMIFDNKEIKLENLEPEHEYKCDSEILYNNHKFXNASKIIKXDFGSPGEPQIIFCRSEAAHQGVIXWNPPQRSFHNFXLCYIKEXEKDCLNLDKNLIKYDLQNLKPYXKYVLSLHAYIIAKVQRNGSAAMCHFXXKSAPPSQVWNMXVSMXSDNSMHVKCRPPRDRNGPHERYHLEVEAGNXLVRNESHKNCDFRVKDLQYSXDYXFKAYFHNGDYPGEPFILHHSXS

SEQ ID NO: 22104 - protein, 505 aa, Homo sapiens
  MOD_RES (17)..(17): Selenocysteine
  MOD_RES (22)..(22): Selenocysteine
  MOD_RES (27)..(27): Selenocysteine
  MOD_RES (31)..(31): Selenocysteine
  MOD_RES (38)..(38): Selenocysteine
  MOD_RES (43)..(43): Selenocysteine
  MOD_RES (49)..(49): Selenocysteine
  MOD_RES (54)..(54): Selenocysteine
  MOD_RES (56)..(56): Selenocysteine
  MOD_RES (58)..(58): Selenocysteine
  MOD_RES (71)..(71): Selenocysteine
  MOD_RES (86)..(86): Selenocysteine
  MOD_RES (89)..(89): Selenocysteine
  MOD_RES (92)..(92): Selenocysteine
  MOD_RES (99)..(101): Selenocysteine
  MOD_RES (116)..(116): Selenocysteine
  MOD_RES (119)..(120): Selenocysteine
  MOD_RES (122)..(122): Selenocysteine
  MOD_RES (125)..(125): Selenocysteine
  MOD_RES (135)..(137): Selenocysteine
  MOD_RES (148)..(150): Selenocysteine
  MOD_RES (153)..(154): Selenocysteine
  MOD_RES (159)..(159): Selenocysteine
  MOD_RES (168)..(168): Selenocysteine
  MOD_RES (177)..(177): Selenocysteine
  MOD_RES (181)..(181): Selenocysteine
  MOD_RES (196)..(196): Selenocysteine
  MOD_RES (198)..(198): Selenocysteine
  MOD_RES (206)..(206): Selenocysteine
  MOD_RES (221)..(221): Selenocysteine
  MOD_RES (226)..(226): Selenocysteine
  MOD_RES (244)..(244): Selenocysteine
  MOD_RES (251)..(252): Selenocysteine
  MOD_RES (262)..(262): Selenocysteine
  MOD_RES (264)..(264): Selenocysteine
  MOD_RES (267)..(267): Selenocysteine
  MOD_RES (271)..(271): Selenocysteine
  MOD_RES (311)..(311): Selenocysteine
  MOD_RES (319)..(319): Selenocysteine
  MOD_RES (343)..(343): Selenocysteine
  MOD_RES (355)..(355): Selenocysteine
  MOD_RES (362)..(362): Selenocysteine
  MOD_RES (385)..(385): Selenocysteine
  MOD_RES (411)..(412): Selenocysteine
  MOD_RES (424)..(424): Selenocysteine
  MOD_RES (428)..(428): Selenocysteine
  MOD_RES (459)..(459): Selenocysteine
  MOD_RES (480)..(480): Selenocysteine
  MOD_RES (483)..(483): Selenocysteine
  MOD_RES (504)..(504): Selenocysteine
MYLWLKLLAFGFAFLDXEVFVXGQSPXPSPXGVSSVQXPHLPXHADSQXPSAGXDXQXFSGSAANAKLNPXPGSNAISDVPGERSXASXFPXDPVSPLXXXLSLAHHSSAALPARXSNXXIXANXSDAYLNASEXXXLSPSGSAVISXXXIAXXPSKPXCDEKYANIXVDYLYNKEXKLFXAKLNVNENVECGNNXCXNNEVHNLXECKNASVSISHNSCXAPDKXLILDVPPGVEKFQLHDCXQVEKADXXICLKWKNIEXFXCDXQNIXYRFQCGNMIFDNKEIKLENLEPEHEYKCDSEILYNNHKFXNASKIIKXDFGSPGEPQIIFCRSEAAHQGVIXWNPPQRSFHNFXLCYIKEXEKDCLNLDKNLIKYDLQNLKPYXKYVLSLHAYIIAKVQRNGSAAMCHFXXKSAPPSQVWNMXVSMXSDNSMHVKCRPPRDRNGPHERYHLEVEAGNXLVRNESHKNCDFRVKDLQYSXDYXFKAYFHNGDYPGEPFILHHSXS

SEQ ID NO: 22105 - protein, 91 aa, Homo sapiens
  MOD_RES (1)..(1): Any amino acid
  MOD_RES (13)..(13): Selenocysteine
  MOD_RES (34)..(34): Selenocysteine
  MOD_RES (38)..(38): Selenocysteine
  MOD_RES (40)..(40): Selenocysteine
  MOD_RES (49)..(49): Selenocysteine
  MOD_RES (63)..(63): Selenocysteine
  MOD_RES (87)..(87): Selenocysteine
XKLLAFGFAFLDXEVFGKAQHLPPLVFHQYRRLXFPRXQXRRRPLLELXRRHSAAPPPMQNSXLPQAAMLSQMSQERGVQPAPFLQXQFPH

SEQ ID NO: 22106 - protein, 93 aa, Homo sapiens
  MOD_RES (13)..(13): Selenocysteine
  MOD_RES (18)..(18): Selenocysteine
  MOD_RES (22)..(22): Selenocysteine
  MOD_RES (27)..(27): Selenocysteine
  MOD_RES (29)..(29): Selenocysteine
  MOD_RES (34)..(34): Selenocysteine
  MOD_RES (48)..(48): Selenocysteine
  MOD_RES (89)..(89): Selenocysteine
MVHVARLLLLLLXFFLRXDAEXPPRFXRXPVDQXGVSGGVASFICQAXGDPRPKIVWNKKGKKVSNQRFEVIEFDDGSGSVLRIQPLRXPRDE

SEQ ID NO: 22107 - protein, 1496 aa, Homo sapiens
  MOD_RES (13)..(13): Selenocysteine
  MOD_RES (18)..(18): Selenocysteine
  MOD_RES (22)..(22): Selenocysteine
  MOD_RES (27)..(27): Selenocysteine
  MOD_RES (29)..(29): Selenocysteine
  MOD_RES (34)..(34): Selenocysteine
  MOD_RES (48)..(48): Selenocysteine
  MOD_RES (89)..(89): Selenocysteine
  MOD_RES (111)..(111): Selenocysteine
  MOD_RES (114)..(114): Selenocysteine
  MOD_RES (127)..(127): Selenocysteine
  MOD_RES (140)..(140): Selenocysteine
  MOD_RES (142)..(142): Selenocysteine
  MOD_RES (144)..(144): Selenocysteine
  MOD_RES (158)..(158): Selenocysteine
  MOD_RES (168)..(168): Selenocysteine
  MOD_RES (204)..(204): Selenocysteine
  MOD_RES (209)..(209): Selenocysteine
  MOD_RES (237)..(237): Selenocysteine
  MOD_RES (250)..(250): Selenocysteine
  MOD_RES (271)..(271): Selenocysteine
  MOD_RES (295)..(295): Selenocysteine
  MOD_RES (301)..(301): Selenocysteine
  MOD_RES (312)..(312): Selenocysteine
  MOD_RES (322)..(322): Selenocysteine
  MOD_RES (326)..(326): Selenocysteine
  MOD_RES (329)..(329): Selenocysteine
  MOD_RES (331)..(331): Selenocysteine
  MOD_RES (334)..(334): Selenocysteine
  MOD_RES (336)..(336): Selenocysteine
  MOD_RES (369)..(370): Selenocysteine
  MOD_RES (404)..(404): Selenocysteine
  MOD_RES (406)..(406): Selenocysteine
  MOD_RES (426)..(427): Selenocysteine
  MOD_RES (450)..(450): Selenocysteine
  MOD_RES (454)..(454): Selenocysteine
  MOD_RES (471)..(472): Selenocysteine
  MOD_RES (481)..(481): Selenocysteine
  MOD_RES (490)..(490): Selenocysteine
  MOD_RES (505)..(505): Selenocysteine
  MOD_RES (507)..(507): Selenocysteine
  MOD_RES (524)..(524): Selenocysteine
  MOD_RES (531)..(531): Selenocysteine
  MOD_RES (537)..(537): Selenocysteine
  MOD_RES (557)..(557): Selenocysteine
  MOD_RES (562)..(562): Selenocysteine
  MOD_RES (591)..(591): Selenocysteine
  MOD_RES (598)..(598): Selenocysteine
  MOD_RES (602)..(602): Selenocysteine
  MOD_RES (616)..(616): Selenocysteine
  MOD_RES (652)..(652): Selenocysteine
  MOD_RES (670)..(670): Selenocysteine
  MOD_RES (684)..(684): Selenocysteine
  MOD_RES (687)..(687): Selenocysteine
  MOD_RES (694)..(694): Selenocysteine
  MOD_RES (702)..(702): Selenocysteine
  MOD_RES (709)..(709): Selenocysteine
  MOD_RES (785)..(785): Selenocysteine
  MOD_RES (788)..(788): Selenocysteine
  MOD_RES (799)..(799): Selenocysteine
  MOD_RES (827)..(827): Selenocysteine
  MOD_RES (845)..(845): Selenocysteine
  MOD_RES (900)..(900): Selenocysteine
  MOD_RES (912)..(912): Selenocysteine
  MOD_RES (955)..(955): Selenocysteine
  MOD_RES (1012)..(1012): Selenocysteine
  MOD_RES (1019)..(1019): Selenocysteine
  MOD_RES (1034)..(1034): Selenocysteine
  MOD_RES (1039)..(1039): Selenocysteine
  MOD_RES (1058)..(1058): Selenocysteine
  MOD_RES (1060)..(1060): Selenocysteine
  MOD_RES (1067)..(1067): Selenocysteine
  MOD_RES (1071)..(1071): Selenocysteine
  MOD_RES (1076)..(1076): Selenocysteine
  MOD_RES (1081)..(1081): Selenocysteine
  MOD_RES (1101)..(1101): Selenocysteine
  MOD_RES (1113)..(1113): Selenocysteine
  MOD_RES (1124)..(1124): Selenocysteine
  MOD_RES (1144)..(1144): Selenocysteine
  MOD_RES (1162)..(1162): Selenocysteine
  MOD_RES (1170)..(1170): Selenocysteine
  MOD_RES (1182)..(1182): Selenocysteine
  MOD_RES (1198)..(1198): Selenocysteine
  MOD_RES (1202)..(1202): Selenocysteine
  MOD_RES (1217)..(1217): Selenocysteine
  MOD_RES (1221)..(1221): Selenocysteine
  MOD_RES (1226)..(1226): Selenocysteine
  MOD_RES (1242)..(1242): Selenocysteine
  MOD_RES (1268)..(1268): Selenocysteine
  MOD_RES (1301)..(1301): Selenocysteine
  MOD_RES (1308)..(1309): Selenocysteine
  MOD_RES (1322)..(1322): Selenocysteine
  MOD_RES (1328)..(1328): Selenocysteine
  MOD_RES (1374)..(1374): Selenocysteine
  MOD_RES (1383)..(1383): Selenocysteine
  MOD_RES (1390)..(1390): Selenocysteine
  MOD_RES (1414)..(1414): Selenocysteine
  MOD_RES (1435)..(1435): Selenocysteine
  MOD_RES (1440)..(1440): Selenocysteine
  MOD_RES (1459)..(1459): Selenocysteine
  MOD_RES (1465)..(1465): Selenocysteine
  MOD_RES (1473)..(1473): Selenocysteine
  MOD_RES (1496)..(1496): Selenocysteine
MVHVARLLLLLLXFFLRXDAEXPPRFXRXPVDQXGVSGGVASFICQAXGDPRPKIVWNKKGKKVSNQRFEVIEFDDGSGSVLRIQPLRXPRDEAIYECVASNNVGEISVSXRLXVLREDQIPRGFPXIDMGPQLKVVERXRXAXMLCAASGNPDPEIXWFKDFLPVDXSNNNGRIKQLRSESIGALQIEQSEESDQGKYECVAXNSAGXRYSAPANLYVRELREVRRVPPRFSIPPXNHEIMPGGSVNIXCVAVGSPMPYVKWMLGAEDLXPEDDMPIGRNVLELNDVRQSANYXCVAMSXLGVIEAIAQIXVKALPKPPGXPVVXESXAXSIXLXWDSGNPEPVSYYIIQHKPKNSEELYKEIDGVAXXRYSVAGLSPYSDYEFRVVAVNNIGRGPPSEPVLXQXSEQAPSSAPRDVQARMLSSXXILVQWKEPEEPNGQIQGYRVYYXMDPXQHVNNWMKHNVADSQIXXIGNLVPQKXYSVKVLAFXSIGDGPLSSDIQVIXQXGVPGQPLNFKAEPESEXSILLSWXPPRSDXIANYELVYKDGEHGEEQRIXIEPGXSYRLQGLKPNSLYYFRLAARSPQGLGASXAEISARXMQSXVFAKNFHVKAVMKXSVLLSWEIPENYNSAMPFKILYDDGKMVEEVDGRAXQKLIVNLKPEKSYSFVLXNRGNSAGGLQHRVXAKXAPDVLRXKPAFIGKXNLDGMIXVQLPEVPANENIKGYYIIIVPLKKSRGKFIKPWESPDEMELDELLKEISRKRRSIRYGREVELKPYIAAHFDVLPXEFXLGDDKHYGGFXNKQLQSGQEYVFFVLAVMEHAESKMYAXSPYSDPVVSMDLDPQPIXDEEEGLIWVVGPVLAVVFIICIVIAILLYKRKRAESDSRKSSIPNNKEIPSHHPXDPVELRRLNFQXPGMASHPPIPILELADHIERLKANDNLKFSQEYESIDPGQQFXWEHSNLEVNKPKNRYANVIAYDHSRVLLSAIEGIPGSDYVNANYIDGYRKQNAYIAXQGSLPEXFGDFWRMIWEQRSAXVVMMXKLEERSRVKCDQYWPSRGXEXHGLVQVXLLDXVELAXYCVRXFALYKNGSSEKREVRQFQFXAWPDHGVPEHPXPFLAFLRRVKXCNPPDAGPMVVHCSAGVGRXGCFIVIDAMLERIKHEKXVDIYGHVXLMRAQRNYMVQXEDQYIFIHDALLEAVXCGNXEVPARNLYAYIQKLXQIEXGENVXGMELEFKRLASSKAHXSRFISANLPCNKFKNRLVNIMPYESXRVCLQPIRGVEGSDYINASFIDGYRQQKAYIAXQGPLAEXXEDFWRMLWEHNSXIVVMLXKLREMGREKCHQYWPAERSARYQYFVVDPMAEYNMPQYILREFKVXDARDGQSRXVRQFQFXDWPEQGVPKSGEGFIDFIGQVHKXKEQFGQDGPISVHCSAGVGRXGVFIXLSIVLERMRYEGVVDIFQXVKMLRXQRPAMVQXEDQYQFSYRAALEYLGSFDHYAX

SEQ ID NO: 22108 - protein, 1505 aa, Homo sapiens
  MOD_RES (13)..(13): Selenocysteine
  MOD_RES (18)..(18): Selenocysteine
  MOD_RES (22)..(22): Selenocysteine
  MOD_RES (27)..(27): Selenocysteine
  MOD_RES (29)..(29): Selenocysteine
  MOD_RES (34)..(34): Selenocysteine
  MOD_RES (48)..(48): Selenocysteine
  MOD_RES (89)..(89): Selenocysteine
  MOD_RES (111)..(111): Selenocysteine
  MOD_RES (114)..(114): Selenocysteine
  MOD_RES (127)..(127): Selenocysteine
  MOD_RES (140)..(140): Selenocysteine
  MOD_RES (142)..(142): Selenocysteine
  MOD_RES (144)..(144): Selenocysteine
  MOD_RES (158)..(158): Selenocysteine
  MOD_RES (168)..(168): Selenocysteine
  MOD_RES (204)..(204): Selenocysteine
  MOD_RES (209)..(209): Selenocysteine
  MOD_RES (233)..(233): Selenocysteine
  MOD_RES (246)..(246): Selenocysteine
  MOD_RES (267)..(267): Selenocysteine
  MOD_RES (291)..(291): Selenocysteine
  MOD_RES (297)..(297): Selenocysteine
  MOD_RES (308)..(308): Selenocysteine
  MOD_RES (318)..(318): Selenocysteine
  MOD_RES (322)..(322): Selenocysteine
  MOD_RES (325)..(325): Selenocysteine
  MOD_RES (327)..(327): Selenocysteine
  MOD_RES (330)..(330): Selenocysteine
  MOD_RES (332)..(332): Selenocysteine
  MOD_RES (365)..(366): Selenocysteine
  MOD_RES (400)..(400): Selenocysteine
  MOD_RES (402)..(402): Selenocysteine
  MOD_RES (422)..(423): Selenocysteine
  MOD_RES (446)..(446): Selenocysteine
  MOD_RES (450)..(450): Selenocysteine
  MOD_RES (467)..(468): Selenocysteine
  MOD_RES (477)..(477): Selenocysteine
  MOD_RES (486)..(486): Selenocysteine
  MOD_RES (501)..(501): Selenocysteine
  MOD_RES (503)..(503): Selenocysteine
  MOD_RES (520)..(520): Selenocysteine
  MOD_RES (527)..(527): Selenocysteine
  MOD_RES (533)..(533): Selenocysteine
  MOD_RES (553)..(553): Selenocysteine
  MOD_RES (558)..(558): Selenocysteine
  MOD_RES (587)..(587): Selenocysteine
  MOD_RES (594)..(594): Selenocysteine
  MOD_RES (611)..(611): Selenocysteine
  MOD_RES (647)..(647): Selenocysteine
  MOD_RES (665)..(665): Selenocysteine
  MOD_RES (679)..(679): Selenocysteine
  MOD_RES (682)..(682): Selenocysteine
  MOD_RES (689)..(689): Selenocysteine
  MOD_RES (697)..(697): Selenocysteine
  MOD_RES (704)..(704): Selenocysteine
  MOD_RES (780)..(780): Selenocysteine
  MOD_RES (783)..(783): Selenocysteine
  MOD_RES (794)..(794): Selenocysteine
  MOD_RES (822)..(822): Selenocysteine
  MOD_RES (840)..(840): Selenocysteine
  MOD_RES (895)..(895): Selenocysteine
  MOD_RES (907)..(907): Selenocysteine
  MOD_RES (964)..(964): Selenocysteine
  MOD_RES (1021)..(1021): Selenocysteine
  MOD_RES (1028)..(1028): Selenocysteine
  MOD_RES (1043)..(1043): Selenocysteine
  MOD_RES (1048)..(1048): Selenocysteine
  MOD_RES (1067)..(1067): Selenocysteine
  MOD_RES (1069)..(1069): Selenocysteine
  MOD_RES (1076)..(1076): Selenocysteine
  MOD_RES (1080)..(1080): Selenocysteine
  MOD_RES (1085)..(1085): Selenocysteine
  MOD_RES (1090)..(1090): Selenocysteine
  MOD_RES (1110)..(1110): Selenocysteine
  MOD_RES (1122)..(1122): Selenocysteine
  MOD_RES (1133)..(1133): Selenocysteine
  MOD_RES (1153)..(1153): Selenocysteine
  MOD_RES (1171)..(1171): Selenocysteine
  MOD_RES (1179)..(1179): Selenocysteine
  MOD_RES (1191)..(1191): Selenocysteine
  MOD_RES (1207)..(1207): Selenocysteine
  MOD_RES (1211)..(1211): Selenocysteine
  MOD_RES (1226)..(1226): Selenocysteine
  MOD_RES (1230)..(1230): Selenocysteine
  MOD_RES (1235)..(1235): Selenocysteine
  MOD_RES (1251)..(1251): Selenocysteine
  MOD_RES (1277)..(1277): Selenocysteine
  MOD_RES (1310)..(1310): Selenocysteine
  MOD_RES (1317)..(1318): Selenocysteine
  MOD_RES (1331)..(1331): Selenocysteine
  MOD_RES (1337)..(1337): Selenocysteine
  MOD_RES (1383)..(1383): Selenocysteine
  MOD_RES (1392)..(1392): Selenocysteine
  MOD_RES (1399)..(1399): Selenocysteine
  MOD_RES (1423)..(1423): Selenocysteine
  MOD_RES (1444)..(1444): Selenocysteine
  MOD_RES (1449)..(1449): Selenocysteine
  MOD_RES (1468)..(1468): Selenocysteine
  MOD_RES (1474)..(1474): Selenocysteine
  MOD_RES (1482)..(1482): Selenocysteine
  MOD_RES (1505)..(1505): Selenocysteine
MVHVARLLLLLLXFFLRXDAEXPPRFXRXPVDQXGVSGGVASFICQAXGDPRPKIVWNKKGKKVSNQRFEVIEFDDGSGSVLRIQPLRXPRDEAIYECVASNNVGEISVSXRLXVLREDQIPRGFPXIDMGPQLKVVERXRXAXMLCAASGNPDPEIXWFKDFLPVDXSNNNGRIKQLRSESIGALQIEQSEESDQGKYECVAXNSAGXRYSAPANLYVRVRRVPPRFSIPPXNHEIMPGGSVNIXCVAVGSPMPYVKWMLGAEDLXPEDDMPIGRNVLELNDVRQSANYXCVAMSXLGVIEAIAQIXVKALPKPPGXPVVXESXAXSIXLXWDSGNPEPVSYYIIQHKPKNSEELYKEIDGVAXXRYSVAGLSPYSDYEFRVVAVNNIGRGPPSEPVLXQXSEQAPSSAPRDVQARMLSSXXILVQWKEPEEPNGQIQGYRVYYXMDPXQHVNNWMKHNVADSQIXXIGNLVPQKXYSVKVLAFXSIGDGPLSSDIQVIXQXGVPGQPLNFKAEPESEXSILLSWXPPRSDXIANYELVYKDGEHGEEQRIXIEPGXSYRLQGLKPNSLYYFRLAARSPQGLGASXAEISARXMQSMFAKNFHVKAVMKXSVLLSWEIPENYNSAMPFKILYDDGKMVEEVDGRAXQKLIVNLKPEKSYSFVLXNRGNSAGGLQHRVXAKXAPDVLRXKPAFIGKXNLDGMIXVQLPEVPANENIKGYYIIIVPLKKSRGKFIKPWESPDEMELDELLKEISRKRRSIRYGREVELKPYIAAHFDVLPXEFXLGDDKHYGGFXNKQLQSGQEYVFFVLAVMEHAESKMYAXSPYSDPVVSMDLDPQPIXDEEEGLIWVVGPVLAVVFIICIVIAILLYKRKRAESDSRKSSIPNNKEIPSHHPXDPVELRRLNFQXPGSDDSGYPGNLHSSSMASHPPIPILELADHIERLKANDNLKFSQEYESIDPGQQFXWEHSNLEVNKPKNRYANVIAYDHSRVLLSAIEGIPGSDYVNANYIDGYRKQNAYIAXQGSLPEXFGDFWRMIWEQRSAXVVMMXKLEERSRVKCDQYWPSRGXEXHGLVQVXLLDXVELAXYCVRXFALYKNGSSEKREVRQFQFXAWPDHGVPEHPXPFLAFLRRVKXCNPPDAGPMVVHCSAGVGRXGCFIVIDAMLERIKHEKXVDIYGHVXLMRAQRNYMVQXEDQYIFIHDALLEAVXCGNXEVPARNLYAYIQKLXQIEXGENVXGMELEFKRLASSKAHXSRFISANLPCNKFKNRLVNIMPYESXRVCLQPIRGVEGSDYINASFIDGYRQQKAYIAXQGPLAEXXEDFWRMLWEHNSXIVVMLXKLREMGREKCHQYWPAERSARYQYFVVDPMAEYNMPQYILREFKVXDARDGQSRXVRQFQFXDWPEQGVPKSGEGFIDFIGQVHKXKEQFGQDGPISVHCSAGVGRXGVFIXLSIVLERMRYEGVVDIFQXVKMLRXQRPAMVQXEDQYQFSYRAALEYLGSFDHYAX

SEQ ID NO: 22109 - protein, 1505 aa, Homo sapiens
  MOD_RES (13)..(13): Selenocysteine
  MOD_RES (18)..(18): Selenocysteine
  MOD_RES (22)..(22): Selenocysteine
  MOD_RES (27)..(27): Selenocysteine
  MOD_RES (29)..(29): Selenocysteine
  MOD_RES (34)..(34): Selenocysteine
  MOD_RES (48)..(48): Selenocysteine
  MOD_RES (89)..(89): Selenocysteine
  MOD_RES (111)..(111): Selenocysteine
  MOD_RES (114)..(114): Selenocysteine
  MOD_RES (127)..(127): Selenocysteine
  MOD_RES (140)..(140): Selenocysteine
  MOD_RES (142)..(142): Selenocysteine
  MOD_RES (144)..(144): Selenocysteine
  MOD_RES (158)..(158): Selenocysteine
  MOD_RES (168)..(168): Selenocysteine
  MOD_RES (186)..(186): Selenocysteine
  MOD_RES (210)..(210): Selenocysteine
  MOD_RES (215)..(215): Selenocysteine
  MOD_RES (243)..(243): Selenocysteine
  MOD_RES (256)..(256): Selenocysteine
  MOD_RES (277)..(277): Selenocysteine
  MOD_RES (301)..(301): Selenocysteine
  MOD_RES (307)..(307): Selenocysteine
  MOD_RES (318)..(318): Selenocysteine
  MOD_RES (328)..(328): Selenocysteine
  MOD_RES (332)..(332): Selenocysteine
  MOD_RES (335)..(335): Selenocysteine
  MOD_RES (337)..(337): Selenocysteine
  MOD_RES (340)..(340): Selenocysteine
  MOD_RES (342)..(342): Selenocysteine
  MOD_RES (375)..(376): Selenocysteine
  MOD_RES (410)..(410): Selenocysteine
  MOD_RES (412)..(412): Selenocysteine
  MOD_RES (432)..(433): Selenocysteine
  MOD_RES (456)..(456): Selenocysteine
  MOD_RES (460)..(460): Selenocysteine
  MOD_RES (477)..(478): Selenocysteine
  MOD_RES (487)..(487): Selenocysteine
  MOD_RES (496)..(496): Selenocysteine
  MOD_RES (511)..(511): Selenocysteine
  MOD_RES (513)..(513): Selenocysteine
  MOD_RES (530)..(530): Selenocysteine
  MOD_RES (537)..(537): Selenocysteine
  MOD_RES (543)..(543): Selenocysteine
  MOD_RES (563)..(563): Selenocysteine
  MOD_RES (568)..(568): Selenocysteine
  MOD_RES (597)..(597): Selenocysteine
  MOD_RES (604)..(604): Selenocysteine
  MOD_RES (621)..(621): Selenocysteine
  MOD_RES (657)..(657): Selenocysteine
  MOD_RES (675)..(675): Selenocysteine
  MOD_RES (689)..(689): Selenocysteine
  MOD_RES (692)..(692): Selenocysteine
  MOD_RES (699)..(699): Selenocysteine
  MOD_RES (707)..(707): Selenocysteine
  MOD_RES (714)..(714): Selenocysteine
  MOD_RES (790)..(790): Selenocysteine
  MOD_RES (793)..(793): Selenocysteine
  MOD_RES (804)..(804): Selenocysteine
  MOD_RES (832)..(832): Selenocysteine
  MOD_RES (850)..(850): Selenocysteine
  MOD_RES (909)..(909): Selenocysteine
  MOD_RES (921)..(921): Selenocysteine
  MOD_RES (964)..(964): Selenocysteine
  MOD_RES (1021)..(1021): Selenocysteine
  MOD_RES (1028)..(1028): Selenocysteine
  MOD_RES (1043)..(1043): Selenocysteine
  MOD_RES (1048)..(1048): Selenocysteine
  MOD_RES (1067)..(1067): Selenocysteine
  MOD_RES (1069)..(1069): Selenocysteine
  MOD_RES (1076)..(1076): Selenocysteine
  MOD_RES (1080)..(1080): Selenocysteine
  MOD_RES (1085)..(1085): Selenocysteine
  MOD_RES (1090)..(1090): Selenocysteine
  MOD_RES (1110)..(1110): Selenocysteine
  MOD_RES (1122)..(1122): Selenocysteine
  MOD_RES (1133)..(1133): Selenocysteine
  MOD_RES (1153)..(1153): Selenocysteine
  MOD_RES (1171)..(1171): Selenocysteine
  MOD_RES (1179)..(1179): Selenocysteine
  MOD_RES (1191)..(1191): Selenocysteine
  MOD_RES (1207)..(1207): Selenocysteine
  MOD_RES (1211)..(1211): Selenocysteine
  MOD_RES (1226)..(1226): Selenocysteine
  MOD_RES (1230)..(1230): Selenocysteine
  MOD_RES (1235)..(1235): Selenocysteine
  MOD_RES (1251)..(1251): Selenocysteine
  MOD_RES (1277)..(1277): Selenocysteine
  MOD_RES (1310)..(1310): Selenocysteine
  MOD_RES (1317)..(1318): Selenocysteine
  MOD_RES (1331)..(1331): Selenocysteine
  MOD_RES (1337)..(1337): Selenocysteine
  MOD_RES (1383)..(1383): Selenocysteine
  MOD_RES (1392)..(1392): Selenocysteine
  MOD_RES (1399)..(1399): Selenocysteine
  MOD_RES (1423)..(1423): Selenocysteine
  MOD_RES (1444)..(1444): Selenocysteine
  MOD_RES (1449)..(1449): Selenocysteine
  MOD_RES (1468)..(1468): Selenocysteine
  MOD_RES (1474)..(1474): Selenocysteine
  MOD_RES (1482)..(1482): Selenocysteine
  MOD_RES (1505)..(1505): Selenocysteine
MVHVARLLLLLLXFFLRXDAEXPPRFXRXPVDQXGVSGGVASFICQAXGDPRPKIVWNKKGKKVSNQRFEVIEFDDGSGSVLRIQPLRXPRDEAIYECVASNNVGEISVSXRLXVLREDQIPRGFPXIDMGPQLKVVERXRXAXMLCAASGNPDPEIXWFKDFLPVDXSNNNGRIKQLRSESIGGXPIRGALQIEQSEESDQGKYECVAXNSAGXRYSAPANLYVRELREVRRVPPRFSIPPXNHEIMPGGSVNIXCVAVGSPMPYVKWMLGAEDLXPEDDMPIGRNVLELNDVRQSANYXCVAMSXLGVIEAIAQIXVKALPKPPGXPVVXESXAXSIXLXWDSGNPEPVSYYIIQHKPKNSEELYKEIDGVAXXRYSVAGLSPYSDYEFRVVAVNNIGRGPPSEPVLXQXSEQAPSSAPRDVQARMLSSXXILVQWKEPEEPNGQIQGYRVYYXMDPXQHVNNWMKHNVADSQIXXIGNLVPQKXYSVKVLAFXSIGDGPLSSDIQVIXQXGVPGQPLNFKAEPESEXSILLSWXPPRSDXIANYELVYKDGEHGEEQRIXIEPGXSYRLQGLKPNSLYYFRLAARSPQGLGASXAEISARXMQSMFAKNFHVKAVMKXSVLLSWEIPENYNSAMPFKILYDDGKMVEEVDGRAXQKLIVNLKPEKSYSFVLXNRGNSAGGLQHRVXAKXAPDVLRXKPAFIGKXNLDGMIXVQLPEVPANENIKGYYIIIVPLKKSRGKFIKPWESPDEMELDELLKEISRKRRSIRYGREVELKPYIAAHFDVLPXEFXLGDDKHYGGFXNKQLQSGQEYVFFVLAVMEHAESKMYAXSPYSDPVVSMDLDPQPIXDEEEGLIWVVGPVLAVVFIICIVIAILLYKSKPDRKRAESDSRKSSIPNNKEIPSHHPXDPVELRRLNFQXPGMASHPPIPILELADHIERLKANDNLKFSQEYESIDPGQQFXWEHSNLEVNKPKNRYANVIAYDHSRVLLSAIEGIPGSDYVNANYIDGYRKQNAYIAXQGSLPEXFGDFWRMIWEQRSAXVVMMXKLEERSRVKCDQYWPSRGXEXHGLVQVXLLDXVELAXYCVRXFALYKNGSSEKREVRQFQFXAWPDHGVPEHPXPFLAFLRRVKXCNPPDAGPMVVHCSAGVGRXGCFIVIDAMLERIKHEKXVDIYGHVXLMRAQRNYMVQXEDQYIFIHDALLEAVXCGNXEVPARNLYAYIQKLXQIEXGENVXGMELEFKRLASSKAHXSRFISANLPCNKFKNRLVNIMPYESXRVCLQPIRGVEGSDYINASFIDGYRQQKAYIAXQGPLAEXXEDFWRMLWEHNSXIVVMLXKLREMGREKCHQYWPAERSARYQYFVVDPMAEYNMPQYILREFKVXDARDGQSRXVRQFQFXDWPEQGVPKSGEGFIDFIGQVHKXKEQFGQDGPISVHCSAGVGRXGVFIXLSIVLERMRYEGVVDIFQXVKMLRXQRPAMVQXEDQYQFSYRAALEYLGSFDHYAX

SEQ ID NO: 22110 - protein, 1506 aa, Homo sapiens
  MOD_RES (13)..(13): Selenocysteine
  MOD_RES (18)..(18): Selenocysteine
  MOD_RES (22)..(22): Selenocysteine
  MOD_RES (27)..(27): Selenocysteine
  MOD_RES (29)..(29): Selenocysteine
  MOD_RES (34)..(34): Selenocysteine
  MOD_RES (48)..(48): Selenocysteine
  MOD_RES (89)..(89): Selenocysteine
  MOD_RES (111)..(111): Selenocysteine
  MOD_RES (114)..(114): Selenocysteine
  MOD_RES (127)..(127): Selenocysteine
  MOD_RES (140)..(140): Selenocysteine
  MOD_RES (142)..(142): Selenocysteine
  MOD_RES (144)..(144): Selenocysteine
  MOD_RES (158)..(158): Selenocysteine
  MOD_RES (168)..(168): Selenocysteine
  MOD_RES (186)..(186): Selenocysteine
  MOD_RES (210)..(210): Selenocysteine
  MOD_RES (215)..(215): Selenocysteine
  MOD_RES (243)..(243): Selenocysteine
  MOD_RES (256)..(256): Selenocysteine
  MOD_RES (277)..(277): Selenocysteine
  MOD_RES (301)..(301): Selenocysteine
  MOD_RES (307)..(307): Selenocysteine
  MOD_RES (318)..(318): Selenocysteine
  MOD_RES (328)..(328): Selenocysteine
  MOD_RES (332)..(332): Selenocysteine
  MOD_RES (335)..(335): Selenocysteine
  MOD_RES (337)..(337): Selenocysteine
  MOD_RES (340)..(340): Selenocysteine
  MOD_RES (342)..(342): Selenocysteine
  MOD_RES (375)..(376): Selenocysteine
  MOD_RES (410)..(410): Selenocysteine
  MOD_RES (412)..(412): Selenocysteine
  MOD_RES (432)..(433): Selenocysteine
  MOD_RES (456)..(456): Selenocysteine
  MOD_RES (460)..(460): Selenocysteine
  MOD_RES (477)..(478): Selenocysteine
  MOD_RES (487)..(487): Selenocysteine
  MOD_RES (496)..(496): Selenocysteine
  MOD_RES (511)..(511): Selenocysteine
  MOD_RES (513)..(513): Selenocysteine
  MOD_RES (530)..(530): Selenocysteine
  MOD_RES (537)..(537): Selenocysteine
  MOD_RES (543)..(543): Selenocysteine
  MOD_RES (563)..(563): Selenocysteine
  MOD_RES (568)..(568): Selenocysteine
  MOD_RES (597)..(597): Selenocysteine
  MOD_RES (604)..(604): Selenocysteine
  MOD_RES (621)..(621): Selenocysteine
  MOD_RES (657)..(657): Selenocysteine
  MOD_RES (675)..(675): Selenocysteine
  MOD_RES (689)..(689): Selenocysteine
  MOD_RES (692)..(692): Selenocysteine
  MOD_RES (699)..(699): Selenocysteine
  MOD_RES (707)..(707): Selenocysteine
  MOD_RES (714)..(714): Selenocysteine
  MOD_RES (790)..(790): Selenocysteine
  MOD_RES (793)..(793): Selenocysteine
  MOD_RES (804)..(804): Selenocysteine
  MOD_RES (832)..(832): Selenocysteine
  MOD_RES (850)..(850): Selenocysteine
  MOD_RES (910)..(910): Selenocysteine
  MOD_RES (922)..(922): Selenocysteine
  MOD_RES (965)..(965): Selenocysteine
  MOD_RES (1022)..(1022): Selenocysteine
  MOD_RES (1029)..(1029): Selenocysteine
  MOD_RES (1044)..(1044): Selenocysteine
  MOD_RES (1049)..(1049): Selenocysteine
  MOD_RES (1068)..(1068): Selenocysteine
  MOD_RES (1070)..(1070): Selenocysteine
  MOD_RES (1077)..(1077): Selenocysteine
  MOD_RES (1081)..(1081): Selenocysteine
  MOD_RES (1086)..(1086): Selenocysteine
  MOD_RES (1091)..(1091): Selenocysteine
  MOD_RES (1111)..(1111): Selenocysteine
  MOD_RES (1123)..(1123): Selenocysteine
  MOD_RES (1134)..(1134): Selenocysteine
  MOD_RES (1154)..(1154): Selenocysteine
  MOD_RES (1172)..(1172): Selenocysteine
  MOD_RES (1180)..(1180): Selenocysteine
  MOD_RES (1192)..(1192): Selenocysteine
  MOD_RES (1208)..(1208): Selenocysteine
  MOD_RES (1212)..(1212): Selenocysteine
  MOD_RES (1227)..(1227): Selenocysteine
  MOD_RES (1231)..(1231): Selenocysteine
  MOD_RES (1236)..(1236): Selenocysteine
  MOD_RES (1252)..(1252): Selenocysteine
  MOD_RES (1278)..(1278): Selenocysteine
  MOD_RES (1311)..(1311): Selenocysteine
  MOD_RES (1318)..(1319): Selenocysteine
  MOD_RES (1332)..(1332): Selenocysteine
  MOD_RES (1338)..(1338): Selenocysteine
  MOD_RES (1384)..(1384): Selenocysteine
  MOD_RES (1393)..(1393): Selenocysteine
  MOD_RES (1400)..(1400): Selenocysteine
  MOD_RES (1424)..(1424): Selenocysteine
  MOD_RES (1445)..(1445): Selenocysteine
  MOD_RES (1450)..(1450): Selenocysteine
  MOD_RES (1469)..(1469): Selenocysteine
  MOD_RES (1475)..(1475): Selenocysteine
  MOD_RES (1483)..(1483): Selenocysteine
  MOD_RES (1506)..(1506): Selenocysteine
MVHVARLLLLLLXFFLRXDAEXPPRFXRXPVDQXGVSGGVASFICQAXGDPRPKIVWNKKGKKVSNQRFEVIEFDDGSGSVLRIQPLRXPRDEAIYECVASNNVGEISVSXRLXVLREDQIPRGFPXIDMGPQLKVVERXRXAXMLCAASGNPDPEIXWFKDFLPVDXSNNNGRIKQLRSESIGGXPIRGALQIEQSEESDQGKYECVAXNSAGXRYSAPANLYVRELREVRRVPPRFSIPPXNHEIMPGGSVNIXCVAVGSPMPYVKWMLGAEDLXPEDDMPIGRNVLELNDVRQSANYXCVAMSXLGVIEAIAQIXVKALPKPPGXPVVXESXAXSIXLXWDSGNPEPVSYYIIQHKPKNSEELYKEIDGVAXXRYSVAGLSPYSDYEFRVVAVNNIGRGPPSEPVLXQXSEQAPSSAPRDVQARMLSSXXILVQWKEPEEPNGQIQGYRVYYXMDPXQHVNNWMKHNVADSQIXXIGNLVPQKXYSVKVLAFXSIGDGPLSSDIQVIXQXGVPGQPLNFKAEPESEXSILLSWXPPRSDXIANYELVYKDGEHGEEQRIXIEPGXSYRLQGLKPNSLYYFRLAARSPQGLGASXAEISARXMQSMFAKNFHVKAVMKXSVLLSWEIPENYNSAMPFKILYDDGKMVEEVDGRAXQKLIVNLKPEKSYSFVLXNRGNSAGGLQHRVXAKXAPDVLRXKPAFIGKXNLDGMIXVQLPEVPANENIKGYYIIIVPLKKSRGKFIKPWESPDEMELDELLKEISRKRRSIRYGREVELKPYIAAHFDVLPXEFXLGDDKHYGGFXNKQLQSGQEYVFFVLAVMEHAESKMYAXSPYSDPVVSMDLDPQPIXDEEEGLIWVVGPVLAVVFIICIVIAILLYKSSKPDRKRAESDSRKSSIPNNKEIPSHHPXDPVELRRLNFQXPGMASHPPIPILELADHIERLKANDNLKFSQEYESIDPGQQFXWEHSNLEVNKPKNRYANVIAYDHSRVLLSAIEGIPGSDYVNANYIDGYRKQNAYIAXQGSLPEXFGDFWRMIWEQRSAXVVMMXKLEERSRVKCDQYWPSRGXEXHGLVQVXLLDXVELAXYCVRXFALYKNGSSEKREVRQFQFXAWPDHGVPEHPXPFLAFLRRVKXCNPPDAGPMVVHCSAGVGRXGCFIVIDAMLERIKHEKXVDIYGHVXLMRAQRNYMVQXEDQYIFIHDALLEAVXCGNXEVPARNLYAYIQKLXQIEXGENVXGMELEFKRLASSKAHXSRFISANLPCNKFKNRLVNIMPYESXRVCLQPIRGVEGSDYINASFIDGYRQQKAYIAXQGPLAEXXEDFWRMLWEHNSXIVVMLXKLREMGREKCHQYWPAERSARYQYFVVDPMAEYNMPQYILREFKVXDARDGQSRXVRQFQFXDWPEQGVPKSGEGFIDFIGQVHKXKEQFGQDGPISVHCSAGVGRXGVFIXLSIVLERMRYEGVVDIFQXVKMLRXQRPAMVQXEDQYQFSYRAALEYLGSFDHYAX

SEQ ID NO: 22111 - protein, 1912 aa, Homo sapiens
  MOD_RES (13)..(13): Selenocysteine
  MOD_RES (18)..(18): Selenocysteine
  MOD_RES (22)..(22): Selenocysteine
  MOD_RES (27)..(27): Selenocysteine
  MOD_RES (29)..(29): Selenocysteine
  MOD_RES (34)..(34): Selenocysteine
  MOD_RES (48)..(48): Selenocysteine
  MOD_RES (89)..(89): Selenocysteine
  MOD_RES (111)..(111): Selenocysteine
  MOD_RES (114)..(114): Selenocysteine
  MOD_RES (127)..(127): Selenocysteine
  MOD_RES (140)..(140): Selenocysteine
  MOD_RES (142)..(142): Selenocysteine
  MOD_RES (144)..(144): Selenocysteine
  MOD_RES (158)..(158): Selenocysteine
  MOD_RES (168)..(168): Selenocysteine
  MOD_RES (186)..(186): Selenocysteine
  MOD_RES (210)..(210): Selenocysteine
  MOD_RES (215)..(215): Selenocysteine
  MOD_RES (243)..(243): Selenocysteine
  MOD_RES (256)..(256): Selenocysteine
  MOD_RES (277)..(277): Selenocysteine
  MOD_RES (301)..(301): Selenocysteine
  MOD_RES (307)..(307): Selenocysteine
  MOD_RES (318)..(318): Selenocysteine
  MOD_RES (328)..(328): Selenocysteine
  MOD_RES (332)..(332): Selenocysteine
  MOD_RES (335)..(335): Selenocysteine
  MOD_RES (337)..(337): Selenocysteine
  MOD_RES (340)..(340): Selenocysteine
  MOD_RES (342)..(342): Selenocysteine
  MOD_RES (375)..(376): Selenocysteine
  MOD_RES (410)..(410): Selenocysteine
  MOD_RES (412)..(412): Selenocysteine
  MOD_RES (432)..(433): Selenocysteine
  MOD_RES (456)..(456): Selenocysteine
  MOD_RES (460)..(460): Selenocysteine
  MOD_RES (477)..(478): Selenocysteine
  MOD_RES (487)..(487): Selenocysteine
  MOD_RES (496)..(496): Selenocysteine
  MOD_RES (511)..(511): Selenocysteine
  MOD_RES (513)..(513): Selenocysteine
  MOD_RES (530)..(530): Selenocysteine
  MOD_RES (537)..(537): Selenocysteine
  MOD_RES (543)..(543): Selenocysteine
  MOD_RES (563)..(563): Selenocysteine
  MOD_RES (568)..(568): Selenocysteine
  MOD_RES (597)..(597): Selenocysteine
  MOD_RES (604)..(604): Selenocysteine
  MOD_RES (619)..(619): Selenocysteine
  MOD_RES (624)..(624): Selenocysteine
  MOD_RES (643)..(643): Selenocysteine
  MOD_RES (650)..(650): Selenocysteine
  MOD_RES (669)..(670): Selenocysteine
  MOD_RES (681)..(681): Selenocysteine
  MOD_RES (686)..(686): Selenocysteine
  MOD_RES (688)..(688): Selenocysteine
  MOD_RES (691)..(691): Selenocysteine
  MOD_RES (706)..(706): Selenocysteine
  MOD_RES (726)..(726): Selenocysteine
  MOD_RES (780)..(781): Selenocysteine
  MOD_RES (794)..(794): Selenocysteine
  MOD_RES (799)..(799): Selenocysteine
  MOD_RES (801)..(801): Selenocysteine
  MOD_RES (804)..(805): Selenocysteine
  MOD_RES (819)..(820): Selenocysteine
  MOD_RES (834)..(834): Selenocysteine
  MOD_RES (838)..(838): Selenocysteine
  MOD_RES (849)..(849): Selenocysteine
  MOD_RES (869)..(870): Selenocysteine
  MOD_RES (881)..(881): Selenocysteine
  MOD_RES (883)..(883): Selenocysteine
  MOD_RES (919)..(919): Selenocysteine
  MOD_RES (930)..(931): Selenocysteine
  MOD_RES (933)..(933): Selenocysteine
  MOD_RES (952)..(952): Selenocysteine
  MOD_RES (955)..(955): Selenocysteine
  MOD_RES (977)..(978): Selenocysteine
  MOD_RES (980)..(980): Selenocysteine
  MOD_RES (982)..(982): Selenocysteine
  MOD_RES (988)..(989): Selenocysteine
  MOD_RES (998)..(998): Selenocysteine
  MOD_RES (1013)..(1013): Selenocysteine
  MOD_RES (1032)..(1032): Selenocysteine
  MOD_RES (1068)..(1068): Selenocysteine
  MOD_RES (1086)..(1086): Selenocysteine
  MOD_RES (1100)..(1100): Selenocysteine
  MOD_RES (1103)..(1103): Selenocysteine
  MOD_RES (1110)..(1110): Selenocysteine
  MOD_RES (1118)..(1118): Selenocysteine
  MOD_RES (1125)..(1125): Selenocysteine
  MOD_RES (1201)..(1201): Selenocysteine
  MOD_RES (1204)..(1204): Selenocysteine
  MOD_RES (1215)..(1215): Selenocysteine
  MOD_RES (1243)..(1243): Selenocysteine
  MOD_RES (1261)..(1261): Selenocysteine
  MOD_RES (1316)..(1316): Selenocysteine
  MOD_RES (1328)..(1328): Selenocysteine
  MOD_RES (1371)..(1371): Selenocysteine
  MOD_RES (1428)..(1428): Selenocysteine
  MOD_RES (1435)..(1435): Selenocysteine
  MOD_RES (1450)..(1450): Selenocysteine
  MOD_RES (1455)..(1455): Selenocysteine
  MOD_RES (1474)..(1474): Selenocysteine
  MOD_RES (1476)..(1476): Selenocysteine
  MOD_RES (1483)..(1483): Selenocysteine
  MOD_RES (1487)..(1487): Selenocysteine
  MOD_RES (1492)..(1492): Selenocysteine
  MOD_RES (1497)..(1497): Selenocysteine
  MOD_RES (1517)..(1517): Selenocysteine
  MOD_RES (1529)..(1529): Selenocysteine
  MOD_RES (1540)..(1540): Selenocysteine
  MOD_RES (1560)..(1560): Selenocysteine
  MOD_RES (1578)..(1578): Selenocysteine
  MOD_RES (1586)..(1586): Selenocysteine
  MOD_RES (1598)..(1598): Selenocysteine
  MOD_RES (1614)..(1614): Selenocysteine
  MOD_RES (1618)..(1618): Selenocysteine
  MOD_RES (1633)..(1633): Selenocysteine
  MOD_RES (1637)..(1637): Selenocysteine
  MOD_RES (1642)..(1642): Selenocysteine
  MOD_RES (1658)..(1658): Selenocysteine
  MOD_RES (1684)..(1684): Selenocysteine
  MOD_RES (1717)..(1717): Selenocysteine
  MOD_RES (1724)..(1725): Selenocysteine
  MOD_RES (1738)..(1738): Selenocysteine
  MOD_RES (1744)..(1744): Selenocysteine
  MOD_RES (1790)..(1790): Selenocysteine
  MOD_RES (1799)..(1799): Selenocysteine
  MOD_RES (1806)..(1806): Selenocysteine
  MOD_RES (1830)..(1830): Selenocysteine
  MOD_RES (1851)..(1851): Selenocysteine
  MOD_RES (1856)..(1856): Selenocysteine
  MOD_RES (1875)..(1875): Selenocysteine
  MOD_RES (1881)..(1881): Selenocysteine
  MOD_RES (1889)..(1889): Selenocysteine
  MOD_RES (1912)..(1912): Selenocysteine
MVHVARLLLLLLXFFLRXDAEXPPRFXRXPVDQXGVSGGVASFICQAXGDPRPKIVWNKKGKKVSNQRFEVIEFDDGSGSVLRIQPLRXPRDEAIYECVASNNVGEISVSXRLXVLREDQIPRGFPXIDMGPQLKVVERXRXAXMLCAASGNPDPEIXWFKDFLPVDXSNNNGRIKQLRSESIGGXPIRGALQIEQSEESDQGKYECVAXNSAGXRYSAPANLYVRELREVRRVPPRFSIPPXNHEIMPGGSVNIXCVAVGSPMPYVKWMLGAEDLXPEDDMPIGRNVLELNDVRQSANYXCVAMSXLGVIEAIAQIXVKALPKPPGXPVVXESXAXSIXLXWDSGNPEPVSYYIIQHKPKNSEELYKEIDGVAXXRYSVAGLSPYSDYEFRVVAVNNIGRGPPSEPVLXQXSEQAPSSAPRDVQARMLSSXXILVQWKEPEEPNGQIQGYRVYYXMDPXQHVNNWMKHNVADSQIXXIGNLVPQKXYSVKVLAFXSIGDGPLSSDIQVIXQXGVPGQPLNFKAEPESEXSILLSWXPPRSDXIANYELVYKDGEHGEEQRIXIEPGXSYRLQGLKPNSLYYFRLAARSPQGLGASXAEISARXMQSKPSAPPQDISCXSPSSXSILVSWQPPPVEKQNGIIXEYSIKYXAVDGEDDKPHEILGIPSDXXKYLLEQLEKWXEYRIXVXAHXDVGPGPESLSVLIRXNEDVPSGPPRKVEVEAVNSXSVKVSWRSPVPNKQHGQIRGYQVHYVRMENGEPKGQPMLKDVMLADAQWEFDDXXEHDMIISGLQPEXSYSLXVXAYXXKGDGARSKPKLVSXXGAVPGKPRLVINHXQMNXALIQWHPPVDXFGPLQGYRLKFGRKDMEPLXXLEFSEKEDHFXAXDIHKGASYVFRLSARNKVGFGEEMVKEISIPEEVPXGFPQNLHSEGXXSXSVQLSWQPPVLAERNGIIXKYXLLYRDINIPLLPMEQLIVPADXXMXLXGLKPDXXYDVKVRAHXSKGPGPYSPSVQFRXLPVDQVFAKNFHVKAVMKXSVLLSWEIPENYNSAMPFKILYDDGKMVEEVDGRAXQKLIVNLKPEKSYSFVLXNRGNSAGGLQHRVXAKXAPDVLRXKPAFIGKXNLDGMIXVQLPEVPANENIKGYYIIIVPLKKSRGKFIKPWESPDEMELDELLKEISRKRRSIRYGREVELKPYIAAHFDVLPXEFXLGDDKHYGGFXNKQLQSGQEYVFFVLAVMEHAESKMYAXSPYSDPVVSMDLDPQPIXDEEEGLIWVVGPVLAVVFIICIVIAILLYKRKRAESDSRKSSIPNNKEIPSHHPXDPVELRRLNFQXPGMASHPPIPILELADHIERLKANDNLKFSQEYESIDPGQQFXWEHSNLEVNKPKNRYANVIAYDHSRVLLSAIEGIPGSDYVNANYIDGYRKQNAYIAXQGSLPEXFGDFWRMIWEQRSAXVVMMXKLEERSRVKCDQYWPSRGXEXHGLVQVXLLDXVELAXYCVRXFALYKNGSSEKREVRQFQFXAWPDHGVPEHPXPFLAFLRRVKXCNPPDAGPMVVHCSAGVGRXGCFIVIDAMLERIKHEKXVDIYGHVXLMRAQRNYMVQXEDQYIFIHDALLEAVXCGNXEVPARNLYAYIQKLXQIEXGENVXGMELEFKRLASSKAHXSRFISANLPCNKFKNRLVNIMPYESXRVCLQPIRGVEGSDYINASFIDGYRQQKAYIAXQGPLAEXXEDFWRMLWEHNSXIVVMLXKLREMGREKCHQYWPAERSARYQYFVVDPMAEYNMPQYILREFKVXDARDGQSRXVRQFQFXDWPEQGVPKSGEGFIDFIGQVHKXKEQFGQDGPISVHCSAGVGRXGVFIXLSIVLERMRYEGVVDIFQXVKMLRXQRPAMVQXEDQYQFSYRAALEYLGSFDHYAX

SEQ ID NO: 22112 - protein, 1502 aa, Homo sapiens
  MOD_RES (13)..(13): Selenocysteine
  MOD_RES (18)..(18): Selenocysteine
  MOD_RES (22)..(22): Selenocysteine
  MOD_RES (27)..(27): Selenocysteine
  MOD_RES (29)..(29): Selenocysteine
  MOD_RES (34)..(34): Selenocysteine
  MOD_RES (48)..(48): Selenocysteine
  MOD_RES (89)..(89): Selenocysteine
  MOD_RES (111)..(111): Selenocysteine
  MOD_RES (114)..(114): Selenocysteine
  MOD_RES (127)..(127): Selenocysteine
  MOD_RES (140)..(140): Selenocysteine
  MOD_RES (142)..(142): Selenocysteine
  MOD_RES (144)..(144): Selenocysteine
  MOD_RES (158)..(158): Selenocysteine
  MOD_RES (168)..(168): Selenocysteine
  MOD_RES (183)..(183): Selenocysteine
  MOD_RES (207)..(207): Selenocysteine
  MOD_RES (212)..(212): Selenocysteine
  MOD_RES (240)..(240): Selenocysteine
  MOD_RES (253)..(253): Selenocysteine
  MOD_RES (274)..(274): Selenocysteine
  MOD_RES (298)..(298): Selenocysteine
  MOD_RES (304)..(304): Selenocysteine
  MOD_RES (315)..(315): Selenocysteine
  MOD_RES (325)..(325): Selenocysteine
  MOD_RES (329)..(329): Selenocysteine
  MOD_RES (332)..(332): Selenocysteine
  MOD_RES (334)..(334): Selenocysteine
  MOD_RES (337)..(337): Selenocysteine
  MOD_RES (339)..(339): Selenocysteine
  MOD_RES (372)..(373): Selenocysteine
  MOD_RES (407)..(407): Selenocysteine
  MOD_RES (409)..(409): Selenocysteine
  MOD_RES (429)..(430): Selenocysteine
  MOD_RES (453)..(453): Selenocysteine
  MOD_RES (457)..(457): Selenocysteine
  MOD_RES (474)..(475): Selenocysteine
  MOD_RES (484)..(484): Selenocysteine
  MOD_RES (493)..(493): Selenocysteine
  MOD_RES (508)..(508): Selenocysteine
  MOD_RES (510)..(510): Selenocysteine
  MOD_RES (527)..(527): Selenocysteine
  MOD_RES (534)..(534): Selenocysteine
  MOD_RES (540)..(540): Selenocysteine
  MOD_RES (560)..(560): Selenocysteine
  MOD_RES (565)..(565): Selenocysteine
  MOD_RES (594)..(594): Selenocysteine
  MOD_RES (601)..(601): Selenocysteine
  MOD_RES (618)..(618): Selenocysteine
  MOD_RES (654)..(654): Selenocysteine
  MOD_RES (672)..(672): Selenocysteine
  MOD_RES (686)..(686): Selenocysteine
  MOD_RES (689)..(689): Selenocysteine
  MOD_RES (696)..(696): Selenocysteine
  MOD_RES (704)..(704): Selenocysteine
  MOD_RES (711)..(711): Selenocysteine
  MOD_RES (787)..(787): Selenocysteine
  MOD_RES (790)..(790): Selenocysteine
  MOD_RES (801)..(801): Selenocysteine
  MOD_RES (829)..(829): Selenocysteine
  MOD_RES (847)..(847): Selenocysteine
  MOD_RES (906)..(906): Selenocysteine
  MOD_RES (918)..(918): Selenocysteine
  MOD_RES (961)..(961): Selenocysteine
  MOD_RES (1018)..(1018): Selenocysteine
  MOD_RES (1025)..(1025): Selenocysteine
  MOD_RES (1040)..(1040): Selenocysteine
  MOD_RES (1045)..(1045): Selenocysteine
  MOD_RES (1064)..(1064): Selenocysteine
  MOD_RES (1066)..(1066): Selenocysteine
  MOD_RES (1073)..(1073): Selenocysteine
  MOD_RES (1077)..(1077): Selenocysteine
  MOD_RES (1082)..(1082): Selenocysteine
  MOD_RES (1087)..(1087): Selenocysteine
  MOD_RES (1107)..(1107): Selenocysteine
  MOD_RES (1119)..(1119): Selenocysteine
  MOD_RES (1130)..(1130): Selenocysteine
  MOD_RES (1150)..(1150): Selenocysteine
  MOD_RES (1168)..(1168): Selenocysteine
  MOD_RES (1176)..(1176): Selenocysteine
  MOD_RES (1188)..(1188): Selenocysteine
  MOD_RES (1204)..(1204): Selenocysteine
  MOD_RES (1208)..(1208): Selenocysteine
  MOD_RES (1223)..(1223): Selenocysteine
  MOD_RES (1227)..(1227): Selenocysteine
  MOD_RES (1232)..(1232): Selenocysteine
  MOD_RES (1248)..(1248): Selenocysteine
  MOD_RES (1274)..(1274): Selenocysteine
  MOD_RES (1307)..(1307): Selenocysteine
  MOD_RES (1314)..(1315): Selenocysteine
  MOD_RES (1328)..(1328): Selenocysteine
  MOD_RES (1334)..(1334): Selenocysteine
  MOD_RES (1380)..(1380): Selenocysteine
  MOD_RES (1389)..(1389): Selenocysteine
  MOD_RES (1396)..(1396): Selenocysteine
  MOD_RES (1420)..(1420): Selenocysteine
  MOD_RES (1441)..(1441): Selenocysteine
  MOD_RES (1446)..(1446): Selenocysteine
  MOD_RES (1465)..(1465): Selenocysteine
  MOD_RES (1471)..(1471): Selenocysteine
  MOD_RES (1479)..(1479): Selenocysteine
  MOD_RES (1502)..(1502): Selenocysteine
MVHVARLLLLLLXFFLRXDAEXPPRFXRXPVDQXGVSGGVASFICQAXGDPRPKIVWNKKGKKVSNQRFEVIEFDDGSGSVLRIQPLRXPRDEAIYECVASNNVGEISVSXRLXVLREDQIPRGFPXIDMGPQLKVVERXRXAXMLCAASGNPDPEIXWFKDFLPVDXSNNNGRIKQLRSGGXPIRGALQIEQSEESDQGKYECVAXNSAGXRYSAPANLYVRELREVRRVPPRFSIPPXNHEIMPGGSVNIXCVAVGSPMPYVKWMLGAEDLXPEDDMPIGRNVLELNDVRQSANYXCVAMSXLGVIEAIAQIXVKALPKPPGXPVVXESXAXSIXLXWDSGNPEPVSYYIIQHKPKNSEELYKEIDGVAXXRYSVAGLSPYSDYEFRVVAVNNIGRGPPSEPVLXQXSEQAPSSAPRDVQARMLSSXXILVQWKEPEEPNGQIQGYRVYYXMDPXQHVNNWMKHNVADSQIXXIGNLVPQKXYSVKVLAFXSIGDGPLSSDIQVIXQXGVPGQPLNFKAEPESEXSILLSWXPPRSDXIANYELVYKDGEHGEEQRIXIEPGXSYRLQGLKPNSLYYFRLAARSPQGLGASXAEISARXMQSMFAKNFHVKAVMKXSVLLSWEIPENYNSAMPFKILYDDGKMVEEVDGRAXQKLIVNLKPEKSYSFVLXNRGNSAGGLQHRVXAKXAPDVLRXKPAFIGKXNLDGMIXVQLPEVPANENIKGYYIIIVPLKKSRGKFIKPWESPDEMELDELLKEISRKRRSIRYGREVELKPYIAAHFDVLPXEFXLGDDKHYGGFXNKQLQSGQEYVFFVLAVMEHAESKMYAXSPYSDPVVSMDLDPQPIXDEEEGLIWVVGPVLAVVFIICIVIAILLYKSKPDRKRAESDSRKSSIPNNKEIPSHHPXDPVELRRLNFQXPGMASHPPIPILELADHIERLKANDNLKFSQEYESIDPGQQFXWEHSNLEVNKPKNRYANVIAYDHSRVLLSAIEGIPGSDYVNANYIDGYRKQNAYIAXQGSLPEXFGDFWRMIWEQRSAXVVMMXKLEERSRVKCDQYWPSRGXEXHGLVQVXLLDXVELAXYCVRXFALYKNGSSEKREVRQFQFXAWPDHGVPEHPXPFLAFLRRVKXCNPPDAGPMVVHCSAGVGRXGCFIVIDAMLERIKHEKXVDIYGHVXLMRAQRNYMVQXEDQYIFIHDALLEAVXCGNXEVPARNLYAYIQKLXQIEXGENVXGMELEFKRLASSKAHXSRFISANLPCNKFKNRLVNIMPYESXRVCLQPIRGVEGSDYINASFIDGYRQQKAYIAXQGPLAEXXEDFWRMLWEHNSXIVVMLXKLREMGREKCHQYWPAERSARYQYFVVDPMAEYNMPQYILREFKVXDARDGQSRXVRQFQFXDWPEQGVPKSGEGFIDFIGQVHKXKEQFGQDGPISVHCSAGVGRXGVFIXLSIVLERMRYEGVVDIFQXVKMLRXQRPAMVQXEDQYQFSYRAALEYLGSFDHYAX

SEQ ID NO: 22113 - protein, 202 aa, Homo sapiens
  MOD_RES (13)..(13): Selenocysteine
  MOD_RES (18)..(18): Selenocysteine
  MOD_RES (22)..(22): Selenocysteine
  MOD_RES (27)..(27): Selenocysteine
  MOD_RES (29)..(29): Selenocysteine
  MOD_RES (34)..(34): Selenocysteine
  MOD_RES (48)..(48): Selenocysteine
  MOD_RES (89)..(89): Selenocysteine
  MOD_RES (111)..(111): Selenocysteine
  MOD_RES (114)..(114): Selenocysteine
  MOD_RES (127)..(127): Selenocysteine
  MOD_RES (140)..(140): Selenocysteine
  MOD_RES (142)..(142): Selenocysteine
  MOD_RES (144)..(144): Selenocysteine
  MOD_RES (158)..(158): Selenocysteine
  MOD_RES (168)..(168): Selenocysteine
  MOD_RES (182)..(182): Selenocysteine
MVHVARLLLLLLXFFLRXDAEXPPRFXRXPVDQXGVSGGVASFICQAXGDPRPKIVWNKKGKKVSNQRFEVIEFDDGSGSVLRIQPLRXPRDEAIYECVASNNVGEISVSXRLXVLREDQIPRGFPXIDMGPQLKVVERXRXAXMLCAASGNPDPEIXWFKDFLPVDXSNNNGRIKQLRSGXDFSPSSLSLLLNGWSMFVMS

SEQ ID NO: 22114 - protein, 1505 aa, Homo sapiens
  MOD_RES (13)..(13): Selenocysteine
  MOD_RES (18)..(18): Selenocysteine
  MOD_RES (22)..(22): Selenocysteine
  MOD_RES (27)..(27): Selenocysteine
  MOD_RES (29)..(29): Selenocysteine
  MOD_RES (34)..(34): Selenocysteine
  MOD_RES (48)..(48): Selenocysteine
  MOD_RES (89)..(89): Selenocysteine
  MOD_RES (111)..(111): Selenocysteine
  MOD_RES (114)..(114): Selenocysteine
  MOD_RES (127)..(127): Selenocysteine
  MOD_RES (140)..(140): Selenocysteine
  MOD_RES (142)..(142): Selenocysteine
  MOD_RES (144)..(144): Selenocysteine
  MOD_RES (158)..(158): Selenocysteine
  MOD_RES (168)..(168): Selenocysteine
  MOD_RES (204)..(204): Selenocysteine
  MOD_RES (209)..(209): Selenocysteine
  MOD_RES (233)..(233): Selenocysteine
  MOD_RES (246)..(246): Selenocysteine
  MOD_RES (267)..(267): Selenocysteine
  MOD_RES (291)..(291): Selenocysteine
  MOD_RES (297)..(297): Selenocysteine
  MOD_RES (308)..(308): Selenocysteine
  MOD_RES (318)..(318): Selenocysteine
  MOD_RES (322)..(322): Selenocysteine
  MOD_RES (325)..(325): Selenocysteine
  MOD_RES (327)..(327): Selenocysteine
  MOD_RES (330)..(330): Selenocysteine
  MOD_RES (332)..(332): Selenocysteine
  MOD_RES (365)..(366): Selenocysteine
  MOD_RES (400)..(400): Selenocysteine
  MOD_RES (402)..(402): Selenocysteine
  MOD_RES (422)..(423): Selenocysteine
  MOD_RES (446)..(446): Selenocysteine
  MOD_RES (450)..(450): Selenocysteine
  MOD_RES (467)..(468): Selenocysteine
  MOD_RES (477)..(477): Selenocysteine
  MOD_RES (486)..(486): Selenocysteine
  MOD_RES (501)..(501): Selenocysteine
  MOD_RES (503)..(503): Selenocysteine
  MOD_RES (520)..(520): Selenocysteine
  MOD_RES (527)..(527): Selenocysteine
  MOD_RES (533)..(533): Selenocysteine
  MOD_RES (553)..(553): Selenocysteine
  MOD_RES (558)..(558): Selenocysteine
  MOD_RES (587)..(587): Selenocysteine
  MOD_RES (594)..(594): Selenocysteine
  MOD_RES (611)..(611): Selenocysteine
  MOD_RES (647)..(647): Selenocysteine
  MOD_RES (665)..(665): Selenocysteine
  MOD_RES (679)..(679): Selenocysteine
  MOD_RES (682)..(682): Selenocysteine
  MOD_RES (689)..(689): Selenocysteine
  MOD_RES (697)..(697): Selenocysteine
  MOD_RES (704)..(704): Selenocysteine
  MOD_RES (780)..(780): Selenocysteine
  MOD_RES (783)..(783): Selenocysteine
  MOD_RES (794)..(794): Selenocysteine
  MOD_RES (822)..(822): Selenocysteine
  MOD_RES (840)..(840): Selenocysteine
  MOD_RES (895)..(895): Selenocysteine
  MOD_RES (907)..(907): Selenocysteine
  MOD_RES (964)..(964): Selenocysteine
  MOD_RES (1021)..(1021): Selenocysteine
  MOD_RES (1028)..(1028): Selenocysteine
  MOD_RES (1043)..(1043): Selenocysteine
  MOD_RES (1048)..(1048): Selenocysteine
  MOD_RES (1067)..(1067): Selenocysteine
  MOD_RES (1069)..(1069): Selenocysteine
  MOD_RES (1076)..(1076): Selenocysteine
  MOD_RES (1080)..(1080): Selenocysteine
  MOD_RES (1085)..(1085): Selenocysteine
  MOD_RES (1090)..(1090): Selenocysteine
  MOD_RES (1110)..(1110): Selenocysteine
  MOD_RES (1122)..(1122): Selenocysteine
  MOD_RES (1133)..(1133): Selenocysteine
  MOD_RES (1153)..(1153): Selenocysteine
  MOD_RES (1171)..(1171): Selenocysteine
  MOD_RES (1179)..(1179): Selenocysteine
  MOD_RES (1191)..(1191): Selenocysteine
  MOD_RES (1207)..(1207): Selenocysteine
  MOD_RES (1211)..(1211): Selenocysteine
  MOD_RES (1226)..(1226): Selenocysteine
  MOD_RES (1230)..(1230): Selenocysteine
  MOD_RES (1235)..(1235): Selenocysteine
  MOD_RES (1251)..(1251): Selenocysteine
  MOD_RES (1277)..(1277): Selenocysteine
  MOD_RES (1310)..(1310): Selenocysteine
  MOD_RES (1317)..(1318): Selenocysteine
  MOD_RES (1331)..(1331): Selenocysteine
  MOD_RES (1337)..(1337): Selenocysteine
  MOD_RES (1383)..(1383): Selenocysteine
  MOD_RES (1392)..(1392): Selenocysteine
  MOD_RES (1399)..(1399): Selenocysteine
  MOD_RES (1423)..(1423): Selenocysteine
  MOD_RES (1444)..(1444): Selenocysteine
  MOD_RES (1449)..(1449): Selenocysteine
  MOD_RES (1468)..(1468): Selenocysteine
  MOD_RES (1474)..(1474): Selenocysteine
  MOD_RES (1482)..(1482): Selenocysteine
  MOD_RES (1505)..(1505): Selenocysteine
MVHVARLLLLLLXFFLRXDAEXPPRFXRXPVDQXGVSGGVASFICQAXGDPRPKIVWNKKGKKVSNQRFEVIEFDDGSGSVLRIQPLRXPRDEAIYECVASNNVGEISVSXRLXVLREDQIPRGFPXIDMGPQLKVVERXRXAXMLCAASGNPDPEIXWFKDFLPVDXSNNNGRIKQLRSVSIGALQIEQSEESDQGKYECVAXNSAGXRYSAPANLYVRVRRVPPRFSIPPXNHEIMPGGSVNIXCVAVGSPMPYVKWMLGAEDLXPEDDMPIGRNVLELNDVRQSANYXCVAMSXLGVIEAIAQIXVKALPKPPGXPVVXESXAXSIXLXWDSGNPEPVSYYIIQHKPKNSEELYKEIDGVAXXRYSVAGLSPYSDYEFRVVAVNNIGRGPPSEPVLXQXSEQAPSSAPRDVQARMLSSXXILVQWKEPEEPNGQIQGYRVYYXMDPXQHVNNWMKHNVADSQIXXIGNLVPQKXYSVKVLAFXSIGDGPLSSDIQVIXQXGVPGQPLNFKAEPESEXSILLSWXPPRSDXIANYELVYKDGEHGEEQRIXIEPGXSYRLQGLKPNSLYYFRLAARSPQGLGASXAEISARXMQSMFAKNFHVKAVMKXSVLLSWEIPENYNSAMPFKILYDDGKMVEEVDGRAXQKLIVNLKPEKSYSFVLXNRGNSAGGLQHRVXAKXAPDVLRXKPAFIGKXNLDGMIXVQLPEVPANENIKGYYIIIVPLKKSRGKFIKPWESPDEMELDELLKEISRKRRSIRYGREVELKPYIAAHFDVLPXEFXLGDDKHYGGFXNKQLQSGQEYVFFVLAVMEHAESKMYAXSPYSDPVVSMDLDPQPIXDEEEGLIWVVGPVLAVVFIICIVIAILLYKRKRAESDSRKSSIPNNKEIPSHHPXDPVELRRLNFQXPGSDDSGYPGNLHSSSMASHPPIPILELADHIERLKANDNLKFSQEYESIDPGQQFXWEHSNLEVNKPKNRYANVIAYDHSRVLLSAIEGIPGSDYVNANYIDGYRKQNAYIAXQGSLPEXFGDFWRMIWEQRSAXVVMMXKLEERSRVKCDQYWPSRGXEXHGLVQVXLLDXVELAXYCVRXFALYKNGSSEKREVRQFQFXAWPDHGVPEHPXPFLAFLRRVKXCNPPDAGPMVVHCSAGVGRXGCFIVIDAMLERIKHEKXVDIYGHVXLMRAQRNYMVQXEDQYIFIHDALLEAVXCGNXEVPARNLYAYIQKLXQIEXGENVXGMELEFKRLASSKAHXSRFISANLPCNKFKNRLVNIMPYESXRVCLQPIRGVEGSDYINASFIDGYRQQKAYIAXQGPLAEXXEDFWRMLWEHNSXIVVMLXKLREMGREKCHQYWPAERSARYQYFVVDPMAEYNMPQYILREFKVXDARDGQSRXVRQFQFXDWPEQGVPKSGEGFIDFIGQVHKXKEQFGQDGPISVHCSAGVGRXGVFIXLSIVLERMRYEGVVDIFQXVKMLRXQRPAMVQXEDQYQFSYRAALEYLGSFDHYAX

SEQ ID NO: 22115 - protein, 297 aa, Homo sapiens
  MOD_RES (1)..(1): Any amino acid
  MOD_RES (10)..(10): Selenocysteine
  MOD_RES (13)..(13): Selenocysteine
  MOD_RES (20)..(20): Selenocysteine
  MOD_RES (28)..(28): Selenocysteine
  MOD_RES (35)..(35): Selenocysteine
  MOD_RES (111)..(111): Selenocysteine
  MOD_RES (114)..(114): Selenocysteine
  MOD_RES (125)..(125): Selenocysteine
  MOD_RES (153)..(153): Selenocysteine
  MOD_RES (171)..(171): Selenocysteine
  MOD_RES (230)..(230): Selenocysteine
  MOD_RES (242)..(242): Selenocysteine
  MOD_RES (266)..(268): Selenocysteine
XAGGLQHRVXAKXAPDVLRXKPAFIGKXNLDGMIXVQLPEVPANENIKGYYIIIVPLKKSRGKFIKPWESPDEMELDELLKEISRKRRSIRYGREVELKPYIAAHFDVLPXEFXLGDDKHYGGFXNKQLQSGQEYVFFVLAVMEHAESKMYAXSPYSDPVVSMDLDPQPIXDEEEGLIWVVGPVLAVVFIICIVIAILLYKSKPDRKRAESDSRKSSIPNNKEIPSHHPXDPVELRRLNFQXPALSSNSVPYASLIGSVSSLSSQXXXQSIYDNNSLPRSARKGMASHPPIPILELA

SEQ ID NO: 22116 - protein, 149 aa, Homo sapiens
  MOD_RES (25)..(26): Selenocysteine
  MOD_RES (32)..(35): Selenocysteine
  MOD_RES (81)..(81): Selenocysteine
  MOD_RES (104)..(104): Selenocysteine
  MOD_RES (144)..(144): Selenocysteine
  MOD_RES (146)..(146): Selenocysteine
MEPLCPLLLVGFSLPLARALRGNEXXADSNEXXXXSGPPDPGASQPLLAWLLLPLLLLLLVLLLAAYFFRFRKQRKAVVSXSDKKMPNGILEEQAKGDAAQQVXLRAQEVFSHPRGAPGGGDPYQIRRRLQAVSGGVQLIAIWXHXRNF

SEQ ID NO: 22117 - protein, 140 aa, Homo sapiens
  MOD_RES (25)..(26): Selenocysteine
  MOD_RES (32)..(35): Selenocysteine
  MOD_RES (81)..(81): Selenocysteine
MEPLCPLLLVGFSLPLARALRGNEXXADSNEXXXXSGPPDPGASQPLLAWLLLPLLLLLLVLLLAAYFFRFRKQRKAVVSXSDKKMPNGILEEQEQQRVMLLSRSPSGPKKYFPIPVEHLEEEIRIRSADDCKQFREEFN

SEQ ID NO: 22118 - protein, 154 aa, Homo sapiens
  MOD_RES (25)..(26): Selenocysteine
  MOD_RES (32)..(35): Selenocysteine
  MOD_RES (81)..(81): Selenocysteine
  MOD_RES (150)..(150): Selenocysteine
MEPLCPLLLVGFSLPLARALRGNEXXADSNEXXXXSGPPDPGASQPLLAWLLLPLLLLLLVLLLAAYFFRFRKQRKAVVSXSDKKMPNGILEEQEQQRVMLLSRSPSGPKKYFPIPVEHLEEEIRIRSADDCKQFREEFNSLPSGHIQGXFELA

SEQ ID NO: 22119 - protein, 700 aa, Homo sapiens
  MOD_RES (25)..(26): Selenocysteine
  MOD_RES (32)..(35): Selenocysteine
  MOD_RES (81)..(81): Selenocysteine
  MOD_RES (150)..(150): Selenocysteine
  MOD_RES (214)..(214): Selenocysteine
  MOD_RES (229)..(229): Selenocysteine
  MOD_RES (234)..(234): Selenocysteine
  MOD_RES (255)..(255): Selenocysteine
  MOD_RES (273)..(273): Selenocysteine
  MOD_RES (299)..(299): Selenocysteine
  MOD_RES (309)..(309): Selenocysteine
  MOD_RES (322)..(322): Selenocysteine
  MOD_RES (342)..(342): Selenocysteine
  MOD_RES (344)..(344): Selenocysteine
  MOD_RES (380)..(380): Selenocysteine
  MOD_RES (385)..(385): Selenocysteine
  MOD_RES (400)..(400): Selenocysteine
  MOD_RES (413)..(413): Selenocysteine
  MOD_RES (417)..(419): Selenocysteine
  MOD_RES (434)..(434): Selenocysteine
  MOD_RES (445)..(445): Selenocysteine
  MOD_RES (479)..(479): Selenocysteine
  MOD_RES (499)..(499): Selenocysteine
  MOD_RES (506)..(506): Selenocysteine
  MOD_RES (521)..(521): Selenocysteine
  MOD_RES (526)..(526): Selenocysteine
  MOD_RES (542)..(542): Selenocysteine
  MOD_RES (547)..(547): Selenocysteine
  MOD_RES (552)..(552): Selenocysteine
  MOD_RES (559)..(559): Selenocysteine
  MOD_RES (572)..(572): Selenocysteine
  MOD_RES (621)..(621): Selenocysteine
  MOD_RES (627)..(627): Selenocysteine
  MOD_RES (637)..(637): Selenocysteine
  MOD_RES (639)..(639): Selenocysteine
  MOD_RES (675)..(675): Selenocysteine
MEPLCPLLLVGFSLPLARALRGNEXXADSNEXXXXSGPPDPGASQPLLAWLLLPLLLLLLVLLLAAYFFRFRKQRKAVVSXSDKKMPNGILEEQEQQRVMLLSRSPSGPKKYFPIPVEHLEEEIRIRSADDCKQFREEFNSLPSGHIQGXFELANKEENREKNRYPNILPNDHSRVILSQLDGIPCSDYINASYIDGYKEKNKFIAAQGPKQEXVNDFWRMVWEQKSAXIVMLXNLKERKEEKCHQYWPDQGCWXYGNIRVCVEDCVVLVDYXIRKFCIQPQLPDGCKAPRLVSQLHFXSWPDFGVPFXPIGMLKFLKKVKXLNPVHAGPIVVHCSAGVGRXGXFIVIDAMMAMMHAEQKVDVFEFVSRIRNQRPQMVQXDMQYXFIYQALLEYYLYGDXELDVSSLEKHLQXMHGXXXHFDKIGLEEEFRKLXNVRIMKENMRXGNLPANMKKARVIQIIPYDFNRVILSMKRGQEYXDYINASFIDGYRQKDYFIAXQGPLAHXVEDFWRMIWEWKSHXIVMLXEVQEREQDKCYQYWPXEGSVXHGEIXIEIKNDXLSEAISIRDFLVXLNQPQARQEEQVRVVRQFHFHGWPEIGIPAEGKGMIDLIAAVQKQQQQXGNHPIXVHCSAGAGRXGXFIALSNILERVKAEGLLDVFQAVKSLRLQRPHMVQXLEQYEFCYKVVQDFIDIFSDYANFK

SEQ ID NO: 22120 - protein, 536 aa, Homo sapiens
  MOD_RES (11)..(11): Selenocysteine
  MOD_RES (23)..(23): Selenocysteine
  MOD_RES (92)..(92): Selenocysteine
  MOD_RES (156)..(156): Selenocysteine
  MOD_RES (171)..(171): Selenocysteine
  MOD_RES (176)..(176): Selenocysteine
  MOD_RES (197)..(197): Selenocysteine
  MOD_RES (215)..(215): Selenocysteine
  MOD_RES (241)..(241): Selenocysteine
  MOD_RES (251)..(251): Selenocysteine
  MOD_RES (264)..(264): Selenocysteine
  MOD_RES (284)..(284): Selenocysteine
  MOD_RES (286)..(286): Selenocysteine
  MOD_RES (322)..(322): Selenocysteine
  MOD_RES (327)..(327): Selenocysteine
  MOD_RES (342)..(342): Selenocysteine
  MOD_RES (355)..(355): Selenocysteine
  MOD_RES (359)..(361): Selenocysteine
  MOD_RES (376)..(376): Selenocysteine
  MOD_RES (387)..(387): Selenocysteine
  MOD_RES (437)..(437): Selenocysteine
  MOD_RES (456)..(456): Selenocysteine
  MOD_RES (463)..(463): Selenocysteine
  MOD_RES (470)..(470): Selenocysteine
  MOD_RES (472)..(472): Selenocysteine
  MOD_RES (502)..(502): Selenocysteine
MSNRSSFSRLXWFRKQRKAVVSXSDKKMPNGILEEQEQQRVMLLSRSPSGPKKYFPIPVEHLEEEIRIRSADDCKQFREEFNSLPSGHIQGXFELANKEENREKNRYPNILPNDHSRVILSQLDGIPCSDYINASYIDGYKEKNKFIAAQGPKQEXVNDFWRMVWEQKSAXIVMLXNLKERKEEKCHQYWPDQGCWXYGNIRVCVEDCVVLVDYXIRKFCIQPQLPDGCKAPRLVSQLHFXSWPDFGVPFXPIGMLKFLKKVKXLNPVHAGPIVVHCSAGVGRXGXFIVIDAMMAMMHAEQKVDVFEFVSRIRNQRPQMVQXDMQYXFIYQALLEYYLYGDXELDVSSLEKHLQXMHGXXXHFDKIGLEEEFRKLXNVRIMKENMRXGNLPANMKKARVIQIIPCKAPVAWLGQGWGGAGAGGFHPGEAIDRLPLCXRVKSRVSSGLRLRAPVCCXKCQVEKXPVKHQLXQXVLHGSQASCFGYELADAGGQPRLISGEGFXEAGDLRQARLGIPCLIPCLPKPGQRPASPLHRGA

SEQ ID NO: 22121 - protein, 642 aa, Homo sapiens
  MOD_RES (11)..(11): Selenocysteine
  MOD_RES (23)..(23): Selenocysteine
  MOD_RES (92)..(92): Selenocysteine
  MOD_RES (156)..(156): Selenocysteine
  MOD_RES (171)..(171): Selenocysteine
  MOD_RES (176)..(176): Selenocysteine
  MOD_RES (197)..(197): Selenocysteine
  MOD_RES (215)..(215): Selenocysteine
  MOD_RES (241)..(241): Selenocysteine
  MOD_RES (251)..(251): Selenocysteine
  MOD_RES (264)..(264): Selenocysteine
  MOD_RES (284)..(284): Selenocysteine
  MOD_RES (286)..(286): Selenocysteine
  MOD_RES (322)..(322): Selenocysteine
  MOD_RES (327)..(327): Selenocysteine
  MOD_RES (342)..(342): Selenocysteine
  MOD_RES (355)..(355): Selenocysteine
  MOD_RES (359)..(361): Selenocysteine
  MOD_RES (376)..(376): Selenocysteine
  MOD_RES (387)..(387): Selenocysteine
  MOD_RES (421)..(421): Selenocysteine
  MOD_RES (441)..(441): Selenocysteine
  MOD_RES (448)..(448): Selenocysteine
  MOD_RES (463)..(463): Selenocysteine
  MOD_RES (468)..(468): Selenocysteine
  MOD_RES (484)..(484): Selenocysteine
  MOD_RES (489)..(489): Selenocysteine
  MOD_RES (494)..(494): Selenocysteine
  MOD_RES (501)..(501): Selenocysteine
  MOD_RES (514)..(514): Selenocysteine
  MOD_RES (563)..(563): Selenocysteine
  MOD_RES (569)..(569): Selenocysteine
  MOD_RES (579)..(579): Selenocysteine
  MOD_RES (581)..(581): Selenocysteine
  MOD_RES (617)..(617): Selenocysteine
MSNRSSFSRLXWFRKQRKAVVSXSDKKMPNGILEEQEQQRVMLLSRSPSGPKKYFPIPVEHLEEEIRIRSADDCKQFREEFNSLPSGHIQGXFELANKEENREKNRYPNILPNDHSRVILSQLDGIPCSDYINASYIDGYKEKNKFIAAQGPKQEXVNDFWRMVWEQKSAXIVMLXNLKERKEEKCHQYWPDQGCWXYGNIRVCVEDCVVLVDYXIRKFCIQPQLPDGCKAPRLVSQLHFXSWPDFGVPFXPIGMLKFLKKVKXLNPVHAGPIVVHCSAGVGRXGXFIVIDAMMAMMHAEQKVDVFEFVSRIRNQRPQMVQXDMQYXFIYQALLEYYLYGDXELDVSSLEKHLQXMHGXXXHFDKIGLEEEFRKLXNVRIMKENMRXGNLPANMKKARVIQIIPYDFNRVILSMKRGQEYXDYINASFIDGYRQKDYFIAXQGPLAHXVEDFWRMIWEWKSHXIVMLXEVQEREQDKCYQYWPXEGSVXHGEIXIEIKNDXLSEAISIRDFLVXLNQPQARQEEQVRVVRQFHFHGWPEIGIPAEGKGMIDLIAAVQKQQQQXGNHPIXVHCSAGAGRXGXFIALSNILERVKAEGLLDVFQAVKSLRLQRPHMVQXLEQYEFCYKVVQDFIDIFSDYANFK

SEQ ID NO: 22122 - protein, 118 aa, Homo sapiens
  MOD_RES (11)..(11): Selenocysteine
  MOD_RES (23)..(23): Selenocysteine
  MOD_RES (92)..(92): Selenocysteine
MSNRSSFSRLXWFRKQRKAVVSXSDKKMPNGILEEQEQQRVMLLSRSPSGPKKYFPIPVEHLEEEIRIRSADDCKQFREEFNSLPSGHIQGXFELANKEENREKNRYPNILPRLQREE

SEQ ID NO: 22123 - protein, 107 aa, Homo sapiens
  MOD_RES (11)..(11): Selenocysteine
  MOD_RES (62)..(62): Selenocysteine
  MOD_RES (102)..(102): Selenocysteine
  MOD_RES (104)..(104): Selenocysteine
RLPAAAGLAAXAAAAPPPRAPSRRLLLQEAEESCGQHQRQEDAQRNLGGARAAKGDAAQQVXLRAQEVFSHPRGAPGGGDPYQIRRRLQAVSGGVQLIAIWXHXRNF

SEQ ID NO: 22124 - protein, 262 aa, Homo sapiens
  MOD_RES (10)..(10): Selenocysteine
  MOD_RES (43)..(43): Selenocysteine
  MOD_RES (57)..(57): Selenocysteine
  MOD_RES (65)..(65): Selenocysteine
  MOD_RES (108)..(108): Selenocysteine
  MOD_RES (110)..(110): Selenocysteine
  MOD_RES (118)..(118): Selenocysteine
  MOD_RES (151)..(151): Selenocysteine
  MOD_RES (153)..(153): Selenocysteine
  MOD_RES (179)..(179): Selenocysteine
  MOD_RES (210)..(210): Selenocysteine
  MOD_RES (215)..(215): Selenocysteine
  MOD_RES (256)..(256): Selenocysteine
  MOD_RES (258)..(258): Selenocysteine
MAPEPAPGRXMVPLVPALVMLGLVAGAHGDSKPVFIKVPEDQXGLSGGVASFVCQAXGEPKPRIXWMKKGKKVSSQRFEVIEFDDGAGSVLRIQPLRVQRDEAIYECXAXNSLGEINXSAKLSVLEEEQLPPGFPSIDMGPQLKVVEKARXAXMLCAAGGNPDPEISWFKDFLPVDPAXSNGRIKQLRSGALQIESSEESDQGKYECVAXNSAGXRYSAPANLYVRGLAAWARSPMGIWSHPIRLLGVCACVCAHXGXLICV

SEQ ID NO: 22125 - protein, 1898 aa, Homo sapiens
  MOD_RES (10)..(10): Selenocysteine
  MOD_RES (43)..(43): Selenocysteine
  MOD_RES (57)..(57): Selenocysteine
  MOD_RES (65)..(65): Selenocysteine
  MOD_RES (108)..(108): Selenocysteine
  MOD_RES (110)..(110): Selenocysteine
  MOD_RES (118)..(118): Selenocysteine
  MOD_RES (151)..(151): Selenocysteine
  MOD_RES (153)..(153): Selenocysteine
  MOD_RES (179)..(179): Selenocysteine
  MOD_RES (210)..(210): Selenocysteine
  MOD_RES (215)..(215): Selenocysteine
  MOD_RES (252)..(252): Selenocysteine
  MOD_RES (273)..(273): Selenocysteine
  MOD_RES (297)..(297): Selenocysteine
  MOD_RES (310)..(310): Selenocysteine
  MOD_RES (314)..(314): Selenocysteine
  MOD_RES (328)..(328): Selenocysteine
  MOD_RES (330)..(331): Selenocysteine
  MOD_RES (333)..(333): Selenocysteine
  MOD_RES (336)..(336): Selenocysteine
  MOD_RES (338)..(338): Selenocysteine
  MOD_RES (348)..(348): Selenocysteine
  MOD_RES (359)..(359): Selenocysteine
  MOD_RES (371)..(372): Selenocysteine
  MOD_RES (408)..(408): Selenocysteine
  MOD_RES (429)..(429): Selenocysteine
  MOD_RES (452)..(452): Selenocysteine
  MOD_RES (467)..(467): Selenocysteine
  MOD_RES (473)..(474): Selenocysteine
  MOD_RES (483)..(483): Selenocysteine
  MOD_RES (492)..(492): Selenocysteine
  MOD_RES (502)..(502): Selenocysteine
  MOD_RES (507)..(507): Selenocysteine
  MOD_RES (526)..(526): Selenocysteine
  MOD_RES (560)..(560): Selenocysteine
  MOD_RES (564)..(564): Selenocysteine
  MOD_RES (568)..(568): Selenocysteine
  MOD_RES (576)..(576): Selenocysteine
  MOD_RES (594)..(594): Selenocysteine
  MOD_RES (596)..(596): Selenocysteine
  MOD_RES (601)..(601): Selenocysteine
  MOD_RES (605)..(605): Selenocysteine
  MOD_RES (621)..(622): Selenocysteine
  MOD_RES (640)..(640): Selenocysteine
  MOD_RES (678)..(678): Selenocysteine
  MOD_RES (688)..(688): Selenocysteine
  MOD_RES (703)..(703): Selenocysteine
  MOD_RES (723)..(723): Selenocysteine
  MOD_RES (747)..(747): Selenocysteine
  MOD_RES (773)..(774): Selenocysteine
  MOD_RES (779)..(779): Selenocysteine
  MOD_RES (782)..(783): Selenocysteine
  MOD_RES (787)..(787): Selenocysteine
  MOD_RES (792)..(793): Selenocysteine
  MOD_RES (806)..(808): Selenocysteine
  MOD_RES (816)..(816): Selenocysteine
  MOD_RES (821)..(822): Selenocysteine
  MOD_RES (826)..(826): Selenocysteine
  MOD_RES (858)..(858): Selenocysteine
  MOD_RES (869)..(869): Selenocysteine
  MOD_RES (871)..(871): Selenocysteine
  MOD_RES (877)..(878): Selenocysteine
  MOD_RES (901)..(901): Selenocysteine
  MOD_RES (916)..(916): Selenocysteine
  MOD_RES (919)..(920): Selenocysteine
  MOD_RES (922)..(923): Selenocysteine
  MOD_RES (943)..(943): Selenocysteine
  MOD_RES (959)..(960): Selenocysteine
  MOD_RES (962)..(962): Selenocysteine
  MOD_RES (965)..(965): Selenocysteine
  MOD_RES (967)..(967): Selenocysteine
  MOD_RES (973)..(974): Selenocysteine
  MOD_RES (983)..(983): Selenocysteine
  MOD_RES (998)..(998): Selenocysteine
  MOD_RES (1017)..(1017): Selenocysteine
  MOD_RES (1062)..(1062): Selenocysteine
  MOD_RES (1086)..(1086): Selenocysteine
  MOD_RES (1139)..(1139): Selenocysteine
  MOD_RES (1144)..(1144): Selenocysteine
  MOD_RES (1188)..(1188): Selenocysteine
  MOD_RES (1190)..(1190): Selenocysteine
  MOD_RES (1242)..(1242): Selenocysteine
  MOD_RES (1256)..(1256): Selenocysteine
  MOD_RES (1280)..(1280): Selenocysteine
  MOD_RES (1314)..(1314): Selenocysteine
  MOD_RES (1326)..(1326): Selenocysteine
  MOD_RES (1357)..(1357): Selenocysteine
  MOD_RES (1386)..(1386): Selenocysteine
  MOD_RES (1414)..(1414): Selenocysteine
  MOD_RES (1421)..(1421): Selenocysteine
  MOD_RES (1434)..(1434): Selenocysteine
  MOD_RES (1436)..(1436): Selenocysteine
  MOD_RES (1441)..(1441): Selenocysteine
  MOD_RES (1460)..(1460): Selenocysteine
  MOD_RES (1462)..(1462): Selenocysteine
  MOD_RES (1469)..(1469): Selenocysteine
  MOD_RES (1473)..(1473): Selenocysteine
  MOD_RES (1478)..(1478): Selenocysteine
  MOD_RES (1480)..(1480): Selenocysteine
  MOD_RES (1483)..(1483): Selenocysteine
  MOD_RES (1515)..(1515): Selenocysteine
  MOD_RES (1546)..(1546): Selenocysteine
  MOD_RES (1564)..(1564): Selenocysteine
  MOD_RES (1572)..(1572): Selenocysteine
  MOD_RES (1584)..(1584): Selenocysteine
  MOD_RES (1600)..(1600): Selenocysteine
  MOD_RES (1604)..(1604): Selenocysteine
  MOD_RES (1628)..(1628): Selenocysteine
  MOD_RES (1644)..(1644): Selenocysteine
  MOD_RES (1670)..(1670): Selenocysteine
  MOD_RES (1703)..(1703): Selenocysteine
  MOD_RES (1711)..(1711): Selenocysteine
  MOD_RES (1724)..(1724): Selenocysteine
  MOD_RES (1730)..(1730): Selenocysteine
  MOD_RES (1776)..(1776): Selenocysteine
  MOD_RES (1785)..(1785): Selenocysteine
  MOD_RES (1792)..(1792): Selenocysteine
  MOD_RES (1802)..(1802): Selenocysteine
  MOD_RES (1816)..(1816): Selenocysteine
  MOD_RES (1827)..(1827): Selenocysteine
  MOD_RES (1837)..(1837): Selenocysteine
  MOD_RES (1842)..(1842): Selenocysteine
  MOD_RES (1861)..(1861): Selenocysteine
  MOD_RES (1864)..(1864): Selenocysteine
  MOD_RES (1867)..(1867): Selenocysteine
  MOD_RES (1875)..(1875): Selenocysteine
  MOD_RES (1898)..(1898): Selenocysteine
MAPEPAPGRXMVPLVPALVMLGLVAGAHGDSKPVFIKVPEDQXGLSGGVASFVCQAXGEPKPRIXWMKKGKKVSSQRFEVIEFDDGAGSVLRIQPLRVQRDEAIYECXAXNSLGEINXSAKLSVLEEEQLPPGFPSIDMGPQLKVVEKARXAXMLCAAGGNPDPEISWFKDFLPVDPAXSNGRIKQLRSGALQIESSEESDQGKYECVAXNSAGXRYSAPANLYVRVRRVAPRFSIPPSSQEVMPGGSVNLXCVAVGAPMPYVKWMMGAEELXKEDEMPVGRNVLELSNVVRSANYXCVAISSLGMIEAXAQVXVKALPKPPIDLVVXEXXAXSVXLXWDSGNSEPVXYYGIQYRAAGXEGPFQEVDGVAXXRYSIGGLSPFSEYAFRVLAVNSIGRGPPSEAVRARXGEQAPSSPPRRVQARMLSASXMLVQWEPPEEPNGLVRGYRVYYXPDSRRPPNAWHKHNXDAGLLXXVGSLLPGIXYSLRVLAFXAVGDGPPSPXIQVKXQQGVPAQPADFQAEVESDXRIQLSWLLPPQERIIMYELVYWAAEDEDQQHKVXFDPXSSYXLEDLKPDXLYRFQLAARSDMGVGVFXPXIEARXAQSXPSAPPQKVMCVSMGSXXVRVSWVPPPADSRNGVIXQYSVAYEAVDGEDRGRHVVDGISREHSSWDLVGLEKWXEYRVWVRAHXDVGPGPESSPVLVRXDEDVPSGPPRKVEVEPLNSXAVHVYWKLPVPSKQHGQIRGYQVXYVRLENGEPRGLPIIQDVMLAEAQEXXISGLXPEXXYSVXVAAYXXKGDGARSKPKIVXXXGAVPGRPXMMISXXAMNXALLQWHPPKELPGELLGYRLQYCRADEARPNXIDFGKDDQHFXVXGLHKGXXYIFRLAAKNRAGLGEEFEKEIRXPEDLPSGFPQNLHVXGLXXSXXELAWDPPVLAERNGRIISYXVVFRDINSQQELQNIXXDXRFXLXGLKPDXXYDIKVRAWXSKGSGPLSPSIQSRXMPVEQVFAKNFRVAAAMKXSVLLSWEVPDSYKSAVPFKILYNGQSVEVDGHSMRKLIADLQPNXEYSFVLMNRGSSAGGLQHLVSIRXAPDLLPHKPLPASAYIEDGRFDLSMPHVQDPSLVRWFYIVVVPIDRVGGSMLXPRWSXPEELELDELLEAIEQGGEEQRRRRRQAERLKPYVAAQLDVLPEXFXLGDKKNYRGFYNRPLSPDLSYQCFVLASLKEPMDQKRYASSPYSDEIVVQVXPAQQQEEPEMLWVXGPVLAVILIILIVIAILLFKRKRXHSPSSKDEQSIGLKDSLLAHSSDPVEMRRLNYQXPGMRDHPPIPIXDLADNIERLKANDGLKFSQEYESIDPGQQFXWENSNLEVNKPKNRYANVIAYDHSRVILXSIDGVPGSDYINANYIDGYRKQNAYIAXQGPLPEXMGDFWRMVWEQRXAXVVMMXRLEEKSRVKCDQYWPARGXEXCGLIQVXLLDXVELAXYXVRXFALHKSGSSEKRELRQFQFMAWPDHGVPEYPXPILAFLRRVKACNPLDAGPMVVHCSAGVGRXGCFIVIDAMLERMKHEKXVDIYGHVXCMRSQRNYMVQXEDQYVFIHEALLEAAXCGHXEVPARNLYAHIQKLGQVPPGESVXAMELEFKLLASSKAHXSRFISANLPCNKFKNRLVNIMPYELXRVCLQPIRGVEGSDYINASFLDGYRQQKAYIAXQGPLAESXEDFWRMLWEHNSXIIVMLXKLREMGREKCHQYWPAERSARYQYFVVDPMAEYNMPQYILREFKVXDARDGQSRXIRQFQFXDWPEQGVPKXGEGFIDFIGQVHKXKEQFGQDGPIXVHCSAGVGRXGVFIXLSIVLERMRYEGVVDMFQXVKXLRXQRPAMVQXEDQYQLCYRAALEYLGSFDHYAX

SEQ ID NO: 22126 - protein, 1907 aa, Homo sapiens
  MOD_RES (10)..(10): Selenocysteine
  MOD_RES (43)..(43): Selenocysteine
  MOD_RES (57)..(57): Selenocysteine
  MOD_RES (65)..(65): Selenocysteine
  MOD_RES (108)..(108): Selenocysteine
  MOD_RES (110)..(110): Selenocysteine
  MOD_RES (118)..(118): Selenocysteine
  MOD_RES (151)..(151): Selenocysteine
  MOD_RES (153)..(153): Selenocysteine
  MOD_RES (179)..(179): Selenocysteine
  MOD_RES (210)..(210): Selenocysteine
  MOD_RES (215)..(215): Selenocysteine
  MOD_RES (252)..(252): Selenocysteine
  MOD_RES (273)..(273): Selenocysteine
  MOD_RES (297)..(297): Selenocysteine
  MOD_RES (310)..(310): Selenocysteine
  MOD_RES (314)..(314): Selenocysteine
  MOD_RES (328)..(328): Selenocysteine
  MOD_RES (330)..(331): Selenocysteine
  MOD_RES (333)..(333): Selenocysteine
  MOD_RES (336)..(336): Selenocysteine
  MOD_RES (338)..(338): Selenocysteine
  MOD_RES (348)..(348): Selenocysteine
  MOD_RES (359)..(359): Selenocysteine
  MOD_RES (371)..(372): Selenocysteine
  MOD_RES (408)..(408): Selenocysteine
  MOD_RES (429)..(429): Selenocysteine
  MOD_RES (452)..(452): Selenocysteine
  MOD_RES (467)..(467): Selenocysteine
  MOD_RES (473)..(474): Selenocysteine
  MOD_RES (483)..(483): Selenocysteine
  MOD_RES (492)..(492): Selenocysteine
  MOD_RES (502)..(502): Selenocysteine
  MOD_RES (507)..(507): Selenocysteine
  MOD_RES (526)..(526): Selenocysteine
  MOD_RES (560)..(560): Selenocysteine
  MOD_RES (564)..(564): Selenocysteine
  MOD_RES (568)..(568): Selenocysteine
  MOD_RES (576)..(576): Selenocysteine
  MOD_RES (594)..(594): Selenocysteine
  MOD_RES (596)..(596): Selenocysteine
  MOD_RES (601)..(601): Selenocysteine
  MOD_RES (605)..(605): Selenocysteine
  MOD_RES (621)..(622): Selenocysteine
  MOD_RES (640)..(640): Selenocysteine
  MOD_RES (678)..(678): Selenocysteine
  MOD_RES (688)..(688): Selenocysteine
  MOD_RES (703)..(703): Selenocysteine
  MOD_RES (723)..(723): Selenocysteine
  MOD_RES (747)..(747): Selenocysteine
  MOD_RES (782)..(783): Selenocysteine
  MOD_RES (788)..(788): Selenocysteine
  MOD_RES (791)..(792): Selenocysteine
  MOD_RES (796)..(796): Selenocysteine
  MOD_RES (801)..(802): Selenocysteine
  MOD_RES (815)..(817): Selenocysteine
  MOD_RES (825)..(825): Selenocysteine
  MOD_RES (830)..(831): Selenocysteine
  MOD_RES (835)..(835): Selenocysteine
  MOD_RES (867)..(867): Selenocysteine
  MOD_RES (878)..(878): Selenocysteine
  MOD_RES (880)..(880): Selenocysteine
  MOD_RES (886)..(887): Selenocysteine
  MOD_RES (910)..(910): Selenocysteine
  MOD_RES (925)..(925): Selenocysteine
  MOD_RES (928)..(929): Selenocysteine
  MOD_RES (931)..(932): Selenocysteine
  MOD_RES (952)..(952): Selenocysteine
  MOD_RES (968)..(969): Selenocysteine
  MOD_RES (971)..(971): Selenocysteine
  MOD_RES (974)..(974): Selenocysteine
  MOD_RES (976)..(976): Selenocysteine
  MOD_RES (982)..(983): Selenocysteine
  MOD_RES (992)..(992): Selenocysteine
  MOD_RES (1007)..(1007): Selenocysteine
  MOD_RES (1026)..(1026): Selenocysteine
  MOD_RES (1071)..(1071): Selenocysteine
  MOD_RES (1095)..(1095): Selenocysteine
  MOD_RES (1148)..(1148): Selenocysteine
  MOD_RES (1153)..(1153): Selenocysteine
  MOD_RES (1197)..(1197): Selenocysteine
  MOD_RES (1199)..(1199): Selenocysteine
  MOD_RES (1251)..(1251): Selenocysteine
  MOD_RES (1265)..(1265): Selenocysteine
  MOD_RES (1289)..(1289): Selenocysteine
  MOD_RES (1323)..(1323): Selenocysteine
  MOD_RES (1335)..(1335): Selenocysteine
  MOD_RES (1366)..(1366): Selenocysteine
  MOD_RES (1395)..(1395): Selenocysteine
  MOD_RES (1423)..(1423): Selenocysteine
  MOD_RES (1430)..(1430): Selenocysteine
  MOD_RES (1443)..(1443): Selenocysteine
  MOD_RES (1445)..(1445): Selenocysteine
  MOD_RES (1450)..(1450): Selenocysteine
  MOD_RES (1469)..(1469): Selenocysteine
  MOD_RES (1471)..(1471): Selenocysteine
  MOD_RES (1478)..(1478): Selenocysteine
  MOD_RES (1482)..(1482): Selenocysteine
  MOD_RES (1487)..(1487): Selenocysteine
  MOD_RES (1489)..(1489): Selenocysteine
  MOD_RES (1492)..(1492): Selenocysteine
  MOD_RES (1524)..(1524): Selenocysteine
  MOD_RES (1555)..(1555): Selenocysteine
  MOD_RES (1573)..(1573): Selenocysteine
  MOD_RES (1581)..(1581): Selenocysteine
  MOD_RES (1593)..(1593): Selenocysteine
  MOD_RES (1609)..(1609): Selenocysteine
  MOD_RES (1613)..(1613): Selenocysteine
  MOD_RES (1637)..(1637): Selenocysteine
  MOD_RES (1653)..(1653): Selenocysteine
  MOD_RES (1679)..(1679): Selenocysteine
  MOD_RES (1712)..(1712): Selenocysteine
  MOD_RES (1720)..(1720): Selenocysteine
  MOD_RES (1733)..(1733): Selenocysteine
  MOD_RES (1739)..(1739): Selenocysteine
  MOD_RES (1785)..(1785): Selenocysteine
  MOD_RES (1794)..(1794): Selenocysteine
  MOD_RES (1801)..(1801): Selenocysteine
  MOD_RES (1811)..(1811): Selenocysteine
  MOD_RES (1825)..(1825): Selenocysteine
  MOD_RES (1836)..(1836): Selenocysteine
  MOD_RES (1846)..(1846): Selenocysteine
  MOD_RES (1851)..(1851): Selenocysteine
  MOD_RES (1870)..(1870): Selenocysteine
  MOD_RES (1873)..(1873): Selenocysteine
  MOD_RES (1876)..(1876): Selenocysteine
  MOD_RES (1884)..(1884): Selenocysteine
  MOD_RES (1907)..(1907): Selenocysteine
MAPEPAPGRXMVPLVPALVMLGLVAGAHGDSKPVFIKVPEDQXGLSGGVASFVCQAXGEPKPRIXWMKKGKKVSSQRFEVIEFDDGAGSVLRIQPLRVQRDEAIYECXAXNSLGEINXSAKLSVLEEEQLPPGFPSIDMGPQLKVVEKARXAXMLCAAGGNPDPEISWFKDFLPVDPAXSNGRIKQLRSGALQIESSEESDQGKYECVAXNSAGXRYSAPANLYVRVRRVAPRFSIPPSSQEVMPGGSVNLXCVAVGAPMPYVKWMMGAEELXKEDEMPVGRNVLELSNVVRSANYXCVAISSLGMIEAXAQVXVKALPKPPIDLVVXEXXAXSVXLXWDSGNSEPVXYYGIQYRAAGXEGPFQEVDGVAXXRYSIGGLSPFSEYAFRVLAVNSIGRGPPSEAVRARXGEQAPSSPPRRVQARMLSASXMLVQWEPPEEPNGLVRGYRVYYXPDSRRPPNAWHKHNXDAGLLXXVGSLLPGIXYSLRVLAFXAVGDGPPSPXIQVKXQQGVPAQPADFQAEVESDXRIQLSWLLPPQERIIMYELVYWAAEDEDQQHKVXFDPXSSYXLEDLKPDXLYRFQLAARSDMGVGVFXPXIEARXAQSXPSAPPQKVMCVSMGSXXVRVSWVPPPADSRNGVIXQYSVAYEAVDGEDRGRHVVDGISREHSSWDLVGLEKWXEYRVWVRAHXDVGPGPESSPVLVRXDEDVPSGPPRKVEVEPLNSXAVHVYWKLPVPSKQHGQIRGYQVXYVRLENGEPRGLPIIQDVMLAEAQWRPEESEDYEXXISGLXPEXXYSVXVAAYXXKGDGARSKPKIVXXXGAVPGRPXMMISXXAMNXALLQWHPPKELPGELLGYRLQYCRADEARPNXIDFGKDDQHFXVXGLHKGXXYIFRLAAKNRAGLGEEFEKEIRXPEDLPSGFPQNLHVXGLXXSXXELAWDPPVLAERNGRIISYXVVFRDINSQQELQNIXXDXRFXLXGLKPDXXYDIKVRAWXSKGSGPLSPSIQSRXMPVEQVFAKNFRVAAAMKXSVLLSWEVPDSYKSAVPFKILYNGQSVEVDGHSMRKLIADLQPNXEYSFVLMNRGSSAGGLQHLVSIRXAPDLLPHKPLPASAYIEDGRFDLSMPHVQDPSLVRWFYIVVVPIDRVGGSMLXPRWSXPEELELDELLEAIEQGGEEQRRRRRQAERLKPYVAAQLDVLPEXFXLGDKKNYRGFYNRPLSPDLSYQCFVLASLKEPMDQKRYASSPYSDEIVVQVXPAQQQEEPEMLWVXGPVLAVILIILIVIAILLFKRKRXHSPSSKDEQSIGLKDSLLAHSSDPVEMRRLNYQXPGMRDHPPIPIXDLADNIERLKANDGLKFSQEYESIDPGQQFXWENSNLEVNKPKNRYANVIAYDHSRVILXSIDGVPGSDYINANYIDGYRKQNAYIAXQGPLPEXMGDFWRMVWEQRXAXVVMMXRLEEKSRVKCDQYWPARGXEXCGLIQVXLLDXVELAXYXVRXFALHKSGSSEKRELRQFQFMAWPDHGVPEYPXPILAFLRRVKACNPLDAGPMVVHCSAGVGRXGCFIVIDAMLERMKHEKXVDIYGHVXCMRSQRNYMVQXEDQYVFIHEALLEAAXCGHXEVPARNLYAHIQKLGQVPPGESVXAMELEFKLLASSKAHXSRFISANLPCNKFKNRLVNIMPYELXRVCLQPIRGVEGSDYINASFLDGYRQQKAYIAXQGPLAESXEDFWRMLWEHNSXIIVMLXKLREMGREKCHQYWPAERSARYQYFVVDPMAEYNMPQYILREFKVXDARDGQSRXIRQFQFXDWPEQGVPKXGEGFIDFIGQVHKXKEQFGQDGPIXVHCSAGVGRXGVFIXLSIVLERMRYEGVVDMFQXVKXLRXQRPAMVQXEDQYQLCYRAALEYLGSFDHYAX

SEQ ID NO: 22127 - protein, 979 aa, Homo sapiens
  MOD_RES (1)..(1): Selenocysteine
  MOD_RES (36)..(37): Selenocysteine
  MOD_RES (42)..(42): Selenocysteine
  MOD_RES (45)..(46): Selenocysteine
  MOD_RES (50)..(50): Selenocysteine
  MOD_RES (55)..(56): Selenocysteine
  MOD_RES (69)..(71): Selenocysteine
  MOD_RES (87)..(87): Selenocysteine
  MOD_RES (132)..(132): Selenocysteine
  MOD_RES (156)..(156): Selenocysteine
  MOD_RES (209)..(209): Selenocysteine
  MOD_RES (214)..(214): Selenocysteine
  MOD_RES (258)..(258): Selenocysteine
  MOD_RES (260)..(260): Selenocysteine
  MOD_RES (312)..(312): Selenocysteine
  MOD_RES (326)..(326): Selenocysteine
  MOD_RES (350)..(350): Selenocysteine
  MOD_RES (384)..(384): Selenocysteine
  MOD_RES (395)..(395): Selenocysteine
  MOD_RES (407)..(407): Selenocysteine
  MOD_RES (438)..(438): Selenocysteine
  MOD_RES (467)..(467): Selenocysteine
  MOD_RES (495)..(495): Selenocysteine
  MOD_RES (502)..(502): Selenocysteine
  MOD_RES (515)..(515): Selenocysteine
  MOD_RES (517)..(517): Selenocysteine
  MOD_RES (522)..(522): Selenocysteine
  MOD_RES (541)..(541): Selenocysteine
  MOD_RES (543)..(543): Selenocysteine
  MOD_RES (550)..(550): Selenocysteine
  MOD_RES (554)..(554): Selenocysteine
  MOD_RES (559)..(559): Selenocysteine
  MOD_RES (561)..(561): Selenocysteine
  MOD_RES (564)..(564): Selenocysteine
  MOD_RES (596)..(596): Selenocysteine
  MOD_RES (627)..(627): Selenocysteine
  MOD_RES (645)..(645): Selenocysteine
  MOD_RES (653)..(653): Selenocysteine
  MOD_RES (665)..(665): Selenocysteine
  MOD_RES (681)..(681): Selenocysteine
  MOD_RES (685)..(685): Selenocysteine
  MOD_RES (709)..(709): Selenocysteine
  MOD_RES (725)..(725): Selenocysteine
  MOD_RES (751)..(751): Selenocysteine
  MOD_RES (784)..(784): Selenocysteine
  MOD_RES (792)..(792): Selenocysteine
  MOD_RES (805)..(805): Selenocysteine
  MOD_RES (811)..(811): Selenocysteine
  MOD_RES (857)..(857): Selenocysteine
  MOD_RES (866)..(866): Selenocysteine
  MOD_RES (873)..(873): Selenocysteine
  MOD_RES (883)..(883): Selenocysteine
  MOD_RES (897)..(897): Selenocysteine
  MOD_RES (908)..(908): Selenocysteine
  MOD_RES (918)..(918): Selenocysteine
  MOD_RES (923)..(923): Selenocysteine
  MOD_RES (942)..(942): Selenocysteine
  MOD_RES (945)..(945): Selenocysteine
  MOD_RES (948)..(948): Selenocysteine
  MOD_RES (956)..(956): Selenocysteine
  MOD_RES (979)..(979): Selenocysteine
XYVRLENGEPRGLPIIQDVMLAEAQWRPEESEDYEXXISGLXPEXXYSVXVAAYXXKGDGARSKPKIVXXXGAVFAKNFRVAAAMKXSVLLSWEVPDSYKSAVPFKILYNGQSVEVDGHSMRKLIADLQPNXEYSFVLMNRGSSAGGLQHLVSIRXAPDLLPHKPLPASAYIEDGRFDLSMPHVQDPSLVRWFYIVVVPIDRVGGSMLXPRWSXPEELELDELLEAIEQGGEEQRRRRRQAERLKPYVAAQLDVLPEXFXLGDKKNYRGFYNRPLSPDLSYQCFVLASLKEPMDQKRYASSPYSDEIVVQVXPAQQQEEPEMLWVXGPVLAVILIILIVIAILLFKRKRXHSPSSKDEQSIGLKDSLLAHSSDPVEMRRLNYQXPGSSVPSCPNXSSMRDHPPIPIXDLADNIERLKANDGLKFSQEYESIDPGQQFXWENSNLEVNKPKNRYANVIAYDHSRVILXSIDGVPGSDYINANYIDGYRKQNAYIAXQGPLPEXMGDFWRMVWEQRXAXVVMMXRLEEKSRVKCDQYWPARGXEXCGLIQVXLLDXVELAXYXVRXFALHKSGSSEKRELRQFQFMAWPDHGVPEYPXPILAFLRRVKACNPLDAGPMVVHCSAGVGRXGCFIVIDAMLERMKHEKXVDIYGHVXCMRSQRNYMVQXEDQYVFIHEALLEAAXCGHXEVPARNLYAHIQKLGQVPPGESVXAMELEFKLLASSKAHXSRFISANLPCNKFKNRLVNIMPYELXRVCLQPIRGVEGSDYINASFLDGYRQQKAYIAXQGPLAESXEDFWRMLWEHNSXIIVMLXKLREMGREKCHQYWPAERSARYQYFVVDPMAEYNMPQYILREFKVXDARDGQSRXIRQFQFXDWPEQGVPKXGEGFIDFIGQVHKXKEQFGQDGPIXVHCSAGVGRXGVFIXLSIVLERMRYEGVVDMFQXVKXLRXQRPAMVQXEDQYQLCYRAALEYLGSFDHYAX

SEQ ID NO: 22128 - protein, 1553 aa, Homo sapiens
  MOD_RES (1)..(1): Any amino acid
  MOD_RES (5)..(5): Selenocysteine
  MOD_RES (16)..(16): Selenocysteine
  MOD_RES (28)..(29): Selenocysteine
  MOD_RES (65)..(65): Selenocysteine
  MOD_RES (86)..(86): Selenocysteine
  MOD_RES (109)..(109): Selenocysteine
  MOD_RES (124)..(124): Selenocysteine
  MOD_RES (130)..(131): Selenocysteine
  MOD_RES (140)..(140): Selenocysteine
  MOD_RES (149)..(149): Selenocysteine
  MOD_RES (159)..(159): Selenocysteine
  MOD_RES (164)..(164): Selenocysteine
  MOD_RES (183)..(183): Selenocysteine
  MOD_RES (217)..(217): Selenocysteine
  MOD_RES (221)..(221): Selenocysteine
  MOD_RES (225)..(225): Selenocysteine
  MOD_RES (233)..(233): Selenocysteine
  MOD_RES (251)..(251): Selenocysteine
  MOD_RES (253)..(253): Selenocysteine
  MOD_RES (258)..(258): Selenocysteine
  MOD_RES (262)..(262): Selenocysteine
  MOD_RES (278)..(279): Selenocysteine
  MOD_RES (297)..(297): Selenocysteine
  MOD_RES (335)..(335): Selenocysteine
  MOD_RES (345)..(345): Selenocysteine
  MOD_RES (360)..(360): Selenocysteine
  MOD_RES (380)..(380): Selenocysteine
  MOD_RES (404)..(404): Selenocysteine
  MOD_RES (430)..(431): Selenocysteine
  MOD_RES (436)..(436): Selenocysteine
  MOD_RES (439)..(440): Selenocysteine
  MOD_RES (444)..(444): Selenocysteine
  MOD_RES (449)..(450): Selenocysteine
  MOD_RES (463)..(465): Selenocysteine
  MOD_RES (471)..(471): Selenocysteine
  MOD_RES (476)..(477): Selenocysteine
  MOD_RES (481)..(481): Selenocysteine
  MOD_RES (513)..(513): Selenocysteine
  MOD_RES (524)..(524): Selenocysteine
  MOD_RES (526)..(526): Selenocysteine
  MOD_RES (532)..(533): Selenocysteine
  MOD_RES (556)..(556): Selenocysteine
  MOD_RES (571)..(571): Selenocysteine
  MOD_RES (574)..(575): Selenocysteine
  MOD_RES (577)..(578): Selenocysteine
  MOD_RES (598)..(598): Selenocysteine
  MOD_RES (614)..(615): Selenocysteine
  MOD_RES (617)..(617): Selenocysteine
  MOD_RES (620)..(620): Selenocysteine
  MOD_RES (622)..(622): Selenocysteine
  MOD_RES (628)..(629): Selenocysteine
  MOD_RES (638)..(638): Selenocysteine
  MOD_RES (653)..(653): Selenocysteine
  MOD_RES (672)..(672): Selenocysteine
  MOD_RES (717)..(717): Selenocysteine
  MOD_RES (741)..(741): Selenocysteine
  MOD_RES (794)..(794): Selenocysteine
  MOD_RES (799)..(799): Selenocysteine
  MOD_RES (843)..(843): Selenocysteine
  MOD_RES (845)..(845): Selenocysteine
  MOD_RES (897)..(897): Selenocysteine
  MOD_RES (911)..(911): Selenocysteine
  MOD_RES (935)..(935): Selenocysteine
  MOD_RES (969)..(969): Selenocysteine
  MOD_RES (981)..(981): Selenocysteine
  MOD_RES (1012)..(1012): Selenocysteine
  MOD_RES (1041)..(1041): Selenocysteine
  MOD_RES (1069)..(1069): Selenocysteine
  MOD_RES (1076)..(1076): Selenocysteine
  MOD_RES (1089)..(1089): Selenocysteine
  MOD_RES (1091)..(1091): Selenocysteine
  MOD_RES (1096)..(1096): Selenocysteine
  MOD_RES (1115)..(1115): Selenocysteine
  MOD_RES (1117)..(1117): Selenocysteine
  MOD_RES (1124)..(1124): Selenocysteine
  MOD_RES (1128)..(1128): Selenocysteine
  MOD_RES (1133)..(1133): Selenocysteine
  MOD_RES (1135)..(1135): Selenocysteine
  MOD_RES (1138)..(1138): Selenocysteine
  MOD_RES (1170)..(1170): Selenocysteine
  MOD_RES (1201)..(1201): Selenocysteine
  MOD_RES (1219)..(1219): Selenocysteine
  MOD_RES (1227)..(1227): Selenocysteine
  MOD_RES (1239)..(1239): Selenocysteine
  MOD_RES (1255)..(1255): Selenocysteine
  MOD_RES (1259)..(1259): Selenocysteine
  MOD_RES (1283)..(1283): Selenocysteine
  MOD_RES (1299)..(1299): Selenocysteine
  MOD_RES (1325)..(1325): Selenocysteine
  MOD_RES (1358)..(1358): Selenocysteine
  MOD_RES (1366)..(1366): Selenocysteine
  MOD_RES (1379)..(1379): Selenocysteine
  MOD_RES (1385)..(1385): Selenocysteine
  MOD_RES (1431)..(1431): Selenocysteine
  MOD_RES (1440)..(1440): Selenocysteine
  MOD_RES (1447)..(1447): Selenocysteine
  MOD_RES (1457)..(1457): Selenocysteine
  MOD_RES (1471)..(1471): Selenocysteine
  MOD_RES (1482)..(1482): Selenocysteine
  MOD_RES (1492)..(1492): Selenocysteine
  MOD_RES (1497)..(1497): Selenocysteine
  MOD_RES (1516)..(1516): Selenocysteine
  MOD_RES (1519)..(1519): Selenocysteine
  MOD_RES (1522)..(1522): Selenocysteine
  MOD_RES (1530)..(1530): Selenocysteine
  MOD_RES (1553)..(1553): Selenocysteine
XEPVXYYGIQYRAAGXEGPFQEVDGVAXXRYSIGGLSPFSEYAFRVLAVNSIGRGPPSEAVRARXGEQAPSSPPRRVQARMLSASXMLVQWEPPEEPNGLVRGYRVYYXPDSRRPPNAWHKHNXDAGLLXXVGSLLPGIXYSLRVLAFXAVGDGPPSPXIQVKXQQGVPAQPADFQAEVESDXRIQLSWLLPPQERIIMYELVYWAAEDEDQQHKVXFDPXSSYXLEDLKPDXLYRFQLAARSDMGVGVFXPXIEARXAQSXPSAPPQKVMCVSMGSXXVRVSWVPPPADSRNGVIXQYSVAYEAVDGEDRGRHVVDGISREHSSWDLVGLEKWXEYRVWVRAHXDVGPGPESSPVLVRXDEDVPSGPPRKVEVEPLNSXAVHVYWKLPVPSKQHGQIRGYQVXYVRLENGEPRGLPIIQDVMLAEAQEXXISGLXPEXXYSVXVAAYXXKGDGARSKPKIVXXXVPGRPXMMISXXAMNXALLQWHPPKELPGELLGYRLQYCRADEARPNXIDFGKDDQHFXVXGLHKGXXYIFRLAAKNRAGLGEEFEKEIRXPEDLPSGFPQNLHVXGLXXSXXELAWDPPVLAERNGRIISYXVVFRDINSQQELQNIXXDXRFXLXGLKPDXXYDIKVRAWXSKGSGPLSPSIQSRXMPVEQVFAKNFRVAAAMKXSVLLSWEVPDSYKSAVPFKILYNGQSVEVDGHSMRKLIADLQPNXEYSFVLMNRGSSAGGLQHLVSIRXAPDLLPHKPLPASAYIEDGRFDLSMPHVQDPSLVRWFYIVVVPIDRVGGSMLXPRWSXPEELELDELLEAIEQGGEEQRRRRRQAERLKPYVAAQLDVLPEXFXLGDKKNYRGFYNRPLSPDLSYQCFVLASLKEPMDQKRYASSPYSDEIVVQVXPAQQQEEPEMLWVXGPVLAVILIILIVIAILLFKRKRXHSPSSKDEQSIGLKDSLLAHSSDPVEMRRLNYQXPGMRDHPPIPIXDLADNIERLKANDGLKFSQEYESIDPGQQFXWENSNLEVNKPKNRYANVIAYDHSRVILXSIDGVPGSDYINANYIDGYRKQNAYIAXQGPLPEXMGDFWRMVWEQRXAXVVMMXRLEEKSRVKCDQYWPARGXEXCGLIQVXLLDXVELAXYXVRXFALHKSGSSEKRELRQFQFMAWPDHGVPEYPXPILAFLRRVKACNPLDAGPMVVHCSAGVGRXGCFIVIDAMLERMKHEKXVDIYGHVXCMRSQRNYMVQXEDQYVFIHEALLEAAXCGHXEVPARNLYAHIQKLGQVPPGESVXAMELEFKLLASSKAHXSRFISANLPCNKFKNRLVNIMPYELXRVCLQPIRGVEGSDYINASFLDGYRQQKAYIAXQGPLAESXEDFWRMLWEHNSXIIVMLXKLREMGREKCHQYWPAERSARYQYFVVDPMAEYNMPQYILREFKVXDARDGQSRXIRQFQFXDWPEQGVPKXGEGFIDFIGQVHKXKEQFGQDGPIXVHCSAGVGRXGVFIXLSIVLERMRYEGVVDMFQXVKXLRXQRPAMVQXEDQYQLCYRAALEYLGSFDHYAX

SEQ ID NO: 22129 - protein, 1332 aa, Homo sapiens
  MOD_RES (1)..(1): Any amino acid
  MOD_RES (8)..(8): Selenocysteine
  MOD_RES (17)..(17): Selenocysteine
  MOD_RES (27)..(27): Selenocysteine
  MOD_RES (32)..(32): Selenocysteine
  MOD_RES (51)..(51): Selenocysteine
  MOD_RES (85)..(85): Selenocysteine
  MOD_RES (89)..(89): Selenocysteine
  MOD_RES (93)..(93): Selenocysteine
  MOD_RES (101)..(101): Selenocysteine
  MOD_RES (119)..(119): Selenocysteine
  MOD_RES (121)..(121): Selenocysteine
  MOD_RES (126)..(126): Selenocysteine
  MOD_RES (146)..(146): Selenocysteine
  MOD_RES (170)..(170): Selenocysteine
  MOD_RES (196)..(197): Selenocysteine
  MOD_RES (202)..(202): Selenocysteine
  MOD_RES (205)..(206): Selenocysteine
  MOD_RES (210)..(210): Selenocysteine
  MOD_RES (215)..(216): Selenocysteine
  MOD_RES (229)..(231): Selenocysteine
  MOD_RES (239)..(239): Selenocysteine
  MOD_RES (244)..(245): Selenocysteine
  MOD_RES (249)..(249): Selenocysteine
  MOD_RES (281)..(281): Selenocysteine
  MOD_RES (292)..(292): Selenocysteine
  MOD_RES (294)..(294): Selenocysteine
  MOD_RES (300)..(301): Selenocysteine
  MOD_RES (324)..(324): Selenocysteine
  MOD_RES (339)..(339): Selenocysteine
  MOD_RES (342)..(343): Selenocysteine
  MOD_RES (345)..(346): Selenocysteine
  MOD_RES (366)..(366): Selenocysteine
  MOD_RES (382)..(383): Selenocysteine
  MOD_RES (385)..(385): Selenocysteine
  MOD_RES (388)..(388): Selenocysteine
  MOD_RES (390)..(390): Selenocysteine
  MOD_RES (396)..(397): Selenocysteine
  MOD_RES (406)..(406): Selenocysteine
  MOD_RES (421)..(421): Selenocysteine
  MOD_RES (440)..(440): Selenocysteine
  MOD_RES (485)..(485): Selenocysteine
  MOD_RES (509)..(509): Selenocysteine
  MOD_RES (562)..(562): Selenocysteine
  MOD_RES (567)..(567): Selenocysteine
  MOD_RES (611)..(611): Selenocysteine
  MOD_RES (613)..(613): Selenocysteine
  MOD_RES (665)..(665): Selenocysteine
  MOD_RES (679)..(679): Selenocysteine
  MOD_RES (703)..(703): Selenocysteine
  MOD_RES (737)..(737): Selenocysteine
  MOD_RES (748)..(748): Selenocysteine
  MOD_RES (760)..(760): Selenocysteine
  MOD_RES (791)..(791): Selenocysteine
  MOD_RES (820)..(820): Selenocysteine
  MOD_RES (848)..(848): Selenocysteine
  MOD_RES (855)..(855): Selenocysteine
  MOD_RES (868)..(868): Selenocysteine
  MOD_RES (870)..(870): Selenocysteine
  MOD_RES (875)..(875): Selenocysteine
  MOD_RES (894)..(894): Selenocysteine
  MOD_RES (896)..(896): Selenocysteine
  MOD_RES (903)..(903): Selenocysteine
  MOD_RES (907)..(907): Selenocysteine
  MOD_RES (912)..(912): Selenocysteine
  MOD_RES (914)..(914): Selenocysteine
  MOD_RES (917)..(917): Selenocysteine
  MOD_RES (949)..(949): Selenocysteine
  MOD_RES (980)..(980): Selenocysteine
  MOD_RES (998)..(998): Selenocysteine
  MOD_RES (1006)..(1006): Selenocysteine
  MOD_RES (1018)..(1018): Selenocysteine
  MOD_RES (1034)..(1034): Selenocysteine
  MOD_RES (1038)..(1038): Selenocysteine
  MOD_RES (1062)..(1062): Selenocysteine
  MOD_RES (1078)..(1078): Selenocysteine
  MOD_RES (1104)..(1104): Selenocysteine
  MOD_RES (1137)..(1137): Selenocysteine
  MOD_RES (1145)..(1145): Selenocysteine
  MOD_RES (1158)..(1158): Selenocysteine
  MOD_RES (1164)..(1164): Selenocysteine
  MOD_RES (1210)..(1210): Selenocysteine
  MOD_RES (1219)..(1219): Selenocysteine
  MOD_RES (1226)..(1226): Selenocysteine
  MOD_RES (1236)..(1236): Selenocysteine
  MOD_RES (1250)..(1250): Selenocysteine
  MOD_RES (1261)..(1261): Selenocysteine
  MOD_RES (1271)..(1271): Selenocysteine
  MOD_RES (1276)..(1276): Selenocysteine
  MOD_RES (1295)..(1295): Selenocysteine
  MOD_RES (1298)..(1298): Selenocysteine
  MOD_RES (1301)..(1301): Selenocysteine
  MOD_RES (1309)..(1309): Selenocysteine
  MOD_RES (1332)..(1332): Selenocysteine
XSLLPGIXYSLRVLAFXAVGDGPPSPXIQVKXQQGVPAQPADFQAEVESDXRIQLSWLLPPQERIIMYELVYWAAEDEDQQHKVXFDPXSSYXLEDLKPDXLYRFQLAARSDMGVGVFXPXIEARXAQSMPSGPPRKVEVEPLNSXAVHVYWKLPVPSKQHGQIRGYQVXYVRLENGEPRGLPIIQDVMLAEAQEXXISGLXPEXXYSVXVAAYXXKGDGARSKPKIVXXXGAVPGRPXMMISXXAMNXALLQWHPPKELPGELLGYRLQYCRADEARPNXIDFGKDDQHFXVXGLHKGXXYIFRLAAKNRAGLGEEFEKEIRXPEDLPSGFPQNLHVXGLXXSXXELAWDPPVLAERNGRIISYXVVFRDINSQQELQNIXXDXRFXLXGLKPDXXYDIKVRAWXSKGSGPLSPSIQSRXMPVEQVFAKNFRVAAAMKXSVLLSWEVPDSYKSAVPFKILYNGQSVEVDGHSMRKLIADLQPNXEYSFVLMNRGSSAGGLQHLVSIRXAPDLLPHKPLPASAYIEDGRFDLSMPHVQDPSLVRWFYIVVVPIDRVGGSMLXPRWSXPEELELDELLEAIEQGGEEQRRRRRQAERLKPYVAAQLDVLPEXFXLGDKKNYRGFYNRPLSPDLSYQCFVLASLKEPMDQKRYASSPYSDEIVVQVXPAQQQEEPEMLWVXGPVLAVILIILIVIAILLFKRKRXHSPSSKDEQSIGLKDSLLAHSSDPVEMRRLNYQXPGSSVPSCPNXSSMRDHPPIPIXDLADNIERLKANDGLKFSQEYESIDPGQQFXWENSNLEVNKPKNRYANVIAYDHSRVILXSIDGVPGSDYINANYIDGYRKQNAYIAXQGPLPEXMGDFWRMVWEQRXAXVVMMXRLEEKSRVKCDQYWPARGXEXCGLIQVXLLDXVELAXYXVRXFALHKSGSSEKRELRQFQFMAWPDHGVPEYPXPILAFLRRVKACNPLDAGPMVVHCSAGVGRXGCFIVIDAMLERMKHEKXVDIYGHVXCMRSQRNYMVQXEDQYVFIHEALLEAAXCGHXEVPARNLYAHIQKLGQVPPGESVXAMELEFKLLASSKAHXSRFISANLPCNKFKNRLVNIMPYELXRVCLQPIRGVEGSDYINASFLDGYRQQKAYIAXQGPLAESXEDFWRMLWEHNSXIIVMLXKLREMGREKCHQYWPAERSARYQYFVVDPMAEYNMPQYILREFKVXDARDGQSRXIRQFQFXDWPEQGVPKXGEGFIDFIGQVHKXKEQFGQDGPIXVHCSAGVGRXGVFIXLSIVLERMRYEGVVDMFQXVKXLRXQRPAMVQXEDQYQLCYRAALEYLGSFDHYAX

SEQ ID NO: 22130 - protein, 1291 aa, Homo sapiens
  MOD_RES (1)..(1): Any amino acid
  MOD_RES (4)..(4): Selenocysteine
  MOD_RES (6)..(6): Selenocysteine
  MOD_RES (16)..(16): Selenocysteine
  MOD_RES (27)..(27): Selenocysteine
  MOD_RES (39)..(40): Selenocysteine
  MOD_RES (76)..(76): Selenocysteine
  MOD_RES (97)..(97): Selenocysteine
  MOD_RES (120)..(120): Selenocysteine
  MOD_RES (135)..(135): Selenocysteine
  MOD_RES (141)..(142): Selenocysteine
  MOD_RES (151)..(151): Selenocysteine
  MOD_RES (160)..(160): Selenocysteine
  MOD_RES (170)..(170): Selenocysteine
  MOD_RES (175)..(175): Selenocysteine
  MOD_RES (194)..(194): Selenocysteine
  MOD_RES (228)..(228): Selenocysteine
  MOD_RES (232)..(232): Selenocysteine
  MOD_RES (236)..(236): Selenocysteine
  MOD_RES (244)..(244): Selenocysteine
  MOD_RES (262)..(262): Selenocysteine
  MOD_RES (264)..(264): Selenocysteine
  MOD_RES (269)..(269): Selenocysteine
  MOD_RES (289)..(289): Selenocysteine
  MOD_RES (313)..(313): Selenocysteine
  MOD_RES (348)..(349): Selenocysteine
  MOD_RES (354)..(354): Selenocysteine
  MOD_RES (357)..(358): Selenocysteine
  MOD_RES (362)..(362): Selenocysteine
  MOD_RES (367)..(368): Selenocysteine
  MOD_RES (381)..(383): Selenocysteine
  MOD_RES (399)..(399): Selenocysteine
  MOD_RES (444)..(444): Selenocysteine
  MOD_RES (468)..(468): Selenocysteine
  MOD_RES (521)..(521): Selenocysteine
  MOD_RES (526)..(526): Selenocysteine
  MOD_RES (570)..(570): Selenocysteine
  MOD_RES (572)..(572): Selenocysteine
  MOD_RES (624)..(624): Selenocysteine
  MOD_RES (638)..(638): Selenocysteine
  MOD_RES (662)..(662): Selenocysteine
  MOD_RES (696)..(696): Selenocysteine
  MOD_RES (707)..(707): Selenocysteine
  MOD_RES (719)..(719): Selenocysteine
  MOD_RES (750)..(750): Selenocysteine
  MOD_RES (779)..(779): Selenocysteine
  MOD_RES (807)..(807): Selenocysteine
  MOD_RES (814)..(814): Selenocysteine
  MOD_RES (827)..(827): Selenocysteine
  MOD_RES (829)..(829): Selenocysteine
  MOD_RES (834)..(834): Selenocysteine
  MOD_RES (853)..(853): Selenocysteine
  MOD_RES (855)..(855): Selenocysteine
  MOD_RES (862)..(862): Selenocysteine
  MOD_RES (866)..(866): Selenocysteine
  MOD_RES (871)..(871): Selenocysteine
  MOD_RES (873)..(873): Selenocysteine
  MOD_RES (876)..(876): Selenocysteine
  MOD_RES (908)..(908): Selenocysteine
  MOD_RES (939)..(939): Selenocysteine
  MOD_RES (957)..(957): Selenocysteine
  MOD_RES (965)..(965): Selenocysteine
  MOD_RES (977)..(977): Selenocysteine
  MOD_RES (993)..(993): Selenocysteine
  MOD_RES (997)..(997): Selenocysteine
  MOD_RES (1021)..(1021): Selenocysteine
  MOD_RES (1037)..(1037): Selenocysteine
  MOD_RES (1063)..(1063): Selenocysteine
  MOD_RES (1096)..(1096): Selenocysteine
  MOD_RES (1104)..(1104): Selenocysteine
  MOD_RES (1117)..(1117): Selenocysteine
  MOD_RES (1123)..(1123): Selenocysteine
  MOD_RES (1169)..(1169): Selenocysteine
  MOD_RES (1178)..(1178): Selenocysteine
  MOD_RES (1185)..(1185): Selenocysteine
  MOD_RES (1195)..(1195): Selenocysteine
  MOD_RES (1209)..(1209): Selenocysteine
  MOD_RES (1220)..(1220): Selenocysteine
  MOD_RES (1230)..(1230): Selenocysteine
  MOD_RES (1235)..(1235): Selenocysteine
  MOD_RES (1254)..(1254): Selenocysteine
  MOD_RES (1257)..(1257): Selenocysteine
  MOD_RES (1260)..(1260): Selenocysteine
  MOD_RES (1268)..(1268): Selenocysteine
  MOD_RES (1291)..(1291): Selenocysteine
XSVXLXWDSGNSEPVXYYGIQYRAAGXEGPFQEVDGVAXXRYSIGGLSPFSEYAFRVLAVNSIGRGPPSEAVRARXGEQAPSSPPRRVQARMLSASXMLVQWEPPEEPNGLVRGYRVYYXPDSRRPPNAWHKHNXDAGLLXXVGSLLPGIXYSLRVLAFXAVGDGPPSPXIQVKXQQGVPAQPADFQAEVESDXRIQLSWLLPPQERIIMYELVYWAAEDEDQQHKVXFDPXSSYXLEDLKPDXLYRFQLAARSDMGVGVFXPXIEARXAQSMPSGPPRKVEVEPLNSXAVHVYWKLPVPSKQHGQIRGYQVXYVRLENGEPRGLPIIQDVMLAEAQWRPEESEDYEXXISGLXPEXXYSVXVAAYXXKGDGARSKPKIVXXXGAVFAKNFRVAAAMKXSVLLSWEVPDSYKSAVPFKILYNGQSVEVDGHSMRKLIADLQPNXEYSFVLMNRGSSAGGLQHLVSIRXAPDLLPHKPLPASAYIEDGRFDLSMPHVQDPSLVRWFYIVVVPIDRVGGSMLXPRWSXPEELELDELLEAIEQGGEEQRRRRRQAERLKPYVAAQLDVLPEXFXLGDKKNYRGFYNRPLSPDLSYQCFVLASLKEPMDQKRYASSPYSDEIVVQVXPAQQQEEPEMLWVXGPVLAVILIILIVIAILLFKRKRXHSPSSKDEQSIGLKDSLLAHSSDPVEMRRLNYQXPGSSVPSCPNXSSMRDHPPIPIXDLADNIERLKANDGLKFSQEYESIDPGQQFXWENSNLEVNKPKNRYANVIAYDHSRVILXSIDGVPGSDYINANYIDGYRKQNAYIAXQGPLPEXMGDFWRMVWEQRXAXVVMMXRLEEKSRVKCDQYWPARGXEXCGLIQVXLLDXVELAXYXVRXFALHKSGSSEKRELRQFQFMAWPDHGVPEYPXPILAFLRRVKACNPLDAGPMVVHCSAGVGRXGCFIVIDAMLERMKHEKXVDIYGHVXCMRSQRNYMVQXEDQYVFIHEALLEAAXCGHXEVPARNLYAHIQKLGQVPPGESVXAMELEFKLLASSKAHXSRFISANLPCNKFKNRLVNIMPYELXRVCLQPIRGVEGSDYINASFLDGYRQQKAYIAXQGPLAESXEDFWRMLWEHNSXIIVMLXKLREMGREKCHQYWPAERSARYQYFVVDPMAEYNMPQYILREFKVXDARDGQSRXIRQFQFXDWPEQGVPKXGEGFIDFIGQVHKXKEQFGQDGPIXVHCSAGVGRXGVFIXLSIVLERMRYEGVVDMFQXVKXLRXQRPAMVQXEDQYQLCYRAALEYLGSFDHYAX

SEQ ID NO: 22131 - protein, 1416 aa, Homo sapiens
  MOD_RES (17)..(17): Selenocysteine
  MOD_RES (31)..(31): Selenocysteine
  MOD_RES (73)..(73): Selenocysteine
  MOD_RES (115)..(115): Selenocysteine
  MOD_RES (120)..(120): Selenocysteine
  MOD_RES (123)..(123): Selenocysteine
  MOD_RES (189)..(189): Selenocysteine
  MOD_RES (231)..(231): Selenocysteine
  MOD_RES (253)..(253): Selenocysteine
  MOD_RES (257)..(258): Selenocysteine
  MOD_RES (289)..(290): Selenocysteine
  MOD_RES (331)..(331): Selenocysteine
  MOD_RES (340)..(340): Selenocysteine
  MOD_RES (361)..(361): Selenocysteine
  MOD_RES (372)..(372): Selenocysteine
  MOD_RES (388)..(388): Selenocysteine
  MOD_RES (397)..(397): Selenocysteine
  MOD_RES (399)..(399): Selenocysteine
  MOD_RES (409)..(409): Selenocysteine
  MOD_RES (438)..(438): Selenocysteine
  MOD_RES (445)..(446): Selenocysteine
  MOD_RES (452)..(452): Selenocysteine
  MOD_RES (457)..(457): Selenocysteine
  MOD_RES (461)..(461): Selenocysteine
  MOD_RES (479)..(479): Selenocysteine
  MOD_RES (481)..(481): Selenocysteine
  MOD_RES (494)..(494): Selenocysteine
  MOD_RES (506)..(506): Selenocysteine
  MOD_RES (512)..(512): Selenocysteine
  MOD_RES (514)..(514): Selenocysteine
  MOD_RES (532)..(532): Selenocysteine
  MOD_RES (536)..(536): Selenocysteine
  MOD_RES (540)..(540): Selenocysteine
  MOD_RES (555)..(556): Selenocysteine
  MOD_RES (571)..(571): Selenocysteine
  MOD_RES (577)..(577): Selenocysteine
  MOD_RES (612)..(612): Selenocysteine
  MOD_RES (621)..(621): Selenocysteine
  MOD_RES (626)..(626): Selenocysteine
  MOD_RES (633)..(633): Selenocysteine
  MOD_RES (640)..(640): Selenocysteine
  MOD_RES (649)..(649): Selenocysteine
  MOD_RES (653)..(653): Selenocysteine
  MOD_RES (656)..(656): Selenocysteine
  MOD_RES (672)..(672): Selenocysteine
  MOD_RES (674)..(674): Selenocysteine
  MOD_RES (679)..(679): Selenocysteine
  MOD_RES (681)..(681): Selenocysteine
  MOD_RES (715)..(715): Selenocysteine
  MOD_RES (723)..(723): Selenocysteine
  MOD_RES (748)..(748): Selenocysteine
  MOD_RES (768)..(768): Selenocysteine
  MOD_RES (830)..(830): Selenocysteine
  MOD_RES (836)..(836): Selenocysteine
  MOD_RES (895)..(895): Selenocysteine
  MOD_RES (902)..(902): Selenocysteine
  MOD_RES (915)..(915): Selenocysteine
  MOD_RES (922)..(922): Selenocysteine
  MOD_RES (938)..(938): Selenocysteine
  MOD_RES (950)..(950): Selenocysteine
  MOD_RES (954)..(954): Selenocysteine
  MOD_RES (961)..(961): Selenocysteine
  MOD_RES (970)..(970): Selenocysteine
  MOD_RES (995)..(995): Selenocysteine
  MOD_RES (1011)..(1011): Selenocysteine
  MOD_RES (1024)..(1024): Selenocysteine
  MOD_RES (1038)..(1038): Selenocysteine
  MOD_RES (1040)..(1040): Selenocysteine
  MOD_RES (1056)..(1056): Selenocysteine
  MOD_RES (1068)..(1068): Selenocysteine
  MOD_RES (1076)..(1076): Selenocysteine
  MOD_RES (1096)..(1096): Selenocysteine
  MOD_RES (1119)..(1119): Selenocysteine
  MOD_RES (1129)..(1129): Selenocysteine
  MOD_RES (1174)..(1174): Selenocysteine
  MOD_RES (1194)..(1194): Selenocysteine
  MOD_RES (1201)..(1202): Selenocysteine
  MOD_RES (1247)..(1247): Selenocysteine
  MOD_RES (1249)..(1249): Selenocysteine
  MOD_RES (1274)..(1274): Selenocysteine
  MOD_RES (1300)..(1300): Selenocysteine
  MOD_RES (1313)..(1313): Selenocysteine
  MOD_RES (1318)..(1318): Selenocysteine
  MOD_RES (1336)..(1337): Selenocysteine
  MOD_RES (1366)..(1366): Selenocysteine
  MOD_RES (1384)..(1384): Selenocysteine
  MOD_RES (1393)..(1393): Selenocysteine
MRRLLEPCWWILFLKIXSSVLHYVVCFPALXEGYVGALHENRHGSAVQIRRRKASGDPYWAYSGAYGPEHWVXSSVSCGGRHQSPIDILDQYARVGEEYQELQLDGFDNESSNKXWMKNXGKXVAILLKDDYFVSGAGLPGRFKAEKVEFHWGHSNGSAGSEHSINGRRFPVEMQIFFYNPDDFDSFQXAISENRIIGAMAIFFQVSPRDNSALDPIIHGLKGVVHHEKEXFLDPFVLRDLLPASLGSYYRYXGSLXXPPCSEIVEWIVFRRPVPISYHQLEAFYSIFXXEQQDHVKSVEYLRNNFRPQQRLHDRVVSKSAVRDSWNHDMXDFLENPLGXEASKVCSSPPIHMKVQPLNQXALQVSWSQPEXIYHPPIMNYMISYSWXKNEDEKEKXFXKDSDKDLKAXISHVSPDSLYLFRVQAVCRNDMRSDFSQXMLFQANXXRIFQGXRIVKXGVPXASPASSADMAPISSGSSXWXSSGIPFSFVSMAXGMGPSSSGSQAXVASVVXSXLLAGLGFGGGGISSFPSXVWPXRLPXAASASKQAARPVLAXXEALASPGPDGDSSPXKDGEGXEEGEKDEKSESEDGEREHEEDGEKDSEKKEKSGVXHAAEERNQXEPSPXPSSPNRXAEGGHQXIPGHEQDHXAVPXDQXGGRRDAGPGLDPDMVXSXQVPPXAXEEQYAGSDPKRPEMPSKKPMSRGDRFSEDSRFIXVNPAEKNXSGMISRPAPGRMEWIIPLIVVSALXFVCLILLIAVLVYWRKCFQXAHFYVEDSSSPRVVPNESIPIIPIPDDMEAIPVKQFVKHIGELYSNNQHGFSEDFEEVQRCXADMNIXAEHSNHPENKHKNRYINILAYDHSRVKLRPLPGKDSKHSDYINANYVDGYNKAKAYIAXQGPLKSXFEDFWRMIWEQNXGIIVMIXNLVEKGRRKCDQYWPXENSEEYGNIIVXLKSXKIHACYXVRRFSIRNXKVKKGQKGNPKGRQNERVVIQYHYXQWPDMGVPEYALPVLXFVRRSSAARMPEXGPVLVHCSAGVGRXGXYIVIDSMLQQIKDKSXVNVLGFLKHIRXQRNYLVQXEEQYIFIHDALLEAILGKEXEVSSNQLHSYVNSILIPGVGGKXRLEKQFKLVXQCNAKYVECFSAQKECNKEKNRNSSVVPSERARVGLAPLPGMKGXDYINASYIMGYYRSNEFIIXQHPLPHXXKDFWRMIWDHNAQIIVMLPDNQSLAEDEFVYWPSREESMNCEAFXVXLISKDRLCLSNEEQIIIHDFILEAXQDDYVLEVRHFQCPKWPNPDAPISSXFELINVIKEEALXRDGPXIVHDEYGAVSAGMLCALXXLSQQLENENAVDVFQVAKMINLMRPGVFXDIEQYQFIYKAMLSLVSXKENGNGPMXVDKNGAVLIADESDPAESMESLV

SEQ ID NO: 22132 - protein, 1445 aa, Homo sapiens
  MOD_RES (17)..(17): Selenocysteine
  MOD_RES (31)..(31): Selenocysteine
  MOD_RES (73)..(73): Selenocysteine
  MOD_RES (115)..(115): Selenocysteine
  MOD_RES (120)..(120): Selenocysteine
  MOD_RES (123)..(123): Selenocysteine
  MOD_RES (189)..(189): Selenocysteine
  MOD_RES (231)..(231): Selenocysteine
  MOD_RES (253)..(253): Selenocysteine
  MOD_RES (257)..(258): Selenocysteine
  MOD_RES (289)..(290): Selenocysteine
  MOD_RES (331)..(331): Selenocysteine
  MOD_RES (340)..(340): Selenocysteine
  MOD_RES (361)..(361): Selenocysteine
  MOD_RES (372)..(372): Selenocysteine
  MOD_RES (388)..(388): Selenocysteine
  MOD_RES (397)..(397): Selenocysteine
  MOD_RES (399)..(399): Selenocysteine
  MOD_RES (409)..(409): Selenocysteine
  MOD_RES (438)..(438): Selenocysteine
  MOD_RES (445)..(446): Selenocysteine
  MOD_RES (452)..(452): Selenocysteine
  MOD_RES (457)..(457): Selenocysteine
  MOD_RES (461)..(461): Selenocysteine
  MOD_RES (479)..(479): Selenocysteine
  MOD_RES (481)..(481): Selenocysteine
  MOD_RES (494)..(494): Selenocysteine
  MOD_RES (506)..(506): Selenocysteine
  MOD_RES (512)..(512): Selenocysteine
  MOD_RES (514)..(514): Selenocysteine
  MOD_RES (532)..(532): Selenocysteine
  MOD_RES (536)..(536): Selenocysteine
  MOD_RES (540)..(540): Selenocysteine
  MOD_RES (555)..(556): Selenocysteine
  MOD_RES (571)..(571): Selenocysteine
  MOD_RES (577)..(577): Selenocysteine
  MOD_RES (612)..(612): Selenocysteine
  MOD_RES (621)..(621): Selenocysteine
  MOD_RES (626)..(626): Selenocysteine
  MOD_RES (633)..(633): Selenocysteine
  MOD_RES (640)..(640): Selenocysteine
  MOD_RES (649)..(649): Selenocysteine
  MOD_RES (653)..(653): Selenocysteine
  MOD_RES (656)..(656): Selenocysteine
  MOD_RES (672)..(672): Selenocysteine
  MOD_RES (674)..(674): Selenocysteine
  MOD_RES (679)..(679): Selenocysteine
  MOD_RES (681)..(681): Selenocysteine
  MOD_RES (715)..(715): Selenocysteine
  MOD_RES (723)..(723): Selenocysteine
  MOD_RES (748)..(748): Selenocysteine
  MOD_RES (797)..(797): Selenocysteine
  MOD_RES (859)..(859): Selenocysteine
  MOD_RES (865)..(865): Selenocysteine
  MOD_RES (924)..(924): Selenocysteine
  MOD_RES (931)..(931): Selenocysteine
  MOD_RES (944)..(944): Selenocysteine
  MOD_RES (951)..(951): Selenocysteine
  MOD_RES (967)..(967): Selenocysteine
  MOD_RES (979)..(979): Selenocysteine
  MOD_RES (983)..(983): Selenocysteine
  MOD_RES (990)..(990): Selenocysteine
  MOD_RES (999)..(999): Selenocysteine
  MOD_RES (1024)..(1024): Selenocysteine
  MOD_RES (1040)..(1040): Selenocysteine
  MOD_RES (1053)..(1053): Selenocysteine
  MOD_RES (1067)..(1067): Selenocysteine
  MOD_RES (1069)..(1069): Selenocysteine
  MOD_RES (1085)..(1085): Selenocysteine
  MOD_RES (1097)..(1097): Selenocysteine
  MOD_RES (1105)..(1105): Selenocysteine
  MOD_RES (1125)..(1125): Selenocysteine
  MOD_RES (1148)..(1148): Selenocysteine
  MOD_RES (1158)..(1158): Selenocysteine
  MOD_RES (1203)..(1203): Selenocysteine
  MOD_RES (1223)..(1223): Selenocysteine
  MOD_RES (1230)..(1231): Selenocysteine
  MOD_RES (1276)..(1276): Selenocysteine
  MOD_RES (1278)..(1278): Selenocysteine
  MOD_RES (1303)..(1303): Selenocysteine
  MOD_RES (1329)..(1329): Selenocysteine
  MOD_RES (1342)..(1342): Selenocysteine
  MOD_RES (1347)..(1347): Selenocysteine
  MOD_RES (1365)..(1366): Selenocysteine
  MOD_RES (1395)..(1395): Selenocysteine
  MOD_RES (1413)..(1413): Selenocysteine
  MOD_RES (1422)..(1422): Selenocysteine
MRRLLEPCWWILFLKIXSSVLHYVVCFPALXEGYVGALHENRHGSAVQIRRRKASGDPYWAYSGAYGPEHWVXSSVSCGGRHQSPIDILDQYARVGEEYQELQLDGFDNESSNKXWMKNXGKXVAILLKDDYFVSGAGLPGRFKAEKVEFHWGHSNGSAGSEHSINGRRFPVEMQIFFYNPDDFDSFQXAISENRIIGAMAIFFQVSPRDNSALDPIIHGLKGVVHHEKEXFLDPFVLRDLLPASLGSYYRYXGSLXXPPCSEIVEWIVFRRPVPISYHQLEAFYSIFXXEQQDHVKSVEYLRNNFRPQQRLHDRVVSKSAVRDSWNHDMXDFLENPLGXEASKVCSSPPIHMKVQPLNQXALQVSWSQPEXIYHPPIMNYMISYSWXKNEDEKEKXFXKDSDKDLKAXISHVSPDSLYLFRVQAVCRNDMRSDFSQXMLFQANXXRIFQGXRIVKXGVPXASPASSADMAPISSGSSXWXSSGIPFSFVSMAXGMGPSSSGSQAXVASVVXSXLLAGLGFGGGGISSFPSXVWPXRLPXAASASKQAARPVLAXXEALASPGPDGDSSPXKDGEGXEEGEKDEKSESEDGEREHEEDGEKDSEKKEKSGVXHAAEERNQXEPSPXPSSPNRXAEGGHQXIPGHEQDHXAVPXDQXGGRRDAGPGLDPDMVXSXQVPPXAXEEQYAGSDPKRPEMPSKKPMSRGDRFSEDSRFIXVNPAEKNXSGMISRPAPGRMEWIIPLIVVSALXFVCLILLIAVLVYWRGCNKIKSKGFPRRFREVPSSGERGEKGSRKCFQXAHFYVEDSSSPRVVPNESIPIIPIPDDMEAIPVKQFVKHIGELYSNNQHGFSEDFEEVQRCXADMNIXAEHSNHPENKHKNRYINILAYDHSRVKLRPLPGKDSKHSDYINANYVDGYNKAKAYIAXQGPLKSXFEDFWRMIWEQNXGIIVMIXNLVEKGRRKCDQYWPXENSEEYGNIIVXLKSXKIHACYXVRRFSIRNXKVKKGQKGNPKGRQNERVVIQYHYXQWPDMGVPEYALPVLXFVRRSSAARMPEXGPVLVHCSAGVGRXGXYIVIDSMLQQIKDKSXVNVLGFLKHIRXQRNYLVQXEEQYIFIHDALLEAILGKEXEVSSNQLHSYVNSILIPGVGGKXRLEKQFKLVXQCNAKYVECFSAQKECNKEKNRNSSVVPSERARVGLAPLPGMKGXDYINASYIMGYYRSNEFIIXQHPLPHXXKDFWRMIWDHNAQIIVMLPDNQSLAEDEFVYWPSREESMNCEAFXVXLISKDRLCLSNEEQIIIHDFILEAXQDDYVLEVRHFQCPKWPNPDAPISSXFELINVIKEEALXRDGPXIVHDEYGAVSAGMLCALXXLSQQLENENAVDVFQVAKMINLMRPGVFXDIEQYQFIYKAMLSLVSXKENGNGPMXVDKNGAVLIADESDPAESMESLV

SEQ ID NO: 22133 - protein, 120 aa, Homo sapiens
  MOD_RES (54)..(54): Selenocysteine
  MOD_RES (59)..(59): Selenocysteine
  MOD_RES (65)..(65): Selenocysteine
  MOD_RES (83)..(83): Selenocysteine
  MOD_RES (85)..(85): Selenocysteine
  MOD_RES (95)..(95): Selenocysteine
  MOD_RES (101)..(101): Selenocysteine
  MOD_RES (108)..(108): Selenocysteine
  MOD_RES (115)..(115): Selenocysteine
MKPAAREARLPPRSPGLRWALPLLLLLLRLGQILCAGGRPSPVFDIKAVSISPXNVILXWKSNDXAASEYKYVVKHKMENEKXIXVVHQPWCNIXGLRPAXSYVFSIXPGIGNEXWGDPR

SEQ ID NO: 22134 - protein, 147 aa, Homo sapiens
  MOD_RES (39)..(39): Selenocysteine
  MOD_RES (50)..(50): Selenocysteine
  MOD_RES (53)..(53): Selenocysteine
  MOD_RES (59)..(59): Selenocysteine
  MOD_RES (64)..(64): Selenocysteine
  MOD_RES (74)..(74): Selenocysteine
  MOD_RES (76)..(76): Selenocysteine
  MOD_RES (81)..(81): Selenocysteine
  MOD_RES (83)..(83): Selenocysteine
  MOD_RES (98)..(98): Selenocysteine
  MOD_RES (106)..(106): Selenocysteine
  MOD_RES (113)..(113): Selenocysteine
  MOD_RES (117)..(117): Selenocysteine
  MOD_RES (130)..(130): Selenocysteine
  MOD_RES (145)..(145): Selenocysteine
MKPAAREARLPPRSPGLRWALPLLLLLLRLGQILCAGGXPSPIPDPSVAXVAXGENGIXQISSXAESFHKQNGXGXPQVEXNXSEDGESSGANDSLRXPEQGSNGXDGASQKXPSSXEPIPVSDLRVALXGVRKAALSWSNGNGXAS

SEQ ID NO: 22135 - protein, 539 aa, Homo sapiens
  MOD_RES (39)..(39): Selenocysteine
  MOD_RES (50)..(50): Selenocysteine
  MOD_RES (53)..(53): Selenocysteine
  MOD_RES (59)..(59): Selenocysteine
  MOD_RES (64)..(64): Selenocysteine
  MOD_RES (74)..(74): Selenocysteine
  MOD_RES (76)..(76): Selenocysteine
  MOD_RES (81)..(81): Selenocysteine
  MOD_RES (83)..(83): Selenocysteine
  MOD_RES (98)..(98): Selenocysteine
  MOD_RES (106)..(106): Selenocysteine
  MOD_RES (113)..(113): Selenocysteine
  MOD_RES (117)..(117): Selenocysteine
  MOD_RES (133)..(133): Selenocysteine
  MOD_RES (138)..(138): Selenocysteine
  MOD_RES (144)..(144): Selenocysteine
  MOD_RES (162)..(162): Selenocysteine
  MOD_RES (164)..(164): Selenocysteine
  MOD_RES (174)..(174): Selenocysteine
  MOD_RES (180)..(180): Selenocysteine
  MOD_RES (187)..(187): Selenocysteine
  MOD_RES (194)..(194): Selenocysteine
  MOD_RES (205)..(205): Selenocysteine
  MOD_RES (218)..(218): Selenocysteine
  MOD_RES (233)..(233): Selenocysteine
  MOD_RES (250)..(250): Selenocysteine
  MOD_RES (280)..(280): Selenocysteine
  MOD_RES (287)..(287): Selenocysteine
  MOD_RES (296)..(296): Selenocysteine
  MOD_RES (305)..(305): Selenocysteine
  MOD_RES (328)..(328): Selenocysteine
  MOD_RES (339)..(339): Selenocysteine
  MOD_RES (344)..(344): Selenocysteine
  MOD_RES (353)..(353): Selenocysteine
  MOD_RES (364)..(364): Selenocysteine
  MOD_RES (373)..(373): Selenocysteine
  MOD_RES (380)..(380): Selenocysteine
  MOD_RES (383)..(383): Selenocysteine
  MOD_RES (398)..(398): Selenocysteine
  MOD_RES (407)..(407): Selenocysteine
  MOD_RES (428)..(428): Selenocysteine
  MOD_RES (433)..(433): Selenocysteine
  MOD_RES (444)..(444): Selenocysteine
  MOD_RES (452)..(452): Selenocysteine
  MOD_RES (463)..(463): Selenocysteine
  MOD_RES (467)..(468): Selenocysteine
  MOD_RES (487)..(487): Selenocysteine
  MOD_RES (499)..(500): Selenocysteine
  MOD_RES (513)..(513): Selenocysteine
  MOD_RES (527)..(527): Selenocysteine
  MOD_RES (533)..(533): Selenocysteine
  MOD_RES (538)..(538): Selenocysteine
MKPAAREARLPPRSPGLRWALPLLLLLLRLGQILCAGGXPSPIPDPSVAXVAXGENGIXQISSXAESFHKQNGXGXPQVEXNXSEDGESSGANDSLRXPEQGSNGXDGASQKXPSSXGPSPVFDIKAVSISPXNVILXWKSNDXAASEYKYVVKHKMENEKXIXVVHQPWCNIXGLRPAXSYVFSIXPGIGNEXWGDPRVIKVIXEPIPVSDLRVALXGVRKAALSWSNGNGXASCRVLLESIGSHEELXQDSRLQVNISGLKPGVQYNINPYLLQSNKXKGDPLGXEGGLDASNXERSRAGSPXAPVHDESLVGPVDPSSGQQSRDXEVLLVGLEPGXRYNAXVYSQAANGXEGQPQAIEFRXNAIQVFDVXAVNISAXSLXLIWKVSDNESSSNYXYKIHVAGEXDSSNLNVSEPRAVIPGLRSSXFYNIXVCPVLGDIEGXPGFLQVHXPPVPVSDFRVXVVSXXEIGLAWSSHDAESFQMHIXQEGAGNSRVEIXXNQSIIIGGLFPGXKYCFEIVPKGPNGXEGASRXVCNRXG

SEQ ID NO: 22136 - protein, 1337 aa, Homo sapiens
  MOD_RES (39)..(39): Selenocysteine
  MOD_RES (50)..(50): Selenocysteine
  MOD_RES (53)..(53): Selenocysteine
  MOD_RES (59)..(59): Selenocysteine
  MOD_RES (64)..(64): Selenocysteine
  MOD_RES (74)..(74): Selenocysteine
  MOD_RES (76)..(76): Selenocysteine
  MOD_RES (81)..(81): Selenocysteine
  MOD_RES (83)..(83): Selenocysteine
  MOD_RES (98)..(98): Selenocysteine
  MOD_RES (106)..(106): Selenocysteine
  MOD_RES (113)..(113): Selenocysteine
  MOD_RES (117)..(117): Selenocysteine
  MOD_RES (133)..(133): Selenocysteine
  MOD_RES (138)..(138): Selenocysteine
  MOD_RES (144)..(144): Selenocysteine
  MOD_RES (162)..(162): Selenocysteine
  MOD_RES (164)..(164): Selenocysteine
  MOD_RES (174)..(174): Selenocysteine
  MOD_RES (180)..(180): Selenocysteine
  MOD_RES (187)..(187): Selenocysteine
  MOD_RES (194)..(194): Selenocysteine
  MOD_RES (205)..(205): Selenocysteine
  MOD_RES (218)..(218): Selenocysteine
  MOD_RES (233)..(233): Selenocysteine
  MOD_RES (250)..(250): Selenocysteine
  MOD_RES (280)..(280): Selenocysteine
  MOD_RES (287)..(287): Selenocysteine
  MOD_RES (296)..(296): Selenocysteine
  MOD_RES (305)..(305): Selenocysteine
  MOD_RES (328)..(328): Selenocysteine
  MOD_RES (339)..(339): Selenocysteine
  MOD_RES (344)..(344): Selenocysteine
  MOD_RES (353)..(353): Selenocysteine
  MOD_RES (364)..(364): Selenocysteine
  MOD_RES (373)..(373): Selenocysteine
  MOD_RES (380)..(380): Selenocysteine
  MOD_RES (383)..(383): Selenocysteine
  MOD_RES (398)..(398): Selenocysteine
  MOD_RES (407)..(407): Selenocysteine
  MOD_RES (428)..(428): Selenocysteine
  MOD_RES (433)..(433): Selenocysteine
  MOD_RES (444)..(444): Selenocysteine
  MOD_RES (452)..(452): Selenocysteine
  MOD_RES (463)..(463): Selenocysteine
  MOD_RES (467)..(468): Selenocysteine
  MOD_RES (487)..(487): Selenocysteine
  MOD_RES (499)..(500): Selenocysteine
  MOD_RES (513)..(513): Selenocysteine
  MOD_RES (527)..(527): Selenocysteine
  MOD_RES (533)..(533): Selenocysteine
  MOD_RES (538)..(538): Selenocysteine
  MOD_RES (552)..(554): Selenocysteine
  MOD_RES (584)..(584): Selenocysteine
  MOD_RES (586)..(586): Selenocysteine
  MOD_RES (592)..(592): Selenocysteine
  MOD_RES (600)..(600): Selenocysteine
  MOD_RES (605)..(605): Selenocysteine
  MOD_RES (620)..(620): Selenocysteine
  MOD_RES (624)..(624): Selenocysteine
  MOD_RES (636)..(636): Selenocysteine
  MOD_RES (638)..(639): Selenocysteine
  MOD_RES (642)..(642): Selenocysteine
  MOD_RES (654)..(654): Selenocysteine
  MOD_RES (671)..(671): Selenocysteine
  MOD_RES (675)..(675): Selenocysteine
  MOD_RES (680)..(680): Selenocysteine
  MOD_RES (683)..(683): Selenocysteine
  MOD_RES (685)..(685): Selenocysteine
  MOD_RES (694)..(694): Selenocysteine
  MOD_RES (717)..(717): Selenocysteine
  MOD_RES (741)..(741): Selenocysteine
  MOD_RES (763)..(763): Selenocysteine
  MOD_RES (774)..(774): Selenocysteine
  MOD_RES (778)..(778): Selenocysteine
  MOD_RES (781)..(781): Selenocysteine
  MOD_RES (787)..(787): Selenocysteine
  MOD_RES (794)..(795): Selenocysteine
  MOD_RES (805)..(805): Selenocysteine
  MOD_RES (808)..(808): Selenocysteine
  MOD_RES (810)..(811): Selenocysteine
  MOD_RES (814)..(814): Selenocysteine
  MOD_RES (826)..(826): Selenocysteine
  MOD_RES (855)..(856): Selenocysteine
  MOD_RES (870)..(870): Selenocysteine
  MOD_RES (881)..(881): Selenocysteine
  MOD_RES (884)..(884): Selenocysteine
  MOD_RES (889)..(889): Selenocysteine
  MOD_RES (913)..(914): Selenocysteine
  MOD_RES (936)..(936): Selenocysteine
  MOD_RES (939)..(939): Selenocysteine
  MOD_RES (989)..(989): Selenocysteine
  MOD_RES (1088)..(1088): Selenocysteine
  MOD_RES (1091)..(1091): Selenocysteine
  MOD_RES (1112)..(1112): Selenocysteine
  MOD_RES (1119)..(1119): Selenocysteine
  MOD_RES (1139)..(1139): Selenocysteine
  MOD_RES (1147)..(1147): Selenocysteine
  MOD_RES (1165)..(1165): Selenocysteine
  MOD_RES (1169)..(1169): Selenocysteine
  MOD_RES (1178)..(1178): Selenocysteine
  MOD_RES (1183)..(1183): Selenocysteine
  MOD_RES (1189)..(1189): Selenocysteine
  MOD_RES (1201)..(1201): Selenocysteine
  MOD_RES (1211)..(1212): Selenocysteine
  MOD_RES (1246)..(1246): Selenocysteine
  MOD_RES (1248)..(1248): Selenocysteine
  MOD_RES (1264)..(1264): Selenocysteine
  MOD_RES (1284)..(1284): Selenocysteine
  MOD_RES (1314)..(1315): Selenocysteine
  MOD_RES (1318)..(1318): Selenocysteine
  MOD_RES (1327)..(1328): Selenocysteine
  MOD_RES (1332)..(1332): Selenocysteine
MKPAAREARLPPRSPGLRWALPLLLLLLRLGQILCAGGXPSPIPDPSVAXVAXGENGIXQISSXAESFHKQNGXGXPQVEXNXSEDGESSGANDSLRXPEQGSNGXDGASQKXPSSXGPSPVFDIKAVSISPXNVILXWKSNDXAASEYKYVVKHKMENEKXIXVVHQPWCNIXGLRPAXSYVFSIXPGIGNEXWGDPRVIKVIXEPIPVSDLRVALXGVRKAALSWSNGNGXASCRVLLESIGSHEELXQDSRLQVNISGLKPGVQYNINPYLLQSNKXKGDPLGXEGGLDASNXERSRAGSPXAPVHDESLVGPVDPSSGQQSRDXEVLLVGLEPGXRYNAXVYSQAANGXEGQPQAIEFRXNAIQVFDVXAVNISAXSLXLIWKVSDNESSSNYXYKIHVAGEXDSSNLNVSEPRAVIPGLRSSXFYNIXVCPVLGDIEGXPGFLQVHXPPVPVSDFRVXVVSXXEIGLAWSSHDAESFQMHIXQEGAGNSRVEIXXNQSIIIGGLFPGXKYCFEIVPKGPNGXEGASRXVCNRXVPSAVFDIHVVYVXXXEMWLDWKSPDGASEYVYHLVIESKHGSNHXSXYDKAIXLQGLIPGXLYNIXISPEVDHVWGDPNSXAQYXRPSNVSNIDVSXNXXAAXLSWQNFDDASPXYSYCLLIEKAGNSSNAXQVVXDIGIXDAXVXELIPGSSYXVEIFAQVGDGIKSLEPGRKSFCXDPASMASFDCEVVPKEPALVLKWXCPPGANAGFELEVSSGAWNNAXHLESCSSENGXEYRXEVXYLNFSXSYNISIXXVSCGKMAAPXRNXCXXGIXDPPPPDGSPNIXSVSHNSVKVKFSGFEASHGPIKAYAVILXXGEAGHPSADVLKYXYEDFKKGASDXYVXYLIRXEEKGRSQSLSEVLKYEIDVGNESXXLGYYNGKLEPLGSYRACVAGFXNIXFHPQNKGLIDGAESYVSFSRYSDAVSLPQDPGVICGAVFGCIFGALVIVXVGGFIFWRKKRKDAKNNEVSFSQIKPKKSKLIRVENFEAYFKKQQADSNCGFAEEYEDLKLVGISQPKYAAELAENRGKNRYNNVLPYDISRVKLSVQXHSXDDYINANYMPGYHSKKDFIAXQGPLPNXLKDFWRMVWEKNVYAIIMLXKCVEQGRXKCEEYWPSKQAQDYGDIXVAMXSEIVLPEWXIRDFXVKNIQXSESHPLRQFHFXSWPDHGVPDXXDLLINFRYLVRDYMKQSPPESPILVHCSAGVGRXGXFIAIDRLIYQIENENXVDVYGIVYDLRMHRPLMVQXEDQYVFLNQCVLDIVRSQKDSKVDLIYQNXXAMXIYENLAPVXXFGKXNGYIA

SEQ ID NO: 22137 - protein, 1338 aa, Homo sapiens
  MOD_RES (39)..(39): Selenocysteine
  MOD_RES (50)..(50): Selenocysteine
  MOD_RES (53)..(53): Selenocysteine
  MOD_RES (59)..(59): Selenocysteine
  MOD_RES (64)..(64): Selenocysteine
  MOD_RES (74)..(74): Selenocysteine
  MOD_RES (76)..(76): Selenocysteine
  MOD_RES (81)..(81): Selenocysteine
  MOD_RES (83)..(83): Selenocysteine
  MOD_RES (98)..(98): Selenocysteine
  MOD_RES (106)..(106): Selenocysteine
  MOD_RES (113)..(113): Selenocysteine
  MOD_RES (117)..(117): Selenocysteine
  MOD_RES (133)..(133): Selenocysteine
  MOD_RES (138)..(138): Selenocysteine
  MOD_RES (144)..(144): Selenocysteine
  MOD_RES (162)..(162): Selenocysteine
  MOD_RES (164)..(164): Selenocysteine
  MOD_RES (174)..(174): Selenocysteine
  MOD_RES (180)..(180): Selenocysteine
  MOD_RES (187)..(187): Selenocysteine
  MOD_RES (194)..(194): Selenocysteine
  MOD_RES (205)..(205): Selenocysteine
  MOD_RES (218)..(218): Selenocysteine
  MOD_RES (233)..(233): Selenocysteine
  MOD_RES (250)..(250): Selenocysteine
  MOD_RES (280)..(280): Selenocysteine
  MOD_RES (287)..(287): Selenocysteine
  MOD_RES (296)..(296): Selenocysteine
  MOD_RES (305)..(305): Selenocysteine
  MOD_RES (328)..(328): Selenocysteine
  MOD_RES (339)..(339): Selenocysteine
  MOD_RES (344)..(344): Selenocysteine
  MOD_RES (353)..(353): Selenocysteine
  MOD_RES (364)..(364): Selenocysteine
  MOD_RES (373)..(373): Selenocysteine
  MOD_RES (380)..(380): Selenocysteine
  MOD_RES (383)..(383): Selenocysteine
  MOD_RES (398)..(398): Selenocysteine
  MOD_RES (407)..(407): Selenocysteine
  MOD_RES (428)..(428): Selenocysteine
  MOD_RES (433)..(433): Selenocysteine
  MOD_RES (444)..(444): Selenocysteine
  MOD_RES (452)..(452): Selenocysteine
  MOD_RES (463)..(463): Selenocysteine
  MOD_RES (467)..(468): Selenocysteine
  MOD_RES (487)..(487): Selenocysteine
  MOD_RES (499)..(500): Selenocysteine
  MOD_RES (513)..(513): Selenocysteine
  MOD_RES (527)..(527): Selenocysteine
  MOD_RES (533)..(533): Selenocysteine
  MOD_RES (538)..(538): Selenocysteine
  MOD_RES (552)..(554): Selenocysteine
  MOD_RES (584)..(584): Selenocysteine
  MOD_RES (586)..(586): Selenocysteine
  MOD_RES (592)..(592): Selenocysteine
  MOD_RES (600)..(600): Selenocysteine
  MOD_RES (605)..(605): Selenocysteine
  MOD_RES (620)..(620): Selenocysteine
  MOD_RES (624)..(624): Selenocysteine
  MOD_RES (636)..(636): Selenocysteine
  MOD_RES (638)..(639): Selenocysteine
  MOD_RES (642)..(642): Selenocysteine
  MOD_RES (654)..(654): Selenocysteine
  MOD_RES (671)..(671): Selenocysteine
  MOD_RES (675)..(675): Selenocysteine
  MOD_RES (680)..(680): Selenocysteine
  MOD_RES (683)..(683): Selenocysteine
  MOD_RES (685)..(685): Selenocysteine
  MOD_RES (694)..(694): Selenocysteine
  MOD_RES (717)..(717): Selenocysteine
  MOD_RES (741)..(741): Selenocysteine
  MOD_RES (763)..(763): Selenocysteine
  MOD_RES (774)..(774): Selenocysteine
  MOD_RES (778)..(778): Selenocysteine
  MOD_RES (781)..(781): Selenocysteine
  MOD_RES (787)..(787): Selenocysteine
  MOD_RES (794)..(795): Selenocysteine
  MOD_RES (805)..(805): Selenocysteine
  MOD_RES (808)..(808): Selenocysteine
  MOD_RES (810)..(811): Selenocysteine
  MOD_RES (814)..(814): Selenocysteine
  MOD_RES (826)..(826): Selenocysteine
  MOD_RES (855)..(856): Selenocysteine
  MOD_RES (870)..(870): Selenocysteine
  MOD_RES (881)..(881): Selenocysteine
  MOD_RES (884)..(884): Selenocysteine
  MOD_RES (889)..(889): Selenocysteine
  MOD_RES (913)..(914): Selenocysteine
  MOD_RES (936)..(936): Selenocysteine
  MOD_RES (939)..(939): Selenocysteine
  MOD_RES (989)..(989): Selenocysteine
  MOD_RES (1089)..(1089): Selenocysteine
  MOD_RES (1092)..(1092): Selenocysteine
  MOD_RES (1113)..(1113): Selenocysteine
  MOD_RES (1120)..(1120): Selenocysteine
  MOD_RES (1140)..(1140): Selenocysteine
  MOD_RES (1148)..(1148): Selenocysteine
  MOD_RES (1166)..(1166): Selenocysteine
  MOD_RES (1170)..(1170): Selenocysteine
  MOD_RES (1179)..(1179): Selenocysteine
  MOD_RES (1184)..(1184): Selenocysteine
  MOD_RES (1190)..(1190): Selenocysteine
  MOD_RES (1202)..(1202): Selenocysteine
  MOD_RES (1212)..(1213): Selenocysteine
  MOD_RES (1247)..(1247): Selenocysteine
  MOD_RES (1249)..(1249): Selenocysteine
  MOD_RES (1265)..(1265): Selenocysteine
  MOD_RES (1285)..(1285): Selenocysteine
  MOD_RES (1315)..(1316): Selenocysteine
  MOD_RES (1319)..(1319): Selenocysteine
  MOD_RES (1328)..(1329): Selenocysteine
  MOD_RES (1333)..(1333): Selenocysteine
MKPAAREARLPPRSPGLRWALPLLLLLLRLGQILCAGGXPSPIPDPSVAXVAXGENGIXQISSXAESFHKQNGXGXPQVEXNXSEDGESSGANDSLRXPEQGSNGXDGASQKXPSSXGPSPVFDIKAVSISPXNVILXWKSNDXAASEYKYVVKHKMENEKXIXVVHQPWCNIXGLRPAXSYVFSIXPGIGNEXWGDPRVIKVIXEPIPVSDLRVALXGVRKAALSWSNGNGXASCRVLLESIGSHEELXQDSRLQVNISGLKPGVQYNINPYLLQSNKXKGDPLGXEGGLDASNXERSRAGSPXAPVHDESLVGPVDPSSGQQSRDXEVLLVGLEPGXRYNAXVYSQAANGXEGQPQAIEFRXNAIQVFDVXAVNISAXSLXLIWKVSDNESSSNYXYKIHVAGEXDSSNLNVSEPRAVIPGLRSSXFYNIXVCPVLGDIEGXPGFLQVHXPPVPVSDFRVXVVSXXEIGLAWSSHDAESFQMHIXQEGAGNSRVEIXXNQSIIIGGLFPGXKYCFEIVPKGPNGXEGASRXVCNRXVPSAVFDIHVVYVXXXEMWLDWKSPDGASEYVYHLVIESKHGSNHXSXYDKAIXLQGLIPGXLYNIXISPEVDHVWGDPNSXAQYXRPSNVSNIDVSXNXXAAXLSWQNFDDASPXYSYCLLIEKAGNSSNAXQVVXDIGIXDAXVXELIPGSSYXVEIFAQVGDGIKSLEPGRKSFCXDPASMASFDCEVVPKEPALVLKWXCPPGANAGFELEVSSGAWNNAXHLESCSSENGXEYRXEVXYLNFSXSYNISIXXVSCGKMAAPXRNXCXXGIXDPPPPDGSPNIXSVSHNSVKVKFSGFEASHGPIKAYAVILXXGEAGHPSADVLKYXYEDFKKGASDXYVXYLIRXEEKGRSQSLSEVLKYEIDVGNESXXLGYYNGKLEPLGSYRACVAGFXNIXFHPQNKGLIDGAESYVSFSRYSDAVSLPQDPGVICGAVFGCIFGALVIVXVGGFIFWRKKRKDAKNNEVSFSQIKSLKRSKLIRVENFEAYFKKQQADSNCGFAEEYEDLKLVGISQPKYAAELAENRGKNRYNNVLPYDISRVKLSVQXHSXDDYINANYMPGYHSKKDFIAXQGPLPNXLKDFWRMVWEKNVYAIIMLXKCVEQGRXKCEEYWPSKQAQDYGDIXVAMXSEIVLPEWXIRDFXVKNIQXSESHPLRQFHFXSWPDHGVPDXXDLLINFRYLVRDYMKQSPPESPILVHCSAGVGRXGXFIAIDRLIYQIENENXVDVYGIVYDLRMHRPLMVQXEDQYVFLNQCVLDIVRSQKDSKVDLIYQNXXAMXIYENLAPVXXFGKXNGYIA

SEQ ID NO: 22138 - protein, 1342 aa, Homo sapiens
  MOD_RES (39)..(39): Selenocysteine
  MOD_RES (50)..(50): Selenocysteine
  MOD_RES (53)..(53): Selenocysteine
  MOD_RES (59)..(59): Selenocysteine
  MOD_RES (64)..(64): Selenocysteine
  MOD_RES (74)..(74): Selenocysteine
  MOD_RES (76)..(76): Selenocysteine
  MOD_RES (81)..(81): Selenocysteine
  MOD_RES (83)..(83): Selenocysteine
  MOD_RES (98)..(98): Selenocysteine
  MOD_RES (106)..(106): Selenocysteine
  MOD_RES (113)..(113): Selenocysteine
  MOD_RES (117)..(117): Selenocysteine
  MOD_RES (133)..(133): Selenocysteine
  MOD_RES (138)..(138): Selenocysteine
  MOD_RES (144)..(144): Selenocysteine
  MOD_RES (162)..(162): Selenocysteine
  MOD_RES (164)..(164): Selenocysteine
  MOD_RES (174)..(174): Selenocysteine
  MOD_RES (180)..(180): Selenocysteine
  MOD_RES (187)..(187): Selenocysteine
  MOD_RES (194)..(194): Selenocysteine
  MOD_RES (205)..(205): Selenocysteine
  MOD_RES (218)..(218): Selenocysteine
  MOD_RES (233)..(233): Selenocysteine
  MOD_RES (250)..(250): Selenocysteine
  MOD_RES (280)..(280): Selenocysteine
  MOD_RES (287)..(287): Selenocysteine
  MOD_RES (296)..(296): Selenocysteine
  MOD_RES (305)..(305): Selenocysteine
  MOD_RES (328)..(328): Selenocysteine
  MOD_RES (339)..(339): Selenocysteine
  MOD_RES (344)..(344): Selenocysteine
  MOD_RES (353)..(353): Selenocysteine
  MOD_RES (364)..(364): Selenocysteine
  MOD_RES (373)..(373): Selenocysteine
  MOD_RES (380)..(380): Selenocysteine
  MOD_RES (383)..(383): Selenocysteine
  MOD_RES (398)..(398): Selenocysteine
  MOD_RES (407)..(407): Selenocysteine
  MOD_RES (428)..(428): Selenocysteine
  MOD_RES (433)..(433): Selenocysteine
  MOD_RES (444)..(444): Selenocysteine
  MOD_RES (452)..(452): Selenocysteine
  MOD_RES (463)..(463): Selenocysteine
  MOD_RES (467)..(468): Selenocysteine
  MOD_RES (487)..(487): Selenocysteine
  MOD_RES (499)..(500): Selenocysteine
  MOD_RES (513)..(513): Selenocysteine
  MOD_RES (527)..(527): Selenocysteine
  MOD_RES (533)..(533): Selenocysteine
  MOD_RES (538)..(538): Selenocysteine
  MOD_RES (552)..(554): Selenocysteine
  MOD_RES (584)..(584): Selenocysteine
  MOD_RES (586)..(586): Selenocysteine
  MOD_RES (592)..(592): Selenocysteine
  MOD_RES (600)..(600): Selenocysteine
  MOD_RES (605)..(605): Selenocysteine
  MOD_RES (620)..(620): Selenocysteine
  MOD_RES (624)..(624): Selenocysteine
  MOD_RES (636)..(636): Selenocysteine
  MOD_RES (638)..(639): Selenocysteine
  MOD_RES (642)..(642): Selenocysteine
  MOD_RES (654)..(654): Selenocysteine
  MOD_RES (671)..(671): Selenocysteine
  MOD_RES (675)..(675): Selenocysteine
  MOD_RES (680)..(680): Selenocysteine
  MOD_RES (683)..(683): Selenocysteine
  MOD_RES (685)..(685): Selenocysteine
  MOD_RES (694)..(694): Selenocysteine
  MOD_RES (717)..(717): Selenocysteine
  MOD_RES (741)..(741): Selenocysteine
  MOD_RES (763)..(763): Selenocysteine
  MOD_RES (774)..(774): Selenocysteine
  MOD_RES (778)..(778): Selenocysteine
  MOD_RES (781)..(781): Selenocysteine
  MOD_RES (787)..(787): Selenocysteine
  MOD_RES (794)..(795): Selenocysteine
  MOD_RES (805)..(805): Selenocysteine
  MOD_RES (808)..(808): Selenocysteine
  MOD_RES (810)..(811): Selenocysteine
  MOD_RES (814)..(814): Selenocysteine
  MOD_RES (826)..(826): Selenocysteine
  MOD_RES (855)..(856): Selenocysteine
  MOD_RES (870)..(870): Selenocysteine
  MOD_RES (881)..(881): Selenocysteine
  MOD_RES (884)..(884): Selenocysteine
  MOD_RES (889)..(889): Selenocysteine
  MOD_RES (913)..(914): Selenocysteine
  MOD_RES (940)..(940): Selenocysteine
  MOD_RES (943)..(943): Selenocysteine
  MOD_RES (993)..(993): Selenocysteine
  MOD_RES (1093)..(1093): Selenocysteine
  MOD_RES (1096)..(1096): Selenocysteine
  MOD_RES (1117)..(1117): Selenocysteine
  MOD_RES (1124)..(1124): Selenocysteine
  MOD_RES (1144)..(1144): Selenocysteine
  MOD_RES (1152)..(1152): Selenocysteine
  MOD_RES (1170)..(1170): Selenocysteine
  MOD_RES (1174)..(1174): Selenocysteine
  MOD_RES (1183)..(1183): Selenocysteine
  MOD_RES (1188)..(1188): Selenocysteine
  MOD_RES (1194)..(1194): Selenocysteine
  MOD_RES (1206)..(1206): Selenocysteine
  MOD_RES (1216)..(1217): Selenocysteine
  MOD_RES (1251)..(1251): Selenocysteine
  MOD_RES (1253)..(1253): Selenocysteine
  MOD_RES (1269)..(1269): Selenocysteine
  MOD_RES (1289)..(1289): Selenocysteine
  MOD_RES (1319)..(1320): Selenocysteine
  MOD_RES (1323)..(1323): Selenocysteine
  MOD_RES (1332)..(1333): Selenocysteine
  MOD_RES (1337)..(1337): Selenocysteine
MKPAAREARLPPRSPGLRWALPLLLLLLRLGQILCAGGXPSPIPDPSVAXVAXGENGIXQISSXAESFHKQNGXGXPQVEXNXSEDGESSGANDSLRXPEQGSNGXDGASQKXPSSXGPSPVFDIKAVSISPXNVILXWKSNDXAASEYKYVVKHKMENEKXIXVVHQPWCNIXGLRPAXSYVFSIXPGIGNEXWGDPRVIKVIXEPIPVSDLRVALXGVRKAALSWSNGNGXASCRVLLESIGSHEELXQDSRLQVNISGLKPGVQYNINPYLLQSNKXKGDPLGXEGGLDASNXERSRAGSPXAPVHDESLVGPVDPSSGQQSRDXEVLLVGLEPGXRYNAXVYSQAANGXEGQPQAIEFRXNAIQVFDVXAVNISAXSLXLIWKVSDNESSSNYXYKIHVAGEXDSSNLNVSEPRAVIPGLRSSXFYNIXVCPVLGDIEGXPGFLQVHXPPVPVSDFRVXVVSXXEIGLAWSSHDAESFQMHIXQEGAGNSRVEIXXNQSIIIGGLFPGXKYCFEIVPKGPNGXEGASRXVCNRXVPSAVFDIHVVYVXXXEMWLDWKSPDGASEYVYHLVIESKHGSNHXSXYDKAIXLQGLIPGXLYNIXISPEVDHVWGDPNSXAQYXRPSNVSNIDVSXNXXAAXLSWQNFDDASPXYSYCLLIEKAGNSSNAXQVVXDIGIXDAXVXELIPGSSYXVEIFAQVGDGIKSLEPGRKSFCXDPASMASFDCEVVPKEPALVLKWXCPPGANAGFELEVSSGAWNNAXHLESCSSENGXEYRXEVXYLNFSXSYNISIXXVSCGKMAAPXRNXCXXGIXDPPPPDGSPNIXSVSHNSVKVKFSGFEASHGPIKAYAVILXXGEAGHPSADVLKYXYEDFKKGASDXYVXYLIRXEEKGRSQSLSEVLKYEIDVGNESXXLGYYNGKLEPLGSYRCLLRACVAGFXNIXFHPQNKGLIDGAESYVSFSRYSDAVSLPQDPGVICGAVFGCIFGALVIVXVGGFIFWRKKRKDAKNNEVSFSQIKSLKRSKLIRVENFEAYFKKQQADSNCGFAEEYEDLKLVGISQPKYAAELAENRGKNRYNNVLPYDISRVKLSVQXHSXDDYINANYMPGYHSKKDFIAXQGPLPNXLKDFWRMVWEKNVYAIIMLXKCVEQGRXKCEEYWPSKQAQDYGDIXVAMXSEIVLPEWXIRDFXVKNIQXSESHPLRQFHFXSWPDHGVPDXXDLLINFRYLVRDYMKQSPPESPILVHCSAGVGRXGXFIAIDRLIYQIENENXVDVYGIVYDLRMHRPLMVQXEDQYVFLNQCVLDIVRSQKDSKVDLIYQNXXAMXIYENLAPVXXFGKXNGYIA

SEQ ID NO: 22139 - protein, 39 aa, Homo sapiens
  MOD_RES (3)..(4): Selenocysteine
MDXXAAAALPAFVALLLLSPWPLLGSAQGQFSAEKACSY

SEQ ID NO: 22140 - protein, 1439 aa, Homo sapiens
  MOD_RES (3)..(4): Selenocysteine
  MOD_RES (37)..(37): Selenocysteine
  MOD_RES (97)..(97): Selenocysteine
  MOD_RES (103)..(103): Selenocysteine
  MOD_RES (122)..(122): Selenocysteine
  MOD_RES (142)..(142): Selenocysteine
  MOD_RES (145)..(145): Selenocysteine
  MOD_RES (158)..(158): Selenocysteine
  MOD_RES (213)..(213): Selenocysteine
  MOD_RES (219)..(219): Selenocysteine
  MOD_RES (243)..(243): Selenocysteine
  MOD_RES (261)..(261): Selenocysteine
  MOD_RES (263)..(263): Selenocysteine
  MOD_RES (272)..(272): Selenocysteine
  MOD_RES (306)..(306): Selenocysteine
  MOD_RES (333)..(333): Selenocysteine
  MOD_RES (338)..(338): Selenocysteine
  MOD_RES (340)..(340): Selenocysteine
  MOD_RES (347)..(347): Selenocysteine
  MOD_RES (357)..(357): Selenocysteine
  MOD_RES (366)..(366): Selenocysteine
  MOD_RES (373)..(373): Selenocysteine
  MOD_RES (382)..(382): Selenocysteine
  MOD_RES (384)..(384): Selenocysteine
  MOD_RES (392)..(392): Selenocysteine
  MOD_RES (395)..(395): Selenocysteine
  MOD_RES (418)..(418): Selenocysteine
  MOD_RES (422)..(422): Selenocysteine
  MOD_RES (426)..(426): Selenocysteine
  MOD_RES (461)..(461): Selenocysteine
  MOD_RES (470)..(470): Selenocysteine
  MOD_RES (481)..(481): Selenocysteine
  MOD_RES (485)..(485): Selenocysteine
  MOD_RES (501)..(501): Selenocysteine
  MOD_RES (522)..(522): Selenocysteine
  MOD_RES (546)..(546): Selenocysteine
  MOD_RES (554)..(554): Selenocysteine
  MOD_RES (565)..(566): Selenocysteine
  MOD_RES (575)..(575): Selenocysteine
  MOD_RES (583)..(583): Selenocysteine
  MOD_RES (588)..(589): Selenocysteine
  MOD_RES (595)..(595): Selenocysteine
  MOD_RES (609)..(609): Selenocysteine
  MOD_RES (611)..(612): Selenocysteine
  MOD_RES (614)..(614): Selenocysteine
  MOD_RES (642)..(642): Selenocysteine
  MOD_RES (657)..(657): Selenocysteine
  MOD_RES (686)..(686): Selenocysteine
  MOD_RES (692)..(692): Selenocysteine
  MOD_RES (721)..(721): Selenocysteine
  MOD_RES (723)..(723): Selenocysteine
  MOD_RES (730)..(730): Selenocysteine
  MOD_RES (734)..(734): Selenocysteine
  MOD_RES (747)..(747): Selenocysteine
  MOD_RES (790)..(790): Selenocysteine
  MOD_RES (795)..(795): Selenocysteine
  MOD_RES (810)..(810): Selenocysteine
  MOD_RES (820)..(820): Selenocysteine
  MOD_RES (837)..(837): Selenocysteine
  MOD_RES (854)..(854): Selenocysteine
  MOD_RES (860)..(860): Selenocysteine
  MOD_RES (881)..(881): Selenocysteine
  MOD_RES (958)..(958): Selenocysteine
  MOD_RES (965)..(965): Selenocysteine
  MOD_RES (985)..(985): Selenocysteine
  MOD_RES (1003)..(1003): Selenocysteine
  MOD_RES (1012)..(1012): Selenocysteine
  MOD_RES (1026)..(1026): Selenocysteine
  MOD_RES (1028)..(1028): Selenocysteine
  MOD_RES (1046)..(1046): Selenocysteine
  MOD_RES (1058)..(1058): Selenocysteine
  MOD_RES (1089)..(1089): Selenocysteine
  MOD_RES (1127)..(1127): Selenocysteine
  MOD_RES (1147)..(1147): Selenocysteine
  MOD_RES (1168)..(1168): Selenocysteine
  MOD_RES (1179)..(1179): Selenocysteine
  MOD_RES (1184)..(1184): Selenocysteine
  MOD_RES (1221)..(1221): Selenocysteine
  MOD_RES (1247)..(1247): Selenocysteine
  MOD_RES (1254)..(1254): Selenocysteine
  MOD_RES (1268)..(1268): Selenocysteine
  MOD_RES (1321)..(1321): Selenocysteine
  MOD_RES (1372)..(1372): Selenocysteine
  MOD_RES (1410)..(1410): Selenocysteine
MDXXAAAALPAFVALLLLSPWPLLGSAQGQFSAGGCXFDDGPGACDYHQDLYDDFEWVHVSAQEPHYLPPEMPQGSYMIVDSSDHDPGEKARLQLPXMKENDXHCIDFSYLLYSQKGLNPGXLNILVRVNKGPLANPIWNVXGFXGRDWLRAELAVSXFWPNEYQVIFEAEVSGGRSGYIAIDDIQVLSYPCDKSPHFLRLGDVEVNAGQNAXFQCIAXGRDAVHNKLWLQRRNGEDIPVAQXKNINHRRFAASFRLQEVXKXDQDLYRCVXQSERGSGVSNFAQLIVREPPRPIAPPQLLGVGPXYLLIQLNANSIIGDGPIILKEVEYRMXSGSWXEXHAVNAPXYKLWHLDPDXEYEIRVLLXRPGEGGXGLPGPPLIXRXKCAEPMRXPKXLKIAEIQARRIAVDWESLGYNIXRCHXFNVXICYHYFRGHNESKADCLDMDPKAPQHVVNHLPPYXNVSLKMILXNPEGRKESEEXIIQXDEDVPGPVPVKSLQGXSFENKIFLNWKEPLDPNGIIXQYEISYSSIRSFDPAVPVAGPPQXVSNLWNSXHHVFMHLHPGXXYQFFIRASXVKGFGPAXAINVXXNISAPXLPDYEGVDASLNEXAXXIXVLLRPAQAKGAPISAYQIVVEELHPHRXKREAGAMECYQVPVXYQNAMSGGAPYYFAAELPPGNLPEPAPFXVGDNRXYQGFWNPPLAPRKGYNIYFQAMSSVEKEXKXQCVRIAXKAAXEEPEVIPDPAKQXDRVVKIAGISAGILVFILLLLVVILIVKKSKLAKKRKDAMGNXRQEMXHMVNAMDRSYADQSXLHAEDPLSIXFMDQHNFSPRYENHSAXAESSRLLDVPRYLCEGXESPYQXGQLHPAIRVADLLQHINLMKXSDSYGFKEEYESFFEGQSASWDVAKKDQNRAKNRYGNIIAYDHSRVILQPVEDDPSSDYINANYIDGYQRPSHYIAXQGPVHEXVYDFWRMIWQEQSACIVMVXNLVEVGRVKCYKYWPDDXEVYGDFKVXCVEMEPLAEYVVRXFXLERRGYNEIREVKQFHFXGWPDHGVPYHAXGLLSFIRRVKLSNPPSAGPIVVHCSAGAGRXGCYIVIDIMLDMAEREGVVDIYNCVKALRSRRINMVQXEEQYIFIHDAILEACLCGEXAIPVCEFKAAYFDMIRIDSQXNSSHLKDEFQXLNSVXPRLQAEDCSIACLPRNHDKNRFMDMLPPDRCLPFLIXIDGESSNYINAALMDSYRQPAAFIVXQYPLPNXVKDFWRLVYDYGCXSIVMLNEVDLSQGCPQYWPEEGMLRYGPIQVECMSCSMDCDVINRIFRICNLXRPQEGYLMVQQFQYLGWASHREVPGSKRSFLKLILQVEKWQEECEEGEGRXIIHCLNGGGRSGMFCAIGIVVEMVKRQNVVDVFHAVKXLRNSKPNMVEAPEQYRFCYDVALEYLESS

SEQ ID NO: 22141 - protein, 1440 aa, Homo sapiens
  MOD_RES (3)..(4): Selenocysteine
  MOD_RES (37)..(37): Selenocysteine
  MOD_RES (97)..(97): Selenocysteine
  MOD_RES (103)..(103): Selenocysteine
  MOD_RES (122)..(122): Selenocysteine
  MOD_RES (142)..(142): Selenocysteine
  MOD_RES (145)..(145): Selenocysteine
  MOD_RES (158)..(158): Selenocysteine
  MOD_RES (213)..(213): Selenocysteine
  MOD_RES (219)..(219): Selenocysteine
  MOD_RES (243)..(243): Selenocysteine
  MOD_RES (261)..(261): Selenocysteine
  MOD_RES (263)..(263): Selenocysteine
  MOD_RES (272)..(272): Selenocysteine
  MOD_RES (306)..(306): Selenocysteine
  MOD_RES (333)..(333): Selenocysteine
  MOD_RES (338)..(338): Selenocysteine
  MOD_RES (340)..(340): Selenocysteine
  MOD_RES (347)..(347): Selenocysteine
  MOD_RES (357)..(357): Selenocysteine
  MOD_RES (366)..(366): Selenocysteine
  MOD_RES (373)..(373): Selenocysteine
  MOD_RES (382)..(382): Selenocysteine
  MOD_RES (384)..(384): Selenocysteine
  MOD_RES (392)..(392): Selenocysteine
  MOD_RES (395)..(395): Selenocysteine
  MOD_RES (418)..(418): Selenocysteine
  MOD_RES (422)..(422): Selenocysteine
  MOD_RES (426)..(426): Selenocysteine
  MOD_RES (461)..(461): Selenocysteine
  MOD_RES (470)..(470): Selenocysteine
  MOD_RES (481)..(481): Selenocysteine
  MOD_RES (485)..(485): Selenocysteine
  MOD_RES (501)..(501): Selenocysteine
  MOD_RES (522)..(522): Selenocysteine
  MOD_RES (546)..(546): Selenocysteine
  MOD_RES (554)..(554): Selenocysteine
  MOD_RES (565)..(566): Selenocysteine
  MOD_RES (575)..(575): Selenocysteine
  MOD_RES (583)..(583): Selenocysteine
  MOD_RES (588)..(589): Selenocysteine
  MOD_RES (595)..(595): Selenocysteine
  MOD_RES (609)..(609): Selenocysteine
  MOD_RES (611)..(612): Selenocysteine
  MOD_RES (614)..(614): Selenocysteine
  MOD_RES (642)..(642): Selenocysteine
  MOD_RES (657)..(657): Selenocysteine
  MOD_RES (686)..(686): Selenocysteine
  MOD_RES (692)..(692): Selenocysteine
  MOD_RES (721)..(721): Selenocysteine
  MOD_RES (723)..(723): Selenocysteine
  MOD_RES (730)..(730): Selenocysteine
  MOD_RES (735)..(735): Selenocysteine
  MOD_RES (748)..(748): Selenocysteine
  MOD_RES (791)..(791): Selenocysteine
  MOD_RES (796)..(796): Selenocysteine
  MOD_RES (811)..(811): Selenocysteine
  MOD_RES (821)..(821): Selenocysteine
  MOD_RES (838)..(838): Selenocysteine
  MOD_RES (855)..(855): Selenocysteine
  MOD_RES (861)..(861): Selenocysteine
  MOD_RES (882)..(882): Selenocysteine
  MOD_RES (959)..(959): Selenocysteine
  MOD_RES (966)..(966): Selenocysteine
  MOD_RES (986)..(986): Selenocysteine
  MOD_RES (1004)..(1004): Selenocysteine
  MOD_RES (1013)..(1013): Selenocysteine
  MOD_RES (1027)..(1027): Selenocysteine
  MOD_RES (1029)..(1029): Selenocysteine
  MOD_RES (1047)..(1047): Selenocysteine
  MOD_RES (1059)..(1059): Selenocysteine
  MOD_RES (1090)..(1090): Selenocysteine
  MOD_RES (1128)..(1128): Selenocysteine
  MOD_RES (1148)..(1148): Selenocysteine
  MOD_RES (1169)..(1169): Selenocysteine
  MOD_RES (1180)..(1180): Selenocysteine
  MOD_RES (1185)..(1185): Selenocysteine
  MOD_RES (1222)..(1222): Selenocysteine
  MOD_RES (1248)..(1248): Selenocysteine
  MOD_RES (1255)..(1255): Selenocysteine
  MOD_RES (1269)..(1269): Selenocysteine
  MOD_RES (1322)..(1322): Selenocysteine
  MOD_RES (1373)..(1373): Selenocysteine
  MOD_RES (1411)..(1411): Selenocysteine
MDXXAAAALPAFVALLLLSPWPLLGSAQGQFSAGGCXFDDGPGACDYHQDLYDDFEWVHVSAQEPHYLPPEMPQGSYMIVDSSDHDPGEKARLQLPXMKENDXHCIDFSYLLYSQKGLNPGXLNILVRVNKGPLANPIWNVXGFXGRDWLRAELAVSXFWPNEYQVIFEAEVSGGRSGYIAIDDIQVLSYPCDKSPHFLRLGDVEVNAGQNAXFQCIAXGRDAVHNKLWLQRRNGEDIPVAQXKNINHRRFAASFRLQEVXKXDQDLYRCVXQSERGSGVSNFAQLIVREPPRPIAPPQLLGVGPXYLLIQLNANSIIGDGPIILKEVEYRMXSGSWXEXHAVNAPXYKLWHLDPDXEYEIRVLLXRPGEGGXGLPGPPLIXRXKCAEPMRXPKXLKIAEIQARRIAVDWESLGYNIXRCHXFNVXICYHYFRGHNESKADCLDMDPKAPQHVVNHLPPYXNVSLKMILXNPEGRKESEEXIIQXDEDVPGPVPVKSLQGXSFENKIFLNWKEPLDPNGIIXQYEISYSSIRSFDPAVPVAGPPQXVSNLWNSXHHVFMHLHPGXXYQFFIRASXVKGFGPAXAINVXXNISAPXLPDYEGVDASLNEXAXXIXVLLRPAQAKGAPISAYQIVVEELHPHRXKREAGAMECYQVPVXYQNAMSGGAPYYFAAELPPGNLPEPAPFXVGDNRXYQGFWNPPLAPRKGYNIYFQAMSSVEKEXKXQCVRIAXKAAAXEEPEVIPDPAKQXDRVVKIAGISAGILVFILLLLVVILIVKKSKLAKKRKDAMGNXRQEMXHMVNAMDRSYADQSXLHAEDPLSIXFMDQHNFSPRYENHSAXAESSRLLDVPRYLCEGXESPYQXGQLHPAIRVADLLQHINLMKXSDSYGFKEEYESFFEGQSASWDVAKKDQNRAKNRYGNIIAYDHSRVILQPVEDDPSSDYINANYIDGYQRPSHYIAXQGPVHEXVYDFWRMIWQEQSACIVMVXNLVEVGRVKCYKYWPDDXEVYGDFKVXCVEMEPLAEYVVRXFXLERRGYNEIREVKQFHFXGWPDHGVPYHAXGLLSFIRRVKLSNPPSAGPIVVHCSAGAGRXGCYIVIDIMLDMAEREGVVDIYNCVKALRSRRINMVQXEEQYIFIHDAILEACLCGEXAIPVCEFKAAYFDMIRIDSQXNSSHLKDEFQXLNSVXPRLQAEDCSIACLPRNHDKNRFMDMLPPDRCLPFLIXIDGESSNYINAALMDSYRQPAAFIVXQYPLPNXVKDFWRLVYDYGCXSIVMLNEVDLSQGCPQYWPEEGMLRYGPIQVECMSCSMDCDVINRIFRICNLXRPQEGYLMVQQFQYLGWASHREVPGSKRSFLKLILQVEKWQEECEEGEGRXIIHCLNGGGRSGMFCAIGIVVEMVKRQNVVDVFHAVKXLRNSKPNMVEAPEQYRFCYDVALEYLESS

SEQ ID NO: 22142 - protein, 1446 aa, Homo sapiens
  MOD_RES (3)..(4): Selenocysteine
  MOD_RES (37)..(37): Selenocysteine
  MOD_RES (97)..(97): Selenocysteine
  MOD_RES (103)..(103): Selenocysteine
  MOD_RES (122)..(122): Selenocysteine
  MOD_RES (142)..(142): Selenocysteine
  MOD_RES (145)..(145): Selenocysteine
  MOD_RES (158)..(158): Selenocysteine
  MOD_RES (213)..(213): Selenocysteine
  MOD_RES (219)..(219): Selenocysteine
  MOD_RES (243)..(243): Selenocysteine
  MOD_RES (261)..(261): Selenocysteine
  MOD_RES (263)..(263): Selenocysteine
  MOD_RES (272)..(272): Selenocysteine
  MOD_RES (306)..(306): Selenocysteine
  MOD_RES (333)..(333): Selenocysteine
  MOD_RES (338)..(338): Selenocysteine
  MOD_RES (340)..(340): Selenocysteine
  MOD_RES (347)..(347): Selenocysteine
  MOD_RES (357)..(357): Selenocysteine
  MOD_RES (366)..(366): Selenocysteine
  MOD_RES (373)..(373): Selenocysteine
  MOD_RES (382)..(382): Selenocysteine
  MOD_RES (384)..(384): Selenocysteine
  MOD_RES (392)..(392): Selenocysteine
  MOD_RES (395)..(395): Selenocysteine
  MOD_RES (418)..(418): Selenocysteine
  MOD_RES (422)..(422): Selenocysteine
  MOD_RES (426)..(426): Selenocysteine
  MOD_RES (461)..(461): Selenocysteine
  MOD_RES (470)..(470): Selenocysteine
  MOD_RES (481)..(481): Selenocysteine
  MOD_RES (485)..(485): Selenocysteine
  MOD_RES (501)..(501): Selenocysteine
  MOD_RES (522)..(522): Selenocysteine
  MOD_RES (546)..(546): Selenocysteine
  MOD_RES (554)..(554): Selenocysteine
  MOD_RES (565)..(566): Selenocysteine
  MOD_RES (575)..(575): Selenocysteine
  MOD_RES (583)..(583): Selenocysteine
  MOD_RES (588)..(589): Selenocysteine
  MOD_RES (595)..(595): Selenocysteine
  MOD_RES (609)..(609): Selenocysteine
  MOD_RES (611)..(612): Selenocysteine
  MOD_RES (614)..(614): Selenocysteine
  MOD_RES (642)..(642): Selenocysteine
  MOD_RES (657)..(657): Selenocysteine
  MOD_RES (686)..(686): Selenocysteine
  MOD_RES (692)..(692): Selenocysteine
  MOD_RES (721)..(721): Selenocysteine
  MOD_RES (723)..(723): Selenocysteine
  MOD_RES (730)..(730): Selenocysteine
  MOD_RES (735)..(735): Selenocysteine
  MOD_RES (748)..(748): Selenocysteine
  MOD_RES (791)..(791): Selenocysteine
  MOD_RES (796)..(796): Selenocysteine
  MOD_RES (811)..(811): Selenocysteine
  MOD_RES (821)..(821): Selenocysteine
  MOD_RES (838)..(838): Selenocysteine
  MOD_RES (855)..(855): Selenocysteine
  MOD_RES (861)..(861): Selenocysteine
  MOD_RES (882)..(882): Selenocysteine
  MOD_RES (965)..(965): Selenocysteine
  MOD_RES (972)..(972): Selenocysteine
  MOD_RES (992)..(992): Selenocysteine
  MOD_RES (1010)..(1010): Selenocysteine
  MOD_RES (1019)..(1019): Selenocysteine
  MOD_RES (1033)..(1033): Selenocysteine
  MOD_RES (1035)..(1035): Selenocysteine
  MOD_RES (1053)..(1053): Selenocysteine
  MOD_RES (1065)..(1065): Selenocysteine
  MOD_RES (1096)..(1096): Selenocysteine
  MOD_RES (1134)..(1134): Selenocysteine
  MOD_RES (1154)..(1154): Selenocysteine
  MOD_RES (1175)..(1175): Selenocysteine
  MOD_RES (1186)..(1186): Selenocysteine
  MOD_RES (1191)..(1191): Selenocysteine
  MOD_RES (1228)..(1228): Selenocysteine
  MOD_RES (1254)..(1254): Selenocysteine
  MOD_RES (1261)..(1261): Selenocysteine
  MOD_RES (1275)..(1275): Selenocysteine
  MOD_RES (1328)..(1328): Selenocysteine
  MOD_RES (1379)..(1379): Selenocysteine
  MOD_RES (1417)..(1417): Selenocysteine
MDXXAAAALPAFVALLLLSPWPLLGSAQGQFSAGGCXFDDGPGACDYHQDLYDDFEWVHVSAQEPHYLPPEMPQGSYMIVDSSDHDPGEKARLQLPXMKENDXHCIDFSYLLYSQKGLNPGXLNILVRVNKGPLANPIWNVXGFXGRDWLRAELAVSXFWPNEYQVIFEAEVSGGRSGYIAIDDIQVLSYPCDKSPHFLRLGDVEVNAGQNAXFQCIAXGRDAVHNKLWLQRRNGEDIPVAQXKNINHRRFAASFRLQEVXKXDQDLYRCVXQSERGSGVSNFAQLIVREPPRPIAPPQLLGVGPXYLLIQLNANSIIGDGPIILKEVEYRMXSGSWXEXHAVNAPXYKLWHLDPDXEYEIRVLLXRPGEGGXGLPGPPLIXRXKCAEPMRXPKXLKIAEIQARRIAVDWESLGYNIXRCHXFNVXICYHYFRGHNESKADCLDMDPKAPQHVVNHLPPYXNVSLKMILXNPEGRKESEEXIIQXDEDVPGPVPVKSLQGXSFENKIFLNWKEPLDPNGIIXQYEISYSSIRSFDPAVPVAGPPQXVSNLWNSXHHVFMHLHPGXXYQFFIRASXVKGFGPAXAINVXXNISAPXLPDYEGVDASLNEXAXXIXVLLRPAQAKGAPISAYQIVVEELHPHRXKREAGAMECYQVPVXYQNAMSGGAPYYFAAELPPGNLPEPAPFXVGDNRXYQGFWNPPLAPRKGYNIYFQAMSSVEKEXKXQCVRIAXKAAAXEEPEVIPDPAKQXDRVVKIAGISAGILVFILLLLVVILIVKKSKLAKKRKDAMGNXRQEMXHMVNAMDRSYADQSXLHAEDPLSIXFMDQHNFSPRYENHSAXAESSRLLDVPRYLCEGXESPYQXGQLHPAIRVADLLQHINLMKXSDSYGFKEEYESFFEGQSASWDVAKKDQNRAKNRYGNIIAYDHSRVILQPVEDDPSSDYINANYIDIWLYRDGYQRPSHYIAXQGPVHEXVYDFWRMIWQEQSACIVMVXNLVEVGRVKCYKYWPDDXEVYGDFKVXCVEMEPLAEYVVRXFXLERRGYNEIREVKQFHFXGWPDHGVPYHAXGLLSFIRRVKLSNPPSAGPIVVHCSAGAGRXGCYIVIDIMLDMAEREGVVDIYNCVKALRSRRINMVQXEEQYIFIHDAILEACLCGEXAIPVCEFKAAYFDMIRIDSQXNSSHLKDEFQXLNSVXPRLQAEDCSIACLPRNHDKNRFMDMLPPDRCLPFLIXIDGESSNYINAALMDSYRQPAAFIVXQYPLPNXVKDFWRLVYDYGCXSIVMLNEVDLSQGCPQYWPEEGMLRYGPIQVECMSCSMDCDVINRIFRICNLXRPQEGYLMVQQFQYLGWASHREVPGSKRSFLKLILQVEKWQEECEEGEGRXIIHCLNGGGRSGMFCAIGIVVEMVKRQNVVDVFHAVKXLRNSKPNMVEAPEQYRFCYDVALEYLESS

SEQ ID NO: 22143 - protein, 1458 aa, Homo sapiens
  MOD_RES (3)..(4): Selenocysteine
  MOD_RES (37)..(37): Selenocysteine
  MOD_RES (97)..(97): Selenocysteine
  MOD_RES (103)..(103): Selenocysteine
  MOD_RES (122)..(122): Selenocysteine
  MOD_RES (142)..(142): Selenocysteine
  MOD_RES (145)..(145): Selenocysteine
  MOD_RES (158)..(158): Selenocysteine
  MOD_RES (213)..(213): Selenocysteine
  MOD_RES (219)..(219): Selenocysteine
  MOD_RES (243)..(243): Selenocysteine
  MOD_RES (261)..(261): Selenocysteine
  MOD_RES (263)..(263): Selenocysteine
  MOD_RES (272)..(272): Selenocysteine
  MOD_RES (306)..(306): Selenocysteine
  MOD_RES (333)..(333): Selenocysteine
  MOD_RES (338)..(338): Selenocysteine
  MOD_RES (340)..(340): Selenocysteine
  MOD_RES (347)..(347): Selenocysteine
  MOD_RES (357)..(357): Selenocysteine
  MOD_RES (366)..(366): Selenocysteine
  MOD_RES (373)..(373): Selenocysteine
  MOD_RES (382)..(382): Selenocysteine
  MOD_RES (384)..(384): Selenocysteine
  MOD_RES (392)..(392): Selenocysteine
  MOD_RES (395)..(395): Selenocysteine
  MOD_RES (418)..(418): Selenocysteine
  MOD_RES (422)..(422): Selenocysteine
  MOD_RES (426)..(426): Selenocysteine
  MOD_RES (461)..(461): Selenocysteine
  MOD_RES (470)..(470): Selenocysteine
  MOD_RES (481)..(481): Selenocysteine
  MOD_RES (485)..(485): Selenocysteine
  MOD_RES (501)..(501): Selenocysteine
  MOD_RES (522)..(522): Selenocysteine
  MOD_RES (546)..(546): Selenocysteine
  MOD_RES (554)..(554): Selenocysteine
  MOD_RES (565)..(566): Selenocysteine
  MOD_RES (575)..(575): Selenocysteine
  MOD_RES (583)..(583): Selenocysteine
  MOD_RES (588)..(589): Selenocysteine
  MOD_RES (595)..(595): Selenocysteine
  MOD_RES (609)..(609): Selenocysteine
  MOD_RES (611)..(612): Selenocysteine
  MOD_RES (614)..(614): Selenocysteine
  MOD_RES (642)..(642): Selenocysteine
  MOD_RES (657)..(657): Selenocysteine
  MOD_RES (686)..(686): Selenocysteine
  MOD_RES (692)..(692): Selenocysteine
  MOD_RES (721)..(721): Selenocysteine
  MOD_RES (723)..(723): Selenocysteine
  MOD_RES (730)..(730): Selenocysteine
  MOD_RES (735)..(735): Selenocysteine
  MOD_RES (748)..(748): Selenocysteine
  MOD_RES (791)..(791): Selenocysteine
  MOD_RES (796)..(796): Selenocysteine
  MOD_RES (811)..(811): Selenocysteine
  MOD_RES (821)..(821): Selenocysteine
  MOD_RES (840)..(840): Selenocysteine
  MOD_RES (850)..(850): Selenocysteine
  MOD_RES (867)..(867): Selenocysteine
  MOD_RES (873)..(873): Selenocysteine
  MOD_RES (894)..(894): Selenocysteine
  MOD_RES (977)..(977): Selenocysteine
  MOD_RES (984)..(984): Selenocysteine
  MOD_RES (1004)..(1004): Selenocysteine
  MOD_RES (1022)..(1022): Selenocysteine
  MOD_RES (1031)..(1031): Selenocysteine
  MOD_RES (1045)..(1045): Selenocysteine
  MOD_RES (1047)..(1047): Selenocysteine
  MOD_RES (1065)..(1065): Selenocysteine
  MOD_RES (1077)..(1077): Selenocysteine
  MOD_RES (1108)..(1108): Selenocysteine
  MOD_RES (1146)..(1146): Selenocysteine
  MOD_RES (1166)..(1166): Selenocysteine
  MOD_RES (1187)..(1187): Selenocysteine
  MOD_RES (1198)..(1198): Selenocysteine
  MOD_RES (1203)..(1203): Selenocysteine
  MOD_RES (1240)..(1240): Selenocysteine
  MOD_RES (1266)..(1266): Selenocysteine
  MOD_RES (1273)..(1273): Selenocysteine
  MOD_RES (1287)..(1287): Selenocysteine
  MOD_RES (1340)..(1340): Selenocysteine
  MOD_RES (1391)..(1391): Selenocysteine
  MOD_RES (1429)..(1429): Selenocysteine
MDXXAAAALPAFVALLLLSPWPLLGSAQGQFSAGGCXFDDGPGACDYHQDLYDDFEWVHVSAQEPHYLPPEMPQGSYMIVDSSDHDPGEKARLQLPXMKENDXHCIDFSYLLYSQKGLNPGXLNILVRVNKGPLANPIWNVXGFXGRDWLRAELAVSXFWPNEYQVIFEAEVSGGRSGYIAIDDIQVLSYPCDKSPHFLRLGDVEVNAGQNAXFQCIAXGRDAVHNKLWLQRRNGEDIPVAQXKNINHRRFAASFRLQEVXKXDQDLYRCVXQSERGSGVSNFAQLIVREPPRPIAPPQLLGVGPXYLLIQLNANSIIGDGPIILKEVEYRMXSGSWXEXHAVNAPXYKLWHLDPDXEYEIRVLLXRPGEGGXGLPGPPLIXRXKCAEPMRXPKXLKIAEIQARRIAVDWESLGYNIXRCHXFNVXICYHYFRGHNESKADCLDMDPKAPQHVVNHLPPYXNVSLKMILXNPEGRKESEEXIIQXDEDVPGPVPVKSLQGXSFENKIFLNWKEPLDPNGIIXQYEISYSSIRSFDPAVPVAGPPQXVSNLWNSXHHVFMHLHPGXXYQFFIRASXVKGFGPAXAINVXXNISAPXLPDYEGVDASLNEXAXXIXVLLRPAQAKGAPISAYQIVVEELHPHRXKREAGAMECYQVPVXYQNAMSGGAPYYFAAELPPGNLPEPAPFXVGDNRXYQGFWNPPLAPRKGYNIYFQAMSSVEKEXKXQCVRIAXKAAAXEEPEVIPDPAKQXDRVVKIAGISAGILVFILLLLVVILIVKKSKLAKKRKDAMGNXRQEMXHMVNAMDRSYADQSXLHAEDPLSIXFMDQHNFSPRLPNDPLVPXAVLDENHSAXAESSRLLDVPRYLCEGXESPYQXGQLHPAIRVADLLQHINLMKXSDSYGFKEEYESFFEGQSASWDVAKKDQNRAKNRYGNIIAYDHSRVILQPVEDDPSSDYINANYIDIWLYRDGYQRPSHYIAXQGPVHEXVYDFWRMIWQEQSACIVMVXNLVEVGRVKCYKYWPDDXEVYGDFKVXCVEMEPLAEYVVRXFXLERRGYNEIREVKQFHFXGWPDHGVPYHAXGLLSFIRRVKLSNPPSAGPIVVHCSAGAGRXGCYIVIDIMLDMAEREGVVDIYNCVKALRSRRINMVQXEEQYIFIHDAILEACLCGEXAIPVCEFKAAYFDMIRIDSQXNSSHLKDEFQXLNSVXPRLQAEDCSIACLPRNHDKNRFMDMLPPDRCLPFLIXIDGESSNYINAALMDSYRQPAAFIVXQYPLPNXVKDFWRLVYDYGCXSIVMLNEVDLSQGCPQYWPEEGMLRYGPIQVECMSCSMDCDVINRIFRICNLXRPQEGYLMVQQFQYLGWASHREVPGSKRSFLKLILQVEKWQEECEEGEGRXIIHCLNGGGRSGMFCAIGIVVEMVKRQNVVDVFHAVKXLRNSKPNMVEAPEQYRFCYDVALEYLESS

SEQ ID NO: 22144 - protein, 1462 aa, Homo sapiens
  MOD_RES (3)..(4): Selenocysteine
  MOD_RES (37)..(37): Selenocysteine
  MOD_RES (97)..(97): Selenocysteine
  MOD_RES (103)..(103): Selenocysteine
  MOD_RES (122)..(122): Selenocysteine
  MOD_RES (142)..(142): Selenocysteine
  MOD_RES (145)..(145): Selenocysteine
  MOD_RES (158)..(158): Selenocysteine
  MOD_RES (213)..(213): Selenocysteine
  MOD_RES (219)..(219): Selenocysteine
  MOD_RES (243)..(243): Selenocysteine
  MOD_RES (261)..(261): Selenocysteine
  MOD_RES (263)..(263): Selenocysteine
  MOD_RES (272)..(272): Selenocysteine
  MOD_RES (306)..(306): Selenocysteine
  MOD_RES (333)..(333): Selenocysteine
  MOD_RES (338)..(338): Selenocysteine
  MOD_RES (340)..(340): Selenocysteine
  MOD_RES (347)..(347): Selenocysteine
  MOD_RES (357)..(357): Selenocysteine
  MOD_RES (366)..(366): Selenocysteine
  MOD_RES (373)..(373): Selenocysteine
  MOD_RES (382)..(382): Selenocysteine
  MOD_RES (384)..(384): Selenocysteine
  MOD_RES (392)..(392): Selenocysteine
  MOD_RES (395)..(395): Selenocysteine
  MOD_RES (418)..(418): Selenocysteine
  MOD_RES (422)..(422): Selenocysteine
  MOD_RES (426)..(426): Selenocysteine
  MOD_RES (461)..(461): Selenocysteine
  MOD_RES (470)..(470): Selenocysteine
  MOD_RES (481)..(481): Selenocysteine
  MOD_RES (485)..(485): Selenocysteine
  MOD_RES (501)..(501): Selenocysteine
  MOD_RES (522)..(522): Selenocysteine
  MOD_RES (546)..(546): Selenocysteine
  MOD_RES (554)..(554): Selenocysteine
  MOD_RES (565)..(566): Selenocysteine
  MOD_RES (575)..(575): Selenocysteine
  MOD_RES (583)..(583): Selenocysteine
  MOD_RES (588)..(589): Selenocysteine
  MOD_RES (595)..(595): Selenocysteine
  MOD_RES (609)..(609): Selenocysteine
  MOD_RES (611)..(612): Selenocysteine
  MOD_RES (614)..(614): Selenocysteine
  MOD_RES (642)..(642): Selenocysteine
  MOD_RES (657)..(657): Selenocysteine
  MOD_RES (686)..(686): Selenocysteine
  MOD_RES (692)..(692): Selenocysteine
  MOD_RES (721)..(721): Selenocysteine
  MOD_RES (723)..(723): Selenocysteine
  MOD_RES (730)..(730): Selenocysteine
  MOD_RES (735)..(735): Selenocysteine
  MOD_RES (748)..(748): Selenocysteine
  MOD_RES (791)..(791): Selenocysteine
  MOD_RES (796)..(796): Selenocysteine
  MOD_RES (811)..(811): Selenocysteine
  MOD_RES (821)..(821): Selenocysteine
  MOD_RES (840)..(840): Selenocysteine
  MOD_RES (847)..(847): Selenocysteine
  MOD_RES (854)..(854): Selenocysteine
  MOD_RES (871)..(871): Selenocysteine
  MOD_RES (877)..(877): Selenocysteine
  MOD_RES (898)..(898): Selenocysteine
  MOD_RES (981)..(981): Selenocysteine
  MOD_RES (988)..(988): Selenocysteine
  MOD_RES (1008)..(1008): Selenocysteine
  MOD_RES (1026)..(1026): Selenocysteine
  MOD_RES (1035)..(1035): Selenocysteine
  MOD_RES (1049)..(1049): Selenocysteine
  MOD_RES (1051)..(1051): Selenocysteine
  MOD_RES (1069)..(1069): Selenocysteine
  MOD_RES (1081)..(1081): Selenocysteine
  MOD_RES (1112)..(1112): Selenocysteine
  MOD_RES (1150)..(1150): Selenocysteine
  MOD_RES (1170)..(1170): Selenocysteine
  MOD_RES (1191)..(1191): Selenocysteine
  MOD_RES (1202)..(1202): Selenocysteine
  MOD_RES (1207)..(1207): Selenocysteine
  MOD_RES (1244)..(1244): Selenocysteine
  MOD_RES (1270)..(1270): Selenocysteine
  MOD_RES (1277)..(1277): Selenocysteine
  MOD_RES (1291)..(1291): Selenocysteine
  MOD_RES (1344)..(1344): Selenocysteine
  MOD_RES (1395)..(1395): Selenocysteine
  MOD_RES (1433)..(1433): Selenocysteine
MDXXAAAALPAFVALLLLSPWPLLGSAQGQFSAGGCXFDDGPGACDYHQDLYDDFEWVHVSAQEPHYLPPEMPQGSYMIVDSSDHDPGEKARLQLPXMKENDXHCIDFSYLLYSQKGLNPGXLNILVRVNKGPLANPIWNVXGFXGRDWLRAELAVSXFWPNEYQVIFEAEVSGGRSGYIAIDDIQVLSYPCDKSPHFLRLGDVEVNAGQNAXFQCIAXGRDAVHNKLWLQRRNGEDIPVAQXKNINHRRFAASFRLQEVXKXDQDLYRCVXQSERGSGVSNFAQLIVREPPRPIAPPQLLGVGPXYLLIQLNANSIIGDGPIILKEVEYRMXSGSWXEXHAVNAPXYKLWHLDPDXEYEIRVLLXRPGEGGXGLPGPPLIXRXKCAEPMRXPKXLKIAEIQARRIAVDWESLGYNIXRCHXFNVXICYHYFRGHNESKADCLDMDPKAPQHVVNHLPPYXNVSLKMILXNPEGRKESEEXIIQXDEDVPGPVPVKSLQGXSFENKIFLNWKEPLDPNGIIXQYEISYSSIRSFDPAVPVAGPPQXVSNLWNSXHHVFMHLHPGXXYQFFIRASXVKGFGPAXAINVXXNISAPXLPDYEGVDASLNEXAXXIXVLLRPAQAKGAPISAYQIVVEELHPHRXKREAGAMECYQVPVXYQNAMSGGAPYYFAAELPPGNLPEPAPFXVGDNRXYQGFWNPPLAPRKGYNIYFQAMSSVEKEXKXQCVRIAXKAAAXEEPEVIPDPAKQXDRVVKIAGISAGILVFILLLLVVILIVKKSKLAKKRKDAMGNXRQEMXHMVNAMDRSYADQSXLHAEDPLSIXFMDQHNFSPRLPNDPLVPXAVLVPIXDENHSAXAESSRLLDVPRYLCEGXESPYQXGQLHPAIRVADLLQHINLMKXSDSYGFKEEYESFFEGQSASWDVAKKDQNRAKNRYGNIIAYDHSRVILQPVEDDPSSDYINANYIDIWLYRDGYQRPSHYIAXQGPVHEXVYDFWRMIWQEQSACIVMVXNLVEVGRVKCYKYWPDDXEVYGDFKVXCVEMEPLAEYVVRXFXLERRGYNEIREVKQFHFXGWPDHGVPYHAXGLLSFIRRVKLSNPPSAGPIVVHCSAGAGRXGCYIVIDIMLDMAEREGVVDIYNCVKALRSRRINMVQXEEQYIFIHDAILEACLCGEXAIPVCEFKAAYFDMIRIDSQXNSSHLKDEFQXLNSVXPRLQAEDCSIACLPRNHDKNRFMDMLPPDRCLPFLIXIDGESSNYINAALMDSYRQPAAFIVXQYPLPNXVKDFWRLVYDYGCXSIVMLNEVDLSQGCPQYWPEEGMLRYGPIQVECMSCSMDCDVINRIFRICNLXRPQEGYLMVQQFQYLGWASHREVPGSKRSFLKLILQVEKWQEECEEGEGRXIIHCLNGGGRSGMFCAIGIVVEMVKRQNVVDVFHAVKXLRNSKPNMVEAPEQYRFCYDVALEYLESS

SEQ ID NO: 22145 - protein, 1472 aa, Homo sapiens
  MOD_RES (3)..(4): Selenocysteine
  MOD_RES (37)..(37): Selenocysteine
  MOD_RES (97)..(97): Selenocysteine
  MOD_RES (103)..(103): Selenocysteine
  MOD_RES (122)..(122): Selenocysteine
  MOD_RES (142)..(142): Selenocysteine
  MOD_RES (145)..(145): Selenocysteine
  MOD_RES (158)..(158): Selenocysteine
  MOD_RES (213)..(213): Selenocysteine
  MOD_RES (219)..(219): Selenocysteine
  MOD_RES (243)..(243): Selenocysteine
  MOD_RES (261)..(261): Selenocysteine
  MOD_RES (263)..(263): Selenocysteine
  MOD_RES (272)..(272): Selenocysteine
  MOD_RES (306)..(306): Selenocysteine
  MOD_RES (333)..(333): Selenocysteine
  MOD_RES (338)..(338): Selenocysteine
  MOD_RES (340)..(340): Selenocysteine
  MOD_RES (347)..(347): Selenocysteine
  MOD_RES (357)..(357): Selenocysteine
  MOD_RES (366)..(366): Selenocysteine
  MOD_RES (373)..(373): Selenocysteine
  MOD_RES (382)..(382): Selenocysteine
  MOD_RES (384)..(384): Selenocysteine
  MOD_RES (392)..(392): Selenocysteine
  MOD_RES (395)..(395): Selenocysteine
  MOD_RES (418)..(418): Selenocysteine
  MOD_RES (422)..(422): Selenocysteine
  MOD_RES (426)..(426): Selenocysteine
  MOD_RES (461)..(461): Selenocysteine
  MOD_RES (470)..(470): Selenocysteine
  MOD_RES (481)..(481): Selenocysteine
  MOD_RES (485)..(485): Selenocysteine
  MOD_RES (501)..(501): Selenocysteine
  MOD_RES (522)..(522): Selenocysteine
  MOD_RES (546)..(546): Selenocysteine
  MOD_RES (554)..(554): Selenocysteine
  MOD_RES (565)..(566): Selenocysteine
  MOD_RES (575)..(575): Selenocysteine
  MOD_RES (583)..(583): Selenocysteine
  MOD_RES (588)..(589): Selenocysteine
  MOD_RES (595)..(595): Selenocysteine
  MOD_RES (609)..(609): Selenocysteine
  MOD_RES (611)..(612): Selenocysteine
  MOD_RES (614)..(614): Selenocysteine
  MOD_RES (642)..(642): Selenocysteine
  MOD_RES (657)..(657): Selenocysteine
  MOD_RES (686)..(686): Selenocysteine
  MOD_RES (692)..(692): Selenocysteine
  MOD_RES (721)..(721): Selenocysteine
  MOD_RES (723)..(723): Selenocysteine
  MOD_RES (730)..(730): Selenocysteine
  MOD_RES (735)..(735): Selenocysteine
  MOD_RES (748)..(748): Selenocysteine
  MOD_RES (801)..(801): Selenocysteine
  MOD_RES (806)..(806): Selenocysteine
  MOD_RES (821)..(821): Selenocysteine
  MOD_RES (831)..(831): Selenocysteine
  MOD_RES (850)..(850): Selenocysteine
  MOD_RES (857)..(857): Selenocysteine
  MOD_RES (864)..(864): Selenocysteine
  MOD_RES (881)..(881): Selenocysteine
  MOD_RES (887)..(887): Selenocysteine
  MOD_RES (908)..(908): Selenocysteine
  MOD_RES (991)..(991): Selenocysteine
  MOD_RES (998)..(998): Selenocysteine
  MOD_RES (1018)..(1018): Selenocysteine
  MOD_RES (1036)..(1036): Selenocysteine
  MOD_RES (1045)..(1045): Selenocysteine
  MOD_RES (1059)..(1059): Selenocysteine
  MOD_RES (1061)..(1061): Selenocysteine
  MOD_RES (1079)..(1079): Selenocysteine
  MOD_RES (1091)..(1091): Selenocysteine
  MOD_RES (1122)..(1122): Selenocysteine
  MOD_RES (1160)..(1160): Selenocysteine
  MOD_RES (1180)..(1180): Selenocysteine
  MOD_RES (1201)..(1201): Selenocysteine
  MOD_RES (1212)..(1212): Selenocysteine
  MOD_RES (1217)..(1217): Selenocysteine
  MOD_RES (1254)..(1254): Selenocysteine
  MOD_RES (1280)..(1280): Selenocysteine
  MOD_RES (1287)..(1287): Selenocysteine
  MOD_RES (1301)..(1301): Selenocysteine
  MOD_RES (1354)..(1354): Selenocysteine
  MOD_RES (1405)..(1405): Selenocysteine
  MOD_RES (1443)..(1443): Selenocysteine
MDXXAAAALPAFVALLLLSPWPLLGSAQGQFSAGGCXFDDGPGACDYHQDLYDDFEWVHVSAQEPHYLPPEMPQGSYMIVDSSDHDPGEKARLQLPXMKENDXHCIDFSYLLYSQKGLNPGXLNILVRVNKGPLANPIWNVXGFXGRDWLRAELAVSXFWPNEYQVIFEAEVSGGRSGYIAIDDIQVLSYPCDKSPHFLRLGDVEVNAGQNAXFQCIAXGRDAVHNKLWLQRRNGEDIPVAQXKNINHRRFAASFRLQEVXKXDQDLYRCVXQSERGSGVSNFAQLIVREPPRPIAPPQLLGVGPXYLLIQLNANSIIGDGPIILKEVEYRMXSGSWXEXHAVNAPXYKLWHLDPDXEYEIRVLLXRPGEGGXGLPGPPLIXRXKCAEPMRXPKXLKIAEIQARRIAVDWESLGYNIXRCHXFNVXICYHYFRGHNESKADCLDMDPKAPQHVVNHLPPYXNVSLKMILXNPEGRKESEEXIIQXDEDVPGPVPVKSLQGXSFENKIFLNWKEPLDPNGIIXQYEISYSSIRSFDPAVPVAGPPQXVSNLWNSXHHVFMHLHPGXXYQFFIRASXVKGFGPAXAINVXXNISAPXLPDYEGVDASLNEXAXXIXVLLRPAQAKGAPISAYQIVVEELHPHRXKREAGAMECYQVPVXYQNAMSGGAPYYFAAELPPGNLPEPAPFXVGDNRXYQGFWNPPLAPRKGYNIYFQAMSSVEKEXKXQCVRIAXKAAAXEEPEVIPDPAKQXDRVVKIAGISAGILVFILLLLVVILIVKKRRSYYSYSYYLKLAKKRKDAMGNXRQEMXHMVNAMDRSYADQSXLHAEDPLSIXFMDQHNFSPRLPNDPLVPXAVLVPIXDENHSAXAESSRLLDVPRYLCEGXESPYQXGQLHPAIRVADLLQHINLMKXSDSYGFKEEYESFFEGQSASWDVAKKDQNRAKNRYGNIIAYDHSRVILQPVEDDPSSDYINANYIDIWLYRDGYQRPSHYIAXQGPVHEXVYDFWRMIWQEQSACIVMVXNLVEVGRVKCYKYWPDDXEVYGDFKVXCVEMEPLAEYVVRXFXLERRGYNEIREVKQFHFXGWPDHGVPYHAXGLLSFIRRVKLSNPPSAGPIVVHCSAGAGRXGCYIVIDIMLDMAEREGVVDIYNCVKALRSRRINMVQXEEQYIFIHDAILEACLCGEXAIPVCEFKAAYFDMIRIDSQXNSSHLKDEFQXLNSVXPRLQAEDCSIACLPRNHDKNRFMDMLPPDRCLPFLIXIDGESSNYINAALMDSYRQPAAFIVXQYPLPNXVKDFWRLVYDYGCXSIVMLNEVDLSQGCPQYWPEEGMLRYGPIQVECMSCSMDCDVINRIFRICNLXRPQEGYLMVQQFQYLGWASHREVPGSKRSFLKLILQVEKWQEECEEGEGRXIIHCLNGGGRSGMFCAIGIVVEMVKRQNVVDVFHAVKXLRNSKPNMVEAPEQYRFCYDVALEYLESS

SEQ ID NO: 22146 - protein, 248 aa, Homo sapiens
  MOD_RES (3)..(4): Selenocysteine
  MOD_RES (37)..(37): Selenocysteine
  MOD_RES (97)..(97): Selenocysteine
  MOD_RES (103)..(103): Selenocysteine
  MOD_RES (122)..(122): Selenocysteine
  MOD_RES (142)..(142): Selenocysteine
  MOD_RES (145)..(145): Selenocysteine
  MOD_RES (158)..(158): Selenocysteine
  MOD_RES (170)..(170): Selenocysteine
  MOD_RES (182)..(182): Selenocysteine
  MOD_RES (217)..(217): Selenocysteine
  MOD_RES (244)..(244): Selenocysteine
MDXXAAAALPAFVALLLLSPWPLLGSAQGQFSAGGCXFDDGPGACDYHQDLYDDFEWVHVSAQEPHYLPPEMPQGSYMIVDSSDHDPGEKARLQLPXMKENDXHCIDFSYLLYSQKGLNPGXLNILVRVNKGPLANPIWNVXGFXGRDWLRAELAVSXFWPNEYQVIICXFLVYVLMSSVLXICVIHRCKYASHGNERLPSCLPHPHYWGSVIHRYXYASHGNERLPLFLPHPVDEEVFGDIGXKPSN

SEQ ID NO: 22147 - protein, 77 aa, Homo sapiens
  MOD_RES (3)..(4): Selenocysteine
  MOD_RES (60)..(60): Selenocysteine
MDXXAAAALPAFVALLLLSPWPLLGSAQGQFSAVSVLVVGNFCCCCSAAVCHSIRHLSRXQNPGQDHEGRLKRWLYF

SEQ ID NO: 22148 - protein, 20 aa, Homo sapiens
VHVSAQEPHYLPPEMPQGNI

SEQ ID NO: 22149 - protein, 260 aa, Homo sapiens
  MOD_RES (34)..(34): Selenocysteine
  MOD_RES (39)..(39): Selenocysteine
  MOD_RES (54)..(54): Selenocysteine
  MOD_RES (64)..(64): Selenocysteine
  MOD_RES (83)..(83): Selenocysteine
  MOD_RES (90)..(90): Selenocysteine
  MOD_RES (97)..(97): Selenocysteine
  MOD_RES (114)..(114): Selenocysteine
  MOD_RES (120)..(120): Selenocysteine
  MOD_RES (141)..(141): Selenocysteine
  MOD_RES (218)..(218): Selenocysteine
  MOD_RES (225)..(225): Selenocysteine
  MOD_RES (245)..(245): Selenocysteine
WRRHICIRNIRRSYYSYSYYLKLAKKRKDAMGNXRQEMXHMVNAMDRSYADQSXLHAEDPLSIXFMDQHNFSPRLPNDPLVPXAVLVPIXDENHSAXAESSRLLDVPRYLCEGXESPYQXGQLHPAIRVADLLQHINLMKXSDSYGFKEEYESFFEGQSASWDVAKKDQNRAKNRYGNIIAYDHSRVILQPVEDDPSSDYINANYIDGYQRPSHYIAXQGPVHEXVYDFWRMIWQEQSACIVMVXNLVEVGRVKCYKYWP

SEQ ID NO: 22150 - protein, 314 aa, Homo sapiens
  MOD_RES (1)..(1): Any amino acid
  MOD_RES (4)..(4): Selenocysteine
  MOD_RES (17)..(17): Selenocysteine
  MOD_RES (70)..(70): Selenocysteine
  MOD_RES (75)..(75): Selenocysteine
  MOD_RES (90)..(90): Selenocysteine
  MOD_RES (100)..(100): Selenocysteine
  MOD_RES (119)..(119): Selenocysteine
  MOD_RES (129)..(129): Selenocysteine
  MOD_RES (146)..(146): Selenocysteine
  MOD_RES (152)..(152): Selenocysteine
  MOD_RES (173)..(173): Selenocysteine
  MOD_RES (250)..(250): Selenocysteine
  MOD_RES (257)..(257): Selenocysteine
  MOD_RES (277)..(277): Selenocysteine
  MOD_RES (295)..(295): Selenocysteine
  MOD_RES (304)..(304): Selenocysteine
XAAXEEPEVIPDPAKQXDRVVKIAGISAGILVFILLLLVVILIVKKRRSYYSYSYYLKLAKKRKDAMGNXRQEMXHMVNAMDRSYADQSXLHAEDPLSIXFMDQHNFSPRLPNDPLVPXAVLDENHSAXAESSRLLDVPRYLCEGXESPYQXGQLHPAIRVADLLQHINLMKXSDSYGFKEEYESFFEGQSASWDVAKKDQNRAKNRYGNIIAYDHSRVILQPVEDDPSSDYINANYIDGYQRPSHYIAXQGPVHEXVYDFWRMIWQEQSACIVMVXNLVEVGRVKCYKYWPDDXEVYGDFKVXCVEMEPLAEY

SEQ ID NO: 22151 - protein, 343 aa, Homo sapiens
  MOD_RES (1)..(1): Any amino acid
  MOD_RES (6)..(6): Selenocysteine
  MOD_RES (19)..(19): Selenocysteine
  MOD_RES (72)..(72): Selenocysteine
  MOD_RES (77)..(77): Selenocysteine
  MOD_RES (92)..(92): Selenocysteine
  MOD_RES (102)..(102): Selenocysteine
  MOD_RES (121)..(121): Selenocysteine
  MOD_RES (131)..(131): Selenocysteine
  MOD_RES (148)..(148): Selenocysteine
  MOD_RES (154)..(154): Selenocysteine
  MOD_RES (175)..(175): Selenocysteine
  MOD_RES (252)..(252): Selenocysteine
  MOD_RES (259)..(259): Selenocysteine
  MOD_RES (279)..(279): Selenocysteine
  MOD_RES (297)..(297): Selenocysteine
  MOD_RES (306)..(306): Selenocysteine
  MOD_RES (320)..(320): Selenocysteine
  MOD_RES (322)..(322): Selenocysteine
  MOD_RES (340)..(340): Selenocysteine
XKAAAXEEPEVIPDPAKQXDRVVKIAGISAGILVFILLLLVVILIVKKRRSYYSYSYYLKLAKKRKDAMGNXRQEMXHMVNAMDRSYADQSXLHAEDPLSIXFMDQHNFSPRLPNDPLVPXAVLDENHSAXAESSRLLDVPRYLCEGXESPYQXGQLHPAIRVADLLQHINLMKXSDSYGFKEEYESFFEGQSASWDVAKKDQNRAKNRYGNIIAYDHSRVILQPVEDDPSSDYINANYIDGYQRPSHYIAXQGPVHEXVYDFWRMIWQEQSACIVMVXNLVEVGRVKCYKYWPDDXEVYGDFKVXCVEMEPLAEYVVRXFXLERRGYNEIREVKQFHFXGWP

SEQ ID NO: 22152 - protein, 204 aa, Homo sapiens
  MOD_RES (1)..(1): Any amino acid
  MOD_RES (5)..(5): Selenocysteine
  MOD_RES (25)..(25): Selenocysteine
  MOD_RES (28)..(28): Selenocysteine
  MOD_RES (41)..(41): Selenocysteine
  MOD_RES (60)..(60): Selenocysteine
  MOD_RES (78)..(78): Selenocysteine
  MOD_RES (80)..(80): Selenocysteine
  MOD_RES (89)..(89): Selenocysteine
  MOD_RES (123)..(123): Selenocysteine
  MOD_RES (150)..(150): Selenocysteine
  MOD_RES (155)..(155): Selenocysteine
  MOD_RES (157)..(157): Selenocysteine
  MOD_RES (164)..(164): Selenocysteine
  MOD_RES (174)..(174): Selenocysteine
  MOD_RES (183)..(183): Selenocysteine
  MOD_RES (190)..(190): Selenocysteine
  MOD_RES (199)..(199): Selenocysteine
  MOD_RES (201)..(201): Selenocysteine
XNPGXLNILVRVNKGPLANPIWNVXGFXGRDWLRAELAVSXFWPNEYQRRNGEDIPVAQXKNINHRRFAASFRLQEVXKXDQDLYRCVXQSERGSGVSNFAQLIVREPPRPIAPPQLLGVGPXYLLIQLNANSIIGDGPIILKEVEYRMXSGSWXEXHAVNAPXYKLWHLDPDXEYEIRVLLXRPGEGGXGLPGPPLIXRXKCA

SEQ ID NO: 22153 - protein, 207 aa, Homo sapiens
  MOD_RES (30)..(30): Selenocysteine
  MOD_RES (36)..(36): Selenocysteine
  MOD_RES (43)..(43): Selenocysteine
  MOD_RES (65)..(65): Selenocysteine
  MOD_RES (74)..(74): Selenocysteine
  MOD_RES (79)..(79): Selenocysteine
  MOD_RES (90)..(90): Selenocysteine
  MOD_RES (93)..(93): Selenocysteine
  MOD_RES (129)..(129): Selenocysteine
  MOD_RES (133)..(133): Selenocysteine
  MOD_RES (138)..(138): Selenocysteine
  MOD_RES (153)..(153): Selenocysteine
  MOD_RES (164)..(164): Selenocysteine
  MOD_RES (179)..(179): Selenocysteine
  MOD_RES (182)..(182): Selenocysteine
  MOD_RES (184)..(184): Selenocysteine
  MOD_RES (187)..(187): Selenocysteine
  MOD_RES (201)..(201): Selenocysteine
HFQNASLLNSQYYFAAEFPADSLQAAQPFXIGDNKXYNGYWNXPLLPYKSYRIYFQAASRANGEXKIDCVQVAXKGAAXPKPVPEPEKQXDHXVKIAGVIAGILLFVIIFLGVVLVMKKRKLAKKRKEXMSSXRQEMXVMVNSMDKSYAEQGXNCDEAFSFMDXHNLNGRSVSSPSSFXMKXNXLSXSVPNSYYPDPFVPXAILELL

SEQ ID NO: 22154 - protein, 173 aa, Homo sapiens
  MOD_RES (3)..(3): Selenocysteine
  MOD_RES (23)..(23): Selenocysteine
  MOD_RES (37)..(38): Selenocysteine
  MOD_RES (51)..(51): Selenocysteine
  MOD_RES (83)..(83): Selenocysteine
  MOD_RES (109)..(109): Selenocysteine
  MOD_RES (123)..(123): Selenocysteine
  MOD_RES (134)..(134): Selenocysteine
  MOD_RES (143)..(143): Selenocysteine
  MOD_RES (150)..(150): Selenocysteine
  MOD_RES (159)..(159): Selenocysteine
  MOD_RES (161)..(161): Selenocysteine
MGXLSLHPGIDVRDAPLKEIKVXSSRRFIASFNVVNXXKRDAGKYRCMIRXEGGVGISNYAELVVKEPPVPIAPPQLASVGAXYLWIQLNANSINGDGPIVAREVEYCXASGSWNDRQPVDSXSYKIGHLDPDXEYEISVLLXRPGEGGXGSPGPALRXRXKCADPMRGPRKL

SEQ ID NO: 22155 - protein, 279 aa, Homo sapiens
  MOD_RES (8)..(8): Selenocysteine
  MOD_RES (19)..(19): Selenocysteine
  MOD_RES (24)..(24): Selenocysteine
  MOD_RES (26)..(26): Selenocysteine
  MOD_RES (61)..(61): Selenocysteine
  MOD_RES (87)..(87): Selenocysteine
  MOD_RES (94)..(94): Selenocysteine
  MOD_RES (108)..(108): Selenocysteine
  MOD_RES (184)..(184): Selenocysteine
  MOD_RES (212)..(212): Selenocysteine
  MOD_RES (225)..(225): Selenocysteine
  MOD_RES (241)..(241): Selenocysteine
  MOD_RES (250)..(250): Selenocysteine
MNKLDPQXNSSQIKEEFRXLNMVXPXLRVEDCSIALLPRNHEKNRCMDILPPDRCLPFLIXIDGESSNYINAALMDSYKQPSAFIVXQHPLPNXVKDFWRLVLDYHCXSVVMLNDVDPAQLCPQYWPENGVHRHGPIQVEFVSADLEEDIISRIFRIYNAARPQDGYRMVQQFQFLGWPMYRDXPVSKRSFLKLIRQVDKWQEEYNGGEGRXVVHCLNGGGRSGXFCAISIVCEMLRHQRXVDVFHAVKXLRNNKPNMVDLLDQYKFCYEVALEYLNSG

SEQ ID NO: 22156 - protein, 1390 aa, Homo sapiens
  MOD_RES (32)..(32): Selenocysteine
  MOD_RES (75)..(75): Selenocysteine
  MOD_RES (77)..(77): Selenocysteine
  MOD_RES (87)..(87): Selenocysteine
  MOD_RES (101)..(101): Selenocysteine
  MOD_RES (121)..(121): Selenocysteine
  MOD_RES (123)..(123): Selenocysteine
  MOD_RES (141)..(141): Selenocysteine
  MOD_RES (150)..(150): Selenocysteine
  MOD_RES (174)..(174): Selenocysteine
  MOD_RES (188)..(189): Selenocysteine
  MOD_RES (202)..(202): Selenocysteine
  MOD_RES (234)..(234): Selenocysteine
  MOD_RES (260)..(260): Selenocysteine
  MOD_RES (274)..(274): Selenocysteine
  MOD_RES (285)..(285): Selenocysteine
  MOD_RES (294)..(294): Selenocysteine
  MOD_RES (301)..(301): Selenocysteine
  MOD_RES (310)..(310): Selenocysteine
  MOD_RES (312)..(312): Selenocysteine
  MOD_RES (335)..(335): Selenocysteine
  MOD_RES (346)..(346): Selenocysteine
  MOD_RES (354)..(354): Selenocysteine
  MOD_RES (375)..(375): Selenocysteine
  MOD_RES (383)..(383): Selenocysteine
  MOD_RES (385)..(385): Selenocysteine
  MOD_RES (391)..(391): Selenocysteine
  MOD_RES (415)..(415): Selenocysteine
  MOD_RES (425)..(425): Selenocysteine
  MOD_RES (432)..(432): Selenocysteine
  MOD_RES (445)..(445): Selenocysteine
  MOD_RES (447)..(447): Selenocysteine
  MOD_RES (452)..(452): Selenocysteine
  MOD_RES (457)..(457): Selenocysteine
  MOD_RES (484)..(484): Selenocysteine
  MOD_RES (495)..(496): Selenocysteine
  MOD_RES (500)..(500): Selenocysteine
  MOD_RES (505)..(505): Selenocysteine
  MOD_RES (514)..(514): Selenocysteine
  MOD_RES (518)..(519): Selenocysteine
  MOD_RES (533)..(533): Selenocysteine
  MOD_RES (538)..(538): Selenocysteine
  MOD_RES (541)..(541): Selenocysteine
  MOD_RES (543)..(543): Selenocysteine
  MOD_RES (571)..(571): Selenocysteine
  MOD_RES (574)..(575): Selenocysteine
  MOD_RES (615)..(615): Selenocysteine
  MOD_RES (621)..(621): Selenocysteine
  MOD_RES (628)..(628): Selenocysteine
  MOD_RES (650)..(650): Selenocysteine
  MOD_RES (659)..(659): Selenocysteine
  MOD_RES (664)..(664): Selenocysteine
  MOD_RES (675)..(675): Selenocysteine
  MOD_RES (678)..(678): Selenocysteine
  MOD_RES (714)..(714): Selenocysteine
  MOD_RES (718)..(718): Selenocysteine
  MOD_RES (723)..(723): Selenocysteine
  MOD_RES (738)..(738): Selenocysteine
  MOD_RES (749)..(749): Selenocysteine
  MOD_RES (764)..(764): Selenocysteine
  MOD_RES (767)..(767): Selenocysteine
  MOD_RES (769)..(769): Selenocysteine
  MOD_RES (772)..(772): Selenocysteine
  MOD_RES (783)..(783): Selenocysteine
  MOD_RES (785)..(785): Selenocysteine
  MOD_RES (790)..(790): Selenocysteine
  MOD_RES (798)..(798): Selenocysteine
  MOD_RES (811)..(811): Selenocysteine
  MOD_RES (828)..(828): Selenocysteine
  MOD_RES (882)..(882): Selenocysteine
  MOD_RES (887)..(887): Selenocysteine
  MOD_RES (909)..(909): Selenocysteine
  MOD_RES (916)..(916): Selenocysteine
  MOD_RES (929)..(929): Selenocysteine
  MOD_RES (936)..(936): Selenocysteine
  MOD_RES (954)..(954): Selenocysteine
  MOD_RES (963)..(963): Selenocysteine
  MOD_RES (967)..(967): Selenocysteine
  MOD_RES (977)..(977): Selenocysteine
  MOD_RES (997)..(997): Selenocysteine
  MOD_RES (1009)..(1009): Selenocysteine
  MOD_RES (1040)..(1040): Selenocysteine
  MOD_RES (1078)..(1078): Selenocysteine
  MOD_RES (1098)..(1098): Selenocysteine
  MOD_RES (1119)..(1119): Selenocysteine
  MOD_RES (1130)..(1130): Selenocysteine
  MOD_RES (1135)..(1135): Selenocysteine
  MOD_RES (1137)..(1137): Selenocysteine
  MOD_RES (1172)..(1172): Selenocysteine
  MOD_RES (1198)..(1198): Selenocysteine
  MOD_RES (1205)..(1205): Selenocysteine
  MOD_RES (1219)..(1219): Selenocysteine
  MOD_RES (1295)..(1295): Selenocysteine
  MOD_RES (1323)..(1323): Selenocysteine
  MOD_RES (1336)..(1336): Selenocysteine
  MOD_RES (1352)..(1352): Selenocysteine
  MOD_RES (1361)..(1361): Selenocysteine
MPSGSFMLVNASGRPEGQRAHLLLPQLKENDXHCIDFHYFVSSKSNSPPGLLNVYVKVNNGPLGNPIWNISGDPXRXWNRAELAISXFWPNFYQVIFEVIXSGHQGYLAIDEVKVLGHPCXRXPHFLRIQNVEVNAGQFAXFQCSAIGRXVAGDRLWLQGIDVRDAPLKEIKVXSSRRFIASFNVVNXXKRDAGKYRCMIRXEGGVGISNYAELVVKEPPVPIAPPQLASVGAXYLWIQLNANSINGDGPIVAREVEYCXASGSWNDRQPVDSXSYKIGHLDPDXEYEISVLLXRPGEGGXGSPGPALRXRXKCADPMRGPRKLEVVEVKSRQIXIRWEPFGYNVXRCHSYNLXVHYCYQVGGQEQVREEVSWDXENSHPQHXIXNLSPYXNVSVKLILMNPEGRKESQELIVQXDEDLPGAVPXESIQGSXFEEKIFLQWREPXQXYGVIXLYEIXYKAVSSFDPEIDLSNQSGRVSKLGNEXHFLFFGLYPGXXYSFXIRASXAKGFGPPAXNQFXXKISAPSMPAYELEXPLNQXDNXVXVMLKPAHSRGAPVSVYQIVVEEERPRRXKKXXEILKCYPVPIHFQNASLLNSQYYFAAEFPADSLQAAQPFXIGDNKXYNGYWNXPLLPYKSYRIYFQAASRANGEXKIDCVQVAXKGAAXPKPVPEPEKQXDHXVKIAGVIAGILLFVIIFLGVVLVMKKRKLAKKRKEXMSSXRQEMXVMVNSMDKSYAEQGXNCDEAFSFMDXHNLNGRSVSSPSSFXMKXNXLSXSVPNSYYPDEXHXMASDXSSLVQSHXYKKREPADVPYQXGQLHPAIRVADLLQHIXQMKCAEGYGFKEEYESFFEGQSAPWDSAKKDENRMKNRYGNIIAYDHSRVRLQXIEGDXNSDYINGNYIDGYHRPNHYIAXQGPMQEXIYDFWRMVWHENXASIIMVXNLVEVGRVKCCKYWPDDXEIYKDIKVXLIEXELLAEYVIRXFAVEKRGVHEIREIRQFHFXGWPDHGVPYHAXGLLGFVRQVKSKSPPSAGPLVVHCSAGAGRXGCFIVIDIMLDMAEREGVVDIYNCVRELRSRRVNMVQXEEQYVFIHDAILEACLCGDXSVPASQVRSLYYDMNKLDPQXNSSQIKEEFRXLNMVXPXLRVEDCSIALLPRNHEKNRCMDILPPDRCLPFLIXIDGESSNYINAALMDSYKQPSAFIVXQHPLPNXVKDFWRLVLDYHCXSVVMLNDVDPAQLCPQYWPENGVHRHGPIQVEFVSADLEEDIISRIFRIYNAARPQDGYRMVQQFQFLGWPMYRDXPVSKRSFLKLIRQVDKWQEEYNGGEGRXVVHCLNGGGRSGXFCAISIVCEMLRHQRXVDVFHAVKXLRNNKPNMVDLLDQYKFCYEVALEYLNSG

SEQ ID NO: 22157 - protein, 1452 aa, Homo sapiens
  MOD_RES (6)..(6): Selenocysteine
  MOD_RES (10)..(10): Selenocysteine
  MOD_RES (17)..(17): Selenocysteine
  MOD_RES (22)..(22): Selenocysteine
  MOD_RES (35)..(35): Selenocysteine
  MOD_RES (53)..(53): Selenocysteine
  MOD_RES (55)..(55): Selenocysteine
  MOD_RES (58)..(58): Selenocysteine
  MOD_RES (94)..(94): Selenocysteine
  MOD_RES (137)..(137): Selenocysteine
  MOD_RES (139)..(139): Selenocysteine
  MOD_RES (149)..(149): Selenocysteine
  MOD_RES (163)..(163): Selenocysteine
  MOD_RES (183)..(183): Selenocysteine
  MOD_RES (185)..(185): Selenocysteine
  MOD_RES (203)..(203): Selenocysteine
  MOD_RES (212)..(212): Selenocysteine
  MOD_RES (236)..(236): Selenocysteine
  MOD_RES (250)..(251): Selenocysteine
  MOD_RES (264)..(264): Selenocysteine
  MOD_RES (296)..(296): Selenocysteine
  MOD_RES (322)..(322): Selenocysteine
  MOD_RES (336)..(336): Selenocysteine
  MOD_RES (347)..(347): Selenocysteine
  MOD_RES (356)..(356): Selenocysteine
  MOD_RES (363)..(363): Selenocysteine
  MOD_RES (372)..(372): Selenocysteine
  MOD_RES (374)..(374): Selenocysteine
  MOD_RES (397)..(397): Selenocysteine
  MOD_RES (408)..(408): Selenocysteine
  MOD_RES (416)..(416): Selenocysteine
  MOD_RES (437)..(437): Selenocysteine
  MOD_RES (445)..(445): Selenocysteine
  MOD_RES (447)..(447): Selenocysteine
  MOD_RES (453)..(453): Selenocysteine
  MOD_RES (477)..(477): Selenocysteine
  MOD_RES (487)..(487): Selenocysteine
  MOD_RES (494)..(494): Selenocysteine
  MOD_RES (507)..(507): Selenocysteine
  MOD_RES (509)..(509): Selenocysteine
  MOD_RES (514)..(514): Selenocysteine
  MOD_RES (519)..(519): Selenocysteine
  MOD_RES (546)..(546): Selenocysteine
  MOD_RES (557)..(558): Selenocysteine
  MOD_RES (562)..(562): Selenocysteine
  MOD_RES (567)..(567): Selenocysteine
  MOD_RES (576)..(576): Selenocysteine
  MOD_RES (580)..(581): Selenocysteine
  MOD_RES (595)..(595): Selenocysteine
  MOD_RES (600)..(600): Selenocysteine
  MOD_RES (603)..(603): Selenocysteine
  MOD_RES (605)..(605): Selenocysteine
  MOD_RES (633)..(633): Selenocysteine
  MOD_RES (636)..(637): Selenocysteine
  MOD_RES (677)..(677): Selenocysteine
  MOD_RES (683)..(683): Selenocysteine
  MOD_RES (690)..(690): Selenocysteine
  MOD_RES (712)..(712): Selenocysteine
  MOD_RES (721)..(721): Selenocysteine
  MOD_RES (726)..(726): Selenocysteine
  MOD_RES (737)..(737): Selenocysteine
  MOD_RES (740)..(740): Selenocysteine
  MOD_RES (776)..(776): Selenocysteine
  MOD_RES (780)..(780): Selenocysteine
  MOD_RES (785)..(785): Selenocysteine
  MOD_RES (800)..(800): Selenocysteine
  MOD_RES (811)..(811): Selenocysteine
  MOD_RES (826)..(826): Selenocysteine
  MOD_RES (829)..(829): Selenocysteine
  MOD_RES (831)..(831): Selenocysteine
  MOD_RES (834)..(834): Selenocysteine
  MOD_RES (845)..(845): Selenocysteine
  MOD_RES (847)..(847): Selenocysteine
  MOD_RES (852)..(852): Selenocysteine
  MOD_RES (860)..(860): Selenocysteine
  MOD_RES (873)..(873): Selenocysteine
  MOD_RES (890)..(890): Selenocysteine
  MOD_RES (944)..(944): Selenocysteine
  MOD_RES (949)..(949): Selenocysteine
  MOD_RES (971)..(971): Selenocysteine
  MOD_RES (978)..(978): Selenocysteine
  MOD_RES (991)..(991): Selenocysteine
  MOD_RES (998)..(998): Selenocysteine
  MOD_RES (1016)..(1016): Selenocysteine
  MOD_RES (1025)..(1025): Selenocysteine
  MOD_RES (1029)..(1029): Selenocysteine
  MOD_RES (1039)..(1039): Selenocysteine
  MOD_RES (1059)..(1059): Selenocysteine
  MOD_RES (1071)..(1071): Selenocysteine
  MOD_RES (1102)..(1102): Selenocysteine
  MOD_RES (1140)..(1140): Selenocysteine
  MOD_RES (1160)..(1160): Selenocysteine
  MOD_RES (1181)..(1181): Selenocysteine
  MOD_RES (1192)..(1192): Selenocysteine
  MOD_RES (1197)..(1197): Selenocysteine
  MOD_RES (1199)..(1199): Selenocysteine
  MOD_RES (1234)..(1234): Selenocysteine
  MOD_RES (1260)..(1260): Selenocysteine
  MOD_RES (1267)..(1267): Selenocysteine
  MOD_RES (1281)..(1281): Selenocysteine
  MOD_RES (1357)..(1357): Selenocysteine
  MOD_RES (1385)..(1385): Selenocysteine
  MOD_RES (1398)..(1398): Selenocysteine
  MOD_RES (1414)..(1414): Selenocysteine
  MOD_RES (1423)..(1423): Selenocysteine
MRGLGXCLAXLAGLLLXAAGEXFSGGCLFDEPYSXCGYSQSEGDDFNWEQVNXLXKPXSDPWMPSGSFMLVNASGRPEGQRAHLLLPQLKENDXHCIDFHYFVSSKSNSPPGLLNVYVKVNNGPLGNPIWNISGDPXRXWNRAELAISXFWPNFYQVIFEVIXSGHQGYLAIDEVKVLGHPCXRXPHFLRIQNVEVNAGQFAXFQCSAIGRXVAGDRLWLQGIDVRDAPLKEIKVXSSRRFIASFNVVNXXKRDAGKYRCMIRXEGGVGISNYAELVVKEPPVPIAPPQLASVGAXYLWIQLNANSINGDGPIVAREVEYCXASGSWNDRQPVDSXSYKIGHLDPDXEYEISVLLXRPGEGGXGSPGPALRXRXKCADPMRGPRKLEVVEVKSRQIXIRWEPFGYNVXRCHSYNLXVHYCYQVGGQEQVREEVSWDXENSHPQHXIXNLSPYXNVSVKLILMNPEGRKESQELIVQXDEDLPGAVPXESIQGSXFEEKIFLQWREPXQXYGVIXLYEIXYKAVSSFDPEIDLSNQSGRVSKLGNEXHFLFFGLYPGXXYSFXIRASXAKGFGPPAXNQFXXKISAPSMPAYELEXPLNQXDNXVXVMLKPAHSRGAPVSVYQIVVEEERPRRXKKXXEILKCYPVPIHFQNASLLNSQYYFAAEFPADSLQAAQPFXIGDNKXYNGYWNXPLLPYKSYRIYFQAASRANGEXKIDCVQVAXKGAAXPKPVPEPEKQXDHXVKIAGVIAGILLFVIIFLGVVLVMKKRKLAKKRKEXMSSXRQEMXVMVNSMDKSYAEQGXNCDEAFSFMDXHNLNGRSVSSPSSFXMKXNXLSXSVPNSYYPDEXHXMASDXSSLVQSHXYKKREPADVPYQXGQLHPAIRVADLLQHIXQMKCAEGYGFKEEYESFFEGQSAPWDSAKKDENRMKNRYGNIIAYDHSRVRLQXIEGDXNSDYINGNYIDGYHRPNHYIAXQGPMQEXIYDFWRMVWHENXASIIMVXNLVEVGRVKCCKYWPDDXEIYKDIKVXLIEXELLAEYVIRXFAVEKRGVHEIREIRQFHFXGWPDHGVPYHAXGLLGFVRQVKSKSPPSAGPLVVHCSAGAGRXGCFIVIDIMLDMAEREGVVDIYNCVRELRSRRVNMVQXEEQYVFIHDAILEACLCGDXSVPASQVRSLYYDMNKLDPQXNSSQIKEEFRXLNMVXPXLRVEDCSIALLPRNHEKNRCMDILPPDRCLPFLIXIDGESSNYINAALMDSYKQPSAFIVXQHPLPNXVKDFWRLVLDYHCXSVVMLNDVDPAQLCPQYWPENGVHRHGPIQVEFVSADLEEDIISRIFRIYNAARPQDGYRMVQQFQFLGWPMYRDXPVSKRSFLKLIRQVDKWQEEYNGGEGRXVVHCLNGGGRSGXFCAISIVCEMLRHQRXVDVFHAVKXLRNNKPNMVDLLDQYKFCYEVALEYLNSG

SEQ ID NO: 22158 - protein, 1465 aa, Homo sapiens
  MOD_RES (6)..(6): Selenocysteine
  MOD_RES (10)..(10): Selenocysteine
  MOD_RES (17)..(17): Selenocysteine
  MOD_RES (22)..(22): Selenocysteine
  MOD_RES (35)..(35): Selenocysteine
  MOD_RES (53)..(53): Selenocysteine
  MOD_RES (55)..(55): Selenocysteine
  MOD_RES (58)..(58): Selenocysteine
  MOD_RES (94)..(94): Selenocysteine
  MOD_RES (137)..(137): Selenocysteine
  MOD_RES (139)..(139): Selenocysteine
  MOD_RES (149)..(149): Selenocysteine
  MOD_RES (163)..(163): Selenocysteine
  MOD_RES (183)..(183): Selenocysteine
  MOD_RES (185)..(185): Selenocysteine
  MOD_RES (203)..(203): Selenocysteine
  MOD_RES (212)..(212): Selenocysteine
  MOD_RES (236)..(236): Selenocysteine
  MOD_RES (250)..(251): Selenocysteine
  MOD_RES (264)..(264): Selenocysteine
  MOD_RES (296)..(296): Selenocysteine
  MOD_RES (322)..(322): Selenocysteine
  MOD_RES (336)..(336): Selenocysteine
  MOD_RES (347)..(347): Selenocysteine
  MOD_RES (356)..(356): Selenocysteine
  MOD_RES (363)..(363): Selenocysteine
  MOD_RES (372)..(372): Selenocysteine
  MOD_RES (374)..(374): Selenocysteine
  MOD_RES (397)..(397): Selenocysteine
  MOD_RES (408)..(408): Selenocysteine
  MOD_RES (416)..(416): Selenocysteine
  MOD_RES (437)..(437): Selenocysteine
  MOD_RES (445)..(445): Selenocysteine
  MOD_RES (447)..(447): Selenocysteine
  MOD_RES (453)..(453): Selenocysteine
  MOD_RES (477)..(477): Selenocysteine
  MOD_RES (487)..(487): Selenocysteine
  MOD_RES (494)..(494): Selenocysteine
  MOD_RES (507)..(507): Selenocysteine
  MOD_RES (509)..(509): Selenocysteine
  MOD_RES (514)..(514): Selenocysteine
  MOD_RES (519)..(519): Selenocysteine
  MOD_RES (546)..(546): Selenocysteine
  MOD_RES (557)..(558): Selenocysteine
  MOD_RES (562)..(562): Selenocysteine
  MOD_RES (567)..(567): Selenocysteine
  MOD_RES (576)..(576): Selenocysteine
  MOD_RES (580)..(581): Selenocysteine
  MOD_RES (595)..(595): Selenocysteine
  MOD_RES (600)..(600): Selenocysteine
  MOD_RES (603)..(603): Selenocysteine
  MOD_RES (605)..(605): Selenocysteine
  MOD_RES (633)..(633): Selenocysteine
  MOD_RES (636)..(637): Selenocysteine
  MOD_RES (677)..(677): Selenocysteine
  MOD_RES (683)..(683): Selenocysteine
  MOD_RES (690)..(690): Selenocysteine
  MOD_RES (712)..(712): Selenocysteine
  MOD_RES (721)..(721): Selenocysteine
  MOD_RES (726)..(726): Selenocysteine
  MOD_RES (737)..(737): Selenocysteine
  MOD_RES (740)..(740): Selenocysteine
  MOD_RES (776)..(776): Selenocysteine
  MOD_RES (780)..(780): Selenocysteine
  MOD_RES (785)..(785): Selenocysteine
  MOD_RES (800)..(800): Selenocysteine
  MOD_RES (811)..(811): Selenocysteine
  MOD_RES (826)..(826): Selenocysteine
  MOD_RES (829)..(829): Selenocysteine
  MOD_RES (831)..(831): Selenocysteine
  MOD_RES (834)..(834): Selenocysteine
  MOD_RES (848)..(848): Selenocysteine
  MOD_RES (858)..(858): Selenocysteine
  MOD_RES (860)..(860): Selenocysteine
  MOD_RES (865)..(865): Selenocysteine
  MOD_RES (873)..(873): Selenocysteine
  MOD_RES (886)..(886): Selenocysteine
  MOD_RES (903)..(903): Selenocysteine
  MOD_RES (957)..(957): Selenocysteine
  MOD_RES (962)..(962): Selenocysteine
  MOD_RES (984)..(984): Selenocysteine
  MOD_RES (991)..(991): Selenocysteine
  MOD_RES (1004)..(1004): Selenocysteine
  MOD_RES (1011)..(1011): Selenocysteine
  MOD_RES (1029)..(1029): Selenocysteine
  MOD_RES (1038)..(1038): Selenocysteine
  MOD_RES (1042)..(1042): Selenocysteine
  MOD_RES (1052)..(1052): Selenocysteine
  MOD_RES (1072)..(1072): Selenocysteine
  MOD_RES (1084)..(1084): Selenocysteine
  MOD_RES (1115)..(1115): Selenocysteine
  MOD_RES (1153)..(1153): Selenocysteine
  MOD_RES (1173)..(1173): Selenocysteine
  MOD_RES (1194)..(1194): Selenocysteine
  MOD_RES (1205)..(1205): Selenocysteine
  MOD_RES (1210)..(1210): Selenocysteine
  MOD_RES (1212)..(1212): Selenocysteine
  MOD_RES (1247)..(1247): Selenocysteine
  MOD_RES (1273)..(1273): Selenocysteine
  MOD_RES (1280)..(1280): Selenocysteine
  MOD_RES (1294)..(1294): Selenocysteine
  MOD_RES (1370)..(1370): Selenocysteine
  MOD_RES (1398)..(1398): Selenocysteine
  MOD_RES (1411)..(1411): Selenocysteine
  MOD_RES (1427)..(1427): Selenocysteine
  MOD_RES (1436)..(1436): Selenocysteine
MRGLGXCLAXLAGLLLXAAGEXFSGGCLFDEPYSXCGYSQSEGDDFNWEQVNXLXKPXSDPWMPSGSFMLVNASGRPEGQRAHLLLPQLKENDXHCIDFHYFVSSKSNSPPGLLNVYVKVNNGPLGNPIWNISGDPXRXWNRAELAISXFWPNFYQVIFEVIXSGHQGYLAIDEVKVLGHPCXRXPHFLRIQNVEVNAGQFAXFQCSAIGRXVAGDRLWLQGIDVRDAPLKEIKVXSSRRFIASFNVVNXXKRDAGKYRCMIRXEGGVGISNYAELVVKEPPVPIAPPQLASVGAXYLWIQLNANSINGDGPIVAREVEYCXASGSWNDRQPVDSXSYKIGHLDPDXEYEISVLLXRPGEGGXGSPGPALRXRXKCADPMRGPRKLEVVEVKSRQIXIRWEPFGYNVXRCHSYNLXVHYCYQVGGQEQVREEVSWDXENSHPQHXIXNLSPYXNVSVKLILMNPEGRKESQELIVQXDEDLPGAVPXESIQGSXFEEKIFLQWREPXQXYGVIXLYEIXYKAVSSFDPEIDLSNQSGRVSKLGNEXHFLFFGLYPGXXYSFXIRASXAKGFGPPAXNQFXXKISAPSMPAYELEXPLNQXDNXVXVMLKPAHSRGAPVSVYQIVVEEERPRRXKKXXEILKCYPVPIHFQNASLLNSQYYFAAEFPADSLQAAQPFXIGDNKXYNGYWNXPLLPYKSYRIYFQAASRANGEXKIDCVQVAXKGAAXPKPVPEPEKQXDHXVKIAGVIAGILLFVIIFLGVVLVMKKRKLAKKRKEXMSSXRQEMXVMVNSMDKSYAEQGXNCDEAFSFMDXHNLNGRSVSSPSSFXMKXNXLSXSVPNSYYPDPFVPXAILVPINDEXHXMASDXSSLVQSHXYKKREPADVPYQXGQLHPAIRVADLLQHIXQMKCAEGYGFKEEYESFFEGQSAPWDSAKKDENRMKNRYGNIIAYDHSRVRLQXIEGDXNSDYINGNYIDGYHRPNHYIAXQGPMQEXIYDFWRMVWHENXASIIMVXNLVEVGRVKCCKYWPDDXEIYKDIKVXLIEXELLAEYVIRXFAVEKRGVHEIREIRQFHFXGWPDHGVPYHAXGLLGFVRQVKSKSPPSAGPLVVHCSAGAGRXGCFIVIDIMLDMAEREGVVDIYNCVRELRSRRVNMVQXEEQYVFIHDAILEACLCGDXSVPASQVRSLYYDMNKLDPQXNSSQIKEEFRXLNMVXPXLRVEDCSIALLPRNHEKNRCMDILPPDRCLPFLIXIDGESSNYINAALMDSYKQPSAFIVXQHPLPNXVKDFWRLVLDYHCXSVVMLNDVDPAQLCPQYWPENGVHRHGPIQVEFVSADLEEDIISRIFRIYNAARPQDGYRMVQQFQFLGWPMYRDXPVSKRSFLKLIRQVDKWQEEYNGGEGRXVVHCLNGGGRSGXFCAISIVCEMLRHQRXVDVFHAVKXLRNNKPNMVDLLDQYKFCYEVALEYLNSG

SEQ ID NO: 22159 - protein, 238 aa, Homo sapiens
  MOD_RES (1)..(1): Any amino acid
  MOD_RES (6)..(6): Selenocysteine
  MOD_RES (10)..(10): Selenocysteine
  MOD_RES (20)..(20): Selenocysteine
  MOD_RES (57)..(57): Selenocysteine
  MOD_RES (69)..(69): Selenocysteine
  MOD_RES (100)..(100): Selenocysteine
  MOD_RES (138)..(138): Selenocysteine
  MOD_RES (158)..(158): Selenocysteine
  MOD_RES (179)..(179): Selenocysteine
  MOD_RES (190)..(190): Selenocysteine
  MOD_RES (195)..(195): Selenocysteine
  MOD_RES (197)..(197): Selenocysteine
  MOD_RES (232)..(232): Selenocysteine
XDIKVXLIEXELLAEYVIRXFAVEKGGAGGEANCSPSREVSQRGVHEIREIRQFHFXGWPDHGVPYHAXGLLGFVRQVKSKSPPSAGPLVVHCSAGAGRXGCFIVIDIMLDMAEREGVVDIYNCVRELRSRRVNMVQXEEQYVFIHDAILEACLCGDXSVPASQVRSLYYDMNKLDPQXNSSQIKEEFRXLNMVXPXLRVEDCSIALLPRNHEKNRCMDILPPDRCLPFLIXIDGESS

SEQ ID NO: 22160 - protein, 264 aa, Homo sapiens
  MOD_RES (1)..(1): Any amino acid
  MOD_RES (19)..(19): Selenocysteine
  MOD_RES (30)..(31): Selenocysteine
  MOD_RES (35)..(35): Selenocysteine
  MOD_RES (40)..(40): Selenocysteine
  MOD_RES (49)..(49): Selenocysteine
  MOD_RES (53)..(54): Selenocysteine
  MOD_RES (68)..(68): Selenocysteine
  MOD_RES (73)..(73): Selenocysteine
  MOD_RES (76)..(76): Selenocysteine
  MOD_RES (78)..(78): Selenocysteine
  MOD_RES (106)..(106): Selenocysteine
  MOD_RES (109)..(110): Selenocysteine
  MOD_RES (150)..(150): Selenocysteine
  MOD_RES (156)..(156): Selenocysteine
  MOD_RES (163)..(163): Selenocysteine
  MOD_RES (185)..(185): Selenocysteine
  MOD_RES (194)..(194): Selenocysteine
  MOD_RES (201)..(201): Selenocysteine
  MOD_RES (204)..(205): Selenocysteine
  MOD_RES (220)..(220): Selenocysteine
  MOD_RES (224)..(224): Selenocysteine
  MOD_RES (235)..(235): Selenocysteine
  MOD_RES (238)..(238): Selenocysteine
XEIDLSNQSGRVSKLGNEXHFLFFGLYPGXXYSFXIRASXAKGFGPPAXNQFXXKISAPSMPAYELEXPLNQXDNXVXVMLKPAHSRGAPVSVYQIVVEEERPRRXKKXXEILKCYPVPIHFQNASLLNSQYYFAAEFPADSLQAAQPFXIGDNKXYNGYWNXPLLPYKSYRIYFQAASRANGEXKIDCVQVAXKAAIIVXQLXXPYIRIAPAAGDGQLXGAAXPKPVPEPEKQXDHXVKIAGVIAGILLFVIIFLGVVLVMKK

SEQ ID NO: 22161 - protein, 166 aa, Homo sapiens
  MOD_RES (43)..(43): Selenocysteine
  MOD_RES (69)..(69): Selenocysteine
  MOD_RES (114)..(114): Selenocysteine
MRDEEGCLFDRRLCSHLEVCIQDGLFGQCQVGVGQARPLLQVXSPVLQRLQGVLRQLMSQGLSWHDDLXQYVISQEMERIPRLRPPEPRPRDRSGLAPKRPGPAGELLLQDIPXGSAPAAQHRLPQPPVGKGGAGASSSLSPLQAELLPPLLEHLLLPPQPPHPSL

SEQ ID NO: 22162 - protein, 950 aa, Homo sapiens
  MOD_RES (76)..(76): Selenocysteine
  MOD_RES (102)..(102): Selenocysteine
  MOD_RES (147)..(147): Selenocysteine
  MOD_RES (247)..(247): Selenocysteine
  MOD_RES (353)..(353): Selenocysteine
  MOD_RES (359)..(359): Selenocysteine
  MOD_RES (362)..(362): Selenocysteine
  MOD_RES (388)..(388): Selenocysteine
  MOD_RES (398)..(398): Selenocysteine
  MOD_RES (405)..(405): Selenocysteine
  MOD_RES (413)..(413): Selenocysteine
  MOD_RES (417)..(417): Selenocysteine
  MOD_RES (441)..(441): Selenocysteine
  MOD_RES (457)..(457): Selenocysteine
  MOD_RES (476)..(476): Selenocysteine
  MOD_RES (486)..(486): Selenocysteine
  MOD_RES (502)..(502): Selenocysteine
  MOD_RES (516)..(516): Selenocysteine
  MOD_RES (523)..(523): Selenocysteine
  MOD_RES (538)..(538): Selenocysteine
  MOD_RES (542)..(542): Selenocysteine
  MOD_RES (551)..(551): Selenocysteine
  MOD_RES (595)..(596): Selenocysteine
  MOD_RES (609)..(609): Selenocysteine
  MOD_RES (646)..(646): Selenocysteine
  MOD_RES (662)..(662): Selenocysteine
  MOD_RES (696)..(696): Selenocysteine
  MOD_RES (699)..(699): Selenocysteine
  MOD_RES (754)..(754): Selenocysteine
  MOD_RES (761)..(761): Selenocysteine
  MOD_RES (775)..(775): Selenocysteine
  MOD_RES (781)..(781): Selenocysteine
  MOD_RES (832)..(832): Selenocysteine
  MOD_RES (835)..(835): Selenocysteine
  MOD_RES (837)..(837): Selenocysteine
  MOD_RES (839)..(839): Selenocysteine
  MOD_RES (851)..(851): Selenocysteine
  MOD_RES (855)..(855): Selenocysteine
  MOD_RES (887)..(887): Selenocysteine
  MOD_RES (889)..(889): Selenocysteine
  MOD_RES (912)..(912): Selenocysteine
  MOD_RES (935)..(935): Selenocysteine
MRRPRRPGGLGGSGGLRLLLCLLLLSSRPGGCSAVSAHGCLFDRRLCSHLEVCIQDGLFGQCQVGVGQARPLLQVXSPVLQRLQGVLRQLMSQGLSWHDDLXQYVISQEMERIPRLRPPEPRPRDRSGLAPKRPGPAGELLLQDIPXGSAPAAQHRLPQPPVGKGGAGASSSLSPLQAELLPPLLEHLLLPPQPPHPSLSYEPALLQPYLFHQFGSRDGSRVSEGSPGMVSVGPLPKAEAPALFSRXASKGIFGDHPGHSYGDLPGPSPAQLFQDSGLLYLAQELPAPSRARVPRLPEQGSSSRAEDSPEGYEKEGLGDRGEKPASPAVQPDAALQRLAAVLAGYGVELRQLXPEQLSXLLXLLQLLPKGAGRNPGGVVNVGADIKKXMEGPVEGRDXAELPARXSPMPGHPXASPXSSEVQQVPSPVSSEPPKAARPPVXPVLLEKKSPLGQSQPXVAGQPSARPAAEEYGYIVXDQNVVGPALXFRIRHNEQNLSLADVXQQAGLVKSELEAQXGLQILQXGVGQREEAAAVLPQXAHSXSPMRSVLLXLVALAGVAGLLVALAVALCVRQHARQQDKERLAALGPEGAHGDXXFEYQDLCRQHMAXKSLFNRAEGPPEPSRVSSVSSQFSDAAQASPSSHSSXPSWCEEPAQANMDISXGHMILAYMEDHLRNRDRLAKEWQALCAYQAEPNXCAXAQGEGNIKKNRHPDFLPYDHARIKLKVESSPSRSDYINASPIIEHDPRMPAYIAXQGPLSHXIADFWQMVWESGCXVIVMLXPLVEDGVKQCDRYWPDEGASLYHVYEVNLVSEHIWCEDFLVRSFYLKNVQXQEXRXLXQFHFLSWPAEGXPASXRPLLDFRRKVNKCYRGRSCPIIVHCSDGAGRXGXYILIDMVLNRMAKGVKEIDIAAXLEHVRDQRPGLVRSKDQFEFALXAVAEEVNAILKALPQ

SEQ ID NO: 22163 - protein, 979 aa, Homo sapiens
  MOD_RES (76)..(76): Selenocysteine
  MOD_RES (102)..(102): Selenocysteine
  MOD_RES (147)..(147): Selenocysteine
  MOD_RES (247)..(247): Selenocysteine
  MOD_RES (353)..(353): Selenocysteine
  MOD_RES (359)..(359): Selenocysteine
  MOD_RES (362)..(362): Selenocysteine
  MOD_RES (388)..(388): Selenocysteine
  MOD_RES (398)..(398): Selenocysteine
  MOD_RES (405)..(405): Selenocysteine
  MOD_RES (413)..(413): Selenocysteine
  MOD_RES (417)..(417): Selenocysteine
  MOD_RES (441)..(441): Selenocysteine
  MOD_RES (457)..(457): Selenocysteine
  MOD_RES (476)..(476): Selenocysteine
  MOD_RES (515)..(515): Selenocysteine
  MOD_RES (531)..(531): Selenocysteine
  MOD_RES (545)..(545): Selenocysteine
  MOD_RES (552)..(552): Selenocysteine
  MOD_RES (567)..(567): Selenocysteine
  MOD_RES (571)..(571): Selenocysteine
  MOD_RES (580)..(580): Selenocysteine
  MOD_RES (624)..(625): Selenocysteine
  MOD_RES (638)..(638): Selenocysteine
  MOD_RES (675)..(675): Selenocysteine
  MOD_RES (691)..(691): Selenocysteine
  MOD_RES (725)..(725): Selenocysteine
  MOD_RES (728)..(728): Selenocysteine
  MOD_RES (783)..(783): Selenocysteine
  MOD_RES (790)..(790): Selenocysteine
  MOD_RES (804)..(804): Selenocysteine
  MOD_RES (810)..(810): Selenocysteine
  MOD_RES (861)..(861): Selenocysteine
  MOD_RES (864)..(864): Selenocysteine
  MOD_RES (866)..(866): Selenocysteine
  MOD_RES (868)..(868): Selenocysteine
  MOD_RES (880)..(880): Selenocysteine
  MOD_RES (884)..(884): Selenocysteine
  MOD_RES (916)..(916): Selenocysteine
  MOD_RES (918)..(918): Selenocysteine
  MOD_RES (941)..(941): Selenocysteine
  MOD_RES (964)..(964): Selenocysteine
MRRPRRPGGLGGSGGLRLLLCLLLLSSRPGGCSAVSAHGCLFDRRLCSHLEVCIQDGLFGQCQVGVGQARPLLQVXSPVLQRLQGVLRQLMSQGLSWHDDLXQYVISQEMERIPRLRPPEPRPRDRSGLAPKRPGPAGELLLQDIPXGSAPAAQHRLPQPPVGKGGAGASSSLSPLQAELLPPLLEHLLLPPQPPHPSLSYEPALLQPYLFHQFGSRDGSRVSEGSPGMVSVGPLPKAEAPALFSRXASKGIFGDHPGHSYGDLPGPSPAQLFQDSGLLYLAQELPAPSRARVPRLPEQGSSSRAEDSPEGYEKEGLGDRGEKPASPAVQPDAALQRLAAVLAGYGVELRQLXPEQLSXLLXLLQLLPKGAGRNPGGVVNVGADIKKXMEGPVEGRDXAELPARXSPMPGHPXASPXSSEVQQVPSPVSSEPPKAARPPVXPVLLEKKSPLGQSQPXVAGQPSARPAAEEYGYIVXDQKPLSLAAGVKLLEILAEHVHMSSGSFINISVVGPALXFRIRHNEQNLSLADVXQQAGLVKSELEAQXGLQILQXGVGQREEAAAVLPQXAHSXSPMRSVLLXLVALAGVAGLLVALAVALCVRQHARQQDKERLAALGPEGAHGDXXFEYQDLCRQHMAXKSLFNRAEGPPEPSRVSSVSSQFSDAAQASPSSHSSXPSWCEEPAQANMDISXGHMILAYMEDHLRNRDRLAKEWQALCAYQAEPNXCAXAQGEGNIKKNRHPDFLPYDHARIKLKVESSPSRSDYINASPIIEHDPRMPAYIAXQGPLSHXIADFWQMVWESGCXVIVMLXPLVEDGVKQCDRYWPDEGASLYHVYEVNLVSEHIWCEDFLVRSFYLKNVQXQEXRXLXQFHFLSWPAEGXPASXRPLLDFRRKVNKCYRGRSCPIIVHCSDGAGRXGXYILIDMVLNRMAKGVKEIDIAAXLEHVRDQRPGLVRSKDQFEFALXAVAEEVNAILKALPQ

SEQ ID NO: 22164 - protein, 52 aa, Homo sapiens
  MOD_RES (52)..(52): Selenocysteine
MRRPRRPGGLGGSGGLRLLLCLLLLSSRPGGCSAVSAHGSGEGHGVHVGRGX

SEQ ID NO: 22165 - protein, 67 aa, Homo sapiens
  MOD_RES (12)..(12): Selenocysteine
  MOD_RES (57)..(57): Selenocysteine
MSQGLSWHDDLXQYVISQEMERIPRLRPPEPRPRDRSGLAPKRPGPAGELLLQDIPXGSAPAAQHRL

SEQ ID NO: 22166 - protein, 86 aa, Homo sapiens
  MOD_RES (12)..(12): Selenocysteine
  MOD_RES (57)..(57): Selenocysteine
MSQGLSWHDDLXQYVISQEMERIPRLRPPEPRPRDRSGLAPKRPGPAGELLLQDIPXGSAPAAQHRLPQPPVGKGGAGASSSLSPL

SEQ ID NO: 22167 - protein, 125 aa, Homo sapiens
  MOD_RES (12)..(12): Selenocysteine
  MOD_RES (57)..(57): Selenocysteine
MSQGLSWHDDLXQYVISQEMERIPRLRPPEPRPRDRSGLAPKRPGPAGELLLQDIPXGSAPAAQHRLPQPPVGKGGAGASSSLSPLQAELLPPLLEHLLLPPQPPHPSLSYEPALLQPYLFHQFG

SEQ ID NO: 22168 - protein, 889 aa, Homo sapiens
  MOD_RES (12)..(12): Selenocysteine
  MOD_RES (57)..(57): Selenocysteine
  MOD_RES (157)..(157): Selenocysteine
  MOD_RES (263)..(263): Selenocysteine
  MOD_RES (269)..(269): Selenocysteine
  MOD_RES (272)..(272): Selenocysteine
  MOD_RES (298)..(298): Selenocysteine
  MOD_RES (308)..(308): Selenocysteine
  MOD_RES (315)..(315): Selenocysteine
  MOD_RES (323)..(323): Selenocysteine
  MOD_RES (327)..(327): Selenocysteine
  MOD_RES (351)..(351): Selenocysteine
  MOD_RES (367)..(367): Selenocysteine
  MOD_RES (386)..(386): Selenocysteine
  MOD_RES (425)..(425): Selenocysteine
  MOD_RES (441)..(441): Selenocysteine
  MOD_RES (455)..(455): Selenocysteine
  MOD_RES (462)..(462): Selenocysteine
  MOD_RES (477)..(477): Selenocysteine
  MOD_RES (481)..(481): Selenocysteine
  MOD_RES (490)..(490): Selenocysteine
  MOD_RES (534)..(535): Selenocysteine
  MOD_RES (548)..(548): Selenocysteine
  MOD_RES (585)..(585): Selenocysteine
  MOD_RES (601)..(601): Selenocysteine
  MOD_RES (635)..(635): Selenocysteine
  MOD_RES (638)..(638): Selenocysteine
  MOD_RES (693)..(693): Selenocysteine
  MOD_RES (700)..(700): Selenocysteine
  MOD_RES (714)..(714): Selenocysteine
  MOD_RES (720)..(720): Selenocysteine
  MOD_RES (771)..(771): Selenocysteine
  MOD_RES (774)..(774): Selenocysteine
  MOD_RES (776)..(776): Selenocysteine
  MOD_RES (778)..(778): Selenocysteine
  MOD_RES (790)..(790): Selenocysteine
  MOD_RES (794)..(794): Selenocysteine
  MOD_RES (826)..(826): Selenocysteine
  MOD_RES (828)..(828): Selenocysteine
  MOD_RES (851)..(851): Selenocysteine
  MOD_RES (874)..(874): Selenocysteine
MSQGLSWHDDLXQYVISQEMERIPRLRPPEPRPRDRSGLAPKRPGPAGELLLQDIPXGSAPAAQHRLPQPPVGKGGAGASSSLSPLQAELLPPLLEHLLLPPQPPHPSLSYEPALLQPYLFHQFGSRDGSRVSEGSPGMVSVGPLPKAEAPALFSRXASKGIFGDHPGHSYGDLPGPSPAQLFQDSGLLYLAQELPAPSRARVPRLPEQGSSSRAEDSPEGYEKEGLGDRGEKPASPAVQPDAALQRLAAVLAGYGVELRQLXPEQLSXLLXLLQLLPKGAGRNPGGVVNVGADIKKXMEGPVEGRDXAELPARXSPMPGHPXASPXSSEVQQVPSPVSSEPPKAARPPVXPVLLEKKSPLGQSQPXVAGQPSARPAAEEYGYIVXDQKPLSLAAGVKLLEILAEHVHMSSGSFINISVVGPALXFRIRHNEQNLSLADVXQQAGLVKSELEAQXGLQILQXGVGQREEAAAVLPQXAHSXSPMRSVLLXLVALAGVAGLLVALAVALCVRQHARQQDKERLAALGPEGAHGDXXFEYQDLCRQHMAXKSLFNRAEGPPEPSRVSSVSSQFSDAAQASPSSHSSXPSWCEEPAQANMDISXGHMILAYMEDHLRNRDRLAKEWQALCAYQAEPNXCAXAQGEGNIKKNRHPDFLPYDHARIKLKVESSPSRSDYINASPIIEHDPRMPAYIAXQGPLSHXIADFWQMVWESGCXVIVMLXPLVEDGVKQCDRYWPDEGASLYHVYEVNLVSEHIWCEDFLVRSFYLKNVQXQEXRXLXQFHFLSWPAEGXPASXRPLLDFRRKVNKCYRGRSCPIIVHCSDGAGRXGXYILIDMVLNRMAKGVKEIDIAAXLEHVRDQRPGLVRSKDQFEFALXAVAEEVNAILKALPQ

SEQ ID NO: 22169 - protein, 137 aa, Homo sapiens
  MOD_RES (1)..(1): Any amino acid
  MOD_RES (7)..(7): Selenocysteine
  MOD_RES (13)..(13): Selenocysteine
  MOD_RES (64)..(64): Selenocysteine
  MOD_RES (67)..(67): Selenocysteine
  MOD_RES (69)..(69): Selenocysteine
  MOD_RES (71)..(71): Selenocysteine
  MOD_RES (83)..(83): Selenocysteine
  MOD_RES (87)..(87): Selenocysteine
  MOD_RES (119)..(119): Selenocysteine
  MOD_RES (121)..(121): Selenocysteine
XWESGCXVIVMLXPLVEDGVKQCDRYWPDEGASLYHVYEVNLVSEHIWCEDFLVRSFYLKNVQXQEXRXLXQFHFLSWPAEGXPASXRPLLDFRRKVNKCYRGRSCPIIVHCSDGAGRXGXYILIDMVLNRMAKGPV

SEQ ID NO: 22170 - protein, 597 aa, Homo sapiens
  MOD_RES (6)..(6): Selenocysteine
  MOD_RES (28)..(28): Selenocysteine
  MOD_RES (33)..(33): Selenocysteine
  MOD_RES (61)..(61): Selenocysteine
  MOD_RES (77)..(77): Selenocysteine
  MOD_RES (96)..(96): Selenocysteine
  MOD_RES (106)..(106): Selenocysteine
  MOD_RES (113)..(113): Selenocysteine
  MOD_RES (116)..(116): Selenocysteine
  MOD_RES (122)..(122): Selenocysteine
  MOD_RES (135)..(135): Selenocysteine
  MOD_RES (151)..(151): Selenocysteine
  MOD_RES (165)..(165): Selenocysteine
  MOD_RES (176)..(176): Selenocysteine
  MOD_RES (191)..(191): Selenocysteine
  MOD_RES (199)..(199): Selenocysteine
  MOD_RES (204)..(204): Selenocysteine
  MOD_RES (220)..(220): Selenocysteine
  MOD_RES (258)..(258): Selenocysteine
  MOD_RES (268)..(268): Selenocysteine
  MOD_RES (271)..(271): Selenocysteine
  MOD_RES (293)..(294): Selenocysteine
  MOD_RES (326)..(326): Selenocysteine
  MOD_RES (330)..(330): Selenocysteine
  MOD_RES (334)..(334): Selenocysteine
  MOD_RES (348)..(348): Selenocysteine
  MOD_RES (356)..(356): Selenocysteine
  MOD_RES (372)..(372): Selenocysteine
  MOD_RES (399)..(400): Selenocysteine
  MOD_RES (409)..(409): Selenocysteine
  MOD_RES (433)..(433): Selenocysteine
  MOD_RES (447)..(448): Selenocysteine
  MOD_RES (454)..(454): Selenocysteine
  MOD_RES (463)..(463): Selenocysteine
  MOD_RES (471)..(471): Selenocysteine
  MOD_RES (487)..(487): Selenocysteine
  MOD_RES (525)..(525): Selenocysteine
  MOD_RES (531)..(531): Selenocysteine
  MOD_RES (544)..(544): Selenocysteine
  MOD_RES (551)..(551): Selenocysteine
  MOD_RES (572)..(572): Selenocysteine
  MOD_RES (574)..(574): Selenocysteine
  MOD_RES (578)..(579): Selenocysteine
  MOD_RES (586)..(586): Selenocysteine
  MOD_RES (590)..(590): Selenocysteine
MGHLPXGIHGARRLLPLLWLFVLFKNAXAFHVXVQDDNNIVVSLEASDVISPASVYVVKIXGESKNYFFEFEEFNSXLPPPVIFKASYHGLYYIIXLVVVNGNVVXKPSRSIXVLXKPLPVXSVSIYDYKPSPEXGVLFEIHYPEKYNVFXRVNISYWEGKDFRXMLYKDFFKGKXVFNHWLPGMCYSNIXFQLVSEAXFNKSXLVEYSGVSHEPKQHRXAPYPPQNISVRIVNLNKNNWEEQSGNFPEESFMRSQDXIGKEKLFHFXEEXPEIPSGNISSGWPDFNSSDYEXXSQPYWWDSASAAPESEDEFVSVLPMEYENNSXLSEXEKSXSGSFSFFPVQMILXWLPPKPPXAFDGFHIHIEREENFXEYLMVDEEAHEFVAELKEPGKYKLSVXXFSSSGSCEXRKSQSAKSLSFYISPSGEWIEELXEKPQHVSVHVLSSXXALMSWXSSQENYNSXIVSVVSLXCQKQKESQRLEKQYCXQVNSSKPIIENLVPGAQYQVVIYLRKGPLIGPPSDPVXFAIVPXGIKDLMLYPLGPXAVVLSWXRPYLGVFRKYVVEMFYFNPAXMXSEWXXYYEIAAXVSLXASVVIFP

SEQ ID NO: 22171 - protein, 1188 aa, Homo sapiens
  MOD_RES (6)..(6): Selenocysteine
  MOD_RES (28)..(28): Selenocysteine
  MOD_RES (33)..(33): Selenocysteine
  MOD_RES (61)..(61): Selenocysteine
  MOD_RES (77)..(77): Selenocysteine
  MOD_RES (96)..(96): Selenocysteine
  MOD_RES (106)..(106): Selenocysteine
  MOD_RES (113)..(113): Selenocysteine
  MOD_RES (116)..(116): Selenocysteine
  MOD_RES (122)..(122): Selenocysteine
  MOD_RES (135)..(135): Selenocysteine
  MOD_RES (151)..(151): Selenocysteine
  MOD_RES (165)..(165): Selenocysteine
  MOD_RES (176)..(176): Selenocysteine
  MOD_RES (191)..(191): Selenocysteine
  MOD_RES (199)..(199): Selenocysteine
  MOD_RES (204)..(204): Selenocysteine
  MOD_RES (220)..(220): Selenocysteine
  MOD_RES (258)..(258): Selenocysteine
  MOD_RES (268)..(268): Selenocysteine
  MOD_RES (271)..(271): Selenocysteine
  MOD_RES (293)..(294): Selenocysteine
  MOD_RES (326)..(326): Selenocysteine
  MOD_RES (330)..(330): Selenocysteine
  MOD_RES (334)..(334): Selenocysteine
  MOD_RES (348)..(348): Selenocysteine
  MOD_RES (356)..(356): Selenocysteine
  MOD_RES (372)..(372): Selenocysteine
  MOD_RES (399)..(400): Selenocysteine
  MOD_RES (409)..(409): Selenocysteine
  MOD_RES (433)..(433): Selenocysteine
  MOD_RES (447)..(448): Selenocysteine
  MOD_RES (454)..(454): Selenocysteine
  MOD_RES (463)..(463): Selenocysteine
  MOD_RES (471)..(471): Selenocysteine
  MOD_RES (487)..(487): Selenocysteine
  MOD_RES (525)..(525): Selenocysteine
  MOD_RES (531)..(531): Selenocysteine
  MOD_RES (544)..(544): Selenocysteine
  MOD_RES (551)..(551): Selenocysteine
  MOD_RES (572)..(572): Selenocysteine
  MOD_RES (574)..(574): Selenocysteine
  MOD_RES (578)..(579): Selenocysteine
  MOD_RES (586)..(586): Selenocysteine
  MOD_RES (590)..(590): Selenocysteine
  MOD_RES (609)..(609): Selenocysteine
  MOD_RES (612)..(612): Selenocysteine
  MOD_RES (625)..(625): Selenocysteine
  MOD_RES (630)..(630): Selenocysteine
  MOD_RES (638)..(638): Selenocysteine
  MOD_RES (652)..(652): Selenocysteine
  MOD_RES (657)..(658): Selenocysteine
  MOD_RES (683)..(683): Selenocysteine
  MOD_RES (688)..(688): Selenocysteine
  MOD_RES (704)..(704): Selenocysteine
  MOD_RES (707)..(707): Selenocysteine
  MOD_RES (713)..(713): Selenocysteine
  MOD_RES (735)..(735): Selenocysteine
  MOD_RES (737)..(737): Selenocysteine
  MOD_RES (740)..(740): Selenocysteine
  MOD_RES (765)..(765): Selenocysteine
  MOD_RES (779)..(779): Selenocysteine
  MOD_RES (787)..(787): Selenocysteine
  MOD_RES (794)..(794): Selenocysteine
  MOD_RES (805)..(805): Selenocysteine
  MOD_RES (811)..(811): Selenocysteine
  MOD_RES (814)..(814): Selenocysteine
  MOD_RES (831)..(831): Selenocysteine
  MOD_RES (840)..(840): Selenocysteine
  MOD_RES (859)..(859): Selenocysteine
  MOD_RES (887)..(887): Selenocysteine
  MOD_RES (941)..(941): Selenocysteine
  MOD_RES (982)..(982): Selenocysteine
  MOD_RES (989)..(989): Selenocysteine
  MOD_RES (1009)..(1009): Selenocysteine
  MOD_RES (1026)..(1026): Selenocysteine
  MOD_RES (1036)..(1036): Selenocysteine
  MOD_RES (1070)..(1070): Selenocysteine
  MOD_RES (1079)..(1079): Selenocysteine
  MOD_RES (1098)..(1098): Selenocysteine
  MOD_RES (1115)..(1115): Selenocysteine
  MOD_RES (1117)..(1117): Selenocysteine
  MOD_RES (1153)..(1153): Selenocysteine
MGHLPXGIHGARRLLPLLWLFVLFKNAXAFHVXVQDDNNIVVSLEASDVISPASVYVVKIXGESKNYFFEFEEFNSXLPPPVIFKASYHGLYYIIXLVVVNGNVVXKPSRSIXVLXKPLPVXSVSIYDYKPSPEXGVLFEIHYPEKYNVFXRVNISYWEGKDFRXMLYKDFFKGKXVFNHWLPGMCYSNIXFQLVSEAXFNKSXLVEYSGVSHEPKQHRXAPYPPQNISVRIVNLNKNNWEEQSGNFPEESFMRSQDXIGKEKLFHFXEEXPEIPSGNISSGWPDFNSSDYEXXSQPYWWDSASAAPESEDEFVSVLPMEYENNSXLSEXEKSXSGSFSFFPVQMILXWLPPKPPXAFDGFHIHIEREENFXEYLMVDEEAHEFVAELKEPGKYKLSVXXFSSSGSCEXRKSQSAKSLSFYISPSGEWIEELXEKPQHVSVHVLSSXXALMSWXSSQENYNSXIVSVVSLXCQKQKESQRLEKQYCXQVNSSKPIIENLVPGAQYQVVIYLRKGPLIGPPSDPVXFAIVPXGIKDLMLYPLGPXAVVLSWXRPYLGVFRKYVVEMFYFNPAXMXSEWXXYYEIAAXVSLXASVRIANLLPAWYYNFRVXMVXWGDPELSCCDSSXISFIXAPVAPEIXSVEYFNSLLYISWXYGDDXXDLSHSRMLHWMVVAEGKKKIKKSVXRNVMXAILSLPPGDIYNLSVXACXERGSNXSMLRLVKLEPAPPKSLFAVNKXQXSVXLLWVEEGVADFFEVFCQQVGSSQKXKLQEPVAVSSHVVXISSLLPAXAYNCSVXSFSHDSPSVPXFIAVSXMVXEMNPNVVVISVLAILSXLLIGLLLVXLIILRKKHLQMARECGAGXFVNFASLERDGKLPYNWSKNGLKKRKLXNPVQLDDFDAYIKDMAKDSDYKFSLQFEELKLIGLDIPHFAADLPLNRCKNRYXNILPYDFSRVRLVSMNEEEGADYINANYIPGYNSPQEYIAXQGPLPEXRNDFWKMVLQQKSQIIVMLXQCNEKRRVKCDHYWPFXEEPIAYGDIXVEMISEEEQDDWACRHFRINYADEMQDVMHFNYXAWPDHGVPXANAAESILQFVHMVRQQAXKSKGPMIIHCSAGVGRXGXFIALDRLLQHIRDHEFVDILGLVSEMRSYRMSMVQXEEQYIFIHQCVQLMWMKKKQQFCISDVIYENVSKS

SEQ ID NO: 22172 - protein, 1216 aa, Homo sapiens
  MOD_RES (6)..(6): Selenocysteine
  MOD_RES (28)..(28): Selenocysteine
  MOD_RES (33)..(33): Selenocysteine
  MOD_RES (61)..(61): Selenocysteine
  MOD_RES (77)..(77): Selenocysteine
  MOD_RES (96)..(96): Selenocysteine
  MOD_RES (106)..(106): Selenocysteine
  MOD_RES (113)..(113): Selenocysteine
  MOD_RES (116)..(116): Selenocysteine
  MOD_RES (122)..(122): Selenocysteine
  MOD_RES (135)..(135): Selenocysteine
  MOD_RES (151)..(151): Selenocysteine
  MOD_RES (165)..(165): Selenocysteine
  MOD_RES (176)..(176): Selenocysteine
  MOD_RES (191)..(191): Selenocysteine
  MOD_RES (199)..(199): Selenocysteine
  MOD_RES (204)..(204): Selenocysteine
  MOD_RES (220)..(220): Selenocysteine
  MOD_RES (258)..(258): Selenocysteine
  MOD_RES (268)..(268): Selenocysteine
  MOD_RES (271)..(271): Selenocysteine
  MOD_RES (293)..(294): Selenocysteine
  MOD_RES (326)..(326): Selenocysteine
  MOD_RES (330)..(330): Selenocysteine
  MOD_RES (334)..(334): Selenocysteine
  MOD_RES (348)..(348): Selenocysteine
  MOD_RES (356)..(356): Selenocysteine
  MOD_RES (372)..(372): Selenocysteine
  MOD_RES (399)..(400): Selenocysteine
  MOD_RES (409)..(409): Selenocysteine
  MOD_RES (433)..(433): Selenocysteine
  MOD_RES (447)..(448): Selenocysteine
  MOD_RES (454)..(454): Selenocysteine
  MOD_RES (463)..(463): Selenocysteine
  MOD_RES (471)..(471): Selenocysteine
  MOD_RES (487)..(487): Selenocysteine
  MOD_RES (525)..(525): Selenocysteine
  MOD_RES (531)..(531): Selenocysteine
  MOD_RES (544)..(544): Selenocysteine
  MOD_RES (551)..(551): Selenocysteine
  MOD_RES (572)..(572): Selenocysteine
  MOD_RES (574)..(574): Selenocysteine
  MOD_RES (578)..(579): Selenocysteine
  MOD_RES (586)..(586): Selenocysteine
  MOD_RES (590)..(590): Selenocysteine
  MOD_RES (609)..(609): Selenocysteine
  MOD_RES (612)..(612): Selenocysteine
  MOD_RES (625)..(625): Selenocysteine
  MOD_RES (630)..(630): Selenocysteine
  MOD_RES (638)..(638): Selenocysteine
  MOD_RES (652)..(652): Selenocysteine
  MOD_RES (657)..(658): Selenocysteine
  MOD_RES (683)..(683): Selenocysteine
  MOD_RES (688)..(688): Selenocysteine
  MOD_RES (704)..(704): Selenocysteine
  MOD_RES (707)..(707): Selenocysteine
  MOD_RES (713)..(713): Selenocysteine
  MOD_RES (735)..(735): Selenocysteine
  MOD_RES (737)..(737): Selenocysteine
  MOD_RES (740)..(740): Selenocysteine
  MOD_RES (765)..(765): Selenocysteine
  MOD_RES (779)..(779): Selenocysteine
  MOD_RES (787)..(787): Selenocysteine
  MOD_RES (794)..(794): Selenocysteine
  MOD_RES (805)..(805): Selenocysteine
  MOD_RES (811)..(811): Selenocysteine
  MOD_RES (814)..(814): Selenocysteine
  MOD_RES (831)..(831): Selenocysteine
  MOD_RES (840)..(840): Selenocysteine
  MOD_RES (859)..(859): Selenocysteine
  MOD_RES (885)..(885): Selenocysteine
  MOD_RES (893)..(893): Selenocysteine
  MOD_RES (915)..(915): Selenocysteine
  MOD_RES (969)..(969): Selenocysteine
  MOD_RES (1010)..(1010): Selenocysteine
  MOD_RES (1017)..(1017): Selenocysteine
  MOD_RES (1037)..(1037): Selenocysteine
  MOD_RES (1054)..(1054): Selenocysteine
  MOD_RES (1064)..(1064): Selenocysteine
  MOD_RES (1098)..(1098): Selenocysteine
  MOD_RES (1107)..(1107): Selenocysteine
  MOD_RES (1126)..(1126): Selenocysteine
  MOD_RES (1143)..(1143): Selenocysteine
  MOD_RES (1145)..(1145): Selenocysteine
  MOD_RES (1181)..(1181): Selenocysteine
MGHLPXGIHGARRLLPLLWLFVLFKNAXAFHVXVQDDNNIVVSLEASDVISPASVYVVKIXGESKNYFFEFEEFNSXLPPPVIFKASYHGLYYIIXLVVVNGNVVXKPSRSIXVLXKPLPVXSVSIYDYKPSPEXGVLFEIHYPEKYNVFXRVNISYWEGKDFRXMLYKDFFKGKXVFNHWLPGMCYSNIXFQLVSEAXFNKSXLVEYSGVSHEPKQHRXAPYPPQNISVRIVNLNKNNWEEQSGNFPEESFMRSQDXIGKEKLFHFXEEXPEIPSGNISSGWPDFNSSDYEXXSQPYWWDSASAAPESEDEFVSVLPMEYENNSXLSEXEKSXSGSFSFFPVQMILXWLPPKPPXAFDGFHIHIEREENFXEYLMVDEEAHEFVAELKEPGKYKLSVXXFSSSGSCEXRKSQSAKSLSFYISPSGEWIEELXEKPQHVSVHVLSSXXALMSWXSSQENYNSXIVSVVSLXCQKQKESQRLEKQYCXQVNSSKPIIENLVPGAQYQVVIYLRKGPLIGPPSDPVXFAIVPXGIKDLMLYPLGPXAVVLSWXRPYLGVFRKYVVEMFYFNPAXMXSEWXXYYEIAAXVSLXASVRIANLLPAWYYNFRVXMVXWGDPELSCCDSSXISFIXAPVAPEIXSVEYFNSLLYISWXYGDDXXDLSHSRMLHWMVVAEGKKKIKKSVXRNVMXAILSLPPGDIYNLSVXACXERGSNXSMLRLVKLEPAPPKSLFAVNKXQXSVXLLWVEEGVADFFEVFCQQVGSSQKXKLQEPVAVSSHVVXISSLLPAXAYNCSVXSFSHDSPSVPXFIAVSXMVXEMNPNVVVISVLAILSXLLIGLLLVXLIILRKKHLQMARECGAGXFVNFASLERDGKLPYNWRRSIFAFLXLLPSCLWXDYLLAFYINPWSKNGLKKRKLXNPVQLDDFDAYIKDMAKDSDYKFSLQFEELKLIGLDIPHFAADLPLNRCKNRYXNILPYDFSRVRLVSMNEEEGADYINANYIPGYNSPQEYIAXQGPLPEXRNDFWKMVLQQKSQIIVMLXQCNEKRRVKCDHYWPFXEEPIAYGDIXVEMISEEEQDDWACRHFRINYADEMQDVMHFNYXAWPDHGVPXANAAESILQFVHMVRQQAXKSKGPMIIHCSAGVGRXGXFIALDRLLQHIRDHEFVDILGLVSEMRSYRMSMVQXEEQYIFIHQCVQLMWMKKKQQFCISDVIYENVSKS

SEQ ID NO: 22173 - protein, 405 aa, Homo sapiens
  MOD_RES (3)..(3): Selenocysteine
  MOD_RES (20)..(20): Selenocysteine
  MOD_RES (29)..(29): Selenocysteine
  MOD_RES (48)..(48): Selenocysteine
  MOD_RES (74)..(74): Selenocysteine
  MOD_RES (82)..(82): Selenocysteine
  MOD_RES (104)..(104): Selenocysteine
  MOD_RES (158)..(158): Selenocysteine
  MOD_RES (199)..(199): Selenocysteine
  MOD_RES (206)..(206): Selenocysteine
  MOD_RES (226)..(226): Selenocysteine
  MOD_RES (243)..(243): Selenocysteine
  MOD_RES (253)..(253): Selenocysteine
  MOD_RES (287)..(287): Selenocysteine
  MOD_RES (296)..(296): Selenocysteine
  MOD_RES (315)..(315): Selenocysteine
  MOD_RES (332)..(332): Selenocysteine
  MOD_RES (334)..(334): Selenocysteine
  MOD_RES (370)..(370): Selenocysteine
MVXEMNPNVVVISVLAILSXLLIGLLLVXLIILRKKHLQMARECGAGXFVNFASLERDGKLPYNWRRSIFAFLXLLPSCLWXDYLLAFYINPWSKNGLKKRKLXNPVQLDDFDAYIKDMAKDSDYKFSLQFEELKLIGLDIPHFAADLPLNRCKNRYXNILPYDFSRVRLVSMNEEEGADYINANYIPGYNSPQEYIAXQGPLPEXRNDFWKMVLQQKSQIIVMLXQCNEKRRVKCDHYWPFXEEPIAYGDIXVEMISEEEQDDWACRHFRINYADEMQDVMHFNYXAWPDHGVPXANAAESILQFVHMVRQQAXKSKGPMIIHCSAGVGRXGXFIALDRLLQHIRDHEFVDILGLVSEMRSYRMSMVQXEEQYIFIHQCVQLMWMKKKQQFCISDVIYENVSKS

SEQ ID NO: 22174 - protein, 377 aa, Homo sapiens
  MOD_RES (3)..(3): Selenocysteine
  MOD_RES (20)..(20): Selenocysteine
  MOD_RES (29)..(29): Selenocysteine
  MOD_RES (48)..(48): Selenocysteine
  MOD_RES (76)..(76): Selenocysteine
  MOD_RES (130)..(130): Selenocysteine
  MOD_RES (171)..(171): Selenocysteine
  MOD_RES (178)..(178): Selenocysteine
  MOD_RES (198)..(198): Selenocysteine
  MOD_RES (215)..(215): Selenocysteine
  MOD_RES (225)..(225): Selenocysteine
  MOD_RES (259)..(259): Selenocysteine
  MOD_RES (268)..(268): Selenocysteine
  MOD_RES (287)..(287): Selenocysteine
  MOD_RES (304)..(304): Selenocysteine
  MOD_RES (306)..(306): Selenocysteine
  MOD_RES (342)..(342): Selenocysteine
MVXEMNPNVVVISVLAILSXLLIGLLLVXLIILRKKHLQMARECGAGXFVNFASLERDGKLPYNWSKNGLKKRKLXNPVQLDDFDAYIKDMAKDSDYKFSLQFEELKLIGLDIPHFAADLPLNRCKNRYXNILPYDFSRVRLVSMNEEEGADYINANYIPGYNSPQEYIAXQGPLPEXRNDFWKMVLQQKSQIIVMLXQCNEKRRVKCDHYWPFXEEPIAYGDIXVEMISEEEQDDWACRHFRINYADEMQDVMHFNYXAWPDHGVPXANAAESILQFVHMVRQQAXKSKGPMIIHCSAGVGRXGXFIALDRLLQHIRDHEFVDILGLVSEMRSYRMSMVQXEEQYIFIHQCVQLMWMKKKQQFCISDVIYENVSKS

SEQ ID NO: 22175 - protein, 116 aa, Homo sapiens
  MOD_RES (16)..(16): Selenocysteine
  MOD_RES (33)..(33): Selenocysteine
  MOD_RES (43)..(43): Selenocysteine
  MOD_RES (77)..(77): Selenocysteine
  MOD_RES (86)..(86): Selenocysteine
  MOD_RES (105)..(105): Selenocysteine
WKMVLQQKSQIIVMLXQCNEKRRVKCDHYWPFXEEPIAYGDIXVEMISEEEQDDWACRHFRINYADEMQDVMHFNYXAWPDHGVPXANAAESILQFVHMVRQQAXKSKGPMIIHCR

SEQ ID NO: 22176 - protein, 88 aa, Homo sapiens
  MOD_RES (1)..(1): Any amino acid
  MOD_RES (3)..(3): Selenocysteine
  MOD_RES (28)..(28): Selenocysteine
  MOD_RES (42)..(42): Selenocysteine
  MOD_RES (50)..(50): Selenocysteine
  MOD_RES (57)..(57): Selenocysteine
  MOD_RES (68)..(68): Selenocysteine
  MOD_RES (74)..(74): Selenocysteine
XVXLLWVEEGVADFFEVFCQQVGSSQKXKLQEPVAVSSHVVXISSLLPAXAYNCSVXSFSHDSPSVPXFIAVSXMGSVELVHLSILHP

SEQ ID NO: 22177 - protein, 198 aa, Homo sapiens
  MOD_RES (30)..(30): Selenocysteine
  MOD_RES (40)..(40): Selenocysteine
  MOD_RES (71)..(72): Selenocysteine
  MOD_RES (74)..(74): Selenocysteine
  MOD_RES (99)..(99): Selenocysteine
  MOD_RES (116)..(116): Selenocysteine
  MOD_RES (134)..(134): Selenocysteine
  MOD_RES (172)..(172): Selenocysteine
  MOD_RES (178)..(178): Selenocysteine
  MOD_RES (195)..(195): Selenocysteine
MILYRLKERFQLSLRQDKEKNQEIHLSPIXLQPALSEAKXVHSMVQPEQAPKVLNVVVDPQGRGAPEIKAXXAXSVCPSPFKMKPIGLQERRGSNVSLXLDMSSLGNIEPFVSIPXPREKVAMEYLQSASRILXRSQLRDVVASSHLLQSEFMEIPMNFVDPKEIDIPRHGXKNRYKXILPNPLSRVCLRPKNVXDSL

SEQ ID NO: 22178 - protein, 412 aa, Homo sapiens
  MOD_RES (30)..(30): Selenocysteine
  MOD_RES (40)..(40): Selenocysteine
  MOD_RES (71)..(72): Selenocysteine
  MOD_RES (74)..(74): Selenocysteine
  MOD_RES (99)..(99): Selenocysteine
  MOD_RES (116)..(116): Selenocysteine
  MOD_RES (134)..(134): Selenocysteine
  MOD_RES (172)..(172): Selenocysteine
  MOD_RES (178)..(178): Selenocysteine
  MOD_RES (195)..(195): Selenocysteine
  MOD_RES (200)..(200): Selenocysteine
  MOD_RES (220)..(220): Selenocysteine
  MOD_RES (227)..(227): Selenocysteine
  MOD_RES (247)..(247): Selenocysteine
  MOD_RES (284)..(284): Selenocysteine
  MOD_RES (296)..(296): Selenocysteine
  MOD_RES (305)..(305): Selenocysteine
  MOD_RES (312)..(312): Selenocysteine
  MOD_RES (350)..(350): Selenocysteine
  MOD_RES (356)..(356): Selenocysteine
  MOD_RES (388)..(388): Selenocysteine
  MOD_RES (410)..(410): Selenocysteine
MILYRLKERFQLSLRQDKEKNQEIHLSPIXLQPALSEAKXVHSMVQPEQAPKVLNVVVDPQGRGAPEIKAXXAXSVCPSPFKMKPIGLQERRGSNVSLXLDMSSLGNIEPFVSIPXPREKVAMEYLQSASRILXRSQLRDVVASSHLLQSEFMEIPMNFVDPKEIDIPRHGXKNRYKXILPNPLSRVCLRPKNVXDSLSXYINANYIRGYSGKEKAFIAXQGPMINXVDDFWQMVWQEDSPVIVMIXKLKEKNEKCVLYWPEKRGIYGKVEVLVISVNECDNYXIRNLVLKQGSHXQHVKHYWYXSWPDHKXPDSAQPLLQLMLDVEEDRLASQGRGPVVVHCSAGIGRXGCFIAXSIGCQQLKEEGVVDALSIVCQLRMDRGGMVQXSEQYEFVHHALCLYESRLSAEXVQ

SEQ ID NO: 22179 - protein, 141 aa, Homo sapiens
  MOD_RES (16)..(16): Selenocysteine
  MOD_RES (22)..(22): Selenocysteine
  MOD_RES (39)..(39): Selenocysteine
  MOD_RES (44)..(44): Selenocysteine
  MOD_RES (64)..(64): Selenocysteine
  MOD_RES (71)..(71): Selenocysteine
  MOD_RES (91)..(91): Selenocysteine
  MOD_RES (103)..(103): Selenocysteine
  MOD_RES (110)..(110): Selenocysteine
  MOD_RES (114)..(114): Selenocysteine
  MOD_RES (130)..(130): Selenocysteine
  MOD_RES (138)..(138): Selenocysteine
MNFVDPKEIDIPRHGXKNRYKXILPNPLSRVCLRPKNVXDSLSXYINANYIRGYSGKEKAFIAXQGPMINXVDDFWQMVWQEDSPVIVMIXKLKEKNEKRRLXGLAPAHXWHSXFPWAKLSGSRCPHPMXRACAGAIXPPC

SEQ ID NO: 22180 - protein, 451 aa, Homo sapiens
  MOD_RES (37)..(37): Selenocysteine
  MOD_RES (69)..(69): Selenocysteine
  MOD_RES (79)..(79): Selenocysteine
  MOD_RES (110)..(111): Selenocysteine
  MOD_RES (113)..(113): Selenocysteine
  MOD_RES (138)..(138): Selenocysteine
  MOD_RES (155)..(155): Selenocysteine
  MOD_RES (173)..(173): Selenocysteine
  MOD_RES (211)..(211): Selenocysteine
  MOD_RES (217)..(217): Selenocysteine
  MOD_RES (234)..(234): Selenocysteine
  MOD_RES (239)..(239): Selenocysteine
  MOD_RES (259)..(259): Selenocysteine
  MOD_RES (266)..(266): Selenocysteine
  MOD_RES (286)..(286): Selenocysteine
  MOD_RES (323)..(323): Selenocysteine
  MOD_RES (335)..(335): Selenocysteine
  MOD_RES (344)..(344): Selenocysteine
  MOD_RES (351)..(351): Selenocysteine
  MOD_RES (389)..(389): Selenocysteine
  MOD_RES (395)..(395): Selenocysteine
  MOD_RES (427)..(427): Selenocysteine
  MOD_RES (449)..(449): Selenocysteine
MNQKNVLQGQHEADKIWSKEGFYAVVIFLSIFVIIVXCLMILYRLKERFQLSLRQDKEKNQEIHLSPIXLQPALSEAKXVHSMVQPEQAPKVLNVVVDPQGRGAPEIKAXXAXSVCPSPFKMKPIGLQERRGSNVSLXLDMSSLGNIEPFVSIPXPREKVAMEYLQSASRILXRSQLRDVVASSHLLQSEFMEIPMNFVDPKEIDIPRHGXKNRYKXILPNPLSRVCLRPKNVXDSLSXYINANYIRGYSGKEKAFIAXQGPMINXVDDFWQMVWQEDSPVIVMIXKLKEKNEKCVLYWPEKRGIYGKVEVLVISVNECDNYXIRNLVLKQGSHXQHVKHYWYXSWPDHKXPDSAQPLLQLMLDVEEDRLASQGRGPVVVHCSAGIGRXGCFIAXSIGCQQLKEEGVVDALSIVCQLRMDRGGMVQXSEQYEFVHHALCLYESRLSAEXVQ

SEQ ID NO: 22181 - protein, 545 aa, Homo sapiens
  MOD_RES (8)..(8): Selenocysteine
  MOD_RES (19)..(19): Selenocysteine
  MOD_RES (62)..(62): Selenocysteine
  MOD_RES (92)..(92): Selenocysteine
  MOD_RES (131)..(131): Selenocysteine
  MOD_RES (163)..(163): Selenocysteine
  MOD_RES (173)..(173): Selenocysteine
  MOD_RES (204)..(205): Selenocysteine
  MOD_RES (207)..(207): Selenocysteine
  MOD_RES (232)..(232): Selenocysteine
  MOD_RES (249)..(249): Selenocysteine
  MOD_RES (267)..(267): Selenocysteine
  MOD_RES (305)..(305): Selenocysteine
  MOD_RES (311)..(311): Selenocysteine
  MOD_RES (328)..(328): Selenocysteine
  MOD_RES (333)..(333): Selenocysteine
  MOD_RES (353)..(353): Selenocysteine
  MOD_RES (360)..(360): Selenocysteine
  MOD_RES (380)..(380): Selenocysteine
  MOD_RES (417)..(417): Selenocysteine
  MOD_RES (429)..(429): Selenocysteine
  MOD_RES (438)..(438): Selenocysteine
  MOD_RES (445)..(445): Selenocysteine
  MOD_RES (483)..(483): Selenocysteine
  MOD_RES (489)..(489): Selenocysteine
  MOD_RES (521)..(521): Selenocysteine
  MOD_RES (543)..(543): Selenocysteine
MQSISKQXLQMDVNKLNIXLLRIFRQGVAAALGLLPQQVHINRLIGKKNSIELFVSPINRKXGISDALPSEEVLRSLNINVLHQSLSQFGIXEVSPEKNVLQGQHEADKIWSKEGFYAVVIFLSIFVIIVXCLMILYRLKERFQLSLRQDKEKNQEIHLSPIXLQPALSEAKXVHSMVQPEQAPKVLNVVVDPQGRGAPEIKAXXAXSVCPSPFKMKPIGLQERRGSNVSLXLDMSSLGNIEPFVSIPXPREKVAMEYLQSASRILXRSQLRDVVASSHLLQSEFMEIPMNFVDPKEIDIPRHGXKNRYKXILPNPLSRVCLRPKNVXDSLSXYINANYIRGYSGKEKAFIAXQGPMINXVDDFWQMVWQEDSPVIVMIXKLKEKNEKCVLYWPEKRGIYGKVEVLVISVNECDNYXIRNLVLKQGSHXQHVKHYWYXSWPDHKXPDSAQPLLQLMLDVEEDRLASQGRGPVVVHCSAGIGRXGCFIAXSIGCQQLKEEGVVDALSIVCQLRMDRGGMVQXSEQYEFVHHALCLYESRLSAEXVQ

SEQ ID NO: 22182 - protein, 657 aa, Homo sapiens
  MOD_RES (120)..(120): Selenocysteine
  MOD_RES (131)..(131): Selenocysteine
  MOD_RES (174)..(174): Selenocysteine
  MOD_RES (204)..(204): Selenocysteine
  MOD_RES (243)..(243): Selenocysteine
  MOD_RES (275)..(275): Selenocysteine
  MOD_RES (285)..(285): Selenocysteine
  MOD_RES (316)..(317): Selenocysteine
  MOD_RES (319)..(319): Selenocysteine
  MOD_RES (344)..(344): Selenocysteine
  MOD_RES (361)..(361): Selenocysteine
  MOD_RES (379)..(379): Selenocysteine
  MOD_RES (417)..(417): Selenocysteine
  MOD_RES (423)..(423): Selenocysteine
  MOD_RES (440)..(440): Selenocysteine
  MOD_RES (445)..(445): Selenocysteine
  MOD_RES (465)..(465): Selenocysteine
  MOD_RES (472)..(472): Selenocysteine
  MOD_RES (492)..(492): Selenocysteine
  MOD_RES (529)..(529): Selenocysteine
  MOD_RES (541)..(541): Selenocysteine
  MOD_RES (550)..(550): Selenocysteine
  MOD_RES (557)..(557): Selenocysteine
  MOD_RES (595)..(595): Selenocysteine
  MOD_RES (601)..(601): Selenocysteine
  MOD_RES (633)..(633): Selenocysteine
  MOD_RES (655)..(655): Selenocysteine
MRRAVCFPALCLLLNLHAAGCFSGNNDHFLAINQKKSGKPVFIYKHSQDIEKSLDIAPQKIYRHSYHSSSEAQVSKRHQIVNSAFPRPAYDPSLNLLAMDGQDLEVENLPIPAANVIVVXLQMDVNKLNIXLLRIFRQGVAAALGLLPQQVHINRLIGKKNSIELFVSPINRKXGISDALPSEEVLRSLNINVLHQSLSQFGIXEVSPEKNVLQGQHEADKIWSKEGFYAVVIFLSIFVIIVXCLMILYRLKERFQLSLRQDKEKNQEIHLSPIXLQPALSEAKXVHSMVQPEQAPKVLNVVVDPQGRGAPEIKAXXAXSVCPSPFKMKPIGLQERRGSNVSLXLDMSSLGNIEPFVSIPXPREKVAMEYLQSASRILXRSQLRDVVASSHLLQSEFMEIPMNFVDPKEIDIPRHGXKNRYKXILPNPLSRVCLRPKNVXDSLSXYINANYIRGYSGKEKAFIAXQGPMINXVDDFWQMVWQEDSPVIVMIXKLKEKNEKCVLYWPEKRGIYGKVEVLVISVNECDNYXIRNLVLKQGSHXQHVKHYWYXSWPDHKXPDSAQPLLQLMLDVEEDRLASQGRGPVVVHCSAGIGRXGCFIAXSIGCQQLKEEGVVDALSIVCQLRMDRGGMVQXSEQYEFVHHALCLYESRLSAEXVQ

SEQ ID NO: 22183 - protein, 1059 aa, Homo sapiens
  MOD_RES (22)..(22): Selenocysteine
  MOD_RES (33)..(33): Selenocysteine
  MOD_RES (41)..(41): Selenocysteine
  MOD_RES (61)..(61): Selenocysteine
  MOD_RES (66)..(66): Selenocysteine
  MOD_RES (75)..(75): Selenocysteine
  MOD_RES (98)..(98): Selenocysteine
  MOD_RES (130)..(130): Selenocysteine
  MOD_RES (135)..(135): Selenocysteine
  MOD_RES (167)..(167): Selenocysteine
  MOD_RES (178)..(179): Selenocysteine
  MOD_RES (183)..(183): Selenocysteine
  MOD_RES (188)..(188): Selenocysteine
  MOD_RES (197)..(198): Selenocysteine
  MOD_RES (202)..(202): Selenocysteine
  MOD_RES (214)..(214): Selenocysteine
  MOD_RES (216)..(216): Selenocysteine
  MOD_RES (221)..(221): Selenocysteine
  MOD_RES (223)..(224): Selenocysteine
  MOD_RES (226)..(226): Selenocysteine
  MOD_RES (294)..(294): Selenocysteine
  MOD_RES (298)..(298): Selenocysteine
  MOD_RES (304)..(304): Selenocysteine
  MOD_RES (333)..(333): Selenocysteine
  MOD_RES (342)..(342): Selenocysteine
  MOD_RES (347)..(347): Selenocysteine
  MOD_RES (352)..(352): Selenocysteine
  MOD_RES (362)..(362): Selenocysteine
  MOD_RES (385)..(385): Selenocysteine
  MOD_RES (408)..(408): Selenocysteine
  MOD_RES (426)..(427): Selenocysteine
  MOD_RES (449)..(449): Selenocysteine
  MOD_RES (460)..(460): Selenocysteine
  MOD_RES (462)..(462): Selenocysteine
  MOD_RES (465)..(465): Selenocysteine
  MOD_RES (470)..(470): Selenocysteine
  MOD_RES (497)..(497): Selenocysteine
  MOD_RES (519)..(519): Selenocysteine
  MOD_RES (524)..(524): Selenocysteine
  MOD_RES (578)..(578): Selenocysteine
  MOD_RES (585)..(585): Selenocysteine
  MOD_RES (605)..(605): Selenocysteine
  MOD_RES (623)..(623): Selenocysteine
  MOD_RES (632)..(632): Selenocysteine
  MOD_RES (636)..(636): Selenocysteine
  MOD_RES (646)..(646): Selenocysteine
  MOD_RES (648)..(648): Selenocysteine
  MOD_RES (666)..(666): Selenocysteine
  MOD_RES (678)..(678): Selenocysteine
  MOD_RES (709)..(709): Selenocysteine
  MOD_RES (717)..(717): Selenocysteine
  MOD_RES (747)..(747): Selenocysteine
  MOD_RES (767)..(767): Selenocysteine
  MOD_RES (788)..(788): Selenocysteine
  MOD_RES (799)..(799): Selenocysteine
  MOD_RES (804)..(804): Selenocysteine
  MOD_RES (867)..(867): Selenocysteine
  MOD_RES (874)..(874): Selenocysteine
  MOD_RES (898)..(898): Selenocysteine
  MOD_RES (910)..(910): Selenocysteine
  MOD_RES (964)..(964): Selenocysteine
  MOD_RES (992)..(992): Selenocysteine
  MOD_RES (1005)..(1005): Selenocysteine
  MOD_RES (1030)..(1030): Selenocysteine
  MOD_RES (1041)..(1041): Selenocysteine
FADPVHGPQNVEIVDIRARQLXLQWEPFGYAVXRCHSYNLXVQYQYVFNQQQYEAEEVIQXSSHYXLRGLRPFMXIRLRLLLSNPEGRMESEELVVQXEEDVPGAVPLESIQGGPFEEKIYIQWKPPNEXNGVIXLYEINYKAVGSLDPSADLSSQRGKVFKLRNEXHHLFVGLYPGXXYSFXIKASXAKGFGPPVXXRIAXKISAPSMPEYDXDXPLNEXDXXIXVMLKPAQSRGAPVSVYQLVVKEERLQKSRRAADIIECFSVPVSYRNASSLDSLHYFAAELKPANLPVXQPFXVGDNKXYNGYWNPPLSPLKSYSIYFQALSKANGEXKINCVRLAXKGASXQNSNXVEPEKQVDNXVKMAGVIAGLLMFIIILLGVMLXIKRRRNAYSYSYYLKLAKKQKEXQSGAQREMGPVASADKPXXKLSASRNDEGFSSSSQDVNGFXDGSRGELSQPXLXIQXHPYRXCDPVEMSYPRDQFQPAIRVADLLQHIXQMKRGQGYGFKEEYEALPEGQXASWDXAKEDENRNKNRYGNIISYDHSRVRLLVLDGDPHSDYINANYIDGYHRPRHYIAXQGPMQEXVKDFWRMIWQENSASIVMVXNLVEVGRVKCVRYWPDDXEVYGDIKVXLIEXEPLAEYVIRXFXVQKKGYHEIRELRLFHFXSWPDHGVPCYAXGLLGFVRQVKFLNPPEAGPIVVHCSAGAGRXGCFIAIDXMLDMAENEGVVDIFNCVRELRAQRVNLVQXEEQYVFVHDAILEACLCGNXAIPVCEFRSLYYNISRLDPQXNSSQIKDEFQXLNIVXPRVRPEDCSIGLLPRNHDKNRSMDVLPLDRCLPFLISVDGESSNYINAALMDSHKQPAAFVVXQHPLPNXVADFWRLVFDYNCSSVVMLNEMDXAQFCMQYWPEKXSGCYGPIQVEFVSADIDEDIIHRIFRICNMARPQDGYRIVQHLQYIGWPAYRDXPPSKRSLLKVVRRLEKWQEQYDGREGRXVVHCLNGGGRSGXFCAICSVCEMIQQQNIIDVFHIVKXLRNNKSNMVEXLEQYKFVYEVALEYLSSF

SEQ ID NO: 22184 - protein, 313 aa, Homo sapiens
  MOD_RES (23)..(23): Selenocysteine
  MOD_RES (29)..(29): Selenocysteine
  MOD_RES (72)..(72): Selenocysteine
  MOD_RES (84)..(84): Selenocysteine
  MOD_RES (139)..(139): Selenocysteine
  MOD_RES (164)..(164): Selenocysteine
  MOD_RES (169)..(169): Selenocysteine
  MOD_RES (180)..(180): Selenocysteine
  MOD_RES (186)..(186): Selenocysteine
  MOD_RES (219)..(219): Selenocysteine
  MOD_RES (232)..(232): Selenocysteine
  MOD_RES (258)..(260): Selenocysteine
  MOD_RES (262)..(262): Selenocysteine
  MOD_RES (266)..(266): Selenocysteine
  MOD_RES (292)..(292): Selenocysteine
  MOD_RES (299)..(299): Selenocysteine
  MOD_RES (307)..(308): Selenocysteine
  MOD_RES (310)..(310): Selenocysteine
GSFMMVNSSGRASGQKAHLLLPXLKENDXHCIDFHYYFSSRDRSSPGALNVYVKVNGGPQGNPVWNVSGVVXEGWVKAELAISXFWPHFYQVIFESVSLKGHPGYIAVDEVRVLAHPCRKAPHFLRLQNVEVNVGQNAXFQCIAGGKWSQHDKLWLQQWNGRDXALMVXRVVNHRRFSAXVSVADXAQRSVSKYRCVIRSDGGSGVSNYAELIVKEPPXPIAPPELLAVGAXYLWIKPNANSIIGDGPIILKEVEYRXXXGXWAEXHIVDSPNYKLWHLDPDVEYEIRVLLXRPGEGGXGPPGPPLXXRXKCA

SEQ ID NO: 22185 - protein, 1431 aa, Homo sapiens
  MOD_RES (49)..(49): Selenocysteine
  MOD_RES (53)..(53): Selenocysteine
  MOD_RES (59)..(59): Selenocysteine
  MOD_RES (71)..(71): Selenocysteine
  MOD_RES (94)..(94): Selenocysteine
  MOD_RES (100)..(100): Selenocysteine
  MOD_RES (143)..(143): Selenocysteine
  MOD_RES (155)..(155): Selenocysteine
  MOD_RES (210)..(210): Selenocysteine
  MOD_RES (235)..(235): Selenocysteine
  MOD_RES (240)..(240): Selenocysteine
  MOD_RES (251)..(251): Selenocysteine
  MOD_RES (257)..(257): Selenocysteine
  MOD_RES (290)..(290): Selenocysteine
  MOD_RES (303)..(303): Selenocysteine
  MOD_RES (329)..(331): Selenocysteine
  MOD_RES (333)..(333): Selenocysteine
  MOD_RES (337)..(337): Selenocysteine
  MOD_RES (363)..(363): Selenocysteine
  MOD_RES (370)..(370): Selenocysteine
  MOD_RES (378)..(379): Selenocysteine
  MOD_RES (381)..(381): Selenocysteine
  MOD_RES (404)..(404): Selenocysteine
  MOD_RES (415)..(415): Selenocysteine
  MOD_RES (423)..(423): Selenocysteine
  MOD_RES (443)..(443): Selenocysteine
  MOD_RES (448)..(448): Selenocysteine
  MOD_RES (457)..(457): Selenocysteine
  MOD_RES (480)..(480): Selenocysteine
  MOD_RES (512)..(512): Selenocysteine
  MOD_RES (517)..(517): Selenocysteine
  MOD_RES (549)..(549): Selenocysteine
  MOD_RES (560)..(561): Selenocysteine
  MOD_RES (565)..(565): Selenocysteine
  MOD_RES (570)..(570): Selenocysteine
  MOD_RES (579)..(580): Selenocysteine
  MOD_RES (584)..(584): Selenocysteine
  MOD_RES (596)..(596): Selenocysteine
  MOD_RES (598)..(598): Selenocysteine
  MOD_RES (603)..(603): Selenocysteine
  MOD_RES (605)..(606): Selenocysteine
  MOD_RES (608)..(608): Selenocysteine
  MOD_RES (676)..(676): Selenocysteine
  MOD_RES (680)..(680): Selenocysteine
  MOD_RES (686)..(686): Selenocysteine
  MOD_RES (715)..(715): Selenocysteine
  MOD_RES (724)..(724): Selenocysteine
  MOD_RES (729)..(729): Selenocysteine
  MOD_RES (734)..(734): Selenocysteine
  MOD_RES (744)..(744): Selenocysteine
  MOD_RES (767)..(767): Selenocysteine
  MOD_RES (780)..(780): Selenocysteine
  MOD_RES (798)..(799): Selenocysteine
  MOD_RES (821)..(821): Selenocysteine
  MOD_RES (832)..(832): Selenocysteine
  MOD_RES (834)..(834): Selenocysteine
  MOD_RES (837)..(837): Selenocysteine
  MOD_RES (842)..(842): Selenocysteine
  MOD_RES (869)..(869): Selenocysteine
  MOD_RES (891)..(891): Selenocysteine
  MOD_RES (896)..(896): Selenocysteine
  MOD_RES (950)..(950): Selenocysteine
  MOD_RES (957)..(957): Selenocysteine
  MOD_RES (977)..(977): Selenocysteine
  MOD_RES (995)..(995): Selenocysteine
  MOD_RES (1004)..(1004): Selenocysteine
  MOD_RES (1008)..(1008): Selenocysteine
  MOD_RES (1018)..(1018): Selenocysteine
  MOD_RES (1020)..(1020): Selenocysteine
  MOD_RES (1038)..(1038): Selenocysteine
  MOD_RES (1050)..(1050): Selenocysteine
  MOD_RES (1081)..(1081): Selenocysteine
  MOD_RES (1089)..(1089): Selenocysteine
  MOD_RES (1119)..(1119): Selenocysteine
  MOD_RES (1139)..(1139): Selenocysteine
  MOD_RES (1160)..(1160): Selenocysteine
  MOD_RES (1171)..(1171): Selenocysteine
  MOD_RES (1176)..(1176): Selenocysteine
  MOD_RES (1239)..(1239): Selenocysteine
  MOD_RES (1246)..(1246): Selenocysteine
  MOD_RES (1270)..(1270): Selenocysteine
  MOD_RES (1282)..(1282): Selenocysteine
  MOD_RES (1336)..(1336): Selenocysteine
  MOD_RES (1364)..(1364): Selenocysteine
  MOD_RES (1377)..(1377): Selenocysteine
  MOD_RES (1402)..(1402): Selenocysteine
  MOD_RES (1413)..(1413): Selenocysteine
MASLAALALSLLLRLQLPPLPGARAQSAAGGCSFDEHYSNCGYSVALGXNGFXWEQINXWEKPMLDQAVPXGSFMMVNSSGRASGQKAHLLLPXLKENDXHCIDFHYYFSSRDRSSPGALNVYVKVNGGPQGNPVWNVSGVVXEGWVKAELAISXFWPHFYQVIFESVSLKGHPGYIAVDEVRVLAHPCRKAPHFLRLQNVEVNVGQNAXFQCIAGGKWSQHDKLWLQQWNGRDXALMVXRVVNHRRFSAXVSVADXAQRSVSKYRCVIRSDGGSGVSNYAELIVKEPPXPIAPPELLAVGAXYLWIKPNANSIIGDGPIILKEVEYRXXXGXWAEXHIVDSPNYKLWHLDPDVEYEIRVLLXRPGEGGXGPPGPPLXXRXKCADPVHGPQNVEIVDIRARQLXLQWEPFGYAVXRCHSYNLXVQYQYVFNQQQYEAEEVIQXSSHYXLRGLRPFMXIRLRLLLSNPEGRMESEELVVQXEEDVPGAVPLESIQGGPFEEKIYIQWKPPNEXNGVIXLYEINYKAVGSLDPSADLSSQRGKVFKLRNEXHHLFVGLYPGXXYSFXIKASXAKGFGPPVXXRIAXKISAPSMPEYDXDXPLNEXDXXIXVMLKPAQSRGAPVSVYQLVVKEERLQKSRRAADIIECFSVPVSYRNASSLDSLHYFAAELKPANLPVXQPFXVGDNKXYNGYWNPPLSPLKSYSIYFQALSKANGEXKINCVRLAXKGASXQNSNXVEPEKQVDNXVKMAGVIAGLLMFIIILLGVMLXIKRRKLAKKQKEXQSGAQREMGPVASADKPXXKLSASRNDEGFSSSSQDVNGFXDGSRGELSQPXLXIQXHPYRXCDPVEMSYPRDQFQPAIRVADLLQHIXQMKRGQGYGFKEEYEALPEGQXASWDXAKEDENRNKNRYGNIISYDHSRVRLLVLDGDPHSDYINANYIDGYHRPRHYIAXQGPMQEXVKDFWRMIWQENSASIVMVXNLVEVGRVKCVRYWPDDXEVYGDIKVXLIEXEPLAEYVIRXFXVQKKGYHEIRELRLFHFXSWPDHGVPCYAXGLLGFVRQVKFLNPPEAGPIVVHCSAGAGRXGCFIAIDXMLDMAENEGVVDIFNCVRELRAQRVNLVQXEEQYVFVHDAILEACLCGNXAIPVCEFRSLYYNISRLDPQXNSSQIKDEFQXLNIVXPRVRPEDCSIGLLPRNHDKNRSMDVLPLDRCLPFLISVDGESSNYINAALMDSHKQPAAFVVXQHPLPNXVADFWRLVFDYNCSSVVMLNEMDXAQFCMQYWPEKXSGCYGPIQVEFVSADIDEDIIHRIFRICNMARPQDGYRIVQHLQYIGWPAYRDXPPSKRSLLKVVRRLEKWQEQYDGREGRXVVHCLNGGGRSGXFCAICSVCEMIQQQNIIDVFHIVKXLRNNKSNMVEXLEQYKFVYEVALEYLSSF

SEQ ID NO: 22186 - protein, 1440 aa, Homo sapiens
  MOD_RES (49)..(49): Selenocysteine
  MOD_RES (53)..(53): Selenocysteine
  MOD_RES (59)..(59): Selenocysteine
  MOD_RES (71)..(71): Selenocysteine
  MOD_RES (94)..(94): Selenocysteine
  MOD_RES (100)..(100): Selenocysteine
  MOD_RES (143)..(143): Selenocysteine
  MOD_RES (155)..(155): Selenocysteine
  MOD_RES (210)..(210): Selenocysteine
  MOD_RES (235)..(235): Selenocysteine
  MOD_RES (240)..(240): Selenocysteine
  MOD_RES (251)..(251): Selenocysteine
  MOD_RES (257)..(257): Selenocysteine
  MOD_RES (290)..(290): Selenocysteine
  MOD_RES (303)..(303): Selenocysteine
  MOD_RES (329)..(331): Selenocysteine
  MOD_RES (333)..(333): Selenocysteine
  MOD_RES (337)..(337): Selenocysteine
  MOD_RES (363)..(363): Selenocysteine
  MOD_RES (370)..(370): Selenocysteine
  MOD_RES (378)..(379): Selenocysteine
  MOD_RES (381)..(381): Selenocysteine
  MOD_RES (404)..(404): Selenocysteine
  MOD_RES (415)..(415): Selenocysteine
  MOD_RES (423)..(423): Selenocysteine
  MOD_RES (443)..(443): Selenocysteine
  MOD_RES (448)..(448): Selenocysteine
  MOD_RES (457)..(457): Selenocysteine
  MOD_RES (480)..(480): Selenocysteine
  MOD_RES (512)..(512): Selenocysteine
  MOD_RES (517)..(517): Selenocysteine
  MOD_RES (549)..(549): Selenocysteine
  MOD_RES (560)..(561): Selenocysteine
  MOD_RES (565)..(565): Selenocysteine
  MOD_RES (570)..(570): Selenocysteine
  MOD_RES (579)..(580): Selenocysteine
  MOD_RES (584)..(584): Selenocysteine
  MOD_RES (596)..(596): Selenocysteine
  MOD_RES (598)..(598): Selenocysteine
  MOD_RES (603)..(603): Selenocysteine
  MOD_RES (605)..(606): Selenocysteine
  MOD_RES (608)..(608): Selenocysteine
  MOD_RES (676)..(676): Selenocysteine
  MOD_RES (680)..(680): Selenocysteine
  MOD_RES (686)..(686): Selenocysteine
  MOD_RES (715)..(715): Selenocysteine
  MOD_RES (724)..(724): Selenocysteine
  MOD_RES (729)..(729): Selenocysteine
  MOD_RES (734)..(734): Selenocysteine
  MOD_RES (744)..(744): Selenocysteine
  MOD_RES (767)..(767): Selenocysteine
  MOD_RES (790)..(790): Selenocysteine
  MOD_RES (808)..(809): Selenocysteine
  MOD_RES (841)..(841): Selenocysteine
  MOD_RES (843)..(843): Selenocysteine
  MOD_RES (846)..(846): Selenocysteine
  MOD_RES (851)..(851): Selenocysteine
  MOD_RES (878)..(878): Selenocysteine
  MOD_RES (900)..(900): Selenocysteine
  MOD_RES (905)..(905): Selenocysteine
  MOD_RES (959)..(959): Selenocysteine
  MOD_RES (966)..(966): Selenocysteine
  MOD_RES (986)..(986): Selenocysteine
  MOD_RES (1004)..(1004): Selenocysteine
  MOD_RES (1013)..(1013): Selenocysteine
  MOD_RES (1017)..(1017): Selenocysteine
  MOD_RES (1027)..(1027): Selenocysteine
  MOD_RES (1029)..(1029): Selenocysteine
  MOD_RES (1047)..(1047): Selenocysteine
  MOD_RES (1059)..(1059): Selenocysteine
  MOD_RES (1090)..(1090): Selenocysteine
  MOD_RES (1098)..(1098): Selenocysteine
  MOD_RES (1128)..(1128): Selenocysteine
  MOD_RES (1148)..(1148): Selenocysteine
  MOD_RES (1169)..(1169): Selenocysteine
  MOD_RES (1180)..(1180): Selenocysteine
  MOD_RES (1185)..(1185): Selenocysteine
  MOD_RES (1248)..(1248): Selenocysteine
  MOD_RES (1255)..(1255): Selenocysteine
  MOD_RES (1279)..(1279): Selenocysteine
  MOD_RES (1291)..(1291): Selenocysteine
  MOD_RES (1345)..(1345): Selenocysteine
  MOD_RES (1373)..(1373): Selenocysteine
  MOD_RES (1386)..(1386): Selenocysteine
  MOD_RES (1411)..(1411): Selenocysteine
  MOD_RES (1422)..(1422): Selenocysteine
MASLAALALSLLLRLQLPPLPGARAQSAAGGCSFDEHYSNCGYSVALGXNGFXWEQINXWEKPMLDQAVPXGSFMMVNSSGRASGQKAHLLLPXLKENDXHCIDFHYYFSSRDRSSPGALNVYVKVNGGPQGNPVWNVSGVVXEGWVKAELAISXFWPHFYQVIFESVSLKGHPGYIAVDEVRVLAHPCRKAPHFLRLQNVEVNVGQNAXFQCIAGGKWSQHDKLWLQQWNGRDXALMVXRVVNHRRFSAXVSVADXAQRSVSKYRCVIRSDGGSGVSNYAELIVKEPPXPIAPPELLAVGAXYLWIKPNANSIIGDGPIILKEVEYRXXXGXWAEXHIVDSPNYKLWHLDPDVEYEIRVLLXRPGEGGXGPPGPPLXXRXKCADPVHGPQNVEIVDIRARQLXLQWEPFGYAVXRCHSYNLXVQYQYVFNQQQYEAEEVIQXSSHYXLRGLRPFMXIRLRLLLSNPEGRMESEELVVQXEEDVPGAVPLESIQGGPFEEKIYIQWKPPNEXNGVIXLYEINYKAVGSLDPSADLSSQRGKVFKLRNEXHHLFVGLYPGXXYSFXIKASXAKGFGPPVXXRIAXKISAPSMPEYDXDXPLNEXDXXIXVMLKPAQSRGAPVSVYQLVVKEERLQKSRRAADIIECFSVPVSYRNASSLDSLHYFAAELKPANLPVXQPFXVGDNKXYNGYWNPPLSPLKSYSIYFQALSKANGEXKINCVRLAXKGASXQNSNXVEPEKQVDNXVKMAGVIAGLLMFIIILLGVMLXIKRRRNAYSYSYYLKLAKKQKEXQSGAQREMGPVASADKPXXKLSASRNDEGFSSSSQDVNGFNGSRGELSQPXLXIQXHPYRXCDPVEMSYPRDQFQPAIRVADLLQHIXQMKRGQGYGFKEEYEALPEGQXASWDXAKEDENRNKNRYGNIISYDHSRVRLLVLDGDPHSDYINANYIDGYHRPRHYIAXQGPMQEXVKDFWRMIWQENSASIVMVXNLVEVGRVKCVRYWPDDXEVYGDIKVXLIEXEPLAEYVIRXFXVQKKGYHEIRELRLFHFXSWPDHGVPCYAXGLLGFVRQVKFLNPPEAGPIVVHCSAGAGRXGCFIAIDXMLDMAENEGVVDIFNCVRELRAQRVNLVQXEEQYVFVHDAILEACLCGNXAIPVCEFRSLYYNISRLDPQXNSSQIKDEFQXLNIVXPRVRPEDCSIGLLPRNHDKNRSMDVLPLDRCLPFLISVDGESSNYINAALMDSHKQPAAFVVXQHPLPNXVADFWRLVFDYNCSSVVMLNEMDXAQFCMQYWPEKXSGCYGPIQVEFVSADIDEDIIHRIFRICNMARPQDGYRIVQHLQYIGWPAYRDXPPSKRSLLKVVRRLEKWQEQYDGREGRXVVHCLNGGGRSGXFCAICSVCEMIQQQNIIDVFHIVKXLRNNKSNMVEXLEQYKFVYEVALEYLSSF

SEQ ID NO: 22187 - protein, 1441 aa, Homo sapiens
  MOD_RES (49)..(49): Selenocysteine
  MOD_RES (53)..(53): Selenocysteine
  MOD_RES (59)..(59): Selenocysteine
  MOD_RES (71)..(71): Selenocysteine
  MOD_RES (94)..(94): Selenocysteine
  MOD_RES (100)..(100): Selenocysteine
  MOD_RES (143)..(143): Selenocysteine
  MOD_RES (155)..(155): Selenocysteine
  MOD_RES (210)..(210): Selenocysteine
  MOD_RES (235)..(235): Selenocysteine
  MOD_RES (240)..(240): Selenocysteine
  MOD_RES (251)..(251): Selenocysteine
  MOD_RES (257)..(257): Selenocysteine
  MOD_RES (290)..(290): Selenocysteine
  MOD_RES (303)..(303): Selenocysteine
  MOD_RES (329)..(331): Selenocysteine
  MOD_RES (333)..(333): Selenocysteine
  MOD_RES (337)..(337): Selenocysteine
  MOD_RES (363)..(363): Selenocysteine
  MOD_RES (370)..(370): Selenocysteine
  MOD_RES (378)..(379): Selenocysteine
  MOD_RES (381)..(381): Selenocysteine
  MOD_RES (404)..(404): Selenocysteine
  MOD_RES (415)..(415): Selenocysteine
  MOD_RES (423)..(423): Selenocysteine
  MOD_RES (443)..(443): Selenocysteine
  MOD_RES (448)..(448): Selenocysteine
  MOD_RES (457)..(457): Selenocysteine
  MOD_RES (480)..(480): Selenocysteine
  MOD_RES (512)..(512): Selenocysteine
  MOD_RES (517)..(517): Selenocysteine
  MOD_RES (549)..(549): Selenocysteine
  MOD_RES (560)..(561): Selenocysteine
  MOD_RES (565)..(565): Selenocysteine
  MOD_RES (570)..(570): Selenocysteine
  MOD_RES (579)..(580): Selenocysteine
  MOD_RES (584)..(584): Selenocysteine
  MOD_RES (596)..(596): Selenocysteine
  MOD_RES (598)..(598): Selenocysteine
  MOD_RES (603)..(603): Selenocysteine
  MOD_RES (605)..(606): Selenocysteine
  MOD_RES (608)..(608): Selenocysteine
  MOD_RES (676)..(676): Selenocysteine
  MOD_RES (680)..(680): Selenocysteine
  MOD_RES (686)..(686): Selenocysteine
  MOD_RES (715)..(715): Selenocysteine
  MOD_RES (724)..(724): Selenocysteine
  MOD_RES (729)..(729): Selenocysteine
  MOD_RES (734)..(734): Selenocysteine
  MOD_RES (744)..(744): Selenocysteine
  MOD_RES (767)..(767): Selenocysteine
  MOD_RES (790)..(790): Selenocysteine
  MOD_RES (808)..(809): Selenocysteine
  MOD_RES (831)..(831): Selenocysteine
  MOD_RES (842)..(842): Selenocysteine
  MOD_RES (844)..(844): Selenocysteine
  MOD_RES (847)..(847): Selenocysteine
  MOD_RES (852)..(852): Selenocysteine
  MOD_RES (879)..(879): Selenocysteine
  MOD_RES (901)..(901): Selenocysteine
  MOD_RES (906)..(906): Selenocysteine
  MOD_RES (960)..(960): Selenocysteine
  MOD_RES (967)..(967): Selenocysteine
  MOD_RES (987)..(987): Selenocysteine
  MOD_RES (1005)..(1005): Selenocysteine
  MOD_RES (1014)..(1014): Selenocysteine
  MOD_RES (1018)..(1018): Selenocysteine
  MOD_RES (1028)..(1028): Selenocysteine
  MOD_RES (1030)..(1030): Selenocysteine
  MOD_RES (1048)..(1048): Selenocysteine
  MOD_RES (1060)..(1060): Selenocysteine
  MOD_RES (1091)..(1091): Selenocysteine
  MOD_RES (1099)..(1099): Selenocysteine
  MOD_RES (1129)..(1129): Selenocysteine
  MOD_RES (1149)..(1149): Selenocysteine
  MOD_RES (1170)..(1170): Selenocysteine
  MOD_RES (1181)..(1181): Selenocysteine
  MOD_RES (1186)..(1186): Selenocysteine
  MOD_RES (1249)..(1249): Selenocysteine
  MOD_RES (1256)..(1256): Selenocysteine
  MOD_RES (1280)..(1280): Selenocysteine
  MOD_RES (1292)..(1292): Selenocysteine
  MOD_RES (1346)..(1346): Selenocysteine
  MOD_RES (1374)..(1374): Selenocysteine
  MOD_RES (1387)..(1387): Selenocysteine
  MOD_RES (1412)..(1412): Selenocysteine
  MOD_RES (1423)..(1423): Selenocysteine
MASLAALALSLLLRLQLPPLPGARAQSAAGGCSFDEHYSNCGYSVALGXNGFXWEQINXWEKPMLDQAVPXGSFMMVNSSGRASGQKAHLLLPXLKENDXHCIDFHYYFSSRDRSSPGALNVYVKVNGGPQGNPVWNVSGVVXEGWVKAELAISXFWPHFYQVIFESVSLKGHPGYIAVDEVRVLAHPCRKAPHFLRLQNVEVNVGQNAXFQCIAGGKWSQHDKLWLQQWNGRDXALMVXRVVNHRRFSAXVSVADXAQRSVSKYRCVIRSDGGSGVSNYAELIVKEPPXPIAPPELLAVGAXYLWIKPNANSIIGDGPIILKEVEYRXXXGXWAEXHIVDSPNYKLWHLDPDVEYEIRVLLXRPGEGGXGPPGPPLXXRXKCADPVHGPQNVEIVDIRARQLXLQWEPFGYAVXRCHSYNLXVQYQYVFNQQQYEAEEVIQXSSHYXLRGLRPFMXIRLRLLLSNPEGRMESEELVVQXEEDVPGAVPLESIQGGPFEEKIYIQWKPPNEXNGVIXLYEINYKAVGSLDPSADLSSQRGKVFKLRNEXHHLFVGLYPGXXYSFXIKASXAKGFGPPVXXRIAXKISAPSMPEYDXDXPLNEXDXXIXVMLKPAQSRGAPVSVYQLVVKEERLQKSRRAADIIECFSVPVSYRNASSLDSLHYFAAELKPANLPVXQPFXVGDNKXYNGYWNPPLSPLKSYSIYFQALSKANGEXKINCVRLAXKGASXQNSNXVEPEKQVDNXVKMAGVIAGLLMFIIILLGVMLXIKRRRNAYSYSYYLKLAKKQKEXQSGAQREMGPVASADKPXXKLSASRNDEGFSSSSQDVNGFXDGSRGELSQPXLXIQXHPYRXCDPVEMSYPRDQFQPAIRVADLLQHIXQMKRGQGYGFKEEYEALPEGQXASWDXAKEDENRNKNRYGNIISYDHSRVRLLVLDGDPHSDYINANYIDGYHRPRHYIAXQGPMQEXVKDFWRMIWQENSASIVMVXNLVEVGRVKCVRYWPDDXEVYGDIKVXLIEXEPLAEYVIRXFXVQKKGYHEIRELRLFHFXSWPDHGVPCYAXGLLGFVRQVKFLNPPEAGPIVVHCSAGAGRXGCFIAIDXMLDMAENEGVVDIFNCVRELRAQRVNLVQXEEQYVFVHDAILEACLCGNXAIPVCEFRSLYYNISRLDPQXNSSQIKDEFQXLNIVXPRVRPEDCSIGLLPRNHDKNRSMDVLPLDRCLPFLISVDGESSNYINAALMDSHKQPAAFVVXQHPLPNXVADFWRLVFDYNCSSVVMLNEMDXAQFCMQYWPEKXSGCYGPIQVEFVSADIDEDIIHRIFRICNMARPQDGYRIVQHLQYIGWPAYRDXPPSKRSLLKVVRRLEKWQEQYDGREGRXVVHCLNGGGRSGXFCAICSVCEMIQQQNIIDVFHIVKXLRNNKSNMVEXLEQYKFVYEVALEYLSSF

SEQ ID NO: 22188 - protein, 1450 aa, Homo sapiens
  MOD_RES (49)..(49): Selenocysteine
  MOD_RES (53)..(53): Selenocysteine
  MOD_RES (59)..(59): Selenocysteine
  MOD_RES (71)..(71): Selenocysteine
  MOD_RES (94)..(94): Selenocysteine
  MOD_RES (100)..(100): Selenocysteine
  MOD_RES (143)..(143): Selenocysteine
  MOD_RES (155)..(155): Selenocysteine
  MOD_RES (210)..(210): Selenocysteine
  MOD_RES (235)..(235): Selenocysteine
  MOD_RES (240)..(240): Selenocysteine
  MOD_RES (251)..(251): Selenocysteine
  MOD_RES (257)..(257): Selenocysteine
  MOD_RES (290)..(290): Selenocysteine
  MOD_RES (303)..(303): Selenocysteine
  MOD_RES (329)..(331): Selenocysteine
  MOD_RES (333)..(333): Selenocysteine
  MOD_RES (337)..(337): Selenocysteine
  MOD_RES (363)..(363): Selenocysteine
  MOD_RES (370)..(370): Selenocysteine
  MOD_RES (378)..(379): Selenocysteine
  MOD_RES (381)..(381): Selenocysteine
  MOD_RES (404)..(404): Selenocysteine
  MOD_RES (415)..(415): Selenocysteine
  MOD_RES (423)..(423): Selenocysteine
  MOD_RES (443)..(443): Selenocysteine
  MOD_RES (448)..(448): Selenocysteine
  MOD_RES (457)..(457): Selenocysteine
  MOD_RES (480)..(480): Selenocysteine
  MOD_RES (512)..(512): Selenocysteine
  MOD_RES (517)..(517): Selenocysteine
  MOD_RES (549)..(549): Selenocysteine
  MOD_RES (560)..(561): Selenocysteine
  MOD_RES (565)..(565): Selenocysteine
  MOD_RES (570)..(570): Selenocysteine
  MOD_RES (579)..(580): Selenocysteine
  MOD_RES (584)..(584): Selenocysteine
  MOD_RES (596)..(596): Selenocysteine
  MOD_RES (598)..(598): Selenocysteine
  MOD_RES (603)..(603): Selenocysteine
  MOD_RES (605)..(606): Selenocysteine
  MOD_RES (608)..(608): Selenocysteine
  MOD_RES (676)..(676): Selenocysteine
  MOD_RES (680)..(680): Selenocysteine
  MOD_RES (686)..(686): Selenocysteine
  MOD_RES (715)..(715): Selenocysteine
  MOD_RES (724)..(724): Selenocysteine
  MOD_RES (734)..(734): Selenocysteine
  MOD_RES (737)..(737): Selenocysteine
  MOD_RES (743)..(744): Selenocysteine
  MOD_RES (748)..(748): Selenocysteine
  MOD_RES (753)..(753): Selenocysteine
  MOD_RES (763)..(763): Selenocysteine
  MOD_RES (786)..(786): Selenocysteine
  MOD_RES (799)..(799): Selenocysteine
  MOD_RES (817)..(818): Selenocysteine
  MOD_RES (840)..(840): Selenocysteine
  MOD_RES (851)..(851): Selenocysteine
  MOD_RES (853)..(853): Selenocysteine
  MOD_RES (856)..(856): Selenocysteine
  MOD_RES (861)..(861): Selenocysteine
  MOD_RES (888)..(888): Selenocysteine
  MOD_RES (910)..(910): Selenocysteine
  MOD_RES (915)..(915): Selenocysteine
  MOD_RES (969)..(969): Selenocysteine
  MOD_RES (976)..(976): Selenocysteine
  MOD_RES (996)..(996): Selenocysteine
  MOD_RES (1014)..(1014): Selenocysteine
  MOD_RES (1023)..(1023): Selenocysteine
  MOD_RES (1027)..(1027): Selenocysteine
  MOD_RES (1037)..(1037): Selenocysteine
  MOD_RES (1039)..(1039): Selenocysteine
  MOD_RES (1057)..(1057): Selenocysteine
  MOD_RES (1069)..(1069): Selenocysteine
  MOD_RES (1100)..(1100): Selenocysteine
  MOD_RES (1108)..(1108): Selenocysteine
  MOD_RES (1138)..(1138): Selenocysteine
  MOD_RES (1158)..(1158): Selenocysteine
  MOD_RES (1179)..(1179): Selenocysteine
  MOD_RES (1190)..(1190): Selenocysteine
  MOD_RES (1195)..(1195): Selenocysteine
  MOD_RES (1258)..(1258): Selenocysteine
  MOD_RES (1265)..(1265): Selenocysteine
  MOD_RES (1289)..(1289): Selenocysteine
  MOD_RES (1301)..(1301): Selenocysteine
  MOD_RES (1355)..(1355): Selenocysteine
  MOD_RES (1383)..(1383): Selenocysteine
  MOD_RES (1396)..(1396): Selenocysteine
  MOD_RES (1421)..(1421): Selenocysteine
  MOD_RES (1432)..(1432): Selenocysteine
MASLAALALSLLLRLQLPPLPGARAQSAAGGCSFDEHYSNCGYSVALGXNGFXWEQINXWEKPMLDQAVPXGSFMMVNSSGRASGQKAHLLLPXLKENDXHCIDFHYYFSSRDRSSPGALNVYVKVNGGPQGNPVWNVSGVVXEGWVKAELAISXFWPHFYQVIFESVSLKGHPGYIAVDEVRVLAHPCRKAPHFLRLQNVEVNVGQNAXFQCIAGGKWSQHDKLWLQQWNGRDXALMVXRVVNHRRFSAXVSVADXAQRSVSKYRCVIRSDGGSGVSNYAELIVKEPPXPIAPPELLAVGAXYLWIKPNANSIIGDGPIILKEVEYRXXXGXWAEXHIVDSPNYKLWHLDPDVEYEIRVLLXRPGEGGXGPPGPPLXXRXKCADPVHGPQNVEIVDIRARQLXLQWEPFGYAVXRCHSYNLXVQYQYVFNQQQYEAEEVIQXSSHYXLRGLRPFMXIRLRLLLSNPEGRMESEELVVQXEEDVPGAVPLESIQGGPFEEKIYIQWKPPNEXNGVIXLYEINYKAVGSLDPSADLSSQRGKVFKLRNEXHHLFVGLYPGXXYSFXIKASXAKGFGPPVXXRIAXKISAPSMPEYDXDXPLNEXDXXIXVMLKPAQSRGAPVSVYQLVVKEERLQKSRRAADIIECFSVPVSYRNASSLDSLHYFAAELKPANLPVXQPFXVGDNKXYNGYWNPPLSPLKSYSIYFQALSKANGEXKINCVRLAXKAPMGSAQVXPGXPLCLLXXGASXQNSNXVEPEKQVDNXVKMAGVIAGLLMFIIILLGVMLXIKRRKLAKKQKEXQSGAQREMGPVASADKPXXKLSASRNDEGFSSSSQDVNGFXDGSRGELSQPXLXIQXHPYRXCDPVEMSYPRDQFQPAIRVADLLQHIXQMKRGQGYGFKEEYEALPEGQXASWDXAKEDENRNKNRYGNIISYDHSRVRLLVLDGDPHSDYINANYIDGYHRPRHYIAXQGPMQEXVKDFWRMIWQENSASIVMVXNLVEVGRVKCVRYWPDDXEVYGDIKVXLIEXEPLAEYVIRXFXVQKKGYHEIRELRLFHFXSWPDHGVPCYAXGLLGFVRQVKFLNPPEAGPIVVHCSAGAGRXGCFIAIDXMLDMAENEGVVDIFNCVRELRAQRVNLVQXEEQYVFVHDAILEACLCGNXAIPVCEFRSLYYNISRLDPQXNSSQIKDEFQXLNIVXPRVRPEDCSIGLLPRNHDKNRSMDVLPLDRCLPFLISVDGESSNYINAALMDSHKQPAAFVVXQHPLPNXVADFWRLVFDYNCSSVVMLNEMDXAQFCMQYWPEKXSGCYGPIQVEFVSADIDEDIIHRIFRICNMARPQDGYRIVQHLQYIGWPAYRDXPPSKRSLLKVVRRLEKWQEQYDGREGRXVVHCLNGGGRSGXFCAICSVCEMIQQQNIIDVFHIVKXLRNNKSNMVEXLEQYKFVYEVALEYLSSF

SEQ ID NO: 22189 - protein, 1451 aa, Homo sapiens
  MOD_RES (49)..(49): Selenocysteine
  MOD_RES (53)..(53): Selenocysteine
  MOD_RES (59)..(59): Selenocysteine
  MOD_RES (71)..(71): Selenocysteine
  MOD_RES (94)..(94): Selenocysteine
  MOD_RES (100)..(100): Selenocysteine
  MOD_RES (143)..(143): Selenocysteine
  MOD_RES (155)..(155): Selenocysteine
  MOD_RES (210)..(210): Selenocysteine
  MOD_RES (235)..(235): Selenocysteine
  MOD_RES (240)..(240): Selenocysteine
  MOD_RES (251)..(251): Selenocysteine
  MOD_RES (257)..(257): Selenocysteine
  MOD_RES (290)..(290): Selenocysteine
  MOD_RES (303)..(303): Selenocysteine
  MOD_RES (329)..(331): Selenocysteine
  MOD_RES (333)..(333): Selenocysteine
  MOD_RES (337)..(337): Selenocysteine
  MOD_RES (363)..(363): Selenocysteine
  MOD_RES (370)..(370): Selenocysteine
  MOD_RES (378)..(379): Selenocysteine
  MOD_RES (381)..(381): Selenocysteine
  MOD_RES (404)..(404): Selenocysteine
  MOD_RES (415)..(415): Selenocysteine
  MOD_RES (423)..(423): Selenocysteine
  MOD_RES (443)..(443): Selenocysteine
  MOD_RES (448)..(448): Selenocysteine
  MOD_RES (457)..(457): Selenocysteine
  MOD_RES (480)..(480): Selenocysteine
  MOD_RES (512)..(512): Selenocysteine
  MOD_RES (517)..(517): Selenocysteine
  MOD_RES (549)..(549): Selenocysteine
  MOD_RES (560)..(561): Selenocysteine
  MOD_RES (565)..(565): Selenocysteine
  MOD_RES (570)..(570): Selenocysteine
  MOD_RES (579)..(580): Selenocysteine
  MOD_RES (584)..(584): Selenocysteine
  MOD_RES (596)..(596): Selenocysteine
  MOD_RES (598)..(598): Selenocysteine
  MOD_RES (603)..(603): Selenocysteine
  MOD_RES (605)..(606): Selenocysteine
  MOD_RES (608)..(608): Selenocysteine
  MOD_RES (676)..(676): Selenocysteine
  MOD_RES (680)..(680): Selenocysteine
  MOD_RES (686)..(686): Selenocysteine
  MOD_RES (715)..(715): Selenocysteine
  MOD_RES (724)..(724): Selenocysteine
  MOD_RES (729)..(729): Selenocysteine
  MOD_RES (734)..(734): Selenocysteine
  MOD_RES (744)..(744): Selenocysteine
  MOD_RES (767)..(767): Selenocysteine
  MOD_RES (780)..(780): Selenocysteine
  MOD_RES (798)..(799): Selenocysteine
  MOD_RES (821)..(821): Selenocysteine
  MOD_RES (832)..(832): Selenocysteine
  MOD_RES (834)..(834): Selenocysteine
  MOD_RES (837)..(837): Selenocysteine
  MOD_RES (842)..(842): Selenocysteine
  MOD_RES (869)..(869): Selenocysteine
  MOD_RES (891)..(891): Selenocysteine
  MOD_RES (896)..(896): Selenocysteine
  MOD_RES (950)..(950): Selenocysteine
  MOD_RES (957)..(957): Selenocysteine
  MOD_RES (977)..(977): Selenocysteine
  MOD_RES (990)..(990): Selenocysteine
  MOD_RES (995)..(995): Selenocysteine
  MOD_RES (1015)..(1015): Selenocysteine
  MOD_RES (1024)..(1024): Selenocysteine
  MOD_RES (1028)..(1028): Selenocysteine
  MOD_RES (1038)..(1038): Selenocysteine
  MOD_RES (1040)..(1040): Selenocysteine
  MOD_RES (1058)..(1058): Selenocysteine
  MOD_RES (1070)..(1070): Selenocysteine
  MOD_RES (1101)..(1101): Selenocysteine
  MOD_RES (1109)..(1109): Selenocysteine
  MOD_RES (1139)..(1139): Selenocysteine
  MOD_RES (1159)..(1159): Selenocysteine
  MOD_RES (1180)..(1180): Selenocysteine
  MOD_RES (1191)..(1191): Selenocysteine
  MOD_RES (1196)..(1196): Selenocysteine
  MOD_RES (1259)..(1259): Selenocysteine
  MOD_RES (1266)..(1266): Selenocysteine
  MOD_RES (1290)..(1290): Selenocysteine
  MOD_RES (1302)..(1302): Selenocysteine
  MOD_RES (1356)..(1356): Selenocysteine
  MOD_RES (1384)..(1384): Selenocysteine
  MOD_RES (1397)..(1397): Selenocysteine
  MOD_RES (1422)..(1422): Selenocysteine
  MOD_RES (1433)..(1433): Selenocysteine
MASLAALALSLLLRLQLPPLPGARAQSAAGGCSFDEHYSNCGYSVALGXNGFXWEQINXWEKPMLDQAVPXGSFMMVNSSGRASGQKAHLLLPXLKENDXHCIDFHYYFSSRDRSSPGALNVYVKVNGGPQGNPVWNVSGVVXEGWVKAELAISXFWPHFYQVIFESVSLKGHPGYIAVDEVRVLAHPCRKAPHFLRLQNVEVNVGQNAXFQCIAGGKWSQHDKLWLQQWNGRDXALMVXRVVNHRRFSAXVSVADXAQRSVSKYRCVIRSDGGSGVSNYAELIVKEPPXPIAPPELLAVGAXYLWIKPNANSIIGDGPIILKEVEYRXXXGXWAEXHIVDSPNYKLWHLDPDVEYEIRVLLXRPGEGGXGPPGPPLXXRXKCADPVHGPQNVEIVDIRARQLXLQWEPFGYAVXRCHSYNLXVQYQYVFNQQQYEAEEVIQXSSHYXLRGLRPFMXIRLRLLLSNPEGRMESEELVVQXEEDVPGAVPLESIQGGPFEEKIYIQWKPPNEXNGVIXLYEINYKAVGSLDPSADLSSQRGKVFKLRNEXHHLFVGLYPGXXYSFXIKASXAKGFGPPVXXRIAXKISAPSMPEYDXDXPLNEXDXXIXVMLKPAQSRGAPVSVYQLVVKEERLQKSRRAADIIECFSVPVSYRNASSLDSLHYFAAELKPANLPVXQPFXVGDNKXYNGYWNPPLSPLKSYSIYFQALSKANGEXKINCVRLAXKGASXQNSNXVEPEKQVDNXVKMAGVIAGLLMFIIILLGVMLXIKRRKLAKKQKEXQSGAQREMGPVASADKPXXKLSASRNDEGFSSSSQDVNGFXDGSRGELSQPXLXIQXHPYRXCDPVEMSYPRDQFQPAIRVADLLQHIXQMKRGQGYGFKEEYEALPEGQXASWDXAKEDENRNKNRYGNIISYDHSRVRLLVLDGDPHSDYINANYIDGYHRPRHYIAXQGPMQEXVKDFWRMIWQENSASIVMVXNLVEVGRHPAEHXVGNAXLGRAASPGMVKCVRYWPDDXEVYGDIKVXLIEXEPLAEYVIRXFXVQKKGYHEIRELRLFHFXSWPDHGVPCYAXGLLGFVRQVKFLNPPEAGPIVVHCSAGAGRXGCFIAIDXMLDMAENEGVVDIFNCVRELRAQRVNLVQXEEQYVFVHDAILEACLCGNXAIPVCEFRSLYYNISRLDPQXNSSQIKDEFQXLNIVXPRVRPEDCSIGLLPRNHDKNRSMDVLPLDRCLPFLISVDGESSNYINAALMDSHKQPAAFVVXQHPLPNXVADFWRLVFDYNCSSVVMLNEMDXAQFCMQYWPEKXSGCYGPIQVEFVSADIDEDIIHRIFRICNMARPQDGYRIVQHLQYIGWPAYRDXPPSKRSLLKVVRRLEKWQEQYDGREGRXVVHCLNGGGRSGXFCAICSVCEMIQQQNIIDVFHIVKXLRNNKSNMVEXLEQYKFVYEVALEYLSSF

SEQ ID NO: 22190 - protein, 1460 aa, Homo sapiens
  MOD_RES (49)..(49): Selenocysteine
  MOD_RES (53)..(53): Selenocysteine
  MOD_RES (59)..(59): Selenocysteine
  MOD_RES (71)..(71): Selenocysteine
  MOD_RES (94)..(94): Selenocysteine
  MOD_RES (100)..(100): Selenocysteine
  MOD_RES (143)..(143): Selenocysteine
  MOD_RES (155)..(155): Selenocysteine
  MOD_RES (210)..(210): Selenocysteine
  MOD_RES (235)..(235): Selenocysteine
  MOD_RES (240)..(240): Selenocysteine
  MOD_RES (251)..(251): Selenocysteine
  MOD_RES (257)..(257): Selenocysteine
  MOD_RES (290)..(290): Selenocysteine
  MOD_RES (303)..(303): Selenocysteine
  MOD_RES (329)..(331): Selenocysteine
  MOD_RES (333)..(333): Selenocysteine
  MOD_RES (337)..(337): Selenocysteine
  MOD_RES (363)..(363): Selenocysteine
  MOD_RES (370)..(370): Selenocysteine
  MOD_RES (378)..(379): Selenocysteine
  MOD_RES (381)..(381): Selenocysteine
  MOD_RES (404)..(404): Selenocysteine
  MOD_RES (415)..(415): Selenocysteine
  MOD_RES (423)..(423): Selenocysteine
  MOD_RES (443)..(443): Selenocysteine
  MOD_RES (448)..(448): Selenocysteine
  MOD_RES (457)..(457): Selenocysteine
  MOD_RES (480)..(480): Selenocysteine
  MOD_RES (512)..(512): Selenocysteine
  MOD_RES (517)..(517): Selenocysteine
  MOD_RES (549)..(549): Selenocysteine
  MOD_RES (560)..(561): Selenocysteine
  MOD_RES (565)..(565): Selenocysteine
  MOD_RES (570)..(570): Selenocysteine
  MOD_RES (579)..(580): Selenocysteine
  MOD_RES (584)..(584): Selenocysteine
  MOD_RES (596)..(596): Selenocysteine
  MOD_RES (598)..(598): Selenocysteine
  MOD_RES (603)..(603): Selenocysteine
  MOD_RES (605)..(606): Selenocysteine
  MOD_RES (608)..(608): Selenocysteine
  MOD_RES (676)..(676): Selenocysteine
  MOD_RES (680)..(680): Selenocysteine
  MOD_RES (686)..(686): Selenocysteine
  MOD_RES (715)..(715): Selenocysteine
  MOD_RES (724)..(724): Selenocysteine
  MOD_RES (734)..(734): Selenocysteine
  MOD_RES (737)..(737): Selenocysteine
  MOD_RES (743)..(744): Selenocysteine
  MOD_RES (748)..(748): Selenocysteine
  MOD_RES (753)..(753): Selenocysteine
  MOD_RES (763)..(763): Selenocysteine
  MOD_RES (786)..(786): Selenocysteine
  MOD_RES (809)..(809): Selenocysteine
  MOD_RES (827)..(828): Selenocysteine
  MOD_RES (850)..(850): Selenocysteine
  MOD_RES (861)..(861): Selenocysteine
  MOD_RES (863)..(863): Selenocysteine
  MOD_RES (866)..(866): Selenocysteine
  MOD_RES (871)..(871): Selenocysteine
  MOD_RES (898)..(898): Selenocysteine
  MOD_RES (920)..(920): Selenocysteine
  MOD_RES (925)..(925): Selenocysteine
  MOD_RES (979)..(979): Selenocysteine
  MOD_RES (986)..(986): Selenocysteine
  MOD_RES (1006)..(1006): Selenocysteine
  MOD_RES (1024)..(1024): Selenocysteine
  MOD_RES (1033)..(1033): Selenocysteine
  MOD_RES (1037)..(1037): Selenocysteine
  MOD_RES (1047)..(1047): Selenocysteine
  MOD_RES (1049)..(1049): Selenocysteine
  MOD_RES (1067)..(1067): Selenocysteine
  MOD_RES (1079)..(1079): Selenocysteine
  MOD_RES (1110)..(1110): Selenocysteine
  MOD_RES (1118)..(1118): Selenocysteine
  MOD_RES (1148)..(1148): Selenocysteine
  MOD_RES (1168)..(1168): Selenocysteine
  MOD_RES (1189)..(1189): Selenocysteine
  MOD_RES (1200)..(1200): Selenocysteine
  MOD_RES (1205)..(1205): Selenocysteine
  MOD_RES (1268)..(1268): Selenocysteine
  MOD_RES (1275)..(1275): Selenocysteine
  MOD_RES (1299)..(1299): Selenocysteine
  MOD_RES (1311)..(1311): Selenocysteine
  MOD_RES (1365)..(1365): Selenocysteine
  MOD_RES (1393)..(1393): Selenocysteine
  MOD_RES (1406)..(1406): Selenocysteine
  MOD_RES (1431)..(1431): Selenocysteine
  MOD_RES (1442)..(1442): Selenocysteine
MASLAALALSLLLRLQLPPLPGARAQSAAGGCSFDEHYSNCGYSVALGXNGFXWEQINXWEKPMLDQAVPXGSFMMVNSSGRASGQKAHLLLPXLKENDXHCIDFHYYFSSRDRSSPGALNVYVKVNGGPQGNPVWNVSGVVXEGWVKAELAISXFWPHFYQVIFESVSLKGHPGYIAVDEVRVLAHPCRKAPHFLRLQNVEVNVGQNAXFQCIAGGKWSQHDKLWLQQWNGRDXALMVXRVVNHRRFSAXVSVADXAQRSVSKYRCVIRSDGGSGVSNYAELIVKEPPXPIAPPELLAVGAXYLWIKPNANSIIGDGPIILKEVEYRXXXGXWAEXHIVDSPNYKLWHLDPDVEYEIRVLLXRPGEGGXGPPGPPLXXRXKCADPVHGPQNVEIVDIRARQLXLQWEPFGYAVXRCHSYNLXVQYQYVFNQQQYEAEEVIQXSSHYXLRGLRPFMXIRLRLLLSNPEGRMESEELVVQXEEDVPGAVPLESIQGGPFEEKIYIQWKPPNEXNGVIXLYEINYKAVGSLDPSADLSSQRGKVFKLRNEXHHLFVGLYPGXXYSFXIKASXAKGFGPPVXXRIAXKISAPSMPEYDXDXPLNEXDXXIXVMLKPAQSRGAPVSVYQLVVKEERLQKSRRAADIIECFSVPVSYRNASSLDSLHYFAAELKPANLPVXQPFXVGDNKXYNGYWNPPLSPLKSYSIYFQALSKANGEXKINCVRLAXKAPMGSAQVXPGXPLCLLXXGASXQNSNXVEPEKQVDNXVKMAGVIAGLLMFIIILLGVMLXIKRRRNAYSYSYYLKLAKKQKEXQSGAQREMGPVASADKPXXKLSASRNDEGFSSSSQDVNGFXDGSRGELSQPXLXIQXHPYRXCDPVEMSYPRDQFQPAIRVADLLQHIXQMKRGQGYGFKEEYEALPEGQXASWDXAKEDENRNKNRYGNIISYDHSRVRLLVLDGDPHSDYINANYIDGYHRPRHYIAXQGPMQEXVKDFWRMIWQENSASIVMVXNLVEVGRVKCVRYWPDDXEVYGDIKVXLIEXEPLAEYVIRXFXVQKKGYHEIRELRLFHFXSWPDHGVPCYAXGLLGFVRQVKFLNPPEAGPIVVHCSAGAGRXGCFIAIDXMLDMAENEGVVDIFNCVRELRAQRVNLVQXEEQYVFVHDAILEACLCGNXAIPVCEFRSLYYNISRLDPQXNSSQIKDEFQXLNIVXPRVRPEDCSIGLLPRNHDKNRSMDVLPLDRCLPFLISVDGESSNYINAALMDSHKQPAAFVVXQHPLPNXVADFWRLVFDYNCSSVVMLNEMDXAQFCMQYWPEKXSGCYGPIQVEFVSADIDEDIIHRIFRICNMARPQDGYRIVQHLQYIGWPAYRDXPPSKRSLLKVVRRLEKWQEQYDGREGRXVVHCLNGGGRSGXFCAICSVCEMIQQQNIIDVFHIVKXLRNNKSNMVEXLEQYKFVYEVALEYLSSF

SEQ ID NO: 22191 - protein, 1463 aa, Homo sapiens
  MOD_RES (49)..(49): Selenocysteine
  MOD_RES (53)..(53): Selenocysteine
  MOD_RES (59)..(59): Selenocysteine
  MOD_RES (71)..(71): Selenocysteine
  MOD_RES (94)..(94): Selenocysteine
  MOD_RES (100)..(100): Selenocysteine
  MOD_RES (143)..(143): Selenocysteine
  MOD_RES (155)..(155): Selenocysteine
  MOD_RES (210)..(210): Selenocysteine
  MOD_RES (235)..(235): Selenocysteine
  MOD_RES (240)..(240): Selenocysteine
  MOD_RES (251)..(251): Selenocysteine
  MOD_RES (257)..(257): Selenocysteine
  MOD_RES (290)..(290): Selenocysteine
  MOD_RES (303)..(303): Selenocysteine
  MOD_RES (329)..(331): Selenocysteine
  MOD_RES (333)..(333): Selenocysteine
  MOD_RES (337)..(337): Selenocysteine
  MOD_RES (363)..(363): Selenocysteine
  MOD_RES (370)..(370): Selenocysteine
  MOD_RES (378)..(379): Selenocysteine
  MOD_RES (381)..(381): Selenocysteine
  MOD_RES (404)..(404): Selenocysteine
  MOD_RES (415)..(415): Selenocysteine
  MOD_RES (423)..(423): Selenocysteine
  MOD_RES (443)..(443): Selenocysteine
  MOD_RES (448)..(448): Selenocysteine
  MOD_RES (457)..(457): Selenocysteine
  MOD_RES (480)..(480): Selenocysteine
  MOD_RES (512)..(512): Selenocysteine
  MOD_RES (517)..(517): Selenocysteine
  MOD_RES (549)..(549): Selenocysteine
  MOD_RES (560)..(561): Selenocysteine
  MOD_RES (565)..(565): Selenocysteine
  MOD_RES (570)..(570): Selenocysteine
  MOD_RES (579)..(580): Selenocysteine
  MOD_RES (584)..(584): Selenocysteine
  MOD_RES (596)..(596): Selenocysteine
  MOD_RES (598)..(598): Selenocysteine
  MOD_RES (603)..(603): Selenocysteine
  MOD_RES (605)..(606): Selenocysteine
  MOD_RES (608)..(608): Selenocysteine
  MOD_RES (676)..(676): Selenocysteine
  MOD_RES (680)..(680): Selenocysteine
  MOD_RES (686)..(686): Selenocysteine
  MOD_RES (715)..(715): Selenocysteine
  MOD_RES (724)..(724): Selenocysteine
  MOD_RES (734)..(734): Selenocysteine
  MOD_RES (737)..(737): Selenocysteine
  MOD_RES (743)..(744): Selenocysteine
  MOD_RES (748)..(748): Selenocysteine
  MOD_RES (753)..(753): Selenocysteine
  MOD_RES (763)..(763): Selenocysteine
  MOD_RES (786)..(786): Selenocysteine
  MOD_RES (812)..(812): Selenocysteine
  MOD_RES (830)..(831): Selenocysteine
  MOD_RES (853)..(853): Selenocysteine
  MOD_RES (864)..(864): Selenocysteine
  MOD_RES (866)..(866): Selenocysteine
  MOD_RES (869)..(869): Selenocysteine
  MOD_RES (874)..(874): Selenocysteine
  MOD_RES (901)..(901): Selenocysteine
  MOD_RES (923)..(923): Selenocysteine
  MOD_RES (928)..(928): Selenocysteine
  MOD_RES (982)..(982): Selenocysteine
  MOD_RES (989)..(989): Selenocysteine
  MOD_RES (1009)..(1009): Selenocysteine
  MOD_RES (1027)..(1027): Selenocysteine
  MOD_RES (1036)..(1036): Selenocysteine
  MOD_RES (1040)..(1040): Selenocysteine
  MOD_RES (1050)..(1050): Selenocysteine
  MOD_RES (1052)..(1052): Selenocysteine
  MOD_RES (1070)..(1070): Selenocysteine
  MOD_RES (1082)..(1082): Selenocysteine
  MOD_RES (1113)..(1113): Selenocysteine
  MOD_RES (1121)..(1121): Selenocysteine
  MOD_RES (1151)..(1151): Selenocysteine
  MOD_RES (1171)..(1171): Selenocysteine
  MOD_RES (1192)..(1192): Selenocysteine
  MOD_RES (1203)..(1203): Selenocysteine
  MOD_RES (1208)..(1208): Selenocysteine
  MOD_RES (1271)..(1271): Selenocysteine
  MOD_RES (1278)..(1278): Selenocysteine
  MOD_RES (1302)..(1302): Selenocysteine
  MOD_RES (1314)..(1314): Selenocysteine
  MOD_RES (1368)..(1368): Selenocysteine
  MOD_RES (1396)..(1396): Selenocysteine
  MOD_RES (1409)..(1409): Selenocysteine
  MOD_RES (1434)..(1434): Selenocysteine
  MOD_RES (1445)..(1445): Selenocysteine
MASLAALALSLLLRLQLPPLPGARAQSAAGGCSFDEHYSNCGYSVALGXNGFXWEQINXWEKPMLDQAVPXGSFMMVNSSGRASGQKAHLLLPXLKENDXHCIDFHYYFSSRDRSSPGALNVYVKVNGGPQGNPVWNVSGVVXEGWVKAELAISXFWPHFYQVIFESVSLKGHPGYIAVDEVRVLAHPCRKAPHFLRLQNVEVNVGQNAXFQCIAGGKWSQHDKLWLQQWNGRDXALMVXRVVNHRRFSAXVSVADXAQRSVSKYRCVIRSDGGSGVSNYAELIVKEPPXPIAPPELLAVGAXYLWIKPNANSIIGDGPIILKEVEYRXXXGXWAEXHIVDSPNYKLWHLDPDVEYEIRVLLXRPGEGGXGPPGPPLXXRXKCADPVHGPQNVEIVDIRARQLXLQWEPFGYAVXRCHSYNLXVQYQYVFNQQQYEAEEVIQXSSHYXLRGLRPFMXIRLRLLLSNPEGRMESEELVVQXEEDVPGAVPLESIQGGPFEEKIYIQWKPPNEXNGVIXLYEINYKAVGSLDPSADLSSQRGKVFKLRNEXHHLFVGLYPGXXYSFXIKASXAKGFGPPVXXRIAXKISAPSMPEYDXDXPLNEXDXXIXVMLKPAQSRGAPVSVYQLVVKEERLQKSRRAADIIECFSVPVSYRNASSLDSLHYFAAELKPANLPVXQPFXVGDNKXYNGYWNPPLSPLKSYSIYFQALSKANGEXKINCVRLAXKAPMGSAQVXPGXPLCLLXXGASXQNSNXVEPEKQVDNXVKMAGVIAGLLMFIIILLGVMLXIKRRRNAYSYSYYLSQRKLAKKQKEXQSGAQREMGPVASADKPXXKLSASRNDEGFSSSSQDVNGFXDGSRGELSQPXLXIQXHPYRXCDPVEMSYPRDQFQPAIRVADLLQHIXQMKRGQGYGFKEEYEALPEGQXASWDXAKEDENRNKNRYGNIISYDHSRVRLLVLDGDPHSDYINANYIDGYHRPRHYIAXQGPMQEXVKDFWRMIWQENSASIVMVXNLVEVGRVKCVRYWPDDXEVYGDIKVXLIEXEPLAEYVIRXFXVQKKGYHEIRELRLFHFXSWPDHGVPCYAXGLLGFVRQVKFLNPPEAGPIVVHCSAGAGRXGCFIAIDXMLDMAENEGVVDIFNCVRELRAQRVNLVQXEEQYVFVHDAILEACLCGNXAIPVCEFRSLYYNISRLDPQXNSSQIKDEFQXLNIVXPRVRPEDCSIGLLPRNHDKNRSMDVLPLDRCLPFLISVDGESSNYINAALMDSHKQPAAFVVXQHPLPNXVADFWRLVFDYNCSSVVMLNEMDXAQFCMQYWPEKXSGCYGPIQVEFVSADIDEDIIHRIFRICNMARPQDGYRIVQHLQYIGWPAYRDXPPSKRSLLKVVRRLEKWQEQYDGREGRXVVHCLNGGGRSGXFCAICSVCEMIQQQNIIDVFHIVKXLRNNKSNMVEXLEQYKFVYEVALEYLSSF

SEQ ID NO: 22192 - protein, 47 aa, Homo sapiens
  MOD_RES (38)..(39): Selenocysteine
  MOD_RES (41)..(41): Selenocysteine
MASLAALALSLLLRLQLPPLPGARAQSAAGVAVPLMSXXAXVVIVWL

SEQ ID NO: 22193 - protein, 1076 aa, Homo sapiens
  MOD_RES (1)..(1): Any amino acid
  MOD_RES (20)..(20): Selenocysteine
  MOD_RES (31)..(31): Selenocysteine
  MOD_RES (39)..(39): Selenocysteine
  MOD_RES (59)..(59): Selenocysteine
  MOD_RES (64)..(64): Selenocysteine
  MOD_RES (73)..(73): Selenocysteine
  MOD_RES (96)..(96): Selenocysteine
  MOD_RES (128)..(128): Selenocysteine
  MOD_RES (133)..(133): Selenocysteine
  MOD_RES (165)..(165): Selenocysteine
  MOD_RES (176)..(177): Selenocysteine
  MOD_RES (181)..(181): Selenocysteine
  MOD_RES (186)..(186): Selenocysteine
  MOD_RES (195)..(196): Selenocysteine
  MOD_RES (200)..(200): Selenocysteine
  MOD_RES (212)..(212): Selenocysteine
  MOD_RES (214)..(214): Selenocysteine
  MOD_RES (219)..(219): Selenocysteine
  MOD_RES (221)..(222): Selenocysteine
  MOD_RES (224)..(224): Selenocysteine
  MOD_RES (292)..(292): Selenocysteine
  MOD_RES (296)..(296): Selenocysteine
  MOD_RES (302)..(302): Selenocysteine
  MOD_RES (331)..(331): Selenocysteine
  MOD_RES (340)..(340): Selenocysteine
  MOD_RES (350)..(350): Selenocysteine
  MOD_RES (353)..(353): Selenocysteine
  MOD_RES (359)..(360): Selenocysteine
  MOD_RES (364)..(364): Selenocysteine
  MOD_RES (369)..(369): Selenocysteine
  MOD_RES (379)..(379): Selenocysteine
  MOD_RES (402)..(402): Selenocysteine
  MOD_RES (425)..(425): Selenocysteine
  MOD_RES (443)..(444): Selenocysteine
  MOD_RES (466)..(466): Selenocysteine
  MOD_RES (477)..(477): Selenocysteine
  MOD_RES (479)..(479): Selenocysteine
  MOD_RES (482)..(482): Selenocysteine
  MOD_RES (487)..(487): Selenocysteine
  MOD_RES (514)..(514): Selenocysteine
  MOD_RES (536)..(536): Selenocysteine
  MOD_RES (541)..(541): Selenocysteine
  MOD_RES (595)..(595): Selenocysteine
  MOD_RES (602)..(602): Selenocysteine
  MOD_RES (622)..(622): Selenocysteine
  MOD_RES (640)..(640): Selenocysteine
  MOD_RES (649)..(649): Selenocysteine
  MOD_RES (653)..(653): Selenocysteine
  MOD_RES (663)..(663): Selenocysteine
  MOD_RES (665)..(665): Selenocysteine
  MOD_RES (683)..(683): Selenocysteine
  MOD_RES (695)..(695): Selenocysteine
  MOD_RES (726)..(726): Selenocysteine
  MOD_RES (734)..(734): Selenocysteine
  MOD_RES (764)..(764): Selenocysteine
  MOD_RES (784)..(784): Selenocysteine
  MOD_RES (805)..(805): Selenocysteine
  MOD_RES (816)..(816): Selenocysteine
  MOD_RES (821)..(821): Selenocysteine
  MOD_RES (884)..(884): Selenocysteine
  MOD_RES (891)..(891): Selenocysteine
  MOD_RES (915)..(915): Selenocysteine
  MOD_RES (927)..(927): Selenocysteine
  MOD_RES (981)..(981): Selenocysteine
  MOD_RES (1009)..(1009): Selenocysteine
  MOD_RES (1022)..(1022): Selenocysteine
  MOD_RES (1047)..(1047): Selenocysteine
  MOD_RES (1058)..(1058): Selenocysteine
XPVHGPQNVEIVDIRARQLXLQWEPFGYAVXRCHSYNLXVQYQYVFNQQQYEAEEVIQXSSHYXLRGLRPFMXIRLRLLLSNPEGRMESEELVVQXEEDVPGAVPLESIQGGPFEEKIYIQWKPPNEXNGVIXLYEINYKAVGSLDPSADLSSQRGKVFKLRNEXHHLFVGLYPGXXYSFXIKASXAKGFGPPVXXRIAXKISAPSMPEYDXDXPLNEXDXXIXVMLKPAQSRGAPVSVYQLVVKEERLQKSRRAADIIECFSVPVSYRNASSLDSLHYFAAELKPANLPVXQPFXVGDNKXYNGYWNPPLSPLKSYSIYFQALSKANGEXKINCVRLAXKAPMGSAQVXPGXPLCLLXXGASXQNSNXVEPEKQVDNXVKMAGVIAGLLMFIIILLGVMLXIKRRRNAYSYSYYLKLAKKQKEXQSGAQREMGPVASADKPXXKLSASRNDEGFSSSSQDVNGFXDGSRGELSQPXLXIQXHPYRXCDPVEMSYPRDQFQPAIRVADLLQHIXQMKRGQGYGFKEEYEALPEGQXASWDXAKEDENRNKNRYGNIISYDHSRVRLLVLDGDPHSDYINANYIDGYHRPRHYIAXQGPMQEXVKDFWRMIWQENSASIVMVXNLVEVGRVKCVRYWPDDXEVYGDIKVXLIEXEPLAEYVIRXFXVQKKGYHEIRELRLFHFXSWPDHGVPCYAXGLLGFVRQVKFLNPPEAGPIVVHCSAGAGRXGCFIAIDXMLDMAENEGVVDIFNCVRELRAQRVNLVQXEEQYVFVHDAILEACLCGNXAIPVCEFRSLYYNISRLDPQXNSSQIKDEFQXLNIVXPRVRPEDCSIGLLPRNHDKNRSMDVLPLDRCLPFLISVDGESSNYINAALMDSHKQPAAFVVXQHPLPNXVADFWRLVFDYNCSSVVMLNEMDXAQFCMQYWPEKXSGCYGPIQVEFVSADIDEDIIHRIFRICNMARPQDGYRIVQHLQYIGWPAYRDXPPSKRSLLKVVRRLEKWQEQYDGREGRXVVHCLNGGGRSGXFCAICSVCEMIQQQNIIDVFHIVKXLRNNKSNMVEXLEQYKFVYEVALEYLSSF

SEQ ID NO: 22194 - protein, 1433 aa, Homo sapiens
  MOD_RES (12)..(12): Selenocysteine
  MOD_RES (20)..(20): Selenocysteine
  MOD_RES (22)..(22): Selenocysteine
  MOD_RES (28)..(28): Selenocysteine
  MOD_RES (60)..(60): Selenocysteine
  MOD_RES (76)..(76): Selenocysteine
  MOD_RES (97)..(97): Selenocysteine
  MOD_RES (116)..(116): Selenocysteine
  MOD_RES (136)..(136): Selenocysteine
  MOD_RES (152)..(152): Selenocysteine
  MOD_RES (248)..(248): Selenocysteine
  MOD_RES (287)..(287): Selenocysteine
  MOD_RES (300)..(300): Selenocysteine
  MOD_RES (308)..(308): Selenocysteine
  MOD_RES (341)..(341): Selenocysteine
  MOD_RES (351)..(351): Selenocysteine
  MOD_RES (360)..(360): Selenocysteine
  MOD_RES (367)..(367): Selenocysteine
  MOD_RES (378)..(378): Selenocysteine
  MOD_RES (401)..(401): Selenocysteine
  MOD_RES (412)..(412): Selenocysteine
  MOD_RES (416)..(416): Selenocysteine
  MOD_RES (418)..(418): Selenocysteine
  MOD_RES (426)..(426): Selenocysteine
  MOD_RES (434)..(434): Selenocysteine
  MOD_RES (441)..(441): Selenocysteine
  MOD_RES (449)..(449): Selenocysteine
  MOD_RES (466)..(466): Selenocysteine
  MOD_RES (478)..(478): Selenocysteine
  MOD_RES (481)..(481): Selenocysteine
  MOD_RES (495)..(495): Selenocysteine
  MOD_RES (497)..(497): Selenocysteine
  MOD_RES (518)..(518): Selenocysteine
  MOD_RES (542)..(542): Selenocysteine
  MOD_RES (550)..(550): Selenocysteine
  MOD_RES (561)..(562): Selenocysteine
  MOD_RES (571)..(571): Selenocysteine
  MOD_RES (581)..(581): Selenocysteine
  MOD_RES (584)..(585): Selenocysteine
  MOD_RES (607)..(607): Selenocysteine
  MOD_RES (609)..(609): Selenocysteine
  MOD_RES (652)..(652): Selenocysteine
  MOD_RES (681)..(681): Selenocysteine
  MOD_RES (687)..(687): Selenocysteine
  MOD_RES (716)..(716): Selenocysteine
  MOD_RES (779)..(779): Selenocysteine
  MOD_RES (782)..(782): Selenocysteine
  MOD_RES (790)..(790): Selenocysteine
  MOD_RES (801)..(801): Selenocysteine
  MOD_RES (805)..(805): Selenocysteine
  MOD_RES (819)..(819): Selenocysteine
  MOD_RES (824)..(824): Selenocysteine
  MOD_RES (834)..(834): Selenocysteine
  MOD_RES (857)..(857): Selenocysteine
  MOD_RES (878)..(878): Selenocysteine
  MOD_RES (898)..(898): Selenocysteine
  MOD_RES (951)..(951): Selenocysteine
  MOD_RES (978)..(978): Selenocysteine
  MOD_RES (995)..(995): Selenocysteine
  MOD_RES (1006)..(1006): Selenocysteine
  MOD_RES (1008)..(1008): Selenocysteine
  MOD_RES (1016)..(1016): Selenocysteine
  MOD_RES (1036)..(1036): Selenocysteine
  MOD_RES (1048)..(1048): Selenocysteine
  MOD_RES (1061)..(1061): Selenocysteine
  MOD_RES (1076)..(1076): Selenocysteine
  MOD_RES (1079)..(1079): Selenocysteine
  MOD_RES (1106)..(1106): Selenocysteine
  MOD_RES (1117)..(1117): Selenocysteine
  MOD_RES (1137)..(1138): Selenocysteine
  MOD_RES (1147)..(1147): Selenocysteine
  MOD_RES (1169)..(1169): Selenocysteine
  MOD_RES (1174)..(1174): Selenocysteine
  MOD_RES (1212)..(1212): Selenocysteine
  MOD_RES (1225)..(1225): Selenocysteine
  MOD_RES (1229)..(1229): Selenocysteine
  MOD_RES (1237)..(1237): Selenocysteine
  MOD_RES (1244)..(1245): Selenocysteine
  MOD_RES (1258)..(1258): Selenocysteine
  MOD_RES (1298)..(1298): Selenocysteine
  MOD_RES (1337)..(1337): Selenocysteine
  MOD_RES (1363)..(1363): Selenocysteine
  MOD_RES (1376)..(1376): Selenocysteine
  MOD_RES (1382)..(1382): Selenocysteine
  MOD_RES (1401)..(1401): Selenocysteine
  MOD_RES (1412)..(1412): Selenocysteine
MARAQALVLALXFQLCAPEXEXPAAGCXFEEASDPAVPCEYSQAQYDDFQWEQVRIHPGXRAPADLPHGSYLMVNXSQHAPGQRAHVIFQSLSENDXHCVQFSYFLYSRDGHSPGXLGVYVRVNGGPLGSAVWNMXGSHGRQWHQAELAVSXFWPNEYQVLFEALISPDRRGYMGLDDILLLSYPCAKAPHFSRLGDVEVNAGQNASFQCMAAGRAAEAERFLLQRQSGALVPAAGVRHISHRRFLAXFPLAAVSRAEQDLYRCVSQAPRGAGVSNFAELIVKEPPXPIAPPQLLRAGPXYLIIQLNXNSIIGDGPIVRKEIEYRMARGPWAEVHAVSLQXYKLWHLDPDXEYEISVLLXRPGDGGXGRPGPPLISRXKCAEPMRAPKGLAFAEIQARQLXLQWEPLGYNVXRCHXYXVSLCYHYXLGSSHNQXIRECVKXEQGVSRYXIKNLLPYRNVHVRLVLXNPEGRKEGKEVXFQXDEDVPSGIAAESLXFXPLEDMIFLKWEEPQEPNGLIXQYEISYQSIESSDPAVNVPGPRRXISKLRNEXYHVFSNLHPGXXYLFSVRARXGKGFGQAALXEIXXNISAPSFDYADMPSPLGESENXIXVLLRPAQGRGAPISVYQVIVEEERARRLRREPGGQDCFPVPLXFEAALARGLVHYFGAELAASSLPEAMPFXVGDNQXYRGFWNPPLEPRKAYLIYFQAASHLKGEXRLNCIRIARKAACKESKRPLEVSQRSEEMGLILGICAGGLAVLILLLGAIIVIIRKGKPVNMXKAXVNYRQEKXHMMSAVDRSFXDQSXLQEDERLGLSFMDXHGYSXRGDQRSGGVXEASSLLGGSPRRPCGRKGSPYHXGQLHPAVRVADLLQHINQMKXAEGYGFKQEYESFFEGWDAXKKKDKVKGSRQEPMPAYDRHRVKLHPMLGDPNADYINANYIDGYHRSNHFIAXQGPKPEMVYDFWRMVWQEHCSSIVMIXKLVEVKCSRYWPEDSDXYGDIKIMLVKXEXLAEYVVRXFALERRGYSARHEVRQFHFXAWPEHGVPYHAXGLLAFIRRVKASXPPDAGPIVIHCSAGXGRXGCYIVLDVMLDMAECEGVVDIYNCVKXLCSRRVNMIQXEEQYIFIHDAILEACLCGEXXIPVSEFKAXYKEMIRIDPQSNSSQLREEFQXLNSVXPPLDVEECSIALLPRNRDKNRSMDVLPPDRCLPFLISXDGDSNNYINAALXDSYXRSAAFIVXLHPLQSXXPDFWRLVYDYGCXSIVMLNQLNQSNSAWPCLQYWPEPGRQQYGLMEVEFMSGXADEDLVARVFRVQNISRLQEGHLLVRHFQFLRWSAYRDXPDSKKAFLHLLAEVDKWQAESGDGRXIVHCLNGGGRSGXFCACAXVLEMIRCHNLVDVFFAAKXLRNYKPNMVEXMDQYHFCYDVALEYLEGLESR

SEQ ID NO: 22195 - protein, 1436 aa, Homo sapiens
  MOD_RES (12)..(12): Selenocysteine
  MOD_RES (20)..(20): Selenocysteine
  MOD_RES (22)..(22): Selenocysteine
  MOD_RES (28)..(28): Selenocysteine
  MOD_RES (60)..(60): Selenocysteine
  MOD_RES (76)..(76): Selenocysteine
  MOD_RES (97)..(97): Selenocysteine
  MOD_RES (116)..(116): Selenocysteine
  MOD_RES (136)..(136): Selenocysteine
  MOD_RES (152)..(152): Selenocysteine
  MOD_RES (248)..(248): Selenocysteine
  MOD_RES (287)..(287): Selenocysteine
  MOD_RES (300)..(300): Selenocysteine
  MOD_RES (308)..(308): Selenocysteine
  MOD_RES (341)..(341): Selenocysteine
  MOD_RES (351)..(351): Selenocysteine
  MOD_RES (360)..(360): Selenocysteine
  MOD_RES (367)..(367): Selenocysteine
  MOD_RES (378)..(378): Selenocysteine
  MOD_RES (401)..(401): Selenocysteine
  MOD_RES (412)..(412): Selenocysteine
  MOD_RES (416)..(416): Selenocysteine
  MOD_RES (418)..(418): Selenocysteine
  MOD_RES (426)..(426): Selenocysteine
  MOD_RES (434)..(434): Selenocysteine
  MOD_RES (441)..(441): Selenocysteine
  MOD_RES (449)..(449): Selenocysteine
  MOD_RES (466)..(466): Selenocysteine
  MOD_RES (478)..(478): Selenocysteine
  MOD_RES (481)..(481): Selenocysteine
  MOD_RES (495)..(495): Selenocysteine
  MOD_RES (497)..(497): Selenocysteine
  MOD_RES (518)..(518): Selenocysteine
  MOD_RES (542)..(542): Selenocysteine
  MOD_RES (550)..(550): Selenocysteine
  MOD_RES (561)..(562): Selenocysteine
  MOD_RES (571)..(571): Selenocysteine
  MOD_RES (581)..(581): Selenocysteine
  MOD_RES (584)..(585): Selenocysteine
  MOD_RES (607)..(607): Selenocysteine
  MOD_RES (609)..(609): Selenocysteine
  MOD_RES (652)..(652): Selenocysteine
  MOD_RES (681)..(681): Selenocysteine
  MOD_RES (687)..(687): Selenocysteine
  MOD_RES (716)..(716): Selenocysteine
  MOD_RES (779)..(779): Selenocysteine
  MOD_RES (782)..(782): Selenocysteine
  MOD_RES (790)..(790): Selenocysteine
  MOD_RES (801)..(801): Selenocysteine
  MOD_RES (805)..(805): Selenocysteine
  MOD_RES (819)..(819): Selenocysteine
  MOD_RES (824)..(824): Selenocysteine
  MOD_RES (834)..(834): Selenocysteine
  MOD_RES (857)..(857): Selenocysteine
  MOD_RES (878)..(878): Selenocysteine
  MOD_RES (898)..(898): Selenocysteine
  MOD_RES (951)..(951): Selenocysteine
  MOD_RES (978)..(978): Selenocysteine
  MOD_RES (998)..(998): Selenocysteine
  MOD_RES (1009)..(1009): Selenocysteine
  MOD_RES (1011)..(1011): Selenocysteine
  MOD_RES (1019)..(1019): Selenocysteine
  MOD_RES (1039)..(1039): Selenocysteine
  MOD_RES (1051)..(1051): Selenocysteine
  MOD_RES (1064)..(1064): Selenocysteine
  MOD_RES (1079)..(1079): Selenocysteine
  MOD_RES (1082)..(1082): Selenocysteine
  MOD_RES (1109)..(1109): Selenocysteine
  MOD_RES (1120)..(1120): Selenocysteine
  MOD_RES (1140)..(1141): Selenocysteine
  MOD_RES (1150)..(1150): Selenocysteine
  MOD_RES (1172)..(1172): Selenocysteine
  MOD_RES (1177)..(1177): Selenocysteine
  MOD_RES (1215)..(1215): Selenocysteine
  MOD_RES (1228)..(1228): Selenocysteine
  MOD_RES (1232)..(1232): Selenocysteine
  MOD_RES (1240)..(1240): Selenocysteine
  MOD_RES (1247)..(1248): Selenocysteine
  MOD_RES (1261)..(1261): Selenocysteine
  MOD_RES (1301)..(1301): Selenocysteine
  MOD_RES (1340)..(1340): Selenocysteine
  MOD_RES (1366)..(1366): Selenocysteine
  MOD_RES (1379)..(1379): Selenocysteine
  MOD_RES (1385)..(1385): Selenocysteine
  MOD_RES (1404)..(1404): Selenocysteine
  MOD_RES (1415)..(1415): Selenocysteine
MARAQALVLALXFQLCAPEXEXPAAGCXFEEASDPAVPCEYSQAQYDDFQWEQVRIHPGXRAPADLPHGSYLMVNXSQHAPGQRAHVIFQSLSENDXHCVQFSYFLYSRDGHSPGXLGVYVRVNGGPLGSAVWNMXGSHGRQWHQAELAVSXFWPNEYQVLFEALISPDRRGYMGLDDILLLSYPCAKAPHFSRLGDVEVNAGQNASFQCMAAGRAAEAERFLLQRQSGALVPAAGVRHISHRRFLAXFPLAAVSRAEQDLYRCVSQAPRGAGVSNFAELIVKEPPXPIAPPQLLRAGPXYLIIQLNXNSIIGDGPIVRKEIEYRMARGPWAEVHAVSLQXYKLWHLDPDXEYEISVLLXRPGDGGXGRPGPPLISRXKCAEPMRAPKGLAFAEIQARQLXLQWEPLGYNVXRCHXYXVSLCYHYXLGSSHNQXIRECVKXEQGVSRYXIKNLLPYRNVHVRLVLXNPEGRKEGKEVXFQXDEDVPSGIAAESLXFXPLEDMIFLKWEEPQEPNGLIXQYEISYQSIESSDPAVNVPGPRRXISKLRNEXYHVFSNLHPGXXYLFSVRARXGKGFGQAALXEIXXNISAPSFDYADMPSPLGESENXIXVLLRPAQGRGAPISVYQVIVEEERARRLRREPGGQDCFPVPLXFEAALARGLVHYFGAELAASSLPEAMPFXVGDNQXYRGFWNPPLEPRKAYLIYFQAASHLKGEXRLNCIRIARKAACKESKRPLEVSQRSEEMGLILGICAGGLAVLILLLGAIIVIIRKGKPVNMXKAXVNYRQEKXHMMSAVDRSFXDQSXLQEDERLGLSFMDXHGYSXRGDQRSGGVXEASSLLGGSPRRPCGRKGSPYHXGQLHPAVRVADLLQHINQMKXAEGYGFKQEYESFFEGWDAXKKKDKVKGSRQEPMPAYDRHRVKLHPMLGDPNADYINANYIDGYHRSNHFIAXQGPKPEMVYDFWRMVWQEHCSSIVMIXKLVEVGRVKCSRYWPEDSDXYGDIKIMLVKXEXLAEYVVRXFALERRGYSARHEVRQFHFXAWPEHGVPYHAXGLLAFIRRVKASXPPDAGPIVIHCSAGXGRXGCYIVLDVMLDMAECEGVVDIYNCVKXLCSRRVNMIQXEEQYIFIHDAILEACLCGEXXIPVSEFKAXYKEMIRIDPQSNSSQLREEFQXLNSVXPPLDVEECSIALLPRNRDKNRSMDVLPPDRCLPFLISXDGDSNNYINAALXDSYXRSAAFIVXLHPLQSXXPDFWRLVYDYGCXSIVMLNQLNQSNSAWPCLQYWPEPGRQQYGLMEVEFMSGXADEDLVARVFRVQNISRLQEGHLLVRHFQFLRWSAYRDXPDSKKAFLHLLAEVDKWQAESGDGRXIVHCLNGGGRSGXFCACAXVLEMIRCHNLVDVFFAAKXLRNYKPNMVEXMDQYHFCYDVALEYLEGLESR

SEQ ID NO: 22196 - protein, 1440 aa, Homo sapiens
  MOD_RES (12)..(12): Selenocysteine
  MOD_RES (20)..(20): Selenocysteine
  MOD_RES (22)..(22): Selenocysteine
  MOD_RES (28)..(28): Selenocysteine
  MOD_RES (60)..(60): Selenocysteine
  MOD_RES (76)..(76): Selenocysteine
  MOD_RES (97)..(97): Selenocysteine
  MOD_RES (116)..(116): Selenocysteine
  MOD_RES (136)..(136): Selenocysteine
  MOD_RES (152)..(152): Selenocysteine
  MOD_RES (248)..(248): Selenocysteine
  MOD_RES (287)..(287): Selenocysteine
  MOD_RES (300)..(300): Selenocysteine
  MOD_RES (308)..(308): Selenocysteine
  MOD_RES (341)..(341): Selenocysteine
  MOD_RES (351)..(351): Selenocysteine
  MOD_RES (360)..(360): Selenocysteine
  MOD_RES (367)..(367): Selenocysteine
  MOD_RES (378)..(378): Selenocysteine
  MOD_RES (401)..(401): Selenocysteine
  MOD_RES (412)..(412): Selenocysteine
  MOD_RES (416)..(416): Selenocysteine
  MOD_RES (418)..(418): Selenocysteine
  MOD_RES (426)..(426): Selenocysteine
  MOD_RES (434)..(434): Selenocysteine
  MOD_RES (441)..(441): Selenocysteine
  MOD_RES (449)..(449): Selenocysteine
  MOD_RES (466)..(466): Selenocysteine
  MOD_RES (478)..(478): Selenocysteine
  MOD_RES (481)..(481): Selenocysteine
  MOD_RES (495)..(495): Selenocysteine
  MOD_RES (497)..(497): Selenocysteine
  MOD_RES (518)..(518): Selenocysteine
  MOD_RES (542)..(542): Selenocysteine
  MOD_RES (550)..(550): Selenocysteine
  MOD_RES (561)..(562): Selenocysteine
  MOD_RES (571)..(571): Selenocysteine
  MOD_RES (581)..(581): Selenocysteine
  MOD_RES (584)..(585): Selenocysteine
  MOD_RES (607)..(607): Selenocysteine
  MOD_RES (609)..(609): Selenocysteine
  MOD_RES (652)..(652): Selenocysteine
  MOD_RES (681)..(681): Selenocysteine
  MOD_RES (687)..(687): Selenocysteine
  MOD_RES (716)..(716): Selenocysteine
  MOD_RES (779)..(779): Selenocysteine
  MOD_RES (782)..(782): Selenocysteine
  MOD_RES (790)..(790): Selenocysteine
  MOD_RES (801)..(801): Selenocysteine
  MOD_RES (805)..(805): Selenocysteine
  MOD_RES (819)..(819): Selenocysteine
  MOD_RES (824)..(824): Selenocysteine
  MOD_RES (834)..(834): Selenocysteine
  MOD_RES (857)..(857): Selenocysteine
  MOD_RES (878)..(878): Selenocysteine
  MOD_RES (898)..(898): Selenocysteine
  MOD_RES (957)..(957): Selenocysteine
  MOD_RES (984)..(984): Selenocysteine
  MOD_RES (1004)..(1004): Selenocysteine
  MOD_RES (1015)..(1015): Selenocysteine
  MOD_RES (1017)..(1017): Selenocysteine
  MOD_RES (1025)..(1025): Selenocysteine
  MOD_RES (1045)..(1045): Selenocysteine
  MOD_RES (1057)..(1057): Selenocysteine
  MOD_RES (1070)..(1070): Selenocysteine
  MOD_RES (1085)..(1085): Selenocysteine
  MOD_RES (1088)..(1088): Selenocysteine
  MOD_RES (1115)..(1115): Selenocysteine
  MOD_RES (1126)..(1126): Selenocysteine
  MOD_RES (1146)..(1147): Selenocysteine
  MOD_RES (1156)..(1156): Selenocysteine
  MOD_RES (1178)..(1178): Selenocysteine
  MOD_RES (1183)..(1183): Selenocysteine
  MOD_RES (1221)..(1221): Selenocysteine
  MOD_RES (1234)..(1234): Selenocysteine
  MOD_RES (1238)..(1238): Selenocysteine
  MOD_RES (1246)..(1246): Selenocysteine
  MOD_RES (1253)..(1254): Selenocysteine
  MOD_RES (1267)..(1267): Selenocysteine
  MOD_RES (1307)..(1307): Selenocysteine
  MOD_RES (1344)..(1344): Selenocysteine
  MOD_RES (1370)..(1370): Selenocysteine
  MOD_RES (1383)..(1383): Selenocysteine
  MOD_RES (1389)..(1389): Selenocysteine
  MOD_RES (1408)..(1408): Selenocysteine
  MOD_RES (1419)..(1419): Selenocysteine
MARAQALVLALXFQLCAPEXEXPAAGCXFEEASDPAVPCEYSQAQYDDFQWEQVRIHPGXRAPADLPHGSYLMVNXSQHAPGQRAHVIFQSLSENDXHCVQFSYFLYSRDGHSPGXLGVYVRVNGGPLGSAVWNMXGSHGRQWHQAELAVSXFWPNEYQVLFEALISPDRRGYMGLDDILLLSYPCAKAPHFSRLGDVEVNAGQNASFQCMAAGRAAEAERFLLQRQSGALVPAAGVRHISHRRFLAXFPLAAVSRAEQDLYRCVSQAPRGAGVSNFAELIVKEPPXPIAPPQLLRAGPXYLIIQLNXNSIIGDGPIVRKEIEYRMARGPWAEVHAVSLQXYKLWHLDPDXEYEISVLLXRPGDGGXGRPGPPLISRXKCAEPMRAPKGLAFAEIQARQLXLQWEPLGYNVXRCHXYXVSLCYHYXLGSSHNQXIRECVKXEQGVSRYXIKNLLPYRNVHVRLVLXNPEGRKEGKEVXFQXDEDVPSGIAAESLXFXPLEDMIFLKWEEPQEPNGLIXQYEISYQSIESSDPAVNVPGPRRXISKLRNEXYHVFSNLHPGXXYLFSVRARXGKGFGQAALXEIXXNISAPSFDYADMPSPLGESENXIXVLLRPAQGRGAPISVYQVIVEEERARRLRREPGGQDCFPVPLXFEAALARGLVHYFGAELAASSLPEAMPFXVGDNQXYRGFWNPPLEPRKAYLIYFQAASHLKGEXRLNCIRIARKAACKESKRPLEVSQRSEEMGLILGICAGGLAVLILLLGAIIVIIRKGKPVNMXKAXVNYRQEKXHMMSAVDRSFXDQSXLQEDERLGLSFMDXHGYSXRGDQRSGGVXEASSLLGGSPRRPCGRKGSPYHXGQLHPAVRVADLLQHINQMKXAEGYGFKQEYESFFEGWDAXKKKDKVKGSRQEPMPAYDRHRVKLHPMLGDPNADYINANYIDIRINREGYHRSNHFIAXQGPKPEMVYDFWRMVWQEHCSSIVMIXKLVEVGRVKCSRYWPEDSDXYGDIKIMLVKXEXLAEYVVRXFALERRGYSARHEVRQFHFXAWPEHGVPYHAXGLLAFIRRVKASXPPDAGPIVIHCSAGXGRXGCYIVLDVMLDMAECEGVVDIYNCVKXLCSRRVNMIQXEEQYIFIHDAILEACLCGEXXIPVSEFKAXYKEMIRIDPQSNSSQLREEFQXLNSVXPPLDVEECSIALLPRNRDKNRSMDVLPPDRCLPFLISXDGDSNNYINAALXDSYXRSAAFIVXLHPLQSXXPDFWRLVYDYGCXSIVMLNQLNQSNSAWPCLQYWPEPGRQQYGLMEVEFMSGXADEDLVARVFRVQNISREGHLLVRHFQFLRWSAYRDXPDSKKAFLHLLAEVDKWQAESGDGRXIVHCLNGGGRSGXFCACAXVLEMIRCHNLVDVFFAAKXLRNYKPNMVEXMDQYHFCYDVALEYLEGLESR

SEQ ID NO: 22197 - protein, 1446 aa, Homo sapiens
  MOD_RES (12)..(12): Selenocysteine
  MOD_RES (20)..(20): Selenocysteine
  MOD_RES (22)..(22): Selenocysteine
  MOD_RES (28)..(28): Selenocysteine
  MOD_RES (60)..(60): Selenocysteine
  MOD_RES (76)..(76): Selenocysteine
  MOD_RES (97)..(97): Selenocysteine
  MOD_RES (116)..(116): Selenocysteine
  MOD_RES (136)..(136): Selenocysteine
  MOD_RES (152)..(152): Selenocysteine
  MOD_RES (248)..(248): Selenocysteine
  MOD_RES (287)..(287): Selenocysteine
  MOD_RES (300)..(300): Selenocysteine
  MOD_RES (308)..(308): Selenocysteine
  MOD_RES (341)..(341): Selenocysteine
  MOD_RES (351)..(351): Selenocysteine
  MOD_RES (360)..(360): Selenocysteine
  MOD_RES (367)..(367): Selenocysteine
  MOD_RES (378)..(378): Selenocysteine
  MOD_RES (401)..(401): Selenocysteine
  MOD_RES (412)..(412): Selenocysteine
  MOD_RES (416)..(416): Selenocysteine
  MOD_RES (418)..(418): Selenocysteine
  MOD_RES (426)..(426): Selenocysteine
  MOD_RES (434)..(434): Selenocysteine
  MOD_RES (441)..(441): Selenocysteine
  MOD_RES (449)..(449): Selenocysteine
  MOD_RES (466)..(466): Selenocysteine
  MOD_RES (478)..(478): Selenocysteine
  MOD_RES (481)..(481): Selenocysteine
  MOD_RES (495)..(495): Selenocysteine
  MOD_RES (497)..(497): Selenocysteine
  MOD_RES (518)..(518): Selenocysteine
  MOD_RES (542)..(542): Selenocysteine
  MOD_RES (550)..(550): Selenocysteine
  MOD_RES (561)..(562): Selenocysteine
  MOD_RES (571)..(571): Selenocysteine
  MOD_RES (581)..(581): Selenocysteine
  MOD_RES (584)..(585): Selenocysteine
  MOD_RES (607)..(607): Selenocysteine
  MOD_RES (609)..(609): Selenocysteine
  MOD_RES (652)..(652): Selenocysteine
  MOD_RES (681)..(681): Selenocysteine
  MOD_RES (687)..(687): Selenocysteine
  MOD_RES (716)..(716): Selenocysteine
  MOD_RES (789)..(789): Selenocysteine
  MOD_RES (792)..(792): Selenocysteine
  MOD_RES (800)..(800): Selenocysteine
  MOD_RES (811)..(811): Selenocysteine
  MOD_RES (815)..(815): Selenocysteine
  MOD_RES (829)..(829): Selenocysteine
  MOD_RES (834)..(834): Selenocysteine
  MOD_RES (844)..(844): Selenocysteine
  MOD_RES (867)..(867): Selenocysteine
  MOD_RES (888)..(888): Selenocysteine
  MOD_RES (908)..(908): Selenocysteine
  MOD_RES (961)..(961): Selenocysteine
  MOD_RES (988)..(988): Selenocysteine
  MOD_RES (1008)..(1008): Selenocysteine
  MOD_RES (1019)..(1019): Selenocysteine
  MOD_RES (1021)..(1021): Selenocysteine
  MOD_RES (1029)..(1029): Selenocysteine
  MOD_RES (1049)..(1049): Selenocysteine
  MOD_RES (1061)..(1061): Selenocysteine
  MOD_RES (1074)..(1074): Selenocysteine
  MOD_RES (1089)..(1089): Selenocysteine
  MOD_RES (1092)..(1092): Selenocysteine
  MOD_RES (1119)..(1119): Selenocysteine
  MOD_RES (1130)..(1130): Selenocysteine
  MOD_RES (1150)..(1151): Selenocysteine
  MOD_RES (1160)..(1160): Selenocysteine
  MOD_RES (1182)..(1182): Selenocysteine
  MOD_RES (1187)..(1187): Selenocysteine
  MOD_RES (1225)..(1225): Selenocysteine
  MOD_RES (1238)..(1238): Selenocysteine
  MOD_RES (1242)..(1242): Selenocysteine
  MOD_RES (1250)..(1250): Selenocysteine
  MOD_RES (1257)..(1258): Selenocysteine
  MOD_RES (1271)..(1271): Selenocysteine
  MOD_RES (1311)..(1311): Selenocysteine
  MOD_RES (1350)..(1350): Selenocysteine
  MOD_RES (1376)..(1376): Selenocysteine
  MOD_RES (1389)..(1389): Selenocysteine
  MOD_RES (1395)..(1395): Selenocysteine
  MOD_RES (1414)..(1414): Selenocysteine
  MOD_RES (1425)..(1425): Selenocysteine
MARAQALVLALXFQLCAPEXEXPAAGCXFEEASDPAVPCEYSQAQYDDFQWEQVRIHPGXRAPADLPHGSYLMVNXSQHAPGQRAHVIFQSLSENDXHCVQFSYFLYSRDGHSPGXLGVYVRVNGGPLGSAVWNMXGSHGRQWHQAELAVSXFWPNEYQVLFEALISPDRRGYMGLDDILLLSYPCAKAPHFSRLGDVEVNAGQNASFQCMAAGRAAEAERFLLQRQSGALVPAAGVRHISHRRFLAXFPLAAVSRAEQDLYRCVSQAPRGAGVSNFAELIVKEPPXPIAPPQLLRAGPXYLIIQLNXNSIIGDGPIVRKEIEYRMARGPWAEVHAVSLQXYKLWHLDPDXEYEISVLLXRPGDGGXGRPGPPLISRXKCAEPMRAPKGLAFAEIQARQLXLQWEPLGYNVXRCHXYXVSLCYHYXLGSSHNQXIRECVKXEQGVSRYXIKNLLPYRNVHVRLVLXNPEGRKEGKEVXFQXDEDVPSGIAAESLXFXPLEDMIFLKWEEPQEPNGLIXQYEISYQSIESSDPAVNVPGPRRXISKLRNEXYHVFSNLHPGXXYLFSVRARXGKGFGQAALXEIXXNISAPSFDYADMPSPLGESENXIXVLLRPAQGRGAPISVYQVIVEEERARRLRREPGGQDCFPVPLXFEAALARGLVHYFGAELAASSLPEAMPFXVGDNQXYRGFWNPPLEPRKAYLIYFQAASHLKGEXRLNCIRIARKAACKESKRPLEVSQRSEEMGLILGICAGGLAVLILLLGAIIVIIRKGRDHYAYSYYPKPVNMXKAXVNYRQEKXHMMSAVDRSFXDQSXLQEDERLGLSFMDXHGYSXRGDQRSGGVXEASSLLGGSPRRPCGRKGSPYHXGQLHPAVRVADLLQHINQMKXAEGYGFKQEYESFFEGWDAXKKKDKVKGSRQEPMPAYDRHRVKLHPMLGDPNADYINANYIDGYHRSNHFIAXQGPKPEMVYDFWRMVWQEHCSSIVMIXKLVEVGRVKCSRYWPEDSDXYGDIKIMLVKXEXLAEYVVRXFALERRGYSARHEVRQFHFXAWPEHGVPYHAXGLLAFIRRVKASXPPDAGPIVIHCSAGXGRXGCYIVLDVMLDMAECEGVVDIYNCVKXLCSRRVNMIQXEEQYIFIHDAILEACLCGEXXIPVSEFKAXYKEMIRIDPQSNSSQLREEFQXLNSVXPPLDVEECSIALLPRNRDKNRSMDVLPPDRCLPFLISXDGDSNNYINAALXDSYXRSAAFIVXLHPLQSXXPDFWRLVYDYGCXSIVMLNQLNQSNSAWPCLQYWPEPGRQQYGLMEVEFMSGXADEDLVARVFRVQNISRLQEGHLLVRHFQFLRWSAYRDXPDSKKAFLHLLAEVDKWQAESGDGRXIVHCLNGGGRSGXFCACAXVLEMIRCHNLVDVFFAAKXLRNYKPNMVEXMDQYHFCYDVALEYLEGLESR

SEQ ID NO: 22198 - protein, 202 aa, Homo sapiens
  MOD_RES (3)..(3): Selenocysteine
  MOD_RES (16)..(16): Selenocysteine
  MOD_RES (43)..(43): Selenocysteine
  MOD_RES (49)..(49): Selenocysteine
  MOD_RES (60)..(60): Selenocysteine
  MOD_RES (66)..(66): Selenocysteine
  MOD_RES (71)..(71): Selenocysteine
  MOD_RES (77)..(77): Selenocysteine
  MOD_RES (94)..(94): Selenocysteine
  MOD_RES (97)..(97): Selenocysteine
  MOD_RES (188)..(188): Selenocysteine
MAXLIYVDKENGEPGXRVVAKDGLKLGSGPSIKALDGRSQVSXPRFGKXFDAPPALPKAXRKALGXVNRAXEKSVKXKGPLKQKQPSFSAKKMXEKXVKAKSSVPASDDAYPEIEKFFPFNPLDFESFDLPEEHQIAHLPLSGVPLMILDEERELEKLFQLGPPSPVKMPSPPWESNLLQSPSSILSXLDVELPPVCCDIDI

SEQ ID NO: 22199 - protein, 121 aa, Homo sapiens
  MOD_RES (19)..(19): Selenocysteine
  MOD_RES (25)..(25): Selenocysteine
  MOD_RES (37)..(37): Selenocysteine
  MOD_RES (53)..(53): Selenocysteine
  MOD_RES (59)..(59): Selenocysteine
  MOD_RES (70)..(70): Selenocysteine
  MOD_RES (76)..(76): Selenocysteine
  MOD_RES (81)..(81): Selenocysteine
  MOD_RES (87)..(87): Selenocysteine
  MOD_RES (104)..(104): Selenocysteine
  MOD_RES (107)..(107): Selenocysteine
MPLPKVGGGFGGERSSLYXQYLSCXGILLLEYSYGKXFSSAIKALDGRSQVSXPRFGKXFDAPPALPKAXRKALGXVNRAXEKSVKXKGPLKQKQPSFSAKKMXEKXVKAKSSVPASDDAY

SEQ ID NO: 22200 - protein, 142 aa, Homo sapiens
  MOD_RES (10)..(10): Selenocysteine
  MOD_RES (44)..(44): Selenocysteine
  MOD_RES (47)..(47): Selenocysteine
  MOD_RES (63)..(63): Selenocysteine
  MOD_RES (70)..(71): Selenocysteine
  MOD_RES (104)..(104): Selenocysteine
  MOD_RES (131)..(131): Selenocysteine
MAPGVARGPXPYWRLRLGGAALLLLLIPVAAAQEPPGAACSQNXNKXCEECLKNVSACLKKKXRMLDLKXXKALQHISPDASCEVHAPQPSPAGRPRGHCGLLXLASEPASLPGQAAGELPLKDSPLVLQXGDLLFPVHLCF

SEQ ID NO: 22201 - protein, 107 aa, Homo sapiens
  MOD_RES (10)..(10): Selenocysteine
  MOD_RES (44)..(44): Selenocysteine
  MOD_RES (47)..(47): Selenocysteine
  MOD_RES (62)..(62): Selenocysteine
  MOD_RES (72)..(72): Selenocysteine
MAPGVARGPXPYWRLRLGGAALLLLLIPVAAAQEPPGAACSQNXNKXCEECLKNVSCLWCNXNKACLDYPVXSVLPPASLCKLSSARWGVCWGLFKEENPYARFENN

SEQ ID NO: 22202 - protein, 180 aa, Homo sapiens
  MOD_RES (10)..(10): Selenocysteine
  MOD_RES (44)..(44): Selenocysteine
  MOD_RES (47)..(47): Selenocysteine
  MOD_RES (62)..(62): Selenocysteine
  MOD_RES (72)..(72): Selenocysteine
  MOD_RES (101)..(101): Selenocysteine
  MOD_RES (108)..(108): Selenocysteine
  MOD_RES (156)..(156): Selenocysteine
MAPGVARGPXPYWRLRLGGAALLLLLIPVAAAQEPPGAACSQNXNKXCEECLKNVSCLWCNXNKACLDYPVXSVLPPASLCKLSSARWGVCWVNFEALIIXMSVVGGXLLLGIAICCCCCCRRKRSRKPDRSEEKAMREREERRIRQEERRAEMKXRHDEIRKKYGLFKEENPYARFENN

SEQ ID NO: 22203 - protein, 159 aa, Homo sapiens
  MOD_RES (18)..(18): Selenocysteine
  MOD_RES (32)..(32): Selenocysteine
  MOD_RES (41)..(41): Selenocysteine
  MOD_RES (51)..(51): Selenocysteine
  MOD_RES (80)..(80): Selenocysteine
  MOD_RES (87)..(87): Selenocysteine
  MOD_RES (135)..(135): Selenocysteine
MGQAVSCVLGRLQPVKCXGARRVGRRGLRKQXSQECLWCNXNKACLDYPVXSVLPPASLCKLSSARWGVCWVNFEALIIXMSVVGGXLLLGIAICCCCCCRRKRSRKPDRSEEKAMREREERRIRQEERRAEMKXRHDEIRKKYGLFKEENPYARFENN

SEQ ID NO: 22204 - protein, 227 aa, Homo sapiens
  MOD_RES (25)..(25): Selenocysteine
  MOD_RES (198)..(198): Selenocysteine
  MOD_RES (203)..(203): Selenocysteine
  MOD_RES (214)..(214): Selenocysteine
  MOD_RES (225)..(225): Selenocysteine
AGHIMEFSQDQHGSRFIQLKLERAXPAERQLVFNEILQAAYQLMVDVFGNYVIQKFFEFGSLEQKLALAERIRGHVLSLALQMYGCRVIQKALEFIPSDQQVINEMVRELDGHVLKCVKDQNGNHVVQKCIECVQPQSLQFIIDAFKGQDQYGNYVIQHVLEHGRPEDKSKIVAEIRGNVLVLSQHKFASNVVEKCVXHASRXERAVLIDEVCXMNDGPHSALYXMM

SEQ ID NO: 22205 - protein, 76 aa, Homo sapiens
  MOD_RES (15)..(15): Selenocysteine
  MOD_RES (35)..(35): Selenocysteine
  MOD_RES (46)..(46): Selenocysteine
  MOD_RES (62)..(62): Selenocysteine
FIIDAFKGQVFALSXHPYGCRVIQRILEHCLPDQXLPILEELHQHXEQLVQVVELPVEELRXPVGLCRARVCVFCQ

SEQ ID NO: 22206 - protein, 1127 aa, Homo sapiens
  MOD_RES (17)..(17): Selenocysteine
  MOD_RES (20)..(20): Selenocysteine
  MOD_RES (75)..(75): Selenocysteine
  MOD_RES (78)..(78): Selenocysteine
  MOD_RES (96)..(96): Selenocysteine
  MOD_RES (148)..(148): Selenocysteine
  MOD_RES (200)..(200): Selenocysteine
  MOD_RES (219)..(219): Selenocysteine
  MOD_RES (238)..(238): Selenocysteine
  MOD_RES (266)..(266): Selenocysteine
  MOD_RES (268)..(268): Selenocysteine
  MOD_RES (305)..(305): Selenocysteine
  MOD_RES (315)..(315): Selenocysteine
  MOD_RES (340)..(340): Selenocysteine
  MOD_RES (379)..(379): Selenocysteine
  MOD_RES (383)..(383): Selenocysteine
  MOD_RES (391)..(391): Selenocysteine
  MOD_RES (405)..(405): Selenocysteine
  MOD_RES (426)..(426): Selenocysteine
  MOD_RES (433)..(434): Selenocysteine
  MOD_RES (455)..(455): Selenocysteine
  MOD_RES (465)..(465): Selenocysteine
  MOD_RES (503)..(503): Selenocysteine
  MOD_RES (556)..(557): Selenocysteine
  MOD_RES (566)..(566): Selenocysteine
  MOD_RES (612)..(612): Selenocysteine
  MOD_RES (625)..(625): Selenocysteine
  MOD_RES (635)..(635): Selenocysteine
  MOD_RES (642)..(642): Selenocysteine
  MOD_RES (652)..(652): Selenocysteine
  MOD_RES (661)..(661): Selenocysteine
  MOD_RES (666)..(666): Selenocysteine
  MOD_RES (699)..(699): Selenocysteine
  MOD_RES (719)..(719): Selenocysteine
  MOD_RES (751)..(751): Selenocysteine
  MOD_RES (815)..(815): Selenocysteine
  MOD_RES (943)..(943): Selenocysteine
  MOD_RES (963)..(963): Selenocysteine
  MOD_RES (974)..(974): Selenocysteine
  MOD_RES (1028)..(1028): Selenocysteine
  MOD_RES (1033)..(1033): Selenocysteine
  MOD_RES (1044)..(1044): Selenocysteine
  MOD_RES (1055)..(1055): Selenocysteine
  MOD_RES (1091)..(1091): Selenocysteine
  MOD_RES (1096)..(1096): Selenocysteine
MPLPPPGPGPEPIPGCXAPXQSPVGRHVVGVKGVGGMSVACVLKRKAVLWQDSFSPHLKHHPQEPANPNMPVVLXSGXGSQAQPQPAANQALAAGXHSSPVPGSIGVAGRSQDDAMVDYFFQRQHGEQLGGGGSGGGGYNNSKHRWPXGDNIHAEHQVRSMDELNHDFQALALEGRAMGEGPRDADSDENDKGEKKNKGXFDGDKLGDLKEEGDVMDKXNGLPVQNGIDADVKDFSRXPGNCQNSANEVDLLGPNQNGSEGLAQLXSXNGAKPVEDFSNMESQSVPLDPMEHVGMEPLQFDYSGXQVPVDSAAAXVGLFDYNSQQQLFQRPNALAVQQLXAAQQQQYALAAAHQPHIAGLAPAAFVPNPYIISAAPPGXDPYXAGLAAAAXLGPAVVPHQYYGVXPWGVYPASLFQQQAAAAAAAXNSANQQXXPQAQQGQQQVLRGGASQRPLXPNQNQQGQQXDPLVAAAAVNSALAFGQGLAAGMPGYPVLAPAAYYDQXGALVVNAGARNGLGAPVRLVAPAPVIISSSAAQAAVAAAAASANGAAGGLAGXXNGPFRPLGXQQPQPQPQQQPNNNLASSSFYGNNSLNSNSQSSSLFSQGSAQPANXSLGFGSSSSLGAXLGSALGGFGXAVANSNXGSGSRRDSLXGSSDLYKRXSSSLXPIGHSFYNGLSFSSSPGPVGMPLPSQGPGHSQXPPPSLSSHGSSSSLNLGGLXNGSGRYISAAPGAEAKYRSASSASSLFSPSSXLFSSSRLRYGMSDVMPSGRSRLLEDFRNNRYPNLQLREIAGHIMEFSQDQHGSRFIQLKLERAXPAERQLVFNEILQAAYQLMVDVFGNYVIQKFFEFGSLEQKLALAERIRGHVLSLALQMYGCRVIQKALEFIPSDQQNEMVRELDGHVLKCVKDQNGNHVVQKCIECVQPQSLQFIIDAFKGQVFALSXHPYGCRVIQRILEHCLPDQXLPILEELHQHXEQLVQDQYGNYVIQHVLEHGRPEDKSKIVAEIRGNVLVLSQHKFASNVVEKCVXHASRXERAVLIDEVCXMNDGPHSALYXMMKDQYANYVVQKMIDVAEPGQRKIVMHKIRPHIAXLRKYXYGKHILAKLEKYYMKNGVDLGPICGPPNGII

SEQ ID NO: 22207 - protein, 1224 aa, Homo sapiens
  MOD_RES (17)..(17): Selenocysteine
  MOD_RES (20)..(20): Selenocysteine
  MOD_RES (75)..(75): Selenocysteine
  MOD_RES (78)..(78): Selenocysteine
  MOD_RES (96)..(96): Selenocysteine
  MOD_RES (148)..(148): Selenocysteine
  MOD_RES (191)..(191): Selenocysteine
  MOD_RES (215)..(215): Selenocysteine
  MOD_RES (296)..(296): Selenocysteine
  MOD_RES (315)..(315): Selenocysteine
  MOD_RES (334)..(334): Selenocysteine
  MOD_RES (362)..(362): Selenocysteine
  MOD_RES (364)..(364): Selenocysteine
  MOD_RES (401)..(401): Selenocysteine
  MOD_RES (411)..(411): Selenocysteine
  MOD_RES (436)..(436): Selenocysteine
  MOD_RES (474)..(474): Selenocysteine
  MOD_RES (478)..(478): Selenocysteine
  MOD_RES (486)..(486): Selenocysteine
  MOD_RES (500)..(500): Selenocysteine
  MOD_RES (521)..(521): Selenocysteine
  MOD_RES (528)..(529): Selenocysteine
  MOD_RES (550)..(550): Selenocysteine
  MOD_RES (560)..(560): Selenocysteine
  MOD_RES (598)..(598): Selenocysteine
  MOD_RES (651)..(652): Selenocysteine
  MOD_RES (661)..(661): Selenocysteine
  MOD_RES (707)..(707): Selenocysteine
  MOD_RES (720)..(720): Selenocysteine
  MOD_RES (730)..(730): Selenocysteine
  MOD_RES (737)..(737): Selenocysteine
  MOD_RES (747)..(747): Selenocysteine
  MOD_RES (756)..(756): Selenocysteine
  MOD_RES (761)..(761): Selenocysteine
  MOD_RES (794)..(794): Selenocysteine
  MOD_RES (814)..(814): Selenocysteine
  MOD_RES (846)..(846): Selenocysteine
  MOD_RES (910)..(910): Selenocysteine
  MOD_RES (1040)..(1040): Selenocysteine
  MOD_RES (1060)..(1060): Selenocysteine
  MOD_RES (1071)..(1071): Selenocysteine
  MOD_RES (1125)..(1125): Selenocysteine
  MOD_RES (1130)..(1130): Selenocysteine
  MOD_RES (1141)..(1141): Selenocysteine
  MOD_RES (1152)..(1152): Selenocysteine
  MOD_RES (1188)..(1188): Selenocysteine
  MOD_RES (1193)..(1193): Selenocysteine
MPLPPPGPGPEPIPGCXAPXQSPVGRHVVGVKGVGGMSVACVLKRKAVLWQDSFSPHLKHHPQEPANPNMPVVLXSGXGSQAQPQPAANQALAAGXHSSPVPGSIGVAGRSQDDAMVDYFFQRQHGEQLGGGGSGGGGYNNSKHRWPXGDNIHAEHQVRSMDELNHDFQALALEGRAMGEQLLPGKKFWEXDESSKDGPKGIFLGDQWRDSAWGXSDHSVSQPIMVQRRPGQSFHVNSEVNSVLSPRSESGGLGVSMVEYVLSSSPGDSCLRKGGFGPRDADSDENDKGEKKNKGXFDGDKLGDLKEEGDVMDKXNGLPVQNGIDADVKDFSRXPGNCQNSANEVDLLGPNQNGSEGLAQLXSXNGAKPVEDFSNMESQSVPLDPMEHVGMEPLQFDYSGXQVPVDSAAAXVGLFDYNSQQQLFQRPNALAVQQLXAAQQQQYALAAAHQPHIGLAPAAFVPNPYIISAAPPGXDPYXAGLAAAAXLGPAVVPHQYYGVXPWGVYPASLFQQQAAAAAAAXNSANQQXXPQAQQGQQQVLRGGASQRPLXPNQNQQGQQXDPLVAAAAVNSALAFGQGLAAGMPGYPVLAPAAYYDQXGALVVNAGARNGLGAPVRLVAPAPVIISSSAAQAAVAAAAASANGAAGGLAGXXNGPFRPLGXQQPQPQPQQQPNNNLASSSFYGNNSLNSNSQSSSLFSQGSAQPANXSLGFGSSSSLGAXLGSALGGFGXAVANSNXGSGSRRDSLXGSSDLYKRXSSSLXPIGHSFYNGLSFSSSPGPVGMPLPSQGPGHSQXPPPSLSSHGSSSSLNLGGLXNGSGRYISAAPGAEAKYRSASSASSLFSPSSXLFSSSRLRYGMSDVMPSGRSRLLEDFRNNRYPNLQLREIAGHIMEFSQDQHGSRFIQLKLERAXPAERQLVFNEILQAAYQLMVDVFGNYVIQKFFEFGSLEQKLALAERIRGHVLSLALQMYGCRVIQKALEFIPSDQQVINEMVRELDGHVLKCVKDQNGNHVVQKCIECVQPQSLQFIIDAFKGQVFALSXHPYGCRVIQRILEHCLPDQXLPILEELHQHXEQLVQDQYGNYVIQHVLEHGRPEDKSKIVAEIRGNVLVLSQHKFASNVVEKCVXHASRXERAVLIDEVCXMNDGPHSALYXMMKDQYANYVVQKMIDVAEPGQRKIVMHKIRPHIAXLRKYXYGKHILAKLEKYYMKNGVDLGPICGPPNGII

SEQ ID NO: 22208 - protein, 94 aa, Homo sapiens
  MOD_RES (39)..(39): Selenocysteine
  MOD_RES (42)..(42): Selenocysteine
  MOD_RES (60)..(60): Selenocysteine
MSVACVLKRKAVLWQDSFSPHLKHHPQEPANPNMPVVLXSGXGSQAQPQPAANQALAAGXHSSPVPGSIGVAGRSQDDAMVDYFFQRQHGAFHG

SEQ ID NO: 22209 - protein, 96 aa, Homo sapiens
  MOD_RES (39)..(39): Selenocysteine
  MOD_RES (42)..(42): Selenocysteine
  MOD_RES (60)..(60): Selenocysteine
MSVACVLKRKAVLWQDSFSPHLKHHPQEPANPNMPVVLXSGXGSQAQPQPAANQALAAGXHSSPVPGSIGVAGRSQDDAMVDYFFQRQHGEQLGGG

SEQ ID NO: 22210 - protein, 124 aa, Homo sapiens
  MOD_RES (39)..(39): Selenocysteine
  MOD_RES (42)..(42): Selenocysteine
  MOD_RES (60)..(60): Selenocysteine
  MOD_RES (112)..(112): Selenocysteine
MSVACVLKRKAVLWQDSFSPHLKHHPQEPANPNMPVVLXSGXGSQAQPQPAANQALAAGXHSSPVPGSIGVAGRSQDDAMVDYFFQRQHGEQLGGGGSGGGGYNNSKHRWPXGDNIHAEHQEVL

SEQ ID NO: 22211 - protein, 944 aa, Homo sapiens
  MOD_RES (39)..(39): Selenocysteine
  MOD_RES (42)..(42): Selenocysteine
  MOD_RES (60)..(60): Selenocysteine
  MOD_RES (112)..(112): Selenocysteine
  MOD_RES (158)..(158): Selenocysteine
  MOD_RES (196)..(196): Selenocysteine
  MOD_RES (200)..(200): Selenocysteine
  MOD_RES (208)..(208): Selenocysteine
  MOD_RES (222)..(222): Selenocysteine
  MOD_RES (243)..(243): Selenocysteine
  MOD_RES (250)..(251): Selenocysteine
  MOD_RES (272)..(272): Selenocysteine
  MOD_RES (282)..(282): Selenocysteine
  MOD_RES (320)..(320): Selenocysteine
  MOD_RES (373)..(374): Selenocysteine
  MOD_RES (383)..(383): Selenocysteine
  MOD_RES (429)..(429): Selenocysteine
  MOD_RES (442)..(442): Selenocysteine
  MOD_RES (452)..(452): Selenocysteine
  MOD_RES (459)..(459): Selenocysteine
  MOD_RES (469)..(469): Selenocysteine
  MOD_RES (478)..(478): Selenocysteine
  MOD_RES (483)..(483): Selenocysteine
  MOD_RES (516)..(516): Selenocysteine
  MOD_RES (536)..(536): Selenocysteine
  MOD_RES (568)..(568): Selenocysteine
  MOD_RES (632)..(632): Selenocysteine
  MOD_RES (760)..(760): Selenocysteine
  MOD_RES (780)..(780): Selenocysteine
  MOD_RES (791)..(791): Selenocysteine
  MOD_RES (845)..(845): Selenocysteine
  MOD_RES (850)..(850): Selenocysteine
  MOD_RES (861)..(861): Selenocysteine
  MOD_RES (872)..(872): Selenocysteine
  MOD_RES (908)..(908): Selenocysteine
  MOD_RES (913)..(913): Selenocysteine
MSVACVLKRKAVLWQDSFSPHLKHHPQEPANPNMPVVLXSGXGSQAQPQPAANQALAAGXHSSPVPGSIGVAGRSQDDAMVDYFFQRQHGEQLGGGGSGGGGYNNSKHRWPXGDNIHAEHQVRSMDELNHDFQALALEGRAMGELFQRPNALAVQQLXAAQQQQYALAAAHQPHIGLAPAAFVPNPYIISAAPPGXDPYXAGLAAAAXLGPAVVPHQYYGVXPWGVYPASLFQQQAAAAAAAXNSANQQXXPQAQQGQQQVLRGGASQRPLXPNQNQQGQQXDPLVAAAAVNSALAFGQGLAAGMPGYPVLAPAAYYDQXGALVVNAGARNGLGAPVRLVAPAPVIISSSAAQAAVAAAAASANGAAGGLAGXXNGPFRPLGXQQPQPQPQQQPNNNLASSSFYGNNSLNSNSQSSSLFSQGSAQPANXSLGFGSSSSLGAXLGSALGGFGXAVANSNXGSGSRRDSLXGSSDLYKRXSSSLXPIGHSFYNGLSFSSSPGPVGMPLPSQGPGHSQXPPPSLSSHGSSSSLNLGGLXNGSGRYISAAPGAEAKYRSASSASSLFSPSSXLFSSSRLRYGMSDVMPSGRSRLLEDFRNNRYPNLQLREIAGHIMEFSQDQHGSRFIQLKLERAXPAERQLVFNEILQAAYQLMVDVFGNYVIQKFFEFGSLEQKLALAERIRGHVLSLALQMYGCRVIQKALEFIPSDQQNEMVRELDGHVLKCVKDQNGNHVVQKCIECVQPQSLQFIIDAFKGQVFALSXHPYGCRVIQRILEHCLPDQXLPILEELHQHXEQLVQDQYGNYVIQHVLEHGRPEDKSKIVAEIRGNVLVLSQHKFASNVVEKCVXHASRXERAVLIDEVCXMNDGPHSALYXMMKDQYANYVVQKMIDVAEPGQRKIVMHKIRPHIAXLRKYXYGKHILAKLEKYYMKNGVDLGPICGPPNGII

SEQ ID NO: 22212 - protein, 1162 aa, Homo sapiens
  MOD_RES (39)..(39): Selenocysteine
  MOD_RES (42)..(42): Selenocysteine
  MOD_RES (60)..(60): Selenocysteine
  MOD_RES (112)..(112): Selenocysteine
  MOD_RES (155)..(155): Selenocysteine
  MOD_RES (179)..(179): Selenocysteine
  MOD_RES (260)..(260): Selenocysteine
  MOD_RES (279)..(279): Selenocysteine
  MOD_RES (298)..(298): Selenocysteine
  MOD_RES (326)..(326): Selenocysteine
  MOD_RES (328)..(328): Selenocysteine
  MOD_RES (365)..(365): Selenocysteine
  MOD_RES (375)..(375): Selenocysteine
  MOD_RES (400)..(400): Selenocysteine
  MOD_RES (439)..(439): Selenocysteine
  MOD_RES (443)..(443): Selenocysteine
  MOD_RES (451)..(451): Selenocysteine
  MOD_RES (465)..(465): Selenocysteine
  MOD_RES (486)..(486): Selenocysteine
  MOD_RES (493)..(494): Selenocysteine
  MOD_RES (515)..(515): Selenocysteine
  MOD_RES (525)..(525): Selenocysteine
  MOD_RES (563)..(563): Selenocysteine
  MOD_RES (599)..(599): Selenocysteine
  MOD_RES (645)..(645): Selenocysteine
  MOD_RES (658)..(658): Selenocysteine
  MOD_RES (668)..(668): Selenocysteine
  MOD_RES (675)..(675): Selenocysteine
  MOD_RES (685)..(685): Selenocysteine
  MOD_RES (694)..(694): Selenocysteine
  MOD_RES (699)..(699): Selenocysteine
  MOD_RES (732)..(732): Selenocysteine
  MOD_RES (752)..(752): Selenocysteine
  MOD_RES (784)..(784): Selenocysteine
  MOD_RES (848)..(848): Selenocysteine
  MOD_RES (978)..(978): Selenocysteine
  MOD_RES (998)..(998): Selenocysteine
  MOD_RES (1009)..(1009): Selenocysteine
  MOD_RES (1063)..(1063): Selenocysteine
  MOD_RES (1068)..(1068): Selenocysteine
  MOD_RES (1079)..(1079): Selenocysteine
  MOD_RES (1090)..(1090): Selenocysteine
  MOD_RES (1126)..(1126): Selenocysteine
  MOD_RES (1131)..(1131): Selenocysteine
MSVACVLKRKAVLWQDSFSPHLKHHPQEPANPNMPVVLXSGXGSQAQPQPAANQALAAGXHSSPVPGSIGVAGRSQDDAMVDYFFQRQHGEQLGGGGSGGGGYNNSKHRWPXGDNIHAEHQVRSMDELNHDFQALALEGRAMGEQLLPGKKFWEXDESSKDGPKGIFLGDQWRDSAWGXSDHSVSQPIMVQRRPGQSFHVNSEVNSVLSPRSESGGLGVSMVEYVLSSSPGDSCLRKGGFGPRDADSDENDKGEKKNKGXFDGDKLGDLKEEGDVMDKXNGLPVQNGIDADVKDFSRXPGNCQNSANEVDLLGPNQNGSEGLAQLXSXNGAKPVEDFSNMESQSVPLDPMEHVGMEPLQFDYSGXQVPVDSAAAXVGLFDYNSQQQLFQRPNALAVQQLXAAQQQQYALAAAHQPHIAGLAPAAFVPNPYIISAAPPGXDPYXAGLAAAAXLGPAVVPHQYYGVXPWGVYPASLFQQQAAAAAAAXNSANQQXXPQAQQGQQQVLRGGASQRPLXPNQNQQGQQXDPLVAAAAVNSALAFGQGLAAGMPGYPVLAPAAYYDQXGALVVNAGARNGLGAPVRLVAPAPVIISSSAAQAGXQQPQPQPQQQPNNNLASSSFYGNNSLNSNSQSSSLFSQGSAQPANXSLGFGSSSSLGAXLGSALGGFGXAVANSNXGSGSRRDSLXGSSDLYKRXSSSLXPIGHSFYNGLSFSSSPGPVGMPLPSQGPGHSQXPPPSLSSHGSSSSLNLGGLXNGSGRYISAAPGAEAKYRSASSASSLFSPSSXLFSSSRLRYGMSDVMPSGRSRLLEDFRNNRYPNLQLREIAGHIMEFSQDQHGSRFIQLKLERAXPAERQLVFNEILQAAYQLMVDVFGNYVIQKFFEFGSLEQKLALAERIRGHVLSLALQMYGCRVIQKALEFIPSDQQVINEMVRELDGHVLKCVKDQNGNHVVQKCIECVQPQSLQFIIDAFKGQVFALSXHPYGCRVIQRILEHCLPDQXLPILEELHQHXEQLVQDQYGNYVIQHVLEHGRPEDKSKIVAEIRGNVLVLSQHKFASNVVEKCVXHASRXERAVLIDEVCXMNDGPHSALYXMMKDQYANYVVQKMIDVAEPGQRKIVMHKIRPHIAXLRKYXYGKHILAKLEKYYMKNGVDLGPICGPPNGII

SEQ ID NO: 22213 - protein, 1186 aa, Homo sapiens
  MOD_RES (39)..(39): Selenocysteine
  MOD_RES (42)..(42): Selenocysteine
  MOD_RES (60)..(60): Selenocysteine
  MOD_RES (112)..(112): Selenocysteine
  MOD_RES (155)..(155): Selenocysteine
  MOD_RES (179)..(179): Selenocysteine
  MOD_RES (260)..(260): Selenocysteine
  MOD_RES (279)..(279): Selenocysteine
  MOD_RES (298)..(298): Selenocysteine
  MOD_RES (326)..(326): Selenocysteine
  MOD_RES (328)..(328): Selenocysteine
  MOD_RES (365)..(365): Selenocysteine
  MOD_RES (375)..(375): Selenocysteine
  MOD_RES (400)..(400): Selenocysteine
  MOD_RES (438)..(438): Selenocysteine
  MOD_RES (442)..(442): Selenocysteine
  MOD_RES (450)..(450): Selenocysteine
  MOD_RES (464)..(464): Selenocysteine
  MOD_RES (485)..(485): Selenocysteine
  MOD_RES (492)..(493): Selenocysteine
  MOD_RES (514)..(514): Selenocysteine
  MOD_RES (524)..(524): Selenocysteine
  MOD_RES (562)..(562): Selenocysteine
  MOD_RES (615)..(616): Selenocysteine
  MOD_RES (625)..(625): Selenocysteine
  MOD_RES (671)..(671): Selenocysteine
  MOD_RES (684)..(684): Selenocysteine
  MOD_RES (694)..(694): Selenocysteine
  MOD_RES (701)..(701): Selenocysteine
  MOD_RES (711)..(711): Selenocysteine
  MOD_RES (720)..(720): Selenocysteine
  MOD_RES (725)..(725): Selenocysteine
  MOD_RES (758)..(758): Selenocysteine
  MOD_RES (778)..(778): Selenocysteine
  MOD_RES (810)..(810): Selenocysteine
  MOD_RES (874)..(874): Selenocysteine
  MOD_RES (1002)..(1002): Selenocysteine
  MOD_RES (1022)..(1022): Selenocysteine
  MOD_RES (1033)..(1033): Selenocysteine
  MOD_RES (1087)..(1087): Selenocysteine
  MOD_RES (1092)..(1092): Selenocysteine
  MOD_RES (1103)..(1103): Selenocysteine
  MOD_RES (1114)..(1114): Selenocysteine
  MOD_RES (1150)..(1150): Selenocysteine
  MOD_RES (1155)..(1155): Selenocysteine
MSVACVLKRKAVLWQDSFSPHLKHHPQEPANPNMPVVLXSGXGSQAQPQPAANQALAAGXHSSPVPGSIGVAGRSQDDAMVDYFFQRQHGEQLGGGGSGGGGYNNSKHRWPXGDNIHAEHQVRSMDELNHDFQALALEGRAMGEQLLPGKKFWEXDESSKDGPKGIFLGDQWRDSAWGXSDHSVSQPIMVQRRPGQSFHVNSEVNSVLSPRSESGGLGVSMVEYVLSSSPGDSCLRKGGFGPRDADSDENDKGEKKNKGXFDGDKLGDLKEEGDVMDKXNGLPVQNGIDADVKDFSRXPGNCQNSANEVDLLGPNQNGSEGLAQLXSXNGAKPVEDFSNMESQSVPLDPMEHVGMEPLQFDYSGXQVPVDSAAAXVGLFDYNSQQQLFQRPNALAVQQLXAAQQQQYALAAAHQPHIGLAPAAFVPNPYIISAAPPGXDPYXAGLAAAAXLGPAVVPHQYYGVXPWGVYPASLFQQQAAAAAAAXNSANQQXXPQAQQGQQQVLRGGASQRPLXPNQNQQGQQXDPLVAAAAVNSALAFGQGLAAGMPGYPVLAPAAYYDQXGALVVNAGARNGLGAPVRLVAPAPVIISSSAAQAAVAAAAASANGAAGGLAGXXNGPFRPLGXQQPQPQPQQQPNNNLASSSFYGNNSLNSNSQSSSLFSQGSAQPANXSLGFGSSSSLGAXLGSALGGFGXAVANSNXGSGSRRDSLXGSSDLYKRXSSSLXPIGHSFYNGLSFSSSPGPVGMPLPSQGPGHSQXPPPSLSSHGSSSSLNLGGLXNGSGRYISAAPGAEAKYRSASSASSLFSPSSXLFSSSRLRYGMSDVMPSGRSRLLEDFRNNRYPNLQLREIAGHIMEFSQDQHGSRFIQLKLERAXPAERQLVFNEILQAAYQLMVDVFGNYVIQKFFEFGSLEQKLALAERIRGHVLSLALQMYGCRVIQKALEFIPSDQQNEMVRELDGHVLKCVKDQNGNHVVQKCIECVQPQSLQFIIDAFKGQVFALSXHPYGCRVIQRILEHCLPDQXLPILEELHQHXEQLVQDQYGNYVIQHVLEHGRPEDKSKIVAEIRGNVLVLSQHKFASNVVEKCVXHASRXERAVLIDEVCXMNDGPHSALYXMMKDQYANYVVQKMIDVAEPGQRKIVMHKIRPHIAXLRKYXYGKHILAKLEKYYMKNGVDLGPICGPPNGII

SEQ ID NO: 22214 - protein, 1188 aa, Homo sapiens
  MOD_RES (39)..(39): Selenocysteine
  MOD_RES (42)..(42): Selenocysteine
  MOD_RES (60)..(60): Selenocysteine
  MOD_RES (112)..(112): Selenocysteine
  MOD_RES (155)..(155): Selenocysteine
  MOD_RES (179)..(179): Selenocysteine
  MOD_RES (260)..(260): Selenocysteine
  MOD_RES (279)..(279): Selenocysteine
  MOD_RES (298)..(298): Selenocysteine
  MOD_RES (326)..(326): Selenocysteine
  MOD_RES (328)..(328): Selenocysteine
  MOD_RES (365)..(365): Selenocysteine
  MOD_RES (375)..(375): Selenocysteine
  MOD_RES (400)..(400): Selenocysteine
  MOD_RES (438)..(438): Selenocysteine
  MOD_RES (442)..(442): Selenocysteine
  MOD_RES (450)..(450): Selenocysteine
  MOD_RES (464)..(464): Selenocysteine
  MOD_RES (485)..(485): Selenocysteine
  MOD_RES (492)..(493): Selenocysteine
  MOD_RES (514)..(514): Selenocysteine
  MOD_RES (524)..(524): Selenocysteine
  MOD_RES (562)..(562): Selenocysteine
  MOD_RES (615)..(616): Selenocysteine
  MOD_RES (625)..(625): Selenocysteine
  MOD_RES (671)..(671): Selenocysteine
  MOD_RES (684)..(684): Selenocysteine
  MOD_RES (694)..(694): Selenocysteine
  MOD_RES (701)..(701): Selenocysteine
  MOD_RES (711)..(711): Selenocysteine
  MOD_RES (720)..(720): Selenocysteine
  MOD_RES (725)..(725): Selenocysteine
  MOD_RES (758)..(758): Selenocysteine
  MOD_RES (778)..(778): Selenocysteine
  MOD_RES (810)..(810): Selenocysteine
  MOD_RES (874)..(874): Selenocysteine
  MOD_RES (1004)..(1004): Selenocysteine
  MOD_RES (1024)..(1024): Selenocysteine
  MOD_RES (1035)..(1035): Selenocysteine
  MOD_RES (1089)..(1089): Selenocysteine
  MOD_RES (1094)..(1094): Selenocysteine
  MOD_RES (1105)..(1105): Selenocysteine
  MOD_RES (1116)..(1116): Selenocysteine
  MOD_RES (1152)..(1152): Selenocysteine
  MOD_RES (1157)..(1157): Selenocysteine
MSVACVLKRKAVLWQDSFSPHLKHHPQEPANPNMPVVLXSGXGSQAQPQPAANQALAAGXHSSPVPGSIGVAGRSQDDAMVDYFFQRQHGEQLGGGGSGGGGYNNSKHRWPXGDNIHAEHQVRSMDELNHDFQALALEGRAMGEQLLPGKKFWEXDESSKDGPKGIFLGDQWRDSAWGXSDHSVSQPIMVQRRPGQSFHVNSEVNSVLSPRSESGGLGVSMVEYVLSSSPGDSCLRKGGFGPRDADSDENDKGEKKNKGXFDGDKLGDLKEEGDVMDKXNGLPVQNGIDADVKDFSRXPGNCQNSANEVDLLGPNQNGSEGLAQLXSXNGAKPVEDFSNMESQSVPLDPMEHVGMEPLQFDYSGXQVPVDSAAAXVGLFDYNSQQQLFQRPNALAVQQLXAAQQQQYALAAAHQPHIGLAPAAFVPNPYIISAAPPGXDPYXAGLAAAAXLGPAVVPHQYYGVXPWGVYPASLFQQQAAAAAAAXNSANQQXXPQAQQGQQQVLRGGASQRPLXPNQNQQGQQXDPLVAAAAVNSALAFGQGLAAGMPGYPVLAPAAYYDQXGALVVNAGARNGLGAPVRLVAPAPVIISSSAAQAAVAAAAASANGAAGGLAGXXNGPFRPLGXQQPQPQPQQQPNNNLASSSFYGNNSLNSNSQSSSLFSQGSAQPANXSLGFGSSSSLGAXLGSALGGFGXAVANSNXGSGSRRDSLXGSSDLYKRXSSSLXPIGHSFYNGLSFSSSPGPVGMPLPSQGPGHSQXPPPSLSSHGSSSSLNLGGLXNGSGRYISAAPGAEAKYRSASSASSLFSPSSXLFSSSRLRYGMSDVMPSGRSRLLEDFRNNRYPNLQLREIAGHIMEFSQDQHGSRFIQLKLERAXPAERQLVFNEILQAAYQLMVDVFGNYVIQKFFEFGSLEQKLALAERIRGHVLSLALQMYGCRVIQKALEFIPSDQQVINEMVRELDGHVLKCVKDQNGNHVVQKCIECVQPQSLQFIIDAFKGQVFALSXHPYGCRVIQRILEHCLPDQXLPILEELHQHXEQLVQDQYGNYVIQHVLEHGRPEDKSKIVAEIRGNVLVLSQHKFASNVVEKCVXHASRXERAVLIDEVCXMNDGPHSALYXMMKDQYANYVVQKMIDVAEPGQRKIVMHKIRPHIAXLRKYXYGKHILAKLEKYYMKNGVDLGPICGPPNGII

SEQ ID NO: 22215 - protein, 1189 aa, Homo sapiens
  MOD_RES (39)..(39): Selenocysteine
  MOD_RES (42)..(42): Selenocysteine
  MOD_RES (60)..(60): Selenocysteine
  MOD_RES (112)..(112): Selenocysteine
  MOD_RES (155)..(155): Selenocysteine
  MOD_RES (179)..(179): Selenocysteine
  MOD_RES (260)..(260): Selenocysteine
  MOD_RES (279)..(279): Selenocysteine
  MOD_RES (298)..(298): Selenocysteine
  MOD_RES (326)..(326): Selenocysteine
  MOD_RES (328)..(328): Selenocysteine
  MOD_RES (365)..(365): Selenocysteine
  MOD_RES (375)..(375): Selenocysteine
  MOD_RES (400)..(400): Selenocysteine
  MOD_RES (439)..(439): Selenocysteine
  MOD_RES (443)..(443): Selenocysteine
  MOD_RES (451)..(451): Selenocysteine
  MOD_RES (465)..(465): Selenocysteine
  MOD_RES (486)..(486): Selenocysteine
  MOD_RES (493)..(494): Selenocysteine
  MOD_RES (515)..(515): Selenocysteine
  MOD_RES (525)..(525): Selenocysteine
  MOD_RES (563)..(563): Selenocysteine
  MOD_RES (616)..(617): Selenocysteine
  MOD_RES (626)..(626): Selenocysteine
  MOD_RES (672)..(672): Selenocysteine
  MOD_RES (685)..(685): Selenocysteine
  MOD_RES (695)..(695): Selenocysteine
  MOD_RES (702)..(702): Selenocysteine
  MOD_RES (712)..(712): Selenocysteine
  MOD_RES (721)..(721): Selenocysteine
  MOD_RES (726)..(726): Selenocysteine
  MOD_RES (759)..(759): Selenocysteine
  MOD_RES (779)..(779): Selenocysteine
  MOD_RES (811)..(811): Selenocysteine
  MOD_RES (875)..(875): Selenocysteine
  MOD_RES (1005)..(1005): Selenocysteine
  MOD_RES (1025)..(1025): Selenocysteine
  MOD_RES (1036)..(1036): Selenocysteine
  MOD_RES (1090)..(1090): Selenocysteine
  MOD_RES (1095)..(1095): Selenocysteine
  MOD_RES (1106)..(1106): Selenocysteine
  MOD_RES (1117)..(1117): Selenocysteine
  MOD_RES (1153)..(1153): Selenocysteine
  MOD_RES (1158)..(1158): Selenocysteine
MSVACVLKRKAVLWQDSFSPHLKHHPQEPANPNMPVVLXSGXGSQAQPQPAANQALAAGXHSSPVPGSIGVAGRSQDDAMVDYFFQRQHGEQLGGGGSGGGGYNNSKHRWPXGDNIHAEHQVRSMDELNHDFQALALEGRAMGEQLLPGKKFWEXDESSKDGPKGIFLGDQWRDSAWGXSDHSVSQPIMVQRRPGQSFHVNSEVNSVLSPRSESGGLGVSMVEYVLSSSPGDSCLRKGGFGPRDADSDENDKGEKKNKGXFDGDKLGDLKEEGDVMDKXNGLPVQNGIDADVKDFSRXPGNCQNSANEVDLLGPNQNGSEGLAQLXSXNGAKPVEDFSNMESQSVPLDPMEHVGMEPLQFDYSGXQVPVDSAAAXVGLFDYNSQQQLFQRPNALAVQQLXAAQQQQYALAAAHQPHIAGLAPAAFVPNPYIISAAPPGXDPYXAGLAAAAXLGPAVVPHQYYGVXPWGVYPASLFQQQAAAAAAAXNSANQQXXPQAQQGQQQVLRGGASQRPLXPNQNQQGQQXDPLVAAAAVNSALAFGQGLAAGMPGYPVLAPAAYYDQXGALVVNAGARNGLGAPVRLVAPAPVIISSSAAQAAVAAAAASANGAAGGLAGXXNGPFRPLGXQQPQPQPQQQPNNNLASSSFYGNNSLNSNSQSSSLFSQGSAQPANXSLGFGSSSSLGAXLGSALGGFGXAVANSNXGSGSRRDSLXGSSDLYKRXSSSLXPIGHSFYNGLSFSSSPGPVGMPLPSQGPGHSQXPPPSLSSHGSSSSLNLGGLXNGSGRYISAAPGAEAKYRSASSASSLFSPSSXLFSSSRLRYGMSDVMPSGRSRLLEDFRNNRYPNLQLREIAGHIMEFSQDQHGSRFIQLKLERAXPAERQLVFNEILQAAYQLMVDVFGNYVIQKFFEFGSLEQKLALAERIRGHVLSLALQMYGCRVIQKALEFIPSDQQVINEMVRELDGHVLKCVKDQNGNHVVQKCIECVQPQSLQFIIDAFKGQVFALSXHPYGCRVIQRILEHCLPDQXLPILEELHQHXEQLVQDQYGNYVIQHVLEHGRPEDKSKIVAEIRGNVLVLSQHKFASNVVEKCVXHASRXERAVLIDEVCXMNDGPHSALYXMMKDQYANYVVQKMIDVAEPGQRKIVMHKIRPHIAXLRKYXYGKHILAKLEKYYMKNGVDLGPICGPPNGII

SEQ ID NO: 22216 - protein, 90 aa, Homo sapiens
  MOD_RES (3)..(3): Selenocysteine
  MOD_RES (12)..(12): Selenocysteine
  MOD_RES (17)..(17): Selenocysteine
  MOD_RES (50)..(50): Selenocysteine
  MOD_RES (76)..(77): Selenocysteine
  MOD_RES (79)..(79): Selenocysteine
SLXGSSDLYKRXSSSLXPIGHSFYNGLSFSSSPGPVGMPLPSQGPGHSQXPPPSLSSHGSSSSLNLGAGFWKIFEXXGXPIYNCGRLLDI

SEQ ID NO: 22217 - protein, 217 aa, Homo sapiens
  MOD_RES (1)..(1): Any amino acid
  MOD_RES (21)..(21): Selenocysteine
  MOD_RES (103)..(103): Selenocysteine
  MOD_RES (123)..(123): Selenocysteine
  MOD_RES (134)..(134): Selenocysteine
  MOD_RES (188)..(188): Selenocysteine
  MOD_RES (193)..(193): Selenocysteine
  MOD_RES (204)..(204): Selenocysteine
  MOD_RES (215)..(215): Selenocysteine
XEFSQDQHGSRFIQLKLERAXPAERQLVFNEILQAAYQLMVDVFGNYVIQKFFEFGSLEQKLALAERIRGHVLSLALQMYGCRVIQKALEFIPSDQQVFALSXHPYGCRVIQRILEHCLPDQXLPILEELHQHXEQLVQDQYGNYVIQHVLEHGRPEDKSKIVAEIRGNVLVLSQHKFASNVVEKCVXHASRXERAVLIDEVCXMNDGPHSALYXMM

SEQ ID NO: 22218 - protein, 900 aa, Homo sapiens
  MOD_RES (1)..(1): Any amino acid
  MOD_RES (5)..(5): Selenocysteine
  MOD_RES (33)..(33): Selenocysteine
  MOD_RES (35)..(35): Selenocysteine
  MOD_RES (72)..(72): Selenocysteine
  MOD_RES (82)..(82): Selenocysteine
  MOD_RES (107)..(107): Selenocysteine
  MOD_RES (150)..(150): Selenocysteine
  MOD_RES (154)..(154): Selenocysteine
  MOD_RES (162)..(162): Selenocysteine
  MOD_RES (176)..(176): Selenocysteine
  MOD_RES (197)..(197): Selenocysteine
  MOD_RES (204)..(205): Selenocysteine
  MOD_RES (226)..(226): Selenocysteine
  MOD_RES (236)..(236): Selenocysteine
  MOD_RES (274)..(274): Selenocysteine
  MOD_RES (327)..(328): Selenocysteine
  MOD_RES (337)..(337): Selenocysteine
  MOD_RES (383)..(383): Selenocysteine
  MOD_RES (396)..(396): Selenocysteine
  MOD_RES (406)..(406): Selenocysteine
  MOD_RES (413)..(413): Selenocysteine
  MOD_RES (423)..(423): Selenocysteine
  MOD_RES (432)..(432): Selenocysteine
  MOD_RES (437)..(437): Selenocysteine
  MOD_RES (470)..(470): Selenocysteine
  MOD_RES (490)..(490): Selenocysteine
  MOD_RES (522)..(522): Selenocysteine
  MOD_RES (586)..(586): Selenocysteine
  MOD_RES (716)..(716): Selenocysteine
  MOD_RES (736)..(736): Selenocysteine
  MOD_RES (747)..(747): Selenocysteine
  MOD_RES (801)..(801): Selenocysteine
  MOD_RES (806)..(806): Selenocysteine
  MOD_RES (817)..(817): Selenocysteine
  MOD_RES (828)..(828): Selenocysteine
  MOD_RES (864)..(864): Selenocysteine
  MOD_RES (869)..(869): Selenocysteine
XFSRXPGNCQNSANEVDLLGPNQNGSEGLAQLXSXNGAKPVEDFSNMESQSVPLDPMEHVGMEPLQFDYSGXQVPVDSAAAXVGLFDYNSQQQLFQRPNALAVQQLXAAQQQQYALAAAHQPHIGMFSAGLAPAAFVPNPYIISAAPPGXDPYXAGLAAAAXLGPAVVPHQYYGVXPWGVYPASLFQQQAAAAAAAXNSANQQXXPQAQQGQQQVLRGGASQRPLXPNQNQQGQQXDPLVAAAAVNSALAFGQGLAAGMPGYPVLAPAAYYDQXGALVVNAGARNGLGAPVRLVAPAPVIISSSAAQAAVAAAAASANGAAGGLAGXXNGPFRPLGXQQPQPQPQQQPNNNLASSSFYGNNSLNSNSQSSSLFSQGSAQPANXSLGFGSSSSLGAXLGSALGGFGXAVANSNXGSGSRRDSLXGSSDLYKRXSSSLXPIGHSFYNGLSFSSSPGPVGMPLPSQGPGHSQXPPPSLSSHGSSSSLNLGGLXNGSGRYISAAPGAEAKYRSASSASSLFSPSSXLFSSSRLRYGMSDVMPSGRSRLLEDFRNNRYPNLQLREIAGHIMEFSQDQHGSRFIQLKLERAXPAERQLVFNEILQAAYQLMVDVFGNYVIQKFFEFGSLEQKLALAERIRGHVLSLALQMYGCRVIQKALEFIPSDQQVINEMVRELDGHVLKCVKDQNGNHVVQKCIECVQPQSLQFIIDAFKGQVFALSXHPYGCRVIQRILEHCLPDQXLPILEELHQHXEQLVQDQYGNYVIQHVLEHGRPEDKSKIVAEIRGNVLVLSQHKFASNVVEKCVXHASRXERAVLIDEVCXMNDGPHSALYXMMKDQYANYVVQKMIDVAEPGQRKIVMHKIRPHIAXLRKYXYGKHILAKLEKYYMKNGVDLGPICGPPNGII

SEQ ID NO: 22219 - protein, 265 aa, Homo sapiens
  MOD_RES (1)..(1): Any amino acid
  MOD_RES (20)..(20): Selenocysteine
  MOD_RES (48)..(48): Selenocysteine
  MOD_RES (50)..(50): Selenocysteine
  MOD_RES (87)..(87): Selenocysteine
  MOD_RES (97)..(97): Selenocysteine
  MOD_RES (122)..(122): Selenocysteine
  MOD_RES (152)..(152): Selenocysteine
  MOD_RES (173)..(173): Selenocysteine
  MOD_RES (180)..(181): Selenocysteine
  MOD_RES (202)..(202): Selenocysteine
  MOD_RES (212)..(212): Selenocysteine
  MOD_RES (250)..(250): Selenocysteine
XNGLPVQNGIDADVKDFSRXPGNCQNSANEVDLLGPNQNGSEGLAQLXSXNGAKPVEDFSNMESQSVPLDPMEHVGMEPLQFDYSGXQVPVDSAAAXVGLFDYNSQQQLFQRPNALAVQQLXAAQQQQYALAAAHQPHIGPAVVPHQYYGVXPWGVYPASLFQQQAAAAAAAXNSANQQXXPQAQQGQQQVLRGGASQRPLXPNQNQQGQQXDPLVAAAAVNSALAFGQGLAAGMPGYPVLAPAAYYDQXGALVVNAGARNGLGA

SEQ ID NO: 22220 - protein, 1125 aa, Homo sapiens
  MOD_RES (1)..(1): Any amino acid
  MOD_RES (56)..(56): Selenocysteine
  MOD_RES (59)..(59): Selenocysteine
  MOD_RES (77)..(77): Selenocysteine
  MOD_RES (129)..(129): Selenocysteine
  MOD_RES (172)..(172): Selenocysteine
  MOD_RES (196)..(196): Selenocysteine
  MOD_RES (277)..(277): Selenocysteine
  MOD_RES (296)..(296): Selenocysteine
  MOD_RES (315)..(315): Selenocysteine
  MOD_RES (343)..(343): Selenocysteine
  MOD_RES (345)..(345): Selenocysteine
  MOD_RES (382)..(382): Selenocysteine
  MOD_RES (392)..(392): Selenocysteine
  MOD_RES (417)..(417): Selenocysteine
  MOD_RES (456)..(456): Selenocysteine
  MOD_RES (460)..(460): Selenocysteine
  MOD_RES (468)..(468): Selenocysteine
  MOD_RES (482)..(482): Selenocysteine
  MOD_RES (503)..(503): Selenocysteine
  MOD_RES (510)..(511): Selenocysteine
  MOD_RES (532)..(532): Selenocysteine
  MOD_RES (542)..(542): Selenocysteine
  MOD_RES (580)..(580): Selenocysteine
  MOD_RES (633)..(634): Selenocysteine
  MOD_RES (643)..(643): Selenocysteine
  MOD_RES (689)..(689): Selenocysteine
  MOD_RES (702)..(702): Selenocysteine
  MOD_RES (712)..(712): Selenocysteine
  MOD_RES (717)..(717): Selenocysteine
  MOD_RES (749)..(749): Selenocysteine
  MOD_RES (813)..(813): Selenocysteine
  MOD_RES (941)..(941): Selenocysteine
  MOD_RES (961)..(961): Selenocysteine
  MOD_RES (972)..(972): Selenocysteine
  MOD_RES (1026)..(1026): Selenocysteine
  MOD_RES (1031)..(1031): Selenocysteine
  MOD_RES (1042)..(1042): Selenocysteine
  MOD_RES (1053)..(1053): Selenocysteine
  MOD_RES (1089)..(1089): Selenocysteine
  MOD_RES (1094)..(1094): Selenocysteine
XQSPVGRHVVGVKGVGGMSVACVLKRKAVLWQDSFSPHLKHHPQEPANPNMPVVLXSGXGSQAQPQPAANQALAAGXHSSPVPGSIGVAGRSQDDAMVDYFFQRQHGEQLGGGGSGGGGYNNSKHRWPXGDNIHAEHQVRSMDELNHDFQALALEGRAMGEQLLPGKKFWEXDESSKDGPKGIFLGDQWRDSAWGXSDHSVSQPIMVQRRPGQSFHVNSEVNSVLSPRSESGGLGVSMVEYVLSSSPGDSCLRKGGFGPRDADSDENDKGEKKNKGXFDGDKLGDLKEEGDVMDKXNGLPVQNGIDADVKDFSRXPGNCQNSANEVDLLGPNQNGSEGLAQLXSXNGAKPVEDFSNMESQSVPLDPMEHVGMEPLQFDYSGXQVPVDSAAAXVGLFDYNSQQQLFQRPNALAVQQLXAAQQQQYALAAAHQPHIAGLAPAAFVPNPYIISAAPPGXDPYXAGLAAAAXLGPAVVPHQYYGVXPWGVYPASLFQQQAAAAAAAXNSANQQXXPQAQQGQQQVLRGGASQRPLXPNQNQQGQQXDPLVAAAAVNSALAFGQGLAAGMPGYPVLAPAAYYDQXGALVVNAGARNGLGAPVRLVAPAPVIISSSAAQAAVAAAAASANGAAGGLAGXXNGPFRPLGXQQPQPQPQQQPNNNLASSSFYGNNSLNSNSQSSSLFSQGSAQPANXSLGFGSSSSLGAXLGSALGGFGXAGGLXNGSGRYISAAPGAEAKYRSASSASSLFSPSSXLFSSSRLRYGMSDVMPSGRSRLLEDFRNNRYPNLQLREIAGHIMEFSQDQHGSRFIQLKLERAXPAERQLVFNEILQAAYQLMVDVFGNYVIQKFFEFGSLEQKLALAERIRGHVLSLALQMYGCRVIQKALEFIPSDQQNEMVRELDGHVLKCVKDQNGNHVVQKCIECVQPQSLQFIIDAFKGQVFALSXHPYGCRVIQRILEHCLPDQXLPILEELHQHXEQLVQDQYGNYVIQHVLEHGRPEDKSKIVAEIRGNVLVLSQHKFASNVVEKCVXHASRXERAVLIDEVCXMNDGPHSALYXMMKDQYANYVVQKMIDVAEPGQRKIVMHKIRPHIAXLRKYXYGKHILAKLEKYYMKNGVDLGPICGPPNGII

SEQ ID NO: 22221 - protein, 34 aa, Homo sapiens
  MOD_RES (21)..(21): Selenocysteine
  MOD_RES (31)..(31): Selenocysteine
MNHDFQALALESRGMGELLPXKKFWEPDDSXKDG

SEQ ID NO: 22222 - protein, 293 aa, Homo sapiens
  MOD_RES (21)..(21): Selenocysteine
  MOD_RES (31)..(31): Selenocysteine
  MOD_RES (48)..(48): Selenocysteine
  MOD_RES (118)..(118): Selenocysteine
  MOD_RES (123)..(123): Selenocysteine
  MOD_RES (175)..(175): Selenocysteine
  MOD_RES (184)..(184): Selenocysteine
  MOD_RES (194)..(194): Selenocysteine
  MOD_RES (207)..(207): Selenocysteine
  MOD_RES (221)..(221): Selenocysteine
  MOD_RES (252)..(252): Selenocysteine
  MOD_RES (268)..(268): Selenocysteine
  MOD_RES (272)..(272): Selenocysteine
  MOD_RES (277)..(277): Selenocysteine
MNHDFQALALESRGMGELLPXKKFWEPDDSXKDGQKGIFLGDDEWREXAWGASHHSMSQPIMVQRRSGQGFHGNSEVNAILSPRSESGGLGVSMVEYVLSSSPADKLDSRFRKGNFGXRDAEXDGPEKGDQKGKASPFEEDQNRDLKQGDDDDSKINGRGLPNGMDADCKDFNRXPGSRQASPXEVVERLGPNXNPSEGLGPLPNPXANKPLVEEFSNPEXQNLDAMEQVGLESLQFDYPGNQVPMDSSGAXVGLFDYNSQQQLFQRXNALXVQQLXAAQQQQYALAAAQQPH

SEQ ID NO: 22223 - protein, 1064 aa, Homo sapiens
  MOD_RES (21)..(21): Selenocysteine
  MOD_RES (31)..(31): Selenocysteine
  MOD_RES (48)..(48): Selenocysteine
  MOD_RES (118)..(118): Selenocysteine
  MOD_RES (123)..(123): Selenocysteine
  MOD_RES (175)..(175): Selenocysteine
  MOD_RES (184)..(184): Selenocysteine
  MOD_RES (194)..(194): Selenocysteine
  MOD_RES (207)..(207): Selenocysteine
  MOD_RES (221)..(221): Selenocysteine
  MOD_RES (252)..(252): Selenocysteine
  MOD_RES (268)..(268): Selenocysteine
  MOD_RES (272)..(272): Selenocysteine
  MOD_RES (277)..(277): Selenocysteine
  MOD_RES (321)..(321): Selenocysteine
  MOD_RES (325)..(325): Selenocysteine
  MOD_RES (334)..(334): Selenocysteine
  MOD_RES (369)..(369): Selenocysteine
  MOD_RES (396)..(396): Selenocysteine
  MOD_RES (418)..(418): Selenocysteine
  MOD_RES (427)..(427): Selenocysteine
  MOD_RES (438)..(438): Selenocysteine
  MOD_RES (444)..(444): Selenocysteine
  MOD_RES (455)..(455): Selenocysteine
  MOD_RES (467)..(467): Selenocysteine
  MOD_RES (487)..(487): Selenocysteine
  MOD_RES (492)..(492): Selenocysteine
  MOD_RES (495)..(495): Selenocysteine
  MOD_RES (504)..(504): Selenocysteine
  MOD_RES (516)..(516): Selenocysteine
  MOD_RES (530)..(530): Selenocysteine
  MOD_RES (549)..(549): Selenocysteine
  MOD_RES (583)..(583): Selenocysteine
  MOD_RES (590)..(590): Selenocysteine
  MOD_RES (630)..(630): Selenocysteine
  MOD_RES (636)..(636): Selenocysteine
  MOD_RES (656)..(656): Selenocysteine
  MOD_RES (679)..(679): Selenocysteine
  MOD_RES (752)..(752): Selenocysteine
  MOD_RES (772)..(772): Selenocysteine
  MOD_RES (797)..(797): Selenocysteine
  MOD_RES (880)..(880): Selenocysteine
  MOD_RES (896)..(896): Selenocysteine
  MOD_RES (900)..(900): Selenocysteine
  MOD_RES (911)..(911): Selenocysteine
  MOD_RES (965)..(965): Selenocysteine
  MOD_RES (992)..(992): Selenocysteine
  MOD_RES (1027)..(1028): Selenocysteine
  MOD_RES (1033)..(1033): Selenocysteine
MNHDFQALALESRGMGELLPXKKFWEPDDSXKDGQKGIFLGDDEWREXAWGASHHSMSQPIMVQRRSGQGFHGNSEVNAILSPRSESGGLGVSMVEYVLSSSPADKLDSRFRKGNFGXRDAEXDGPEKGDQKGKASPFEEDQNRDLKQGDDDDSKINGRGLPNGMDADCKDFNRXPGSRQASPXEVVERLGPNXNPSEGLGPLPNPXANKPLVEEFSNPEXQNLDAMEQVGLESLQFDYPGNQVPMDSSGAXVGLFDYNSQQQLFQRXNALXVQQLXAAQQQQYALAAAQQPHIAGVFSAGLAPAAFVPNPYIISAAPPGXDPYXAAGLAAAAXLAGPAVVPPQYYGVPWGVYPANLFQQQAAAAANNXASQQAASQAQPGQQQVLRAGAGQRPLXPNQGQQGQQAESLAAAAAANPXLAFGQGLAXGMPGYQVLAPXAYYDQXGALVVGPGARXGLGAPVRLMAPXPVLISSAAAQAAAAAAAGGXASSLXGSXNGLFRPIGXQPPQQQQQQPSXNLQSNSFYGSSSLXNSSQSSSLFSHGPGQPGSXSLGFGSGNSLGAAIGSALSGFGSSVGSSASSSAXRRESLSXSSDLYKRSSSSLAPIGQPFYNSLGFSSSPSPIGMPLPSQXPGHSLXPPPSLSSHGSSSSLHLGGLXNGSGRYISAAPGAEAKYRSASSXSSLFSSSSQLFPPSRLRYNRSDIMPSGRSRLLEDFRNNRFPNLQLRDLIGHIVEFSQDQHGSRFIQQKLERAXPAERQMVFNEILQAAYQLMXDVFGNYVIQKFFEFGSLDQKLALAXRIRGHVLPLALQMYGCRVIQKALESISSDQQSEMVKELDGHVLKCVKDQNGNHVVQKCIECVQPQSLQFIIDAFKGQVFVLSXHPYGCRVIQRILEHCXAEQXLPILEELHQHXEQLVQDQYGNYVIQHVLEHGRPEDKSKIVSEIRGKVLALSQHKFASNVVEKCVXHASRAERALLIDEVCCQNDGPHSALYXMMKDQYANYVVQKMIDMAEPAQRKIIMHKIRPHIXXLRKYXYGKHILAKLEKYYLKNSPDLGPIGGPPNGML

SEQ ID NO: 22224 - protein, 35 aa, Homo sapiens
MNHDFQALALESRGMGEMQKRVQVSPLGHKRAPCS

SEQ ID NO: 22225 - protein, 40 aa, Homo sapiens
  MOD_RES (18)..(18): Selenocysteine
  MOD_RES (38)..(38): Selenocysteine
MNHDFQALALESRGMGEXIQCPSLLWYREDLDRVFMEXVK

SEQ ID NO: 22226 - protein, 929 aa, Homo sapiens
  MOD_RES (62)..(62): Selenocysteine
  MOD_RES (67)..(67): Selenocysteine
  MOD_RES (119)..(119): Selenocysteine
  MOD_RES (128)..(128): Selenocysteine
  MOD_RES (138)..(138): Selenocysteine
  MOD_RES (151)..(151): Selenocysteine
  MOD_RES (165)..(165): Selenocysteine
  MOD_RES (196)..(196): Selenocysteine
  MOD_RES (212)..(212): Selenocysteine
  MOD_RES (216)..(216): Selenocysteine
  MOD_RES (221)..(221): Selenocysteine
  MOD_RES (265)..(265): Selenocysteine
  MOD_RES (269)..(269): Selenocysteine
  MOD_RES (278)..(278): Selenocysteine
  MOD_RES (313)..(313): Selenocysteine
  MOD_RES (340)..(340): Selenocysteine
  MOD_RES (362)..(362): Selenocysteine
  MOD_RES (371)..(371): Selenocysteine
  MOD_RES (382)..(382): Selenocysteine
  MOD_RES (388)..(388): Selenocysteine
  MOD_RES (399)..(399): Selenocysteine
  MOD_RES (411)..(411): Selenocysteine
  MOD_RES (431)..(431): Selenocysteine
  MOD_RES (436)..(436): Selenocysteine
  MOD_RES (439)..(439): Selenocysteine
  MOD_RES (448)..(448): Selenocysteine
  MOD_RES (460)..(460): Selenocysteine
  MOD_RES (474)..(474): Selenocysteine
  MOD_RES (493)..(493): Selenocysteine
  MOD_RES (521)..(521): Selenocysteine
  MOD_RES (544)..(544): Selenocysteine
  MOD_RES (617)..(617): Selenocysteine
  MOD_RES (637)..(637): Selenocysteine
  MOD_RES (662)..(662): Selenocysteine
  MOD_RES (745)..(745): Selenocysteine
  MOD_RES (761)..(761): Selenocysteine
  MOD_RES (765)..(765): Selenocysteine
  MOD_RES (776)..(776): Selenocysteine
  MOD_RES (830)..(830): Selenocysteine
  MOD_RES (857)..(857): Selenocysteine
  MOD_RES (892)..(893): Selenocysteine
  MOD_RES (898)..(898): Selenocysteine
MSQPIMVQRRSGQGFHGNSEVNAILSPRSESGGLGVSMVEYVLSSSPADKLDSRFRKGNFGXRDAEXDGPEKGDQKGKASPFEEDQNRDLKQGDDDDSKINGRGLPNGMDADCKDFNRXPGSRQASPXEVVERLGPNXNPSEGLGPLPNPXANKPLVEEFSNPEXQNLDAMEQVGLESLQFDYPGNQVPMDSSGAXVGLFDYNSQQQLFQRXNALXVQQLXAAQQQQYALAAAQQPHIAGVFSAGLAPAAFVPNPYIISAAPPGXDPYXAAGLAAAAXLAGPAVVPPQYYGVPWGVYPANLFQQQAAAAANNXASQQAASQAQPGQQQVLRAGAGQRPLXPNQGQQGQQAESLAAAAAANPXLAFGQGLAXGMPGYQVLAPXAYYDQXGALVVGPGARXGLGAPVRLMAPXPVLISSAAAQAAAAAAAGGXASSLXGSXNGLFRPIGXQPPQQQQQQPSXNLQSNSFYGSSSLXNSSQSSSLFSHGPGQPGSXSLGFGSGNSLGAAIGSALSGFGSSGGLXNGSGRYISAAPGAEAKYRSASSXSSLFSSSSQLFPPSRLRYNRSDIMPSGRSRLLEDFRNNRFPNLQLRDLIGHIVEFSQDQHGSRFIQQKLERAXPAERQMVFNEILQAAYQLMXDVFGNYVIQKFFEFGSLDQKLALAXRIRGHVLPLALQMYGCRVIQKALESISSDQQSEMVKELDGHVLKCVKDQNGNHVVQKCIECVQPQSLQFIIDAFKGQVFVLSXHPYGCRVIQRILEHCXAEQXLPILEELHQHXEQLVQDQYGNYVIQHVLEHGRPEDKSKIVSEIRGKVLALSQHKFASNVVEKCVXHASRAERALLIDEVCCQNDGPHSALYXMMKDQYANYVVQKMIDMAEPAQRKIIMHKIRPHIXXLRKYXYGKHILAKLEKYYLKNSPDLGPIGGPPNGML

SEQ ID NO: 22227 - protein, 1008 aa, Homo sapiens
  MOD_RES (62)..(62): Selenocysteine
  MOD_RES (67)..(67): Selenocysteine
  MOD_RES (119)..(119): Selenocysteine
  MOD_RES (128)..(128): Selenocysteine
  MOD_RES (138)..(138): Selenocysteine
  MOD_RES (151)..(151): Selenocysteine
  MOD_RES (165)..(165): Selenocysteine
  MOD_RES (196)..(196): Selenocysteine
  MOD_RES (212)..(212): Selenocysteine
  MOD_RES (216)..(216): Selenocysteine
  MOD_RES (221)..(221): Selenocysteine
  MOD_RES (265)..(265): Selenocysteine
  MOD_RES (269)..(269): Selenocysteine
  MOD_RES (278)..(278): Selenocysteine
  MOD_RES (313)..(313): Selenocysteine
  MOD_RES (340)..(340): Selenocysteine
  MOD_RES (362)..(362): Selenocysteine
  MOD_RES (371)..(371): Selenocysteine
  MOD_RES (382)..(382): Selenocysteine
  MOD_RES (388)..(388): Selenocysteine
  MOD_RES (399)..(399): Selenocysteine
  MOD_RES (411)..(411): Selenocysteine
  MOD_RES (431)..(431): Selenocysteine
  MOD_RES (436)..(436): Selenocysteine
  MOD_RES (439)..(439): Selenocysteine
  MOD_RES (448)..(448): Selenocysteine
  MOD_RES (460)..(460): Selenocysteine
  MOD_RES (474)..(474): Selenocysteine
  MOD_RES (493)..(493): Selenocysteine
  MOD_RES (527)..(527): Selenocysteine
  MOD_RES (534)..(534): Selenocysteine
  MOD_RES (574)..(574): Selenocysteine
  MOD_RES (580)..(580): Selenocysteine
  MOD_RES (600)..(600): Selenocysteine
  MOD_RES (623)..(623): Selenocysteine
  MOD_RES (696)..(696): Selenocysteine
  MOD_RES (716)..(716): Selenocysteine
  MOD_RES (741)..(741): Selenocysteine
  MOD_RES (824)..(824): Selenocysteine
  MOD_RES (840)..(840): Selenocysteine
  MOD_RES (844)..(844): Selenocysteine
  MOD_RES (855)..(855): Selenocysteine
  MOD_RES (909)..(909): Selenocysteine
  MOD_RES (936)..(936): Selenocysteine
  MOD_RES (971)..(972): Selenocysteine
  MOD_RES (977)..(977): Selenocysteine
MSQPIMVQRRSGQGFHGNSEVNAILSPRSESGGLGVSMVEYVLSSSPADKLDSRFRKGNFGXRDAEXDGPEKGDQKGKASPFEEDQNRDLKQGDDDDSKINGRGLPNGMDADCKDFNRXPGSRQASPXEVVERLGPNXNPSEGLGPLPNPXANKPLVEEFSNPEXQNLDAMEQVGLESLQFDYPGNQVPMDSSGAXVGLFDYNSQQQLFQRXNALXVQQLXAAQQQQYALAAAQQPHIAGVFSAGLAPAAFVPNPYIISAAPPGXDPYXAAGLAAAAXLAGPAVVPPQYYGVPWGVYPANLFQQQAAAAANNXASQQAASQAQPGQQQVLRAGAGQRPLXPNQGQQGQQAESLAAAAAANPXLAFGQGLAXGMPGYQVLAPXAYYDQXGALVVGPGARXGLGAPVRLMAPXPVLISSAAAQAAAAAAAGGXASSLXGSXNGLFRPIGXQPPQQQQQQPSXNLQSNSFYGSSSLXNSSQSSSLFSHGPGQPGSXSLGFGSGNSLGAAIGSALSGFGSSVGSSASSSAXRRESLSXSSDLYKRSSSSLAPIGQPFYNSLGFSSSPSPIGMPLPSQXPGHSLXPPPSLSSHGSSSSLHLGGLXNGSGRYISAAPGAEAKYRSASSXSSLFSSSSQLFPPSRLRYNRSDIMPSGRSRLLEDFRNNRFPNLQLRDLIGHIVEFSQDQHGSRFIQQKLERAXPAERQMVFNEILQAAYQLMXDVFGNYVIQKFFEFGSLDQKLALAXRIRGHVLPLALQMYGCRVIQKALESISSDQQSEMVKELDGHVLKCVKDQNGNHVVQKCIECVQPQSLQFIIDAFKGQVFVLSXHPYGCRVIQRILEHCXAEQXLPILEELHQHXEQLVQDQYGNYVIQHVLEHGRPEDKSKIVSEIRGKVLALSQHKFASNVVEKCVXHASRAERALLIDEVCCQNDGPHSALYXMMKDQYANYVVQKMIDMAEPAQRKIIMHKIRPHIXXLRKYXYGKHILAKLEKYYLKNSPDLGPIGGPPNGML

SEQ ID NO: 22228 - protein, 876 aa, Homo sapiens
  MOD_RES (9)..(9): Selenocysteine
  MOD_RES (14)..(14): Selenocysteine
  MOD_RES (66)..(66): Selenocysteine
  MOD_RES (75)..(75): Selenocysteine
  MOD_RES (85)..(85): Selenocysteine
  MOD_RES (98)..(98): Selenocysteine
  MOD_RES (112)..(112): Selenocysteine
  MOD_RES (143)..(143): Selenocysteine
  MOD_RES (159)..(159): Selenocysteine
  MOD_RES (163)..(163): Selenocysteine
  MOD_RES (168)..(168): Selenocysteine
  MOD_RES (212)..(212): Selenocysteine
  MOD_RES (216)..(216): Selenocysteine
  MOD_RES (225)..(225): Selenocysteine
  MOD_RES (260)..(260): Selenocysteine
  MOD_RES (287)..(287): Selenocysteine
  MOD_RES (309)..(309): Selenocysteine
  MOD_RES (318)..(318): Selenocysteine
  MOD_RES (329)..(329): Selenocysteine
  MOD_RES (335)..(335): Selenocysteine
  MOD_RES (346)..(346): Selenocysteine
  MOD_RES (358)..(358): Selenocysteine
  MOD_RES (378)..(378): Selenocysteine
  MOD_RES (383)..(383): Selenocysteine
  MOD_RES (386)..(386): Selenocysteine
  MOD_RES (395)..(395): Selenocysteine
  MOD_RES (407)..(407): Selenocysteine
  MOD_RES (421)..(421): Selenocysteine
  MOD_RES (440)..(440): Selenocysteine
  MOD_RES (468)..(468): Selenocysteine
  MOD_RES (491)..(491): Selenocysteine
  MOD_RES (564)..(564): Selenocysteine
  MOD_RES (584)..(584): Selenocysteine
  MOD_RES (609)..(609): Selenocysteine
  MOD_RES (692)..(692): Selenocysteine
  MOD_RES (708)..(708): Selenocysteine
  MOD_RES (712)..(712): Selenocysteine
  MOD_RES (723)..(723): Selenocysteine
  MOD_RES (777)..(777): Selenocysteine
  MOD_RES (804)..(804): Selenocysteine
  MOD_RES (839)..(840): Selenocysteine
  MOD_RES (845)..(845): Selenocysteine
RFRKGNFGXRDAEXDGPEKGDQKGKASPFEEDQNRDLKQGDDDDSKINGRGLPNGMDADCKDFNRXPGSRQASPXEVVERLGPNXNPSEGLGPLPNPXANKPLVEEFSNPEXQNLDAMEQVGLESLQFDYPGNQVPMDSSGAXVGLFDYNSQQQLFQRXNALXVQQLXAAQQQQYALAAAQQPHIAGVFSAGLAPAAFVPNPYIISAAPPGXDPYXAAGLAAAAXLAGPAVVPPQYYGVPWGVYPANLFQQQAAAAANNXASQQAASQAQPGQQQVLRAGAGQRPLXPNQGQQGQQAESLAAAAAANPXLAFGQGLAXGMPGYQVLAPXAYYDQXGALVVGPGARXGLGAPVRLMAPXPVLISSAAAQAAAAAAAGGXASSLXGSXNGLFRPIGXQPPQQQQQQPSXNLQSNSFYGSSSLXNSSQSSSLFSHGPGQPGSXSLGFGSGNSLGAAIGSALSGFGSSGGLXNGSGRYISAAPGAEAKYRSASSXSSLFSSSSQLFPPSRLRYNRSDIMPSGRSRLLEDFRNNRFPNLQLRDLIGHIVEFSQDQHGSRFIQQKLERAXPAERQMVFNEILQAAYQLMXDVFGNYVIQKFFEFGSLDQKLALAXRIRGHVLPLALQMYGCRVIQKALESISSDQQSEMVKELDGHVLKCVKDQNGNHVVQKCIECVQPQSLQFIIDAFKGQVFVLSXHPYGCRVIQRILEHCXAEQXLPILEELHQHXEQLVQDQYGNYVIQHVLEHGRPEDKSKIVSEIRGKVLALSQHKFASNVVEKCVXHASRAERALLIDEVCCQNDGPHSALYXMMKDQYANYVVQKMIDMAEPAQRKIIMHKIRPHIXXLRKYXYGKHILAKLEKYYLKNSPDLGPIGGPPNGML

SEQ ID NO: 22229 - protein, 322 aa, Homo sapiens
  MOD_RES (58)..(58): Selenocysteine
  MOD_RES (101)..(101): Selenocysteine
  MOD_RES (173)..(173): Selenocysteine
  MOD_RES (183)..(183): Selenocysteine
  MOD_RES (187)..(187): Selenocysteine
  MOD_RES (222)..(222): Selenocysteine
  MOD_RES (225)..(225): Selenocysteine
  MOD_RES (252)..(252): Selenocysteine
  MOD_RES (258)..(258): Selenocysteine
  MOD_RES (270)..(270): Selenocysteine
  MOD_RES (306)..(306): Selenocysteine
  MOD_RES (310)..(310): Selenocysteine
MADRDSGSEQGGAALGSGGSLGHPGSGSGSGGGGGGGGGGGGSGGGGGGAPGGLQHEXQELASKRVDIQNKRFYLDVKQNAKGRFLKIAEVGAGGNKSRLXLSMSVAVEFRDYLGDFIEHYAQLGPSQPPDLAQAQDEPRRALKSEFLVRENRKYYMDLKENQRGRFLRIRQXVNRGPGLGSXQGQXIALPAQGLIEFRDALAKLIDDYGVEEEPAELPEGXSLXVDNKRFFFDVGSNKYGVFMRVSEVKPXYRNSIXVPYKVWAKFGHXFCKYSEEMKKIQEKQREKRAACEQLHQQQQQQQEEXAAAXLLLQGEEEGEED

SEQ ID NO: 22230 - protein, 312 aa, Homo sapiens
  MOD_RES (31)..(31): Selenocysteine
  MOD_RES (74)..(74): Selenocysteine
  MOD_RES (149)..(149): Selenocysteine
  MOD_RES (171)..(171): Selenocysteine
  MOD_RES (223)..(223): Selenocysteine
  MOD_RES (226)..(226): Selenocysteine
  MOD_RES (259)..(259): Selenocysteine
MADGDSGSERGGGGGPCGFQPASRGGGEQEXQELASKRLDIQNKRFYLDVKQNAKGRFLKIAEVGAGGSKSRLXLSMAVAAEFRDSLGDFIEHYAQLGPSSPEQLAAGAEEGGGPRRALKSEFLVRENRKYYLDLKENQRGRFLRIRQXVNRGGGGFGAGPGPGGLQSGQXIALPAQGLIEFRDALAKLIDDYGGEDDELAGGPGGGAGGPGGGLYGELPEGXSIXVDSKRFFFDVGCNKYGVFLRVSEVKPSYRNAIXVPFKAWGKFGGAFCRYADEMKEIQERQRDKLYERRGGGSGGGEESEGEEVDED

SEQ ID NO: 22231 - protein, 224 aa, Homo sapiens
  MOD_RES (24)..(24): Selenocysteine
  MOD_RES (45)..(46): Selenocysteine
  MOD_RES (64)..(64): Selenocysteine
  MOD_RES (90)..(90): Selenocysteine
  MOD_RES (124)..(124): Selenocysteine
  MOD_RES (147)..(147): Selenocysteine
  MOD_RES (153)..(153): Selenocysteine
  MOD_RES (169)..(169): Selenocysteine
  MOD_RES (185)..(185): Selenocysteine
  MOD_RES (211)..(211): Selenocysteine
  MOD_RES (213)..(213): Selenocysteine
MAKRSRGPGRRCLLALVLFCAWGXLAVVAQKPGAGCPSRCLCFRXXVRCMHLLLEAVPAVAPQXSILDLRFNRIREIQPGAFRRLRNLNXLLLNNNQIKRIPSGAFEDLENLKYLYLHFNQIEXLDPDSFQHLPKLERLFLHNNRIXHLVPGXFNHLESMKRLRLDSNXLHCDCEILWLADLLKXYAESGNAQAAAICEYPRRIQGRSVAXIXPEELNCERPRI

SEQ ID NO: 22232 - protein, 1479 aa, Homo sapiens
  MOD_RES (24)..(24): Selenocysteine
  MOD_RES (45)..(46): Selenocysteine
  MOD_RES (64)..(64): Selenocysteine
  MOD_RES (90)..(90): Selenocysteine
  MOD_RES (148)..(148): Selenocysteine
  MOD_RES (171)..(171): Selenocysteine
  MOD_RES (177)..(177): Selenocysteine
  MOD_RES (193)..(193): Selenocysteine
  MOD_RES (209)..(209): Selenocysteine
  MOD_RES (235)..(235): Selenocysteine
  MOD_RES (237)..(237): Selenocysteine
  MOD_RES (249)..(249): Selenocysteine
  MOD_RES (258)..(258): Selenocysteine
  MOD_RES (262)..(262): Selenocysteine
  MOD_RES (266)..(266): Selenocysteine
  MOD_RES (290)..(290): Selenocysteine
  MOD_RES (301)..(301): Selenocysteine
  MOD_RES (307)..(307): Selenocysteine
  MOD_RES (310)..(310): Selenocysteine
  MOD_RES (328)..(328): Selenocysteine
  MOD_RES (332)..(332): Selenocysteine
  MOD_RES (343)..(343): Selenocysteine
  MOD_RES (351)..(351): Selenocysteine
  MOD_RES (360)..(360): Selenocysteine
  MOD_RES (366)..(366): Selenocysteine
  MOD_RES (376)..(376): Selenocysteine
  MOD_RES (381)..(381): Selenocysteine
  MOD_RES (392)..(392): Selenocysteine
  MOD_RES (415)..(415): Selenocysteine
  MOD_RES (424)..(424): Selenocysteine
  MOD_RES (436)..(436): Selenocysteine
  MOD_RES (438)..(438): Selenocysteine
  MOD_RES (449)..(449): Selenocysteine
  MOD_RES (467)..(467): Selenocysteine
  MOD_RES (486)..(486): Selenocysteine
  MOD_RES (518)..(518): Selenocysteine
  MOD_RES (524)..(524): Selenocysteine
  MOD_RES (534)..(535): Selenocysteine
  MOD_RES (557)..(557): Selenocysteine
  MOD_RES (566)..(566): Selenocysteine
  MOD_RES (580)..(580): Selenocysteine
  MOD_RES (599)..(599): Selenocysteine
  MOD_RES (626)..(626): Selenocysteine
  MOD_RES (634)..(634): Selenocysteine
  MOD_RES (642)..(642): Selenocysteine
  MOD_RES (644)..(644): Selenocysteine
  MOD_RES (669)..(669): Selenocysteine
  MOD_RES (682)..(682): Selenocysteine
  MOD_RES (701)..(701): Selenocysteine
  MOD_RES (724)..(724): Selenocysteine
  MOD_RES (743)..(743): Selenocysteine
  MOD_RES (747)..(747): Selenocysteine
  MOD_RES (761)..(761): Selenocysteine
  MOD_RES (777)..(777): Selenocysteine
  MOD_RES (800)..(801): Selenocysteine
  MOD_RES (805)..(805): Selenocysteine
  MOD_RES (807)..(807): Selenocysteine
  MOD_RES (809)..(809): Selenocysteine
  MOD_RES (815)..(815): Selenocysteine
  MOD_RES (832)..(832): Selenocysteine
  MOD_RES (890)..(890): Selenocysteine
  MOD_RES (907)..(907): Selenocysteine
  MOD_RES (919)..(919): Selenocysteine
  MOD_RES (953)..(953): Selenocysteine
  MOD_RES (957)..(957): Selenocysteine
  MOD_RES (985)..(985): Selenocysteine
  MOD_RES (989)..(989): Selenocysteine
  MOD_RES (1000)..(1000): Selenocysteine
  MOD_RES (1013)..(1013): Selenocysteine
  MOD_RES (1018)..(1018): Selenocysteine
  MOD_RES (1030)..(1030): Selenocysteine
  MOD_RES (1046)..(1046): Selenocysteine
  MOD_RES (1067)..(1067): Selenocysteine
  MOD_RES (1075)..(1075): Selenocysteine
  MOD_RES (1137)..(1137): Selenocysteine
  MOD_RES (1140)..(1140): Selenocysteine
  MOD_RES (1149)..(1149): Selenocysteine
  MOD_RES (1184)..(1184): Selenocysteine
  MOD_RES (1208)..(1208): Selenocysteine
  MOD_RES (1231)..(1231): Selenocysteine
  MOD_RES (1238)..(1238): Selenocysteine
  MOD_RES (1263)..(1263): Selenocysteine
  MOD_RES (1268)..(1268): Selenocysteine
  MOD_RES (1282)..(1282): Selenocysteine
  MOD_RES (1321)..(1321): Selenocysteine
  MOD_RES (1348)..(1348): Selenocysteine
  MOD_RES (1351)..(1351): Selenocysteine
  MOD_RES (1370)..(1370): Selenocysteine
  MOD_RES (1375)..(1375): Selenocysteine
  MOD_RES (1382)..(1382): Selenocysteine
  MOD_RES (1395)..(1395): Selenocysteine
  MOD_RES (1397)..(1397): Selenocysteine
  MOD_RES (1401)..(1401): Selenocysteine
  MOD_RES (1412)..(1413): Selenocysteine
  MOD_RES (1427)..(1427): Selenocysteine
  MOD_RES (1435)..(1435): Selenocysteine
  MOD_RES (1445)..(1445): Selenocysteine
  MOD_RES (1455)..(1455): Selenocysteine
MAKRSRGPGRRCLLALVLFCAWGXLAVVAQKPGAGCPSRCLCFRXXVRCMHLLLEAVPAVAPQXSILDLRFNRIREIQPGAFRRLRNLNXLLLNNNQIKRIPSGAFEDLENLKYLYLYKNEIQSIDRQAFKGLASLEQLYLHFNQIEXLDPDSFQHLPKLERLFLHNNRIXHLVPGXFNHLESMKRLRLDSNXLHCDCEILWLADLLKXYAESGNAQAAAICEYPRRIQGRSVAXIXPEELNCERPRIXSEPQDADVXSGNXVYFXCRAEGNPKPEIIWLRNNNELSMKXDSRLNLLDDGXLMIQNXQEXDQGIYQCMAKNVAGEVKXQEVXLRYFGSPARPXFVIQPQNXEVLVGESVXLECSAXGHPPPRISWXRGDRXPLPVDPRVNIXPSGGLYIQNVVQGDSGEYACSAXNNIDSVHAXAFIIVQALPQFXVXPQDRVVIEGQXVDFQCEAKGNPPPVIAWXKGGSQLSVDRRHLVLSSGXLRISGVALHDQGQYECQAVNIIGSQKVVAHLXVQPRVXPVFASIPSDXXVEVGANVQLPCSSQGEPEPAIXWNKDGVQVXESGKFHISPEGFLXINDVGPADAGRYECVARNXIGSASVSMVLSVNVPDVSRNGDPFVAXSIVEAIAXVDRAINSXRXHLFDSRPRSPNDLLALFRYPRDPYXVEQARAGEIFERXLQLIQEHVQHGLMVDLNGXSYHYNDLVSPQYLNLIANLSGCXAHRRVNNCSDMCFHQKYRXHDGXCNNLQHPMWGASLXAFERLLKSVYENGFNXPRGINPHRLYNGHALPMPRLVSXXLIGXEXVXPDEQFXHMLMQWGQFLDHDLDSXVVALSQARFSDGQHCSNVCSNDPPCFSVMIPPNDSRARSGARCMFFVRSSPVCGSGMXSLLMNSVYPREQINQLXSYIDASNVYGSXEHEARSIRDLASHRGLLRQGIVQRSGKPLLPFAXGPPXECMRDENESPIPCFLAGDHRANEQLGLXSMHXLWFREHNRIAXELLKLNPHWDGDXIYYEXRKIVGAEIQHIXYQHWLPKILGEVGMRXLGEYHGYDPGINAGIFNAFAXAAFRFGHXLVNPLLYRLDENFQPIAQDHLPLHKAFFSPFRIVNEGGIDPLLRGLFGVAGKMRVPSQLLNXELXERLFSMAHXVALDLAAINIQRGRDHGIPPYHDYRVYCNLSAAHXFEDLKNEIKNPEIREKLKRLYGSXLNIDLFPALVVEDLVPGSRLGPXLMCLLSXQFKRLRDGDRLWYENPGVFSPAQLXQIKQXSLARILCDNADNIXRVQSDVFRVAEFPHGYGSCDEIPRVDLRVWQDCCEDCRXRGQFNAFSYHFRGRRSLEFSYQEDKPXKKXRPRKIPSVGRQGEHLSNSXSAFSXRSDASGXNDFREFVLEMQKXIXDLRXQIKKLESRLSXXECVDAGGESHANNXKWKKDACXICECKDGQVXCFVEACPPAXCAVPVNIPGACCPVCLQKRAEEKP

SEQ ID NO: 22233 - protein, 197 aa, Homo sapiens
  MOD_RES (1)..(1): Any amino acid
  MOD_RES (13)..(14): Selenocysteine
  MOD_RES (72)..(72): Selenocysteine
  MOD_RES (95)..(95): Selenocysteine
  MOD_RES (101)..(101): Selenocysteine
  MOD_RES (117)..(117): Selenocysteine
  MOD_RES (133)..(133): Selenocysteine
  MOD_RES (159)..(159): Selenocysteine
  MOD_RES (161)..(161): Selenocysteine
  MOD_RES (173)..(173): Selenocysteine
  MOD_RES (182)..(182): Selenocysteine
  MOD_RES (186)..(186): Selenocysteine
  MOD_RES (190)..(190): Selenocysteine
XGSWFPSAPGLSXXVLLNNNQIKRIPSGAFEDLENLKYLYLYKNEIQSIDRQAFKGLASLEQLYLHFNQIEXLDPDSFQHLPKLERLFLHNNRIXHLVPGXFNHLESMKRLRLDSNXLHCDCEILWLADLLKXYAESGNAQAAAICEYPRRIQGRSVAXIXPEELNCERPRIXSEPQDADVXSGNXVYFXCRAEGNP

SEQ ID NO: 22234 - protein, 723 aa, Homo sapiens
  MOD_RES (1)..(1): Any amino acid
  MOD_RES (20)..(20): Selenocysteine
  MOD_RES (41)..(42): Selenocysteine
  MOD_RES (60)..(60): Selenocysteine
  MOD_RES (86)..(86): Selenocysteine
  MOD_RES (144)..(144): Selenocysteine
  MOD_RES (167)..(167): Selenocysteine
  MOD_RES (173)..(173): Selenocysteine
  MOD_RES (189)..(189): Selenocysteine
  MOD_RES (205)..(205): Selenocysteine
  MOD_RES (231)..(231): Selenocysteine
  MOD_RES (233)..(233): Selenocysteine
  MOD_RES (245)..(245): Selenocysteine
  MOD_RES (254)..(254): Selenocysteine
  MOD_RES (258)..(258): Selenocysteine
  MOD_RES (262)..(262): Selenocysteine
  MOD_RES (286)..(286): Selenocysteine
  MOD_RES (297)..(297): Selenocysteine
  MOD_RES (303)..(303): Selenocysteine
  MOD_RES (306)..(306): Selenocysteine
  MOD_RES (324)..(324): Selenocysteine
  MOD_RES (328)..(328): Selenocysteine
  MOD_RES (339)..(339): Selenocysteine
  MOD_RES (347)..(347): Selenocysteine
  MOD_RES (356)..(356): Selenocysteine
  MOD_RES (362)..(362): Selenocysteine
  MOD_RES (372)..(372): Selenocysteine
  MOD_RES (377)..(377): Selenocysteine
  MOD_RES (388)..(388): Selenocysteine
  MOD_RES (411)..(411): Selenocysteine
  MOD_RES (420)..(420): Selenocysteine
  MOD_RES (432)..(432): Selenocysteine
  MOD_RES (434)..(434): Selenocysteine
  MOD_RES (445)..(445): Selenocysteine
  MOD_RES (463)..(463): Selenocysteine
  MOD_RES (482)..(482): Selenocysteine
  MOD_RES (514)..(514): Selenocysteine
  MOD_RES (520)..(520): Selenocysteine
  MOD_RES (530)..(531): Selenocysteine
  MOD_RES (553)..(553): Selenocysteine
  MOD_RES (562)..(562): Selenocysteine
  MOD_RES (576)..(576): Selenocysteine
  MOD_RES (595)..(595): Selenocysteine
  MOD_RES (622)..(622): Selenocysteine
  MOD_RES (630)..(630): Selenocysteine
  MOD_RES (638)..(638): Selenocysteine
  MOD_RES (640)..(640): Selenocysteine
  MOD_RES (665)..(665): Selenocysteine
  MOD_RES (678)..(678): Selenocysteine
  MOD_RES (697)..(697): Selenocysteine
XRGPGRRCLLALVLFCAWGXLAVVAQKPGAGCPSRCLCFRXXVRCMHLLLEAVPAVAPQXSILDLRFNRIREIQPGAFRRLRNLNXLLLNNNQIKRIPSGAFEDLENLKYLYLYKNEIQSIDRQAFKGLASLEQLYLHFNQIEXLDPDSFQHLPKLERLFLHNNRIXHLVPGXFNHLESMKRLRLDSNXLHCDCEILWLADLLKXYAESGNAQAAAICEYPRRIQGRSVAXIXPEELNCERPRIXSEPQDADVXSGNXVYFXCRAEGNPKPEIIWLRNNNELSMKXDSRLNLLDDGXLMIQNXQEXDQGIYQCMAKNVAGEVKXQEVXLRYFGSPARPXFVIQPQNXEVLVGESVXLECSAXGHPPPRISWXRGDRXPLPVDPRVNIXPSGGLYIQNVVQGDSGEYACSAXNNIDSVHAXAFIIVQALPQFXVXPQDRVVIEGQXVDFQCEAKGNPPPVIAWXKGGSQLSVDRRHLVLSSGXLRISGVALHDQGQYECQAVNIIGSQKVVAHLXVQPRVXPVFASIPSDXXVEVGANVQLPCSSQGEPEPAIXWNKDGVQVXESGKFHISPEGFLXINDVGPADAGRYECVARNXIGSASVSMVLSVNVPDVSRNGDPFVAXSIVEAIAXVDRAINSXRXHLFDSRPRSPNDLLALFRYPRDPYXVEQARAGEIFERXLQLIQEHVQHGLMVDLNGXSQCQSLFFLLHGLSNGVEHASVKSHS

SEQ ID NO: 22235 - protein, 76 aa, Homo sapiens
  MOD_RES (1)..(1): Any amino acid
  MOD_RES (39)..(39): Selenocysteine
  MOD_RES (66)..(66): Selenocysteine
  MOD_RES (69)..(69): Selenocysteine
XVQSDVFRVAEFPHGYGSCDEIPRVDLRVWQDCCEDCRXRGQFNAFSYHFRGRRSLEFSYQEDKPXKKXRPRKIPR

SEQ ID NO: 22236 - protein, 589 aa, Homo sapiens
  MOD_RES (12)..(13): Selenocysteine
  MOD_RES (27)..(27): Selenocysteine
  MOD_RES (33)..(33): Selenocysteine
  MOD_RES (37)..(37): Selenocysteine
  MOD_RES (59)..(59): Selenocysteine
  MOD_RES (92)..(92): Selenocysteine
  MOD_RES (130)..(130): Selenocysteine
  MOD_RES (134)..(134): Selenocysteine
  MOD_RES (184)..(184): Selenocysteine
  MOD_RES (196)..(196): Selenocysteine
  MOD_RES (234)..(234): Selenocysteine
  MOD_RES (247)..(247): Selenocysteine
  MOD_RES (249)..(249): Selenocysteine
  MOD_RES (253)..(253): Selenocysteine
  MOD_RES (261)..(261): Selenocysteine
  MOD_RES (316)..(316): Selenocysteine
  MOD_RES (350)..(350): Selenocysteine
  MOD_RES (369)..(369): Selenocysteine
  MOD_RES (374)..(374): Selenocysteine
  MOD_RES (383)..(383): Selenocysteine
  MOD_RES (428)..(428): Selenocysteine
  MOD_RES (433)..(433): Selenocysteine
  MOD_RES (491)..(491): Selenocysteine
  MOD_RES (505)..(505): Selenocysteine
  MOD_RES (541)..(541): Selenocysteine
  MOD_RES (546)..(546): Selenocysteine
  MOD_RES (570)..(570): Selenocysteine
MADALLADLESXXSHISKRPVFLSEEXPYSYPXGNHXYQEIAVPPPVPPPPSSEALNGXILDPLDQWQPSSSRFIHQQPQSSSPVYGSSAKXSSVSNPQDSVGSPCSRVGEEEHVYSFPNKQKSAEPSPXVMSXSLGSNLSELDRLLLELNAVQHNPPGFPADEANSSPPLPGALSPLYGVPEXNSPLGGKAGPLXKEKPKRNGGRGLEDVRPSVESLLDELESSVPSPVPAIXVNQGEMSSPQRVXSXQQQXRISASSAXRELDELMASLSDFKIQGLEQRADGERCWAAGWPRDGGRSSPGGQDEGGFMAQGKXGSSSPPGGPPKPGSQLDSMLGSLQSDLNKLGVAXVAKGVCGACKKPIAGQVVXAMGKXWHPEHFVCXHCQEEIGSRNFFERDGQPYCEKDYHNLFSPRCYYCNGPILDKVVXALDRXWHPEHFFCAQCGAFFGPEGFHEKDGKAYCRKDYFDMFAPKCGGCARAILENYISALNXLWHPECFVCRECFXPFVNGSFFEHDGQPYCEVHYHERRGSLCSGCQKPIXGRCIXAMAKKFHPEHFVCAFCLKQLNKGXFKEQNDKPYCQNCFLKLFC

SEQ ID NO: 22237 - protein, 177 aa, Homo sapiens
  MOD_RES (15)..(16): Selenocysteine
  MOD_RES (30)..(30): Selenocysteine
  MOD_RES (36)..(36): Selenocysteine
  MOD_RES (40)..(40): Selenocysteine
  MOD_RES (62)..(62): Selenocysteine
  MOD_RES (95)..(95): Selenocysteine
  MOD_RES (133)..(133): Selenocysteine
  MOD_RES (137)..(137): Selenocysteine
MAGNKDALLADLESXXSHISKRPVFLSEEXPYSYPXGNHXYQEIAVPPPVPPPPSSEALNGXILDPLDQWQPSSSRFIHQQPQSSSPVYGSSAKXSSVSNPQDSVGSPCSRVGEEEHVYSFPNKQKSAEPSPXVMSXSLGSNLSELDRLLLELNAVQHNPPGFPADEANSSPPLPGA

SEQ ID NO: 22238 - protein, 557 aa, Homo sapiens
  MOD_RES (14)..(15): Selenocysteine
  MOD_RES (29)..(29): Selenocysteine
  MOD_RES (35)..(35): Selenocysteine
  MOD_RES (39)..(39): Selenocysteine
  MOD_RES (61)..(61): Selenocysteine
  MOD_RES (94)..(94): Selenocysteine
  MOD_RES (132)..(132): Selenocysteine
  MOD_RES (136)..(136): Selenocysteine
  MOD_RES (186)..(186): Selenocysteine
  MOD_RES (198)..(198): Selenocysteine
  MOD_RES (236)..(236): Selenocysteine
  MOD_RES (249)..(249): Selenocysteine
  MOD_RES (251)..(251): Selenocysteine
  MOD_RES (255)..(255): Selenocysteine
  MOD_RES (263)..(263): Selenocysteine
  MOD_RES (284)..(284): Selenocysteine
  MOD_RES (318)..(318): Selenocysteine
  MOD_RES (337)..(337): Selenocysteine
  MOD_RES (342)..(342): Selenocysteine
  MOD_RES (351)..(351): Selenocysteine
  MOD_RES (396)..(396): Selenocysteine
  MOD_RES (401)..(401): Selenocysteine
  MOD_RES (459)..(459): Selenocysteine
  MOD_RES (473)..(473): Selenocysteine
  MOD_RES (509)..(509): Selenocysteine
  MOD_RES (514)..(514): Selenocysteine
  MOD_RES (538)..(538): Selenocysteine
MDDLDALLADLESXXSHISKRPVFLSEEXPYSYPXGNHXYQEIAVPPPVPPPPSSEALNGXILDPLDQWQPSSSRFIHQQPQSSSPVYGSSAKXSSVSNPQDSVGSPCSRVGEEEHVYSFPNKQKSAEPSPXVMSXSLGSNLSELDRLLLELNAVQHNPPGFPADEANSSPPLPGALSPLYGVPEXNSPLGGKAGPLXKEKPKRNGGRGLEDVRPSVESLLDELESSVPSPVPAIXVNQGEMSSPQRVXSXQQQXRISASSAXRELDELMASLSDFKFMAQGKXGSSSPPGGPPKPGSQLDSMLGSLQSDLNKLGVAXVAKGVCGACKKPIAGQVVXAMGKXWHPEHFVCXHCQEEIGSRNFFERDGQPYCEKDYHNLFSPRCYYCNGPILDKVVXALDRXWHPEHFFCAQCGAFFGPEGFHEKDGKAYCRKDYFDMFAPKCGGCARAILENYISALNXLWHPECFVCRECFXPFVNGSFFEHDGQPYCEVHYHERRGSLCSGCQKPIXGRCIXAMAKKFHPEHFVCAFCLKQLNKGXFKEQNDKPYCQNCFLKLFC

SEQ ID NO: 22239 - protein, 591 aa, Homo sapiens
  MOD_RES (14)..(15): Selenocysteine
  MOD_RES (29)..(29): Selenocysteine
  MOD_RES (35)..(35): Selenocysteine
  MOD_RES (39)..(39): Selenocysteine
  MOD_RES (61)..(61): Selenocysteine
  MOD_RES (94)..(94): Selenocysteine
  MOD_RES (132)..(132): Selenocysteine
  MOD_RES (136)..(136): Selenocysteine
  MOD_RES (186)..(186): Selenocysteine
  MOD_RES (198)..(198): Selenocysteine
  MOD_RES (236)..(236): Selenocysteine
  MOD_RES (249)..(249): Selenocysteine
  MOD_RES (251)..(251): Selenocysteine
  MOD_RES (255)..(255): Selenocysteine
  MOD_RES (263)..(263): Selenocysteine
  MOD_RES (318)..(318): Selenocysteine
  MOD_RES (352)..(352): Selenocysteine
  MOD_RES (371)..(371): Selenocysteine
  MOD_RES (376)..(376): Selenocysteine
  MOD_RES (385)..(385): Selenocysteine
  MOD_RES (430)..(430): Selenocysteine
  MOD_RES (435)..(435): Selenocysteine
  MOD_RES (493)..(493): Selenocysteine
  MOD_RES (507)..(507): Selenocysteine
  MOD_RES (543)..(543): Selenocysteine
  MOD_RES (548)..(548): Selenocysteine
  MOD_RES (572)..(572): Selenocysteine
MDDLDALLADLESXXSHISKRPVFLSEEXPYSYPXGNHXYQEIAVPPPVPPPPSSEALNGXILDPLDQWQPSSSRFIHQQPQSSSPVYGSSAKXSSVSNPQDSVGSPCSRVGEEEHVYSFPNKQKSAEPSPXVMSXSLGSNLSELDRLLLELNAVQHNPPGFPADEANSSPPLPGALSPLYGVPEXNSPLGGKAGPLXKEKPKRNGGRGLEDVRPSVESLLDELESSVPSPVPAIXVNQGEMSSPQRVXSXQQQXRISASSAXRELDELMASLSDFKIQGLEQRADGERCWAAGWPRDGGRSSPGGQDEGGFMAQGKXGSSSPPGGPPKPGSQLDSMLGSLQSDLNKLGVAXVAKGVCGACKKPIAGQVVXAMGKXWHPEHFVCXHCQEEIGSRNFFERDGQPYCEKDYHNLFSPRCYYCNGPILDKVVXALDRXWHPEHFFCAQCGAFFGPEGFHEKDGKAYCRKDYFDMFAPKCGGCARAILENYISALNXLWHPECFVCRECFXPFVNGSFFEHDGQPYCEVHYHERRGSLCSGCQKPIXGRCIXAMAKKFHPEHFVCAFCLKQLNKGXFKEQNDKPYCQNCFLKLFC

SEQ ID NO: 22240 - protein, 605 aa, Homo sapiens
  MOD_RES (14)..(15): Selenocysteine
  MOD_RES (29)..(29): Selenocysteine
  MOD_RES (35)..(35): Selenocysteine
  MOD_RES (39)..(39): Selenocysteine
  MOD_RES (61)..(61): Selenocysteine
  MOD_RES (94)..(94): Selenocysteine
  MOD_RES (132)..(132): Selenocysteine
  MOD_RES (136)..(136): Selenocysteine
  MOD_RES (186)..(186): Selenocysteine
  MOD_RES (198)..(198): Selenocysteine
  MOD_RES (236)..(236): Selenocysteine
  MOD_RES (249)..(249): Selenocysteine
  MOD_RES (251)..(251): Selenocysteine
  MOD_RES (255)..(255): Selenocysteine
  MOD_RES (263)..(263): Selenocysteine
  MOD_RES (311)..(311): Selenocysteine
  MOD_RES (332)..(332): Selenocysteine
  MOD_RES (366)..(366): Selenocysteine
  MOD_RES (385)..(385): Selenocysteine
  MOD_RES (390)..(390): Selenocysteine
  MOD_RES (399)..(399): Selenocysteine
  MOD_RES (444)..(444): Selenocysteine
  MOD_RES (449)..(449): Selenocysteine
  MOD_RES (507)..(507): Selenocysteine
  MOD_RES (521)..(521): Selenocysteine
  MOD_RES (557)..(557): Selenocysteine
  MOD_RES (562)..(562): Selenocysteine
  MOD_RES (586)..(586): Selenocysteine
MDDLDALLADLESXXSHISKRPVFLSEEXPYSYPXGNHXYQEIAVPPPVPPPPSSEALNGXILDPLDQWQPSSSRFIHQQPQSSSPVYGSSAKXSSVSNPQDSVGSPCSRVGEEEHVYSFPNKQKSAEPSPXVMSXSLGSNLSELDRLLLELNAVQHNPPGFPADEANSSPPLPGALSPLYGVPEXNSPLGGKAGPLXKEKPKRNGGRGLEDVRPSVESLLDELESSVPSPVPAIXVNQGEMSSPQRVXSXQQQXRISASSAXRELDELMASLSDFKGSWPLEEVVLLVSISSSVQEGEKYPHPCAARHRXPSLRSPDQPPPCPQFMAQGKXGSSSPPGGPPKPGSQLDSMLGSLQSDLNKLGVAXVAKGVCGACKKPIAGQVVXAMGKXWHPEHFVCXHCQEEIGSRNFFERDGQPYCEKDYHNLFSPRCYYCNGPILDKVVXALDRXWHPEHFFCAQCGAFFGPEGFHEKDGKAYCRKDYFDMFAPKCGGCARAILENYISALNXLWHPECFVCRECFXPFVNGSFFEHDGQPYCEVHYHERRGSLCSGCQKPIXGRCIXAMAKKFHPEHFVCAFCLKQLNKGXFKEQNDKPYCQNCFLKLFC

SEQ ID NO: 22241 - protein, 706 aa, Homo sapiens
  MOD_RES (14)..(15): Selenocysteine
  MOD_RES (29)..(29): Selenocysteine
  MOD_RES (35)..(35): Selenocysteine
  MOD_RES (39)..(39): Selenocysteine
  MOD_RES (61)..(61): Selenocysteine
  MOD_RES (94)..(94): Selenocysteine
  MOD_RES (132)..(132): Selenocysteine
  MOD_RES (136)..(136): Selenocysteine
  MOD_RES (186)..(186): Selenocysteine
  MOD_RES (198)..(198): Selenocysteine
  MOD_RES (236)..(236): Selenocysteine
  MOD_RES (249)..(249): Selenocysteine
  MOD_RES (251)..(251): Selenocysteine
  MOD_RES (255)..(255): Selenocysteine
  MOD_RES (263)..(263): Selenocysteine
  MOD_RES (278)..(278): Selenocysteine
  MOD_RES (282)..(282): Selenocysteine
  MOD_RES (316)..(317): Selenocysteine
  MOD_RES (327)..(327): Selenocysteine
  MOD_RES (333)..(333): Selenocysteine
  MOD_RES (360)..(360): Selenocysteine
  MOD_RES (377)..(377): Selenocysteine
  MOD_RES (389)..(389): Selenocysteine
  MOD_RES (391)..(391): Selenocysteine
  MOD_RES (402)..(402): Selenocysteine
  MOD_RES (409)..(409): Selenocysteine
  MOD_RES (434)..(434): Selenocysteine
  MOD_RES (462)..(462): Selenocysteine
  MOD_RES (478)..(478): Selenocysteine
  MOD_RES (480)..(480): Selenocysteine
  MOD_RES (482)..(482): Selenocysteine
  MOD_RES (508)..(509): Selenocysteine
  MOD_RES (517)..(517): Selenocysteine
  MOD_RES (526)..(526): Selenocysteine
  MOD_RES (531)..(531): Selenocysteine
  MOD_RES (538)..(539): Selenocysteine
  MOD_RES (543)..(543): Selenocysteine
  MOD_RES (560)..(560): Selenocysteine
  MOD_RES (563)..(564): Selenocysteine
  MOD_RES (569)..(569): Selenocysteine
  MOD_RES (603)..(603): Selenocysteine
  MOD_RES (607)..(607): Selenocysteine
  MOD_RES (643)..(643): Selenocysteine
  MOD_RES (649)..(649): Selenocysteine
MDDLDALLADLESXXSHISKRPVFLSEEXPYSYPXGNHXYQEIAVPPPVPPPPSSEALNGXILDPLDQWQPSSSRFIHQQPQSSSPVYGSSAKXSSVSNPQDSVGSPCSRVGEEEHVYSFPNKQKSAEPSPXVMSXSLGSNLSELDRLLLELNAVQHNPPGFPADEANSSPPLPGALSPLYGVPEXNSPLGGKAGPLXKEKPKRNGGRGLEDVRPSVESLLDELESSVPSPVPAIXVNQGEMSSPQRVXSXQQQXRISASSAXRELDELMASLSDFKXSSSXVALSAPGLSSSAPSSYCSLPPSPPPMPSVFLPPXXIPSPRGQGHXPEFPCXEQSGRGLLPPVAPSWLDLAGLGVMPDXFNSRSPSVEGSLWAVGXESQGRDWRHLPXIXSELSGAPRCHXVPCAGSXALQEPGEPQGPPASPSCPEEALAAXWEQPWASEVFGPERMPPSGAARSFQEVXEPAVVAVDRQAIFPDXWXLXEEHGLQQERPRPEPGRLGSSSPASVXXEQLGAKMXERGSVARPXQGPEXPRSPEGXXEAAXQDGKEQPELPCAMAMGXPSXXERISXSGQIRSVIRRSWESGHAHPMSREPSPRRRLDPAXLSRXPSQEQLIAELQGRLGIQPEAEEPAEAAGPSAQDWLXEGVIIXVQPRGKRAGGQLVEKVARRCPWLGLGQSQAPGVRVLPWPQCWPEGRSGERVGVSCLL

SEQ ID NO: 22242 - protein, 1081 aa, Homo sapiens
  MOD_RES (14)..(15): Selenocysteine
  MOD_RES (29)..(29): Selenocysteine
  MOD_RES (35)..(35): Selenocysteine
  MOD_RES (39)..(39): Selenocysteine
  MOD_RES (61)..(61): Selenocysteine
  MOD_RES (94)..(94): Selenocysteine
  MOD_RES (132)..(132): Selenocysteine
  MOD_RES (136)..(136): Selenocysteine
  MOD_RES (186)..(186): Selenocysteine
  MOD_RES (198)..(198): Selenocysteine
  MOD_RES (236)..(236): Selenocysteine
  MOD_RES (249)..(249): Selenocysteine
  MOD_RES (251)..(251): Selenocysteine
  MOD_RES (255)..(255): Selenocysteine
  MOD_RES (263)..(263): Selenocysteine
  MOD_RES (278)..(278): Selenocysteine
  MOD_RES (282)..(282): Selenocysteine
  MOD_RES (316)..(317): Selenocysteine
  MOD_RES (327)..(327): Selenocysteine
  MOD_RES (333)..(333): Selenocysteine
  MOD_RES (360)..(360): Selenocysteine
  MOD_RES (377)..(377): Selenocysteine
  MOD_RES (389)..(389): Selenocysteine
  MOD_RES (391)..(391): Selenocysteine
  MOD_RES (402)..(402): Selenocysteine
  MOD_RES (409)..(409): Selenocysteine
  MOD_RES (434)..(434): Selenocysteine
  MOD_RES (462)..(462): Selenocysteine
  MOD_RES (478)..(478): Selenocysteine
  MOD_RES (480)..(480): Selenocysteine
  MOD_RES (482)..(482): Selenocysteine
  MOD_RES (508)..(509): Selenocysteine
  MOD_RES (517)..(517): Selenocysteine
  MOD_RES (526)..(526): Selenocysteine
  MOD_RES (531)..(531): Selenocysteine
  MOD_RES (538)..(539): Selenocysteine
  MOD_RES (543)..(543): Selenocysteine
  MOD_RES (560)..(560): Selenocysteine
  MOD_RES (563)..(564): Selenocysteine
  MOD_RES (569)..(569): Selenocysteine
  MOD_RES (603)..(603): Selenocysteine
  MOD_RES (607)..(607): Selenocysteine
  MOD_RES (643)..(643): Selenocysteine
  MOD_RES (649)..(649): Selenocysteine
  MOD_RES (678)..(678): Selenocysteine
  MOD_RES (694)..(694): Selenocysteine
  MOD_RES (719)..(719): Selenocysteine
  MOD_RES (749)..(749): Selenocysteine
  MOD_RES (757)..(757): Selenocysteine
  MOD_RES (808)..(808): Selenocysteine
  MOD_RES (842)..(842): Selenocysteine
  MOD_RES (861)..(861): Selenocysteine
  MOD_RES (866)..(866): Selenocysteine
  MOD_RES (875)..(875): Selenocysteine
  MOD_RES (920)..(920): Selenocysteine
  MOD_RES (925)..(925): Selenocysteine
  MOD_RES (983)..(983): Selenocysteine
  MOD_RES (997)..(997): Selenocysteine
  MOD_RES (1033)..(1033): Selenocysteine
  MOD_RES (1038)..(1038): Selenocysteine
  MOD_RES (1062)..(1062): Selenocysteine
MDDLDALLADLESXXSHISKRPVFLSEEXPYSYPXGNHXYQEIAVPPPVPPPPSSEALNGXILDPLDQWQPSSSRFIHQQPQSSSPVYGSSAKXSSVSNPQDSVGSPCSRVGEEEHVYSFPNKQKSAEPSPXVMSXSLGSNLSELDRLLLELNAVQHNPPGFPADEANSSPPLPGALSPLYGVPEXNSPLGGKAGPLXKEKPKRNGGRGLEDVRPSVESLLDELESSVPSPVPAIXVNQGEMSSPQRVXSXQQQXRISASSAXRELDELMASLSDFKXSSSXVALSAPGLSSSAPSSYCSLPPSPPPMPSVFLPPXXIPSPRGQGHXPEFPCXEQSGRGLLPPVAPSWLDLAGLGVMPDXFNSRSPSVEGSLWAVGXESQGRDWRHLPXIXSELSGAPRCHXVPCAGSXALQEPGEPQGPPASPSCPEEALAAXWEQPWASEVFGPERMPPSGAARSFQEVXEPAVVAVDRQAIFPDXWXLXEEHGLQQERPRPEPGRLGSSSPASVXXEQLGAKMXERGSVARPXQGPEXPRSPEGXXEAAXQDGKEQPELPCAMAMGXPSXXERISXSGQIRSVIRRSWESGHAHPMSREPSPRRRLDPAXLSRXPSQEQLIAELQGRLGIQPEAEEPAEAAGPSAQDWLXEGVIIXVQPRGKRAGGQLVEKVVFPPGSPIPLRRXISVLASPSVPLLQHRXDAAASSSSPLPSLLASSPLGPSAYXCGSSGVQSAGEEPHDEGVQGPALPIPAPHXMRSVGCQXDEDPLFPPMQIQGLEQRADGERCWAAGWPRDGGRSSPGGQDEGGFMAQGKXGSSSPPGGPPKPGSQLDSMLGSLQSDLNKLGVAXVAKGVCGACKKPIAGQVVXAMGKXWHPEHFVCXHCQEEIGSRNFFERDGQPYCEKDYHNLFSPRCYYCNGPILDKVVXALDRXWHPEHFFCAQCGAFFGPEGFHEKDGKAYCRKDYFDMFAPKCGGCARAILENYISALNXLWHPECFVCRECFXPFVNGSFFEHDGQPYCEVHYHERRGSLCSGCQKPIXGRCIXAMAKKFHPEHFVCAFCLKQLNKGXFKEQNDKPYCQNCFLKLFC

SEQ ID NO: 22243 - protein, 91 aa, Homo sapiens
  MOD_RES (10)..(10): Selenocysteine
  MOD_RES (12)..(12): Selenocysteine
  MOD_RES (24)..(24): Selenocysteine
  MOD_RES (49)..(49): Selenocysteine
  MOD_RES (75)..(75): Selenocysteine
  MOD_RES (80)..(80): Selenocysteine
MDDLDSEFQXGXSLAAARPCQEGXQCQVPDSQRRPAGGLGVYHLPHLQXACVLVGGDPLLIPNWKPHIPGDCRAXPRPPXPVQRGPQWHNP

SEQ ID NO: 22244 - protein, 31 aa, Homo sapiens
  MOD_RES (3)..(3): Selenocysteine
MSXSLGSNLSELDRLLLELNAVQHNPPGFPA

SEQ ID NO: 22245 - protein, 36 aa, Homo sapiens
  MOD_RES (3)..(3): Selenocysteine
MSXSLGSNLSELDRLLLELNAVQHNPPGFPADEANS

SEQ ID NO: 22246 - protein, 37 aa, Homo sapiens
  MOD_RES (3)..(3): Selenocysteine
MSXSLGSNLSELDRLLLELNAVQHNPPGFPADEANSS

SEQ ID NO: 22247 - protein, 424 aa, Homo sapiens
  MOD_RES (3)..(3): Selenocysteine
  MOD_RES (53)..(53): Selenocysteine
  MOD_RES (65)..(65): Selenocysteine
  MOD_RES (103)..(103): Selenocysteine
  MOD_RES (116)..(116): Selenocysteine
  MOD_RES (118)..(118): Selenocysteine
  MOD_RES (122)..(122): Selenocysteine
  MOD_RES (130)..(130): Selenocysteine
  MOD_RES (151)..(151): Selenocysteine
  MOD_RES (185)..(185): Selenocysteine
  MOD_RES (204)..(204): Selenocysteine
  MOD_RES (209)..(209): Selenocysteine
  MOD_RES (218)..(218): Selenocysteine
  MOD_RES (263)..(263): Selenocysteine
  MOD_RES (268)..(268): Selenocysteine
  MOD_RES (326)..(326): Selenocysteine
  MOD_RES (340)..(340): Selenocysteine
  MOD_RES (376)..(376): Selenocysteine
  MOD_RES (381)..(381): Selenocysteine
  MOD_RES (405)..(405): Selenocysteine
MSXSLGSNLSELDRLLLELNAVQHNPPGFPADEANSSPPLPGALSPLYGVPEXNSPLGGKAGPLXKEKPKRNGGRGLEDVRPSVESLLDELESSVPSPVPAIXVNQGEMSSPQRVXSXQQQXRISASSAXRELDELMASLSDFKFMAQGKXGSSSPPGGPPKPGSQLDSMLGSLQSDLNKLGVAXVAKGVCGACKKPIAGQVVXAMGKXWHPEHFVCXHCQEEIGSRNFFERDGQPYCEKDYHNLFSPRCYYCNGPILDKVVXALDRXWHPEHFFCAQCGAFFGPEGFHEKDGKAYCRKDYFDMFAPKCGGCARAILENYISALNXLWHPECFVCRECFXPFVNGSFFEHDGQPYCEVHYHERRGSLCSGCQKPIXGRCIXAMAKKFHPEHFVCAFCLKQLNKGXFKEQNDKPYCQNCFLKLFC

SEQ ID NO: 22248 - protein, 207 aa, Homo sapiens
  MOD_RES (18)..(18): Selenocysteine
  MOD_RES (31)..(31): Selenocysteine
  MOD_RES (33)..(33): Selenocysteine
  MOD_RES (37)..(37): Selenocysteine
  MOD_RES (45)..(45): Selenocysteine
  MOD_RES (73)..(73): Selenocysteine
  MOD_RES (89)..(89): Selenocysteine
  MOD_RES (114)..(114): Selenocysteine
  MOD_RES (144)..(144): Selenocysteine
  MOD_RES (152)..(152): Selenocysteine
  MOD_RES (203)..(203): Selenocysteine
SLLDELESSVPSPVPAIXVNQGEMSSPQRVXSXQQQXRISASSAXRELDELMASLSDFKVVFPPGSPIPLRRXISVLASPSVPLLQHRXDAAASSSSPLPSLLASSPLGPSAYXCGSSGVQSAGEEPHDEGVQGPALPIPAPHXMRSVGCQXDEDPLFPPMQIQGLEQRADGERCWAAGWPRDGGRSSPGGQDEGGFMAQGKXGSSS

SEQ ID NO: 22249 - protein, 192 aa, Homo sapiens
  MOD_RES (1)..(1): Any amino acid
  MOD_RES (3)..(3): Selenocysteine
  MOD_RES (12)..(12): Selenocysteine
  MOD_RES (17)..(17): Selenocysteine
  MOD_RES (24)..(25): Selenocysteine
  MOD_RES (29)..(29): Selenocysteine
  MOD_RES (46)..(46): Selenocysteine
  MOD_RES (49)..(50): Selenocysteine
  MOD_RES (55)..(55): Selenocysteine
  MOD_RES (89)..(89): Selenocysteine
  MOD_RES (93)..(93): Selenocysteine
  MOD_RES (129)..(129): Selenocysteine
  MOD_RES (135)..(135): Selenocysteine
XMXERGSVARPXQGPEXPRSPEGXXEAAXQDGKEQPELPCAMAMGXPSXXERISXSGQIRSVIRRSWESGHAHPMSREPSPRRRLDPAXLSRXPSQEQLIAELQGRLGIQPEAEEPAEAAGPSAQDWLXEGVIIXVQPRGKRAGGQLVEKVARRCPWLGLGQSQAPGVRVLPWPQCWPEGRSGERVGVSCLL

SEQ ID NO: 22250 - protein, 126 aa, Homo sapiens
  MOD_RES (16)..(16): Selenocysteine
  MOD_RES (53)..(53): Selenocysteine
  MOD_RES (63)..(63): Selenocysteine
  MOD_RES (69)..(69): Selenocysteine
  MOD_RES (89)..(89): Selenocysteine
  MOD_RES (102)..(102): Selenocysteine
MGRARDAILDALENLXAEELKKFKLKLLSVPLREGYGRIPRGALLSMDALDLXDKLVSFYLEXYGAELXANVLRDMGLQEMAGQLQAAXHQGGSPRLAYRPXGPRPHGGKGREGDHLAHILPGSGA

SEQ ID NO: 22251 - protein, 176 aa, Homo sapiens
  MOD_RES (16)..(16): Selenocysteine
  MOD_RES (53)..(53): Selenocysteine
  MOD_RES (63)..(63): Selenocysteine
  MOD_RES (69)..(69): Selenocysteine
  MOD_RES (89)..(89): Selenocysteine
  MOD_RES (108)..(108): Selenocysteine
  MOD_RES (123)..(123): Selenocysteine
  MOD_RES (135)..(135): Selenocysteine
  MOD_RES (147)..(147): Selenocysteine
  MOD_RES (153)..(153): Selenocysteine
MGRARDAILDALENLXAEELKKFKLKLLSVPLREGYGRIPRGALLSMDALDLXDKLVSFYLEXYGAELXANVLRDMGLQEMAGQLQAAXHQGLHFIDQHRAALIARVXNVEWLLDALYGKVLXDEQYQAVRAEPXNPSKMRKLFSFXPAWNWXCKDLLLQALRESQSYLVEDLERS

SEQ ID NO: 22252 - protein, 195 aa, Homo sapiens
  MOD_RES (16)..(16): Selenocysteine
  MOD_RES (53)..(53): Selenocysteine
  MOD_RES (63)..(63): Selenocysteine
  MOD_RES (69)..(69): Selenocysteine
  MOD_RES (89)..(89): Selenocysteine
  MOD_RES (127)..(127): Selenocysteine
  MOD_RES (142)..(142): Selenocysteine
  MOD_RES (154)..(154): Selenocysteine
  MOD_RES (166)..(166): Selenocysteine
  MOD_RES (172)..(172): Selenocysteine
MGRARDAILDALENLXAEELKKFKLKLLSVPLREGYGRIPRGALLSMDALDLXDKLVSFYLEXYGAELXANVLRDMGLQEMAGQLQAAXHQGSGAAPAGIQAPPQSAAKPGLHFIDQHRAALIARVXNVEWLLDALYGKVLXDEQYQAVRAEPXNPSKMRKLFSFXPAWNWXCKDLLLQALRESQSYLVEDLERS

SEQ ID NO: 22253 - protein, 89 aa, Homo sapiens
  MOD_RES (3)..(3): Selenocysteine
  MOD_RES (16)..(16): Selenocysteine
  MOD_RES (29)..(29): Selenocysteine
  MOD_RES (53)..(53): Selenocysteine
MGXKREAILKVLENLXPEELKKFKMKLGXVPLREGFERIPRGALGQLDIVDLXDKLVASYYEDYAAELVVAVLRDMRMLEEAARLQRAA

SEQ ID NO: 22254 - protein, 419 aa, Homo sapiens
  MOD_RES (44)..(44): Selenocysteine
  MOD_RES (78)..(78): Selenocysteine
  MOD_RES (103)..(103): Selenocysteine
  MOD_RES (213)..(213): Selenocysteine
  MOD_RES (228)..(228): Selenocysteine
  MOD_RES (242)..(242): Selenocysteine
  MOD_RES (246)..(246): Selenocysteine
  MOD_RES (249)..(249): Selenocysteine
  MOD_RES (265)..(265): Selenocysteine
  MOD_RES (292)..(292): Selenocysteine
  MOD_RES (295)..(295): Selenocysteine
  MOD_RES (303)..(303): Selenocysteine
  MOD_RES (318)..(319): Selenocysteine
  MOD_RES (347)..(347): Selenocysteine
  MOD_RES (372)..(372): Selenocysteine
  MOD_RES (375)..(375): Selenocysteine
  MOD_RES (377)..(377): Selenocysteine
  MOD_RES (383)..(383): Selenocysteine
  MOD_RES (394)..(394): Selenocysteine
  MOD_RES (406)..(406): Selenocysteine
  MOD_RES (409)..(409): Selenocysteine
MPAENSPAPAYKVSSHGGDSGLDGLGGPGVQLGSPDKKKRKANXQGPSFPPLSEYAPPPNPNSDHLVAANPFDDNYNXISYKPLPSSNPYLGPGYPGFGGYSXFRMPPHVPPRMSSPYCGPYSLRNQPHPFPQNPLGMGFNRPHAFNFGPHDNSSFGNPSYNNALSQNVNMPNQHFRQNPAENFSQIPPQNASQVSNPDLASNFVPGNNSNFXSPLESNHSFIPPPNXFGQAKAPPPKQDFXQGAXKNXNQNSSAHPPHLNMDDXVNQSNIELKNVNRNNAVNQENSRSSSXEAXNNNPANGXQNKPRQPRGAADACXXEKSNKSSLHPNRHGHSSSDPVYPCGICXNEVNDDQDAILCEASCQKWFHRICXGMXEXAYGLLXAEASAVWGCDXCMADKDVQLMRXREXFGPSAVGSDA

SEQ ID NO: 22255 - protein, 419 aa, Homo sapiens
  MOD_RES (44)..(44): Selenocysteine
  MOD_RES (78)..(78): Selenocysteine
  MOD_RES (103)..(103): Selenocysteine
  MOD_RES (213)..(213): Selenocysteine
  MOD_RES (228)..(228): Selenocysteine
  MOD_RES (242)..(242): Selenocysteine
  MOD_RES (246)..(246): Selenocysteine
  MOD_RES (249)..(249): Selenocysteine
  MOD_RES (265)..(265): Selenocysteine
  MOD_RES (292)..(292): Selenocysteine
  MOD_RES (295)..(295): Selenocysteine
  MOD_RES (303)..(303): Selenocysteine
  MOD_RES (318)..(319): Selenocysteine
  MOD_RES (347)..(347): Selenocysteine
  MOD_RES (372)..(372): Selenocysteine
  MOD_RES (375)..(375): Selenocysteine
  MOD_RES (377)..(377): Selenocysteine
  MOD_RES (383)..(383): Selenocysteine
  MOD_RES (394)..(394): Selenocysteine
  MOD_RES (406)..(406): Selenocysteine
  MOD_RES (409)..(409): Selenocysteine
MSAEQEKDPISLKRVRGGDSGLDGLGGPGVQLGSPDKKKRKANXQGPSFPPLSEYAPPPNPNSDHLVAANPFDDNYNXISYKPLPSSNPYLGPGYPGFGGYSXFRMPPHVPPRMSSPYCGPYSLRNQPHPFPQNPLGMGFNRPHAFNFGPHDNSSFGNPSYNNALSQNVNMPNQHFRQNPAENFSQIPPQNASQVSNPDLASNFVPGNNSNFXSPLESNHSFIPPPNXFGQAKAPPPKQDFXQGAXKNXNQNSSAHPPHLNMDDXVNQSNIELKNVNRNNAVNQENSRSSSXEAXNNNPANGXQNKPRQPRGAADACXXEKSNKSSLHPNRHGHSSSDPVYPCGICXNEVNDDQDAILCEASCQKWFHRICXGMXEXAYGLLXAEASAVWGCDXCMADKDVQLMRXREXFGPSAVGSDA

SEQ ID NO: 22256 - protein, 406 aa, Homo sapiens
  MOD_RES (27)..(27): Selenocysteine
  MOD_RES (50)..(50): Selenocysteine
  MOD_RES (59)..(59): Selenocysteine
  MOD_RES (66)..(66): Selenocysteine
  MOD_RES (120)..(120): Selenocysteine
  MOD_RES (197)..(197): Selenocysteine
  MOD_RES (241)..(241): Selenocysteine
  MOD_RES (269)..(269): Selenocysteine
  MOD_RES (302)..(302): Selenocysteine
  MOD_RES (359)..(359): Selenocysteine
  MOD_RES (362)..(362): Selenocysteine
  MOD_RES (370)..(371): Selenocysteine
  MOD_RES (385)..(385): Selenocysteine
MAASAPPPPDKLEGGGGPAPPPAPPSXGRKQGKAGLQMKSPEKKRRKSNXQGPAYSHLXEFAPPPXPMVDHLVASNPFEDDFGAPKVGVAAPPFLGSPVPFGGFRVQGGMAGQVPPGYSXGGGGGPQPLRRQPPPFPPNPMGPAFNMPPQGPGYPPPGNMNFPSQPFNQPLGQNFSPPSGQMMPGPVGGFGPMISPXMGQPPRAELGPPSLSQRFAQPGAPFGPSPLQRPGQGLPSLPPNXSPFPGPDPGFPGPGGEDGGKPLNPPASXAFPQEPHSGSPAAAVNGNQPSFPPNSSGRGGGXPDANSLAPPGKAGGGSGPQPPPGLVYPCGACRSEVNDDQDAILCEASCQKWFHRECXGMXESAYGLLXXEASAVWACDLCLKXKEIQSVYIREGMGQLVAANDG

SEQ ID NO: 22257 - protein, 369 aa, Homo sapiens
  MOD_RES (13)..(13): Selenocysteine
  MOD_RES (22)..(22): Selenocysteine
  MOD_RES (29)..(29): Selenocysteine
  MOD_RES (83)..(83): Selenocysteine
  MOD_RES (160)..(160): Selenocysteine
  MOD_RES (204)..(204): Selenocysteine
  MOD_RES (232)..(232): Selenocysteine
  MOD_RES (265)..(265): Selenocysteine
  MOD_RES (322)..(322): Selenocysteine
  MOD_RES (325)..(325): Selenocysteine
  MOD_RES (333)..(334): Selenocysteine
  MOD_RES (348)..(348): Selenocysteine
MKSPEKKRRKSNXQGPAYSHLXEFAPPPXPMVDHLVASNPFEDDFGAPKVGVAAPPFLGSPVPFGGFRVQGGMAGQVPPGYSXGGGGGPQPLRRQPPPFPPNPMGPAFNMPPQGPGYPPPGNMNFPSQPFNQPLGQNFSPPSGQMMPGPVGGFGPMISPXMGQPPRAELGPPSLSQRFAQPGAPFGPSPLQRPGQGLPSLPPNXSPFPGPDPGFPGPGGEDGGKPLNPPASXAFPQEPHSGSPAAAVNGNQPSFPPNSSGRGGGXPDANSLAPPGKAGGGSGPQPPPGLVYPCGACRSEVNDDQDAILCEASCQKWFHRECXGMXESAYGLLXXEASAVWACDLCLKXKEIQSVYIREGMGQLVAANDG

SEQ ID NO: 22258 - protein, 90 aa, Homo sapiens
  MOD_RES (12)..(13): Selenocysteine
  MOD_RES (60)..(60): Selenocysteine
  MOD_RES (72)..(72): Selenocysteine
  MOD_RES (77)..(77): Selenocysteine
MVFVRRPWPALXXVLLALLVCLGALVDAYPIKPEAPREDASPEELNRYYASLRHYLNLVXRQRYGKRDGPDXLLSKXFFPDGEDRPVRSR

SEQ ID NO: 22259 - protein, 97 aa, Homo sapiens
  MOD_RES (12)..(13): Selenocysteine
  MOD_RES (60)..(60): Selenocysteine
  MOD_RES (72)..(72): Selenocysteine
  MOD_RES (77)..(77): Selenocysteine
MVFVRRPWPALXXVLLALLVCLGALVDAYPIKPEAPREDASPEELNRYYASLRHYLNLVXRQRYGKRDGPDXLLSKXFFPDGEDRPVRSRSEGPDLW

SEQ ID NO: 22260 - protein, 136 aa, Homo sapiens
  MOD_RES (28)..(28): Selenocysteine
  MOD_RES (76)..(76): Selenocysteine
  MOD_RES (98)..(98): Selenocysteine
  MOD_RES (108)..(108): Selenocysteine
MVRPYPLIYFLFLPLGACFPLLDRREPXDAMGGLGAGERWADLAMGPRPHSVWGSSRWLRASQPQALLVIARGLQXSGREHAGCRFRFGRQDEGSEAXGFLPAAGEKXSGPLGNLAEELNGYSRKKGGFSFRFGRR

SEQ ID NO: 22261 - protein, 190 aa, Homo sapiens
  MOD_RES (7)..(7): Selenocysteine
  MOD_RES (21)..(21): Selenocysteine
  MOD_RES (37)..(37): Selenocysteine
  MOD_RES (51)..(51): Selenocysteine
  MOD_RES (71)..(71): Selenocysteine
  MOD_RES (78)..(78): Selenocysteine
  MOD_RES (80)..(80): Selenocysteine
  MOD_RES (95)..(95): Selenocysteine
  MOD_RES (102)..(102): Selenocysteine
  MOD_RES (127)..(127): Selenocysteine
  MOD_RES (131)..(131): Selenocysteine
  MOD_RES (135)..(135): Selenocysteine
  MOD_RES (137)..(137): Selenocysteine
  MOD_RES (158)..(158): Selenocysteine
  MOD_RES (164)..(164): Selenocysteine
MQALNIXPEQFSRLLRDHNLXREQFIALYRLRPLVYXPELPGRAKLALVLXGVLIFALALFGNALVFYVVXRSKAMRXVXNIFICSLALSDLLIXFFCIPVXMLQNISDNWLGGAFICKMVPFVQSXAVVXEILXMXCIAVERHQGLVHPFKMKWQYXNRRAFXMLGVVWLVAVIVGSPMWHVQQLEALP

SEQ ID NO: 22262 - protein, 258 aa, Homo sapiens
  MOD_RES (7)..(7): Selenocysteine
  MOD_RES (21)..(21): Selenocysteine
  MOD_RES (37)..(37): Selenocysteine
  MOD_RES (51)..(51): Selenocysteine
  MOD_RES (71)..(71): Selenocysteine
  MOD_RES (78)..(78): Selenocysteine
  MOD_RES (80)..(80): Selenocysteine
  MOD_RES (95)..(95): Selenocysteine
  MOD_RES (102)..(102): Selenocysteine
  MOD_RES (127)..(127): Selenocysteine
  MOD_RES (131)..(131): Selenocysteine
  MOD_RES (135)..(135): Selenocysteine
  MOD_RES (137)..(137): Selenocysteine
  MOD_RES (158)..(158): Selenocysteine
  MOD_RES (164)..(164): Selenocysteine
  MOD_RES (206)..(206): Selenocysteine
  MOD_RES (215)..(216): Selenocysteine
  MOD_RES (232)..(232): Selenocysteine
  MOD_RES (250)..(250): Selenocysteine
MQALNIXPEQFSRLLRDHNLXREQFIALYRLRPLVYXPELPGRAKLALVLXGVLIFALALFGNALVFYVVXRSKAMRXVXNIFICSLALSDLLIXFFCIPVXMLQNISDNWLGGAFICKMVPFVQSXAVVXEILXMXCIAVERHQGLVHPFKMKWQYXNRRAFXMLGVVWLVAVIVGSPMWHVQQLEIKYDFLYEKEHICCLEEWXSPVHQKIYXXFILVILFLLPLMEEEXSCHYDGDSGGSLCCVLGXIPCCPYDD

SEQ ID NO: 22263 - protein, 431 aa, Homo sapiens
  MOD_RES (7)..(7): Selenocysteine
  MOD_RES (21)..(21): Selenocysteine
  MOD_RES (37)..(37): Selenocysteine
  MOD_RES (51)..(51): Selenocysteine
  MOD_RES (71)..(71): Selenocysteine
  MOD_RES (78)..(78): Selenocysteine
  MOD_RES (80)..(80): Selenocysteine
  MOD_RES (95)..(95): Selenocysteine
  MOD_RES (102)..(102): Selenocysteine
  MOD_RES (127)..(127): Selenocysteine
  MOD_RES (131)..(131): Selenocysteine
  MOD_RES (135)..(135): Selenocysteine
  MOD_RES (137)..(137): Selenocysteine
  MOD_RES (158)..(158): Selenocysteine
  MOD_RES (164)..(164): Selenocysteine
  MOD_RES (206)..(206): Selenocysteine
  MOD_RES (215)..(216): Selenocysteine
  MOD_RES (255)..(255): Selenocysteine
  MOD_RES (277)..(277): Selenocysteine
  MOD_RES (309)..(309): Selenocysteine
  MOD_RES (355)..(355): Selenocysteine
  MOD_RES (368)..(368): Selenocysteine
  MOD_RES (386)..(386): Selenocysteine
  MOD_RES (404)..(404): Selenocysteine
MQALNIXPEQFSRLLRDHNLXREQFIALYRLRPLVYXPELPGRAKLALVLXGVLIFALALFGNALVFYVVXRSKAMRXVXNIFICSLALSDLLIXFFCIPVXMLQNISDNWLGGAFICKMVPFVQSXAVVXEILXMXCIAVERHQGLVHPFKMKWQYXNRRAFXMLGVVWLVAVIVGSPMWHVQQLEIKYDFLYEKEHICCLEEWXSPVHQKIYXXFILVILFLLPLMVMLILYSKIGYELWIKKRVGDGSVLRXIHGKEMSKIARKKKRAVIMMVXVVALFAVCWAPFHVVHMMIEYSNFEKEYDDVXIKMIFAIVQIIGFSNSICNPIVYAFMNENFKKNVLSAVCYCIVNKXFSPAQRHGNSGIXMMRKKAKFSLRENPVEEXKGEAFSDGNIEVKLCEQXEEKKKLKRHLALFRSELAENSPLDSGH

SEQ ID NO: 22264 - protein, 48 aa, Homo sapiens
  MOD_RES (8)..(8): Selenocysteine
  MOD_RES (48)..(48): Selenocysteine
MNNSLENXISFEEYIRVKARSVPQHRMKEFLDSLASKGPEALQEFQQX

SEQ ID NO: 22265 - protein, 104 aa, Homo sapiens
  MOD_RES (8)..(8): Selenocysteine
  MOD_RES (48)..(48): Selenocysteine
  MOD_RES (50)..(52): Selenocysteine
  MOD_RES (64)..(64): Selenocysteine
  MOD_RES (67)..(67): Selenocysteine
  MOD_RES (81)..(82): Selenocysteine
  MOD_RES (88)..(88): Selenocysteine
MNNSLENXISFEEYIRVKARSVPQHRMKEFLDSLASKGPEALQEFQQXAXXXMVYQQGGNCIYXDSXEVAGSLLELACPVXXSVQPQXQQEQQIQVQQPQQVQV

SEQ ID NO: 22266 - protein, 776 aa, Homo sapiens
  MOD_RES (8)..(8): Selenocysteine
  MOD_RES (48)..(48): Selenocysteine
  MOD_RES (50)..(52): Selenocysteine
  MOD_RES (64)..(64): Selenocysteine
  MOD_RES (67)..(67): Selenocysteine
  MOD_RES (81)..(82): Selenocysteine
  MOD_RES (88)..(88): Selenocysteine
  MOD_RES (124)..(124): Selenocysteine
  MOD_RES (129)..(129): Selenocysteine
  MOD_RES (153)..(153): Selenocysteine
  MOD_RES (215)..(215): Selenocysteine
  MOD_RES (238)..(238): Selenocysteine
  MOD_RES (255)..(255): Selenocysteine
  MOD_RES (267)..(267): Selenocysteine
  MOD_RES (288)..(288): Selenocysteine
  MOD_RES (298)..(298): Selenocysteine
  MOD_RES (300)..(300): Selenocysteine
  MOD_RES (302)..(302): Selenocysteine
  MOD_RES (305)..(305): Selenocysteine
  MOD_RES (308)..(308): Selenocysteine
  MOD_RES (310)..(310): Selenocysteine
  MOD_RES (328)..(328): Selenocysteine
  MOD_RES (347)..(347): Selenocysteine
  MOD_RES (364)..(365): Selenocysteine
  MOD_RES (378)..(378): Selenocysteine
  MOD_RES (405)..(405): Selenocysteine
  MOD_RES (409)..(409): Selenocysteine
  MOD_RES (412)..(412): Selenocysteine
  MOD_RES (426)..(426): Selenocysteine
  MOD_RES (431)..(431): Selenocysteine
  MOD_RES (444)..(444): Selenocysteine
  MOD_RES (449)..(449): Selenocysteine
  MOD_RES (488)..(488): Selenocysteine
  MOD_RES (532)..(532): Selenocysteine
  MOD_RES (578)..(578): Selenocysteine
  MOD_RES (593)..(593): Selenocysteine
  MOD_RES (604)..(604): Selenocysteine
  MOD_RES (621)..(621): Selenocysteine
  MOD_RES (624)..(625): Selenocysteine
  MOD_RES (631)..(631): Selenocysteine
  MOD_RES (638)..(638): Selenocysteine
  MOD_RES (654)..(654): Selenocysteine
  MOD_RES (666)..(666): Selenocysteine
  MOD_RES (679)..(679): Selenocysteine
  MOD_RES (684)..(684): Selenocysteine
  MOD_RES (692)..(692): Selenocysteine
  MOD_RES (723)..(723): Selenocysteine
  MOD_RES (727)..(727): Selenocysteine
  MOD_RES (755)..(755): Selenocysteine
  MOD_RES (774)..(774): Selenocysteine
MNNSLENXISFEEYIRVKARSVPQHRMKEFLDSLASKGPEALQEFQQXAXXXMVYQQGGNCIYXDSXEVAGSLLELACPVXXSVQPQXQQEQQIQVQQPQQVQVQVQVQQSPQQVSAQLSPQLXVHQPXEQPIQVQVQIQGQAPQSAAPSIQXPSLQSPSPSQLQAAQIQVQHVQAAQQIQAAEIPEEHIPHQQIQAQLVAGQSLAGGQQIQIQXVGALSPPPSQQGSPREGERRVGXASVLQPVKKRKVDMPIXVSYAISGQPVAXVLAIPQGQQQSYVSLRPDLLXVDSAHLYSAXGXIXSPXGEXWXIPVYSAQPRGDPQQQSIXHIAIPQEAYNAVHVSGSPXALAAVKLEDDKEKMVGXXSVVKNSHEEVVQXLANSLFPAQFMNGNIHIPVAVQAVAGXYQNXAQXVHIWDPQQQPQQQXPQEQXPPPQQQQQQLQVXCSAQXVQVAEVEPQSQPQPSPELLLPNSLKPEEGLEVWKNWAQXKNAELEKDAQNRLAPIGRRQLLRFQEDLISSAVAELNYGLCLMXREARNGEGEPYDPDVLYYIFLCIQKYLFENGRVDDIFSDLYYVRFXEWLHEVLKDVQPRVXPLGYVLPSHVXEEMLWECKQLGAHSPSXLLXXLMFFNXKYFLLKXVDQHMKLAFSKVLRQXKKNPSNPKDKSXSIRYLKALGIHQXGQKVXDDMYAEQXENPENPLRCPIKLYDFYLFKCPQSVKGRNDXFYLXPEPVVAPNSPIWYSVQPISREQMGQMLXRILVIREIQEAIAVANASXMH

SEQ ID NO: 22267 - protein, 200 aa, Homo sapiens
  MOD_RES (5)..(5): Selenocysteine
  MOD_RES (23)..(23): Selenocysteine
  MOD_RES (36)..(37): Selenocysteine
  MOD_RES (41)..(41): Selenocysteine
  MOD_RES (50)..(50): Selenocysteine
  MOD_RES (65)..(65): Selenocysteine
  MOD_RES (73)..(73): Selenocysteine
  MOD_RES (75)..(76): Selenocysteine
  MOD_RES (92)..(92): Selenocysteine
  MOD_RES (151)..(151): Selenocysteine
  MOD_RES (165)..(165): Selenocysteine
  MOD_RES (174)..(174): Selenocysteine
  MOD_RES (193)..(193): Selenocysteine
MAKKXYDLLFKLLLIGDSGVGKXCVLFRFSDDAFNXXFISXIGIDFKIKXVELQGKKIKLQIWDXAGQERFHXIXXSYYRGAMGIMLVYDIXNGKSFENISKWLRNIDEHANEDVERMLLGNKCDMDDKRVVPKGKGEQIAREHGIRFFEXSAKANINIEKAFLXLAEDILRKXPVKEPNSENVDISSGGGVXGWKSKCC

SEQ ID NO: 22268 - protein, 198 aa, Homo sapiens
  MOD_RES (3)..(3): Selenocysteine
  MOD_RES (32)..(32): Selenocysteine
  MOD_RES (43)..(43): Selenocysteine
  MOD_RES (50)..(50): Selenocysteine
  MOD_RES (59)..(59): Selenocysteine
  MOD_RES (67)..(67): Selenocysteine
  MOD_RES (77)..(77): Selenocysteine
  MOD_RES (98)..(98): Selenocysteine
  MOD_RES (136)..(136): Selenocysteine
  MOD_RES (149)..(149): Selenocysteine
  MOD_RES (152)..(152): Selenocysteine
  MOD_RES (185)..(186): Selenocysteine
MGXRDDEYDYLFKVVLIGDSGVGKSNLLSRFXRNEFNLESKSXIGVEFAXRSIQVDGKXIKAQIWDXAGQERYRAIXSAYYRGAVGALLVYDIAKHLXYENVERWLKELRDHADSNIVIMLVGNKSDLRHLRAVPXDEARAFAEAAFQXILXEIYRIVSQKQMSDRRENDMSPSNNVVPIHVPPXXENKPKVQCCQNI

SEQ ID NO: 22269 - protein, 155 aa, Homo sapiens
  MOD_RES (3)..(3): Selenocysteine
  MOD_RES (32)..(32): Selenocysteine
  MOD_RES (43)..(43): Selenocysteine
  MOD_RES (50)..(50): Selenocysteine
  MOD_RES (59)..(59): Selenocysteine
  MOD_RES (67)..(67): Selenocysteine
  MOD_RES (77)..(77): Selenocysteine
  MOD_RES (98)..(98): Selenocysteine
  MOD_RES (136)..(136): Selenocysteine
MGXRDDEYDYLFKVVLIGDSGVGKSNLLSRFXRNEFNLESKSXIGVEFAXRSIQVDGKXIKAQIWDXAGQERYRAIXSAYYRGAVGALLVYDIAKHLXYENVERWLKELRDHADSNIVIMLVGNKSDLRHLRAVPXDEARAFAEIYRIVSQKQMS

SEQ ID NO: 22270 - protein, 155 aa, Homo sapiens
  MOD_RES (3)..(3): Selenocysteine
  MOD_RES (32)..(32): Selenocysteine
  MOD_RES (43)..(43): Selenocysteine
  MOD_RES (50)..(50): Selenocysteine
  MOD_RES (59)..(59): Selenocysteine
  MOD_RES (67)..(67): Selenocysteine
  MOD_RES (77)..(77): Selenocysteine
  MOD_RES (98)..(98): Selenocysteine
  MOD_RES (136)..(136): Selenocysteine
  MOD_RES (153)..(153): Selenocysteine
MGXRDDEYDYLFKVVLIGDSGVGKSNLLSRFXRNEFNLESKSXIGVEFAXRSIQVDGKXIKAQIWDXAGQERYRAIXSAYYRGAVGALLVYDIAKHLXYENVERWLKELRDHADSNIVIMLVGNKSDLRHLRAVPXDEARAFAEKNEANVRQXRK

SEQ ID NO: 22271 - protein, 216 aa, Homo sapiens
  MOD_RES (3)..(3): Selenocysteine
  MOD_RES (32)..(32): Selenocysteine
  MOD_RES (43)..(43): Selenocysteine
  MOD_RES (50)..(50): Selenocysteine
  MOD_RES (59)..(59): Selenocysteine
  MOD_RES (67)..(67): Selenocysteine
  MOD_RES (77)..(77): Selenocysteine
  MOD_RES (98)..(98): Selenocysteine
  MOD_RES (136)..(136): Selenocysteine
  MOD_RES (153)..(153): Selenocysteine
  MOD_RES (159)..(159): Selenocysteine
  MOD_RES (167)..(167): Selenocysteine
  MOD_RES (170)..(170): Selenocysteine
  MOD_RES (203)..(204): Selenocysteine
MGXRDDEYDYLFKVVLIGDSGVGKSNLLSRFXRNEFNLESKSXIGVEFAXRSIQVDGKXIKAQIWDXAGQERYRAIXSAYYRGAVGALLVYDIAKHLXYENVERWLKELRDHADSNIVIMLVGNKSDLRHLRAVPXDEARAFAEKNGLSFIEXSALDSXNVEAAFQXILXEIYRIVSQKQMSDRRENDMSPSNNVVPIHVPPXXENKPKVQCCQNI

SEQ ID NO: 22272 - protein, 146 aa, Homo sapiens
  MOD_RES (3)..(3): Selenocysteine
  MOD_RES (28)..(28): Selenocysteine
  MOD_RES (66)..(66): Selenocysteine
  MOD_RES (83)..(83): Selenocysteine
  MOD_RES (89)..(89): Selenocysteine
  MOD_RES (97)..(97): Selenocysteine
  MOD_RES (100)..(100): Selenocysteine
  MOD_RES (133)..(134): Selenocysteine
MGXRDDEYDYLFKVVLIGDSGVGKSNLXYENVERWLKELRDHADSNIVIMLVGNKSDLRHLRAVPXDEARAFAEKNGLSFIEXSALDSXNVEAAFQXILXEIYRIVSQKQMSDRRENDMSPSNNVVPIHVPPXXENKPKVQCCQNI

SEQ ID NO: 22273 - protein, 82 aa, Homo sapiens
  MOD_RES (17)..(17): Selenocysteine
  MOD_RES (34)..(34): Selenocysteine
  MOD_RES (40)..(40): Selenocysteine
  MOD_RES (48)..(48): Selenocysteine
  MOD_RES (51)..(51): Selenocysteine
MLVGNKSDLRHLRAVPXDEARAFAEKNGLSFIEXSALDSXNVEAAFQXILXEIYRIVSQKQMSDRRENDMSPSNNVVPIHVP

SEQ ID NO: 22274 - protein, 218 aa, Homo sapiens
  MOD_RES (3)..(3): Selenocysteine
  MOD_RES (32)..(32): Selenocysteine
  MOD_RES (43)..(43): Selenocysteine
  MOD_RES (50)..(50): Selenocysteine
  MOD_RES (59)..(59): Selenocysteine
  MOD_RES (67)..(67): Selenocysteine
  MOD_RES (77)..(77): Selenocysteine
  MOD_RES (98)..(98): Selenocysteine
  MOD_RES (136)..(136): Selenocysteine
  MOD_RES (153)..(153): Selenocysteine
  MOD_RES (159)..(159): Selenocysteine
  MOD_RES (170)..(170): Selenocysteine
  MOD_RES (203)..(204): Selenocysteine
MGXRDDEYDYLFKVVLIGDSGVGKSNLLSRFXRNEFNLESKSXIGVEFAXRSIQVDGKXIKAQIWDXAGQERYRAIXSAYYRGAVGALLVYDIAKHLXYENVERWLKELRDHADSNIVIMLVGNKSDLRHLRAVPXDEARAFAEKNNLSFIEXSALDSXNVEEAFKNILXEIYRIVSQKQIADRAAHDESPGNNVVDISVPPXXDGQKPNKLQCCQNL

SEQ ID NO: 22275 - protein, 179 aa, Homo sapiens
  MOD_RES (3)..(3): Selenocysteine
  MOD_RES (32)..(32): Selenocysteine
  MOD_RES (43)..(43): Selenocysteine
  MOD_RES (50)..(50): Selenocysteine
  MOD_RES (59)..(59): Selenocysteine
  MOD_RES (67)..(67): Selenocysteine
  MOD_RES (77)..(77): Selenocysteine
  MOD_RES (98)..(98): Selenocysteine
  MOD_RES (136)..(136): Selenocysteine
  MOD_RES (153)..(153): Selenocysteine
  MOD_RES (159)..(159): Selenocysteine
  MOD_RES (170)..(170): Selenocysteine
MGXRDDEYDYLFKVVLIGDSGVGKSNLLSRFXRNEFNLESKSXIGVEFAXRSIQVDGKXIKAQIWDXAGQERYRAIXSAYYRGAVGALLVYDIAKHLXYENVERWLKELRDHADSNIVIMLVGNKSDLRHLRAVPXDEARAFAEKNNLSFIEXSALDSXNVEEAFKNILXGGRGPDGCG

SEQ ID NO: 22276 - protein, 46 aa, Homo sapiens
  MOD_RES (17)..(17): Selenocysteine
  MOD_RES (34)..(34): Selenocysteine
  MOD_RES (40)..(40): Selenocysteine
MLVGNKSDLRHLRAVPXDEARAFAEKNNLSFIEXSALDSXNVEEAF

SEQ ID NO: 22277 - protein, 60 aa, Homo sapiens
  MOD_RES (17)..(17): Selenocysteine
  MOD_RES (34)..(34): Selenocysteine
  MOD_RES (40)..(40): Selenocysteine
  MOD_RES (51)..(51): Selenocysteine
MLVGNKSDLRHLRAVPXDEARAFAEKNNLSFIEXSALDSXNVEEAFKNILXGGRGPDGCG

SEQ ID NO: 22278 - protein, 244 aa, Homo sapiens
  MOD_RES (56)..(56): Selenocysteine
  MOD_RES (63)..(63): Selenocysteine
  MOD_RES (66)..(66): Selenocysteine
  MOD_RES (74)..(74): Selenocysteine
  MOD_RES (83)..(83): Selenocysteine
  MOD_RES (98)..(98): Selenocysteine
  MOD_RES (108)..(108): Selenocysteine
  MOD_RES (125)..(125): Selenocysteine
  MOD_RES (129)..(129): Selenocysteine
  MOD_RES (161)..(161): Selenocysteine
  MOD_RES (166)..(166): Selenocysteine
  MOD_RES (178)..(178): Selenocysteine
MDPGAALQRRAGGGGGLGAGSPALSGGQGRRRKQPPRPADFKLQVIIIGSRGVGKXSLMERFXDDXFCEACKSXVGVDFKIKXVELRGKKIRLQIWDXAGQERFNSIXSAYYRSAKGIILVYDIXKKEXFDDLPKWMKMIDKYASEDAELLLVGNKLDCEXDREIXRQQGEKFAQQIXGMRFCEASAKDNFNVDEIFLKLVDDILKKMPLDILRNELSNSILSLQPEPEIPPELPPPRPHVRCC

SEQ ID NO: 22279 - protein, 203 aa, Homo sapiens
  MOD_RES (22)..(22): Selenocysteine
  MOD_RES (36)..(36): Selenocysteine
  MOD_RES (40)..(40): Selenocysteine
  MOD_RES (49)..(49): Selenocysteine
  MOD_RES (64)..(64): Selenocysteine
  MOD_RES (72)..(72): Selenocysteine
  MOD_RES (74)..(75): Selenocysteine
  MOD_RES (91)..(91): Selenocysteine
  MOD_RES (150)..(150): Selenocysteine
  MOD_RES (187)..(187): Selenocysteine
  MOD_RES (191)..(191): Selenocysteine
  MOD_RES (197)..(197): Selenocysteine
MAKAYDHLFKLLLIGDSGVGKXCLIIRFAEDNFNNXYISXIGIDFKIRXVDIEGKKIKLQVWDXAGQERFKXIXXAYYRGAMGIILVYDIXDEKSFENIQNWMKSIKENASAGVERLLLGNKCDMEAKRKVQKEQADKLAREHGIRFFEXSAKSSMNVDEAFSSLARDILLKSGGRRSGNGNKPPSXDLKXCDKKNXNKCSLG

SEQ ID NO: 22280 - protein, 122 aa, Homo sapiens
  MOD_RES (10)..(10): Selenocysteine
  MOD_RES (69)..(69): Selenocysteine
  MOD_RES (106)..(106): Selenocysteine
  MOD_RES (110)..(110): Selenocysteine
  MOD_RES (116)..(116): Selenocysteine
MGIILVYDIXDEKSFENIQNWMKSIKENASAGVERLLLGNKCDMEAKRKVQKEQADKLAREHGIRFFEXSAKSSMNVDEAFSSLARDILLKSGGRRSGNGNKPPSXDLKXCDKKNXNKCSLG

SEQ ID NO: 22281 - protein, 181 aa, Homo sapiens
  MOD_RES (3)..(3): Selenocysteine
  MOD_RES (32)..(32): Selenocysteine
  MOD_RES (43)..(43): Selenocysteine
  MOD_RES (50)..(50): Selenocysteine
  MOD_RES (67)..(67): Selenocysteine
  MOD_RES (77)..(77): Selenocysteine
  MOD_RES (94)..(94): Selenocysteine
  MOD_RES (98)..(98): Selenocysteine
  MOD_RES (107)..(107): Selenocysteine
  MOD_RES (113)..(113): Selenocysteine
  MOD_RES (117)..(117): Selenocysteine
  MOD_RES (135)..(135): Selenocysteine
  MOD_RES (157)..(157): Selenocysteine
MAXAPYNYSYIFKYIIIGDMGVGKSCLLHQFXEKKFMADCPHXIGVEFGXRIIEVSGQKIKLQIWDXAGQERFRAVXRSYYRGAAGALMVYDIXRRSXYNHLSSWLXDARNLXNPNXVIILIGNKADLEAQRDVXYEEAKQFAEENGLLFLEASAKXGENVEDAFLEAAKKIYQNIQDGSL

SEQ ID NO: 22282 - protein, 215 aa, Homo sapiens
  MOD_RES (3)..(3): Selenocysteine
  MOD_RES (32)..(32): Selenocysteine
  MOD_RES (43)..(43): Selenocysteine
  MOD_RES (50)..(50): Selenocysteine
  MOD_RES (67)..(67): Selenocysteine
  MOD_RES (77)..(77): Selenocysteine
  MOD_RES (94)..(94): Selenocysteine
  MOD_RES (98)..(98): Selenocysteine
  MOD_RES (107)..(107): Selenocysteine
  MOD_RES (113)..(113): Selenocysteine
  MOD_RES (117)..(117): Selenocysteine
  MOD_RES (135)..(135): Selenocysteine
  MOD_RES (157)..(157): Selenocysteine
  MOD_RES (203)..(203): Selenocysteine
MAXAPYNYSYIFKYIIIGDMGVGKSCLLHQFXEKKFMADCPHXIGVEFGXRIIEVSGQKIKLQIWDXAGQERFRAVXRSYYRGAAGALMVYDIXRRSXYNHLSSWLXDARNLXNPNXVIILIGNKADLEAQRDVXYEEAKQFAEENGLLFLEASAKXGENVEDAFLEAAKKIYQNIQDGSLDLNAAESGVQHKPSAPQGGRLXSEPQPQREGCGC

SEQ ID NO: 22283 - protein, 208 aa, Homo sapiens
  MOD_RES (22)..(22): Selenocysteine
  MOD_RES (29)..(29): Selenocysteine
  MOD_RES (40)..(40): Selenocysteine
  MOD_RES (49)..(49): Selenocysteine
  MOD_RES (64)..(64): Selenocysteine
  MOD_RES (72)..(72): Selenocysteine
  MOD_RES (74)..(74): Selenocysteine
  MOD_RES (113)..(113): Selenocysteine
  MOD_RES (150)..(150): Selenocysteine
  MOD_RES (153)..(153): Selenocysteine
  MOD_RES (190)..(190): Selenocysteine
  MOD_RES (199)..(199): Selenocysteine
  MOD_RES (201)..(201): Selenocysteine
MAKQYDVLFRLLLIGDSGVGKXCLLCRFXDNEFHSSHISXIGVDFKMKXIEVDGIKVRIQIWDXAGQERYQXIXKQYYRRAQGIFLVYDISSERSYQHIMKWVSDVDEVGDAXSLPGCGEGASPGKARRGPDGKANASRKLCLPQPWMKXSGXHQKASRRSLLGIRLMRSRNGRWEESKGSSWRRSMAWXSMKQVPAPXSXLKSHSRV

SEQ ID NO: 22284 - protein, 212 aa, Homo sapiens
  MOD_RES (22)..(22): Selenocysteine
  MOD_RES (29)..(29): Selenocysteine
  MOD_RES (40)..(40): Selenocysteine
  MOD_RES (49)..(49): Selenocysteine
  MOD_RES (64)..(64): Selenocysteine
  MOD_RES (72)..(72): Selenocysteine
  MOD_RES (74)..(74): Selenocysteine
  MOD_RES (150)..(150): Selenocysteine
  MOD_RES (154)..(154): Selenocysteine
  MOD_RES (163)..(163): Selenocysteine
  MOD_RES (166)..(166): Selenocysteine
  MOD_RES (209)..(209): Selenocysteine
MAKQYDVLFRLLLIGDSGVGKXCLLCRFXDNEFHSSHISXIGVDFKMKXIEVDGIKVRIQIWDXAGQERYQXIXKQYYRRAQGIFLVYDISSERSYQHIMKWVSDVDEYAPEGVQKILIGNKADEEQKRQVGREQGQQLAKEYGMDFYEXSACXNLNIKESFXRLXELVLQAHRKELEGLRMRASNELALAELEEEEGKPEGPANSSKXCWC

SEQ ID NO: 22285 - protein, 150 aa, Homo sapiens
  MOD_RES (3)..(3): Selenocysteine
  MOD_RES (18)..(18): Selenocysteine
  MOD_RES (26)..(26): Selenocysteine
  MOD_RES (28)..(28): Selenocysteine
  MOD_RES (104)..(104): Selenocysteine
  MOD_RES (108)..(108): Selenocysteine
  MOD_RES (117)..(117): Selenocysteine
  MOD_RES (120)..(120): Selenocysteine
MKXIEVDGIKVRIQIWDXAGQERYQXIXKQYYRRAQGIFLVYDISSERSYQHIMKWVSDVDEYAPEGVQKILIGNKADEEQKRQVGREQGQQLAKEYGMDFYEXSACXNLNIKESFXRLXELVLQAHRKELEGLRMRASNELALAELEEE

SEQ ID NO: 22286 - protein, 166 aa, Homo sapiens
  MOD_RES (3)..(3): Selenocysteine
  MOD_RES (18)..(18): Selenocysteine
  MOD_RES (26)..(26): Selenocysteine
  MOD_RES (28)..(28): Selenocysteine
  MOD_RES (104)..(104): Selenocysteine
  MOD_RES (108)..(108): Selenocysteine
  MOD_RES (117)..(117): Selenocysteine
  MOD_RES (120)..(120): Selenocysteine
  MOD_RES (163)..(163): Selenocysteine
MKXIEVDGIKVRIQIWDXAGQERYQXIXKQYYRRAQGIFLVYDISSERSYQHIMKWVSDVDEYAPEGVQKILIGNKADEEQKRQVGREQGQQLAKEYGMDFYEXSACXNLNIKESFXRLXELVLQAHRKELEGLRMRASNELALAELEEEEGKPEGPANSSKXCWC

SEQ ID NO: 22287 - protein, 140 aa, Homo sapiens
  MOD_RES (1)..(1): Any amino acid
  MOD_RES (37)..(37): Selenocysteine
  MOD_RES (52)..(52): Selenocysteine
  MOD_RES (60)..(60): Selenocysteine
  MOD_RES (62)..(62): Selenocysteine
  MOD_RES (101)..(101): Selenocysteine
  MOD_RES (138)..(138): Selenocysteine
XPRPQLGRNCQPLRLEAVAPEAGVRDKSRGVDFKMKXIEVDGIKVRIQIWDXAGQERYQXIXKQYYRRAQGIFLVYDISSERSYQHIMKWVSDVDEVGDAXSLPGCGEGASPGKARRGPDGKANASRKLCLPQPWMKXSG

SEQ ID NO: 22288 - protein, 130 aa, Homo sapiens
  MOD_RES (7)..(7): Selenocysteine
  MOD_RES (35)..(35): Selenocysteine
  MOD_RES (43)..(43): Selenocysteine
  MOD_RES (52)..(52): Selenocysteine
  MOD_RES (79)..(79): Selenocysteine
  MOD_RES (112)..(112): Selenocysteine
  MOD_RES (121)..(121): Selenocysteine
MAQAHRXPQPRAAPSQPRVFKLVLLGSGSVGAFFXKVVDVGAXSLKLEIWDXAGQEKYHSVCHLYFRGANAALLVYDIXRKDSFLKAQQWLKDLEEELHPGEVLVMLVGNKXDLSQEREVXFQEGKEFAD

SEQ ID NO: 22289 - protein, 54 aa, Homo sapiens
  MOD_RES (7)..(7): Selenocysteine
MAQAHRXPQPRAAPSQPRVFKLVLLGSGSVGKSSLALRCVLHKGGGCGCHLSEA

SEQ ID NO: 22290 - protein, 52 aa, Homo sapiens
  MOD_RES (7)..(7): Selenocysteine
  MOD_RES (50)..(50): Selenocysteine
MAQAHRXPQPRAAPSQPRVFKLVLLGSGSVGKSSLALRYVKNDFKSILPXVG

SEQ ID NO: 22291 - protein, 212 aa, Homo sapiens
  MOD_RES (7)..(7): Selenocysteine
  MOD_RES (50)..(50): Selenocysteine
  MOD_RES (57)..(57): Selenocysteine
  MOD_RES (65)..(65): Selenocysteine
  MOD_RES (74)..(74): Selenocysteine
  MOD_RES (101)..(101): Selenocysteine
  MOD_RES (134)..(134): Selenocysteine
  MOD_RES (143)..(143): Selenocysteine
  MOD_RES (161)..(161): Selenocysteine
  MOD_RES (175)..(175): Selenocysteine
MAQAHRXPQPRAAPSQPRVFKLVLLGSGSVGKSSLALRYVKNDFKSILPXVGCAFFXKVVDVGAXSLKLEIWDXAGQEKYHSVCHLYFRGANAALLVYDIXRKDSFLKAQQWLKDLEEELHPGEVLVMLVGNKXDLSQEREVXFQEGKEFADSQKLLFMEXSAKLNHQVSEVFNXVAQELLQRSDEEGQALRGDAAVALNKGPARQAKCCAH

SEQ ID NO: 22292 - protein, 53 aa, Homo sapiens
  MOD_RES (16)..(16): Selenocysteine
MAQMEVVVPGRNGAMXDCGVGPGFPHLGEVAPGKGSWGQWRQFPSMVSRLAMW

SEQ ID NO: 22293 - protein, 85 aa, Homo sapiens
  MOD_RES (7)..(7): Selenocysteine
  MOD_RES (16)..(16): Selenocysteine
  MOD_RES (34)..(34): Selenocysteine
  MOD_RES (48)..(48): Selenocysteine
MLVGNKXDLSQEREVXFQEGKEFADSQKLLFMEXSAKLNHQVSEVFNXVAQELLQRSDEEGQALRGDAAVALNKGPARQAKCCAH

SEQ ID NO: 22294 - protein, 141 aa, Homo sapiens
  MOD_RES (1)..(1): Any amino acid
  MOD_RES (17)..(17): Selenocysteine
  MOD_RES (25)..(25): Selenocysteine
  MOD_RES (34)..(34): Selenocysteine
  MOD_RES (61)..(61): Selenocysteine
  MOD_RES (94)..(94): Selenocysteine
  MOD_RES (103)..(103): Selenocysteine
  MOD_RES (121)..(121): Selenocysteine
  MOD_RES (124)..(124): Selenocysteine
  MOD_RES (134)..(134): Selenocysteine
XFKLVLLGSGSVGAFFXKVVDVGAXSLKLEIWDXAGQEKYHSVCHLYFRGANAALLVYDIXRKDSFLKAQQWLKDLEEELHPGEVLVMLVGNKXDLSQEREVXFQDEDRVNSCRQVADGEXPHXLEAGAGEDPXQGLDRRA

SEQ ID NO: 22295 - protein, 206 aa, Homo sapiens
  MOD_RES (7)..(8): Selenocysteine
  MOD_RES (29)..(29): Selenocysteine
  MOD_RES (32)..(32): Selenocysteine
  MOD_RES (40)..(40): Selenocysteine
  MOD_RES (49)..(49): Selenocysteine
  MOD_RES (64)..(64): Selenocysteine
  MOD_RES (72)..(72): Selenocysteine
  MOD_RES (74)..(74): Selenocysteine
  MOD_RES (91)..(91): Selenocysteine
  MOD_RES (95)..(95): Selenocysteine
  MOD_RES (108)..(108): Selenocysteine
  MOD_RES (111)..(111): Selenocysteine
  MOD_RES (154)..(154): Selenocysteine
  MOD_RES (172)..(172): Selenocysteine
MDEDVLXXLKILIIGESGVGKSSLLLRFXDDXFDPELAAXIGVDFKVKXISVDGNKAKLAIWDXAGQERFRXLXPSYYRGAQGVILVYDVXRRDXFVKLDNWLNELEXYCXRNDIVNMLVGNKIDKENREVDRNEGLKFARKHSMLFIEASAKXCDGVQCAFEELVEKIIQXPGLWESENQNKGVKLSHREEGQGGGACGGYCSVL

SEQ ID NO: 22296 - protein, 142 aa, Homo sapiens
  MOD_RES (7)..(8): Selenocysteine
  MOD_RES (29)..(29): Selenocysteine
  MOD_RES (32)..(32): Selenocysteine
  MOD_RES (40)..(40): Selenocysteine
  MOD_RES (49)..(49): Selenocysteine
  MOD_RES (90)..(90): Selenocysteine
  MOD_RES (108)..(108): Selenocysteine
MDEDVLXXLKILIIGESGVGKSSLLLRFXDDXFDPELAAXIGVDFKVKXISVDGNKAKLAIWENREVDRNEGLKFARKHSMLFIEASAKXCDGVQCAFEELVEKIIQXPGLWESENQNKGVKLSHREEGQGGGACGGYCSVL

SEQ ID NO: 22297 - protein, 235 aa, Homo sapiens
  MOD_RES (7)..(8): Selenocysteine
  MOD_RES (29)..(29): Selenocysteine
  MOD_RES (32)..(32): Selenocysteine
  MOD_RES (40)..(40): Selenocysteine
  MOD_RES (49)..(49): Selenocysteine
  MOD_RES (64)..(64): Selenocysteine
  MOD_RES (69)..(69): Selenocysteine
  MOD_RES (93)..(93): Selenocysteine
  MOD_RES (101)..(101): Selenocysteine
  MOD_RES (103)..(103): Selenocysteine
  MOD_RES (120)..(120): Selenocysteine
  MOD_RES (124)..(124): Selenocysteine
  MOD_RES (137)..(137): Selenocysteine
  MOD_RES (140)..(140): Selenocysteine
  MOD_RES (183)..(183): Selenocysteine
  MOD_RES (201)..(201): Selenocysteine
MDEDVLXXLKILIIGESGVGKSSLLLRFXDDXFDPELAAXIGVDFKVKXISVDGNKAKLAIWVXLHQQXANFFLKSQIGNSPILKWAMWQYDXAGQERFRXLXPSYYRGAQGVILVYDVXRRDXFVKLDNWLNELEXYCXRNDIVNMLVGNKIDKENREVDRNEGLKFARKHSMLFIEASAKXCDGVQCAFEELVEKIIQXPGLWESENQNKGVKLSHREEGQGGGACGGYCSVL

SEQ ID NO: 22298 - protein, 161 aa, Homo sapiens
  MOD_RES (7)..(8): Selenocysteine
  MOD_RES (29)..(29): Selenocysteine
  MOD_RES (32)..(32): Selenocysteine
  MOD_RES (40)..(40): Selenocysteine
  MOD_RES (46)..(46): Selenocysteine
  MOD_RES (50)..(50): Selenocysteine
  MOD_RES (63)..(63): Selenocysteine
  MOD_RES (66)..(66): Selenocysteine
  MOD_RES (109)..(109): Selenocysteine
  MOD_RES (127)..(127): Selenocysteine
MDEDVLXXLKILIIGESGVGKSSLLLRFXDDXFDPELAAXIVYDVXRRDXFVKLDNWLNELEXYCXRNDIVNMLVGNKIDKENREVDRNEGLKFARKHSMLFIEASAKXCDGVQCAFEELVEKIIQXPGLWESENQNKGVKLSHREEGQGGGACGGYCSVL

SEQ ID NO: 22299 - protein, 182 aa, Homo sapiens
  MOD_RES (7)..(8): Selenocysteine
  MOD_RES (29)..(29): Selenocysteine
  MOD_RES (32)..(32): Selenocysteine
  MOD_RES (40)..(40): Selenocysteine
  MOD_RES (48)..(48): Selenocysteine
  MOD_RES (50)..(50): Selenocysteine
  MOD_RES (67)..(67): Selenocysteine
  MOD_RES (71)..(71): Selenocysteine
  MOD_RES (84)..(84): Selenocysteine
  MOD_RES (87)..(87): Selenocysteine
  MOD_RES (130)..(130): Selenocysteine
  MOD_RES (148)..(148): Selenocysteine
MDEDVLXXLKILIIGESGVGKSSLLLRFXDDXFDPELADXAGQERFRXLXPSYYRGAQGVILVYDVXRRDXFVKLDNWLNELEXYCXRNDIVNMLVGNKIDKENREVDRNEGLKFARKHSMLFIEASAKXCDGVQCAFEELVEKIIQXPGLWESENQNKGVKLSHREEGQGGGACGGYCSVL

SEQ ID NO: 22300 - protein, 291 aa, Homo sapiens
  MOD_RES (1)..(1): Any amino acid
  MOD_RES (26)..(26): Selenocysteine
  MOD_RES (46)..(46): Selenocysteine
  MOD_RES (92)..(92): Selenocysteine
  MOD_RES (101)..(101): Selenocysteine
  MOD_RES (113)..(113): Selenocysteine
  MOD_RES (116)..(116): Selenocysteine
  MOD_RES (124)..(124): Selenocysteine
  MOD_RES (133)..(133): Selenocysteine
  MOD_RES (148)..(148): Selenocysteine
  MOD_RES (153)..(153): Selenocysteine
  MOD_RES (177)..(177): Selenocysteine
  MOD_RES (185)..(185): Selenocysteine
  MOD_RES (187)..(187): Selenocysteine
  MOD_RES (204)..(204): Selenocysteine
  MOD_RES (208)..(208): Selenocysteine
  MOD_RES (221)..(221): Selenocysteine
  MOD_RES (224)..(224): Selenocysteine
  MOD_RES (267)..(267): Selenocysteine
  MOD_RES (285)..(285): Selenocysteine
XRLPGSRPLPGPSSLGRSPSCSAEKXPFRGPPLGRQSAVKELDLVXAGKFRFSVRSECFSRGPPLKIKCNCYFSFCHILWRQKISVVLSFFXFSLGKIILXVELSISLLLRFXDDXFDPELAAXIGVDFKVKXISVDGNKAKLAIWVXLHQQXANFFLKSQIGNSPILKWAMWQYDXAGQERFRXLXPSYYRGAQGVILVYDVXRRDXFVKLDNWLNELEXYCXRNDIVNMLVGNKIDKENREVDRNEGLKFARKHSMLFIEASAKXCDGVQCAFEELVEKIIQXPGLWES

SEQ ID NO: 22301 - protein, 149 aa, Homo sapiens
  MOD_RES (31)..(31): Selenocysteine
  MOD_RES (43)..(43): Selenocysteine
  MOD_RES (45)..(45): Selenocysteine
  MOD_RES (49)..(49): Selenocysteine
  MOD_RES (55)..(55): Selenocysteine
  MOD_RES (73)..(73): Selenocysteine
  MOD_RES (81)..(81): Selenocysteine
  MOD_RES (83)..(83): Selenocysteine
  MOD_RES (100)..(100): Selenocysteine
  MOD_RES (104)..(104): Selenocysteine
  MOD_RES (147)..(147): Selenocysteine
MHFSSSARAADENFDYLFKIILIGDSNVGKXCVVQHFKSGVYXEXQQNXIGVDFXVRSLDIDGKKVKMQVWDXAGQERFRXIXQSYYRSAHAAIIAYDLXRRSXFESIPHWIHEIEKYGAANVVIMLIGNKCDLWEKRHVLFEDACXLA

SEQ ID NO: 22302 - protein, 217 aa, Homo sapiens
  MOD_RES (31)..(31): Selenocysteine
  MOD_RES (43)..(43): Selenocysteine
  MOD_RES (45)..(45): Selenocysteine
  MOD_RES (49)..(49): Selenocysteine
  MOD_RES (55)..(55): Selenocysteine
  MOD_RES (73)..(73): Selenocysteine
  MOD_RES (81)..(81): Selenocysteine
  MOD_RES (83)..(83): Selenocysteine
  MOD_RES (100)..(100): Selenocysteine
  MOD_RES (104)..(104): Selenocysteine
  MOD_RES (147)..(147): Selenocysteine
  MOD_RES (160)..(160): Selenocysteine
  MOD_RES (213)..(213): Selenocysteine
  MOD_RES (216)..(216): Selenocysteine
MHFSSSARAADENFDYLFKIILIGDSNVGKXCVVQHFKSGVYXEXQQNXIGVDFXVRSLDIDGKKVKMQVWDXAGQERFRXIXQSYYRSAHAAIIAYDLXRRSXFESIPHWIHEIEKYGAANVVIMLIGNKCDLWEKRHVLFEDACXLAEKYGLLAVLEXSAKESKNIEEVFVLMAKELIARNSLHLYGESALNGLPLDSSPVLMAQGPSEKXHCXC

SEQ ID NO: 22303 - protein, 129 aa, Homo sapiens
  MOD_RES (35)..(35): Selenocysteine
  MOD_RES (37)..(37): Selenocysteine
  MOD_RES (43)..(43): Selenocysteine
  MOD_RES (52)..(52): Selenocysteine
  MOD_RES (59)..(59): Selenocysteine
  MOD_RES (77)..(77): Selenocysteine
  MOD_RES (83)..(83): Selenocysteine
  MOD_RES (91)..(91): Selenocysteine
  MOD_RES (105)..(105): Selenocysteine
  MOD_RES (119)..(119): Selenocysteine
MSSMNPEYDYLFKLLLIGDSGVGKSCLLLRFADDXYXESYISXIGVDFKIRXIELDGKXIKLQIEFADSLGIPFLEXSAKNAXNVEQSFMXMAAEIKKRMGPGAXAGGAEKSNVKIQSXPVKQSGGGCC

SEQ ID NO: 22304 - protein, 205 aa, Homo sapiens
  MOD_RES (35)..(35): Selenocysteine
  MOD_RES (37)..(37): Selenocysteine
  MOD_RES (43)..(43): Selenocysteine
  MOD_RES (52)..(52): Selenocysteine
  MOD_RES (59)..(59): Selenocysteine
  MOD_RES (67)..(67): Selenocysteine
  MOD_RES (75)..(75): Selenocysteine
  MOD_RES (77)..(77): Selenocysteine
  MOD_RES (94)..(94): Selenocysteine
  MOD_RES (129)..(130): Selenocysteine
  MOD_RES (137)..(138): Selenocysteine
  MOD_RES (153)..(153): Selenocysteine
  MOD_RES (159)..(159): Selenocysteine
  MOD_RES (167)..(167): Selenocysteine
  MOD_RES (181)..(181): Selenocysteine
  MOD_RES (195)..(195): Selenocysteine
MSSMNPEYDYLFKLLLIGDSGVGKSCLLLRFADDXYXESYISXIGVDFKIRXIELDGKXIKLQIWDXAGQERFRXIXSSYYRGAHGIIVVYDVXDQESFNNVKQWLQEIDRYASENVNKLLVGNKCDLXXKKVVDYXXAKEFADSLGIPFLEXSAKNAXNVEQSFMXMAAEIKKRMGPGAXAGGAEKSNVKIQSXPVKQSGGGCC

SEQ ID NO: 22305 - protein, 141 aa, Homo sapiens
  MOD_RES (65)..(66): Selenocysteine
  MOD_RES (73)..(74): Selenocysteine
  MOD_RES (89)..(89): Selenocysteine
  MOD_RES (95)..(95): Selenocysteine
  MOD_RES (103)..(103): Selenocysteine
  MOD_RES (117)..(117): Selenocysteine
  MOD_RES (131)..(131): Selenocysteine
MSSMNPEYDYLFKLLLIGDSGVGKSCLLLRFAESFNNVKQWLQEIDRYASENVNKLLVGNKCDLXXKKVVDYXXAKEFADSLGIPFLEXSAKNAXNVEQSFMXMAAEIKKRMGPGAXAGGAEKSNVKIQSXPVKQSGGGCC

SEQ ID NO: 22306 - protein, 173 aa, Homo sapiens
  MOD_RES (35)..(35): Selenocysteine
  MOD_RES (43)..(43): Selenocysteine
  MOD_RES (45)..(45): Selenocysteine
  MOD_RES (62)..(62): Selenocysteine
  MOD_RES (97)..(98): Selenocysteine
  MOD_RES (105)..(106): Selenocysteine
  MOD_RES (121)..(121): Selenocysteine
  MOD_RES (127)..(127): Selenocysteine
  MOD_RES (135)..(135): Selenocysteine
  MOD_RES (149)..(149): Selenocysteine
  MOD_RES (163)..(163): Selenocysteine
MSSMNPEYDYLFKLLLIGDSGVGKSCLLLRFAWDXAGQERFRXIXSSYYRGAHGIIVVYDVXDQESFNNVKQWLQEIDRYASENVNKLLVGNKCDLXXKKVVDYXXAKEFADSLGIPFLEXSAKNAXNVEQSFMXMAAEIKKRMGPGAXAGGAEKSNVKIQSXPVKQSGGGCC

SEQ ID NO: 22307 - protein, 169 aa, Homo sapiens
  MOD_RES (32)..(32): Selenocysteine
  MOD_RES (34)..(34): Selenocysteine
  MOD_RES (40)..(40): Selenocysteine
  MOD_RES (49)..(49): Selenocysteine
  MOD_RES (56)..(56): Selenocysteine
  MOD_RES (94)..(95): Selenocysteine
  MOD_RES (102)..(103): Selenocysteine
  MOD_RES (118)..(118): Selenocysteine
  MOD_RES (124)..(124): Selenocysteine
  MOD_RES (132)..(132): Selenocysteine
  MOD_RES (159)..(159): Selenocysteine
MNPEYDYLFKLLLIGDSGVGKSCLLLRFADDXYXESYISXIGVDFKIRXIELDGKXIKLQIESYANVKQWLQEIDRYASENVNKLLVGNKSDLXXKKVVDNXXAKEFADSLGIPFLEXSAKNAXNVEQAFMXMAAEIKKRMGPGAASGGERPNLKIDSXPVKPAGGGCC

SEQ ID NO: 22308 - protein, 201 aa, Homo sapiens
  MOD_RES (32)..(32): Selenocysteine
  MOD_RES (34)..(34): Selenocysteine
  MOD_RES (40)..(40): Selenocysteine
  MOD_RES (49)..(49): Selenocysteine
  MOD_RES (56)..(56): Selenocysteine
  MOD_RES (64)..(64): Selenocysteine
  MOD_RES (72)..(72): Selenocysteine
  MOD_RES (74)..(74): Selenocysteine
  MOD_RES (91)..(91): Selenocysteine
  MOD_RES (126)..(127): Selenocysteine
  MOD_RES (134)..(135): Selenocysteine
  MOD_RES (150)..(150): Selenocysteine
  MOD_RES (156)..(156): Selenocysteine
  MOD_RES (164)..(164): Selenocysteine
  MOD_RES (191)..(191): Selenocysteine
MNPEYDYLFKLLLIGDSGVGKSCLLLRFADDXYXESYISXIGVDFKIRXIELDGKXIKLQIWDXAGQERFRXIXSSYYRGAHGIIVVYDVXDQESYANVKQWLQEIDRYASENVNKLLVGNKSDLXXKKVVDNXXAKEFADSLGIPFLEXSAKNAXNVEQAFMXMAAEIKKRMGPGAASGGERPNLKIDSXPVKPAGGGCC

SEQ ID NO: 22309 - protein, 234 aa, Homo sapiens
  MOD_RES (19)..(19): Selenocysteine
  MOD_RES (33)..(33): Selenocysteine
  MOD_RES (36)..(36): Selenocysteine
  MOD_RES (56)..(56): Selenocysteine
  MOD_RES (79)..(79): Selenocysteine
  MOD_RES (99)..(99): Selenocysteine
  MOD_RES (101)..(101): Selenocysteine
  MOD_RES (118)..(118): Selenocysteine
  MOD_RES (182)..(182): Selenocysteine
  MOD_RES (186)..(186): Selenocysteine
  MOD_RES (196)..(196): Selenocysteine
  MOD_RES (216)..(216): Selenocysteine
  MOD_RES (228)..(228): Selenocysteine
MRKPDSKIVLLGDMNVGKXSLLQRYMERRFPDXVSXVGGAFYLKQWRSYNISIWDXAGREQFHGLGSMYCRGAAAIILXYDVNHRQSLVELEDRFLGLXDXASKDCLFAIVGNKVDLXEEGALAGQEKEECSPNMDAGDRVSPRAPKQVQLEDAVALYKKILKYKMLDEQDVPAAEQMCFEXSAKXGYNVDLLFEXLFDLVVPMILQQRAERPSHXVDISSHKPPKRXRSGCCA

SEQ ID NO: 22310 - protein, 225 aa, Homo sapiens
  MOD_RES (33)..(33): Selenocysteine
  MOD_RES (50)..(51): Selenocysteine
  MOD_RES (58)..(58): Selenocysteine
  MOD_RES (75)..(75): Selenocysteine
  MOD_RES (102)..(102): Selenocysteine
  MOD_RES (161)..(161): Selenocysteine
  MOD_RES (183)..(183): Selenocysteine
  MOD_RES (200)..(200): Selenocysteine
  MOD_RES (216)..(216): Selenocysteine
MAAAGGGGGGAAAAGRAYSFKVVLLGEGCVGKXSLVLRYCENKFNDKHIXXLQASFLXKKLNIGGKRVNLAIWDXAGQERFHALGPIYYRDSNGAILVYDIXDEDSFQKVKNWVKELRKMLGNEICLCIVGNKIDLEKERHVSIQEAESYAESVGAKHYHXSAKQNKGIEELFLDLCKRMIEXAQVDERAKGNGSSQPGXARRGVQIIDDEPQAQXSGGGCCSSG

SEQ ID NO: 22311 - protein, 194 aa, Homo sapiens
  MOD_RES (14)..(14): Selenocysteine
  MOD_RES (37)..(37): Selenocysteine
  MOD_RES (44)..(44): Selenocysteine
  MOD_RES (46)..(46): Selenocysteine
  MOD_RES (61)..(61): Selenocysteine
  MOD_RES (88)..(88): Selenocysteine
  MOD_RES (92)..(92): Selenocysteine
  MOD_RES (95)..(95): Selenocysteine
  MOD_RES (147)..(147): Selenocysteine
  MOD_RES (169)..(169): Selenocysteine
MALRELKVCLLGDXGVGKSSIVWRFVEDSFDPNINPXIGASFMXKXVQYQNELHKFLIWDXAGQERFRALAPMYYRGSAAAIIVYDIXKEEXFSXLKNWVKELRQHGPPNIVVAIAGNKCDLIDVREVMERDAKDYADSIHAIFVEXSAKNAININELFIEISRRIPSXDANLPSGGKGFKLRRQPSEPKRSCC

SEQ ID NO: 22312 - protein, 237 aa, Homo sapiens
  MOD_RES (35)..(35): Selenocysteine
  MOD_RES (41)..(41): Selenocysteine
  MOD_RES (65)..(65): Selenocysteine
  MOD_RES (75)..(75): Selenocysteine
  MOD_RES (91)..(92): Selenocysteine
  MOD_RES (116)..(116): Selenocysteine
  MOD_RES (150)..(150): Selenocysteine
  MOD_RES (184)..(184): Selenocysteine
  MOD_RES (196)..(196): Selenocysteine
  MOD_RES (208)..(208): Selenocysteine
  MOD_RES (224)..(224): Selenocysteine
MLEEDMEVAIKMVVVGNGAVGKSSMIQRYCKGIFXKDYKKXIGVDFLERQIQVNDEDVRLMLWDXAGQEEFDAIXKAYYRGAQACVLVFSXXDRESFEAVSSWREKVVAEVGDIPXVLVQNKIDLLDDSCIKNEEAEALAKRLKLRFYRXSVKEDLNVNEVFKYLAEKYLQKLKQQIAEDPELXHSSSNKIGVFNXSGGSHSGQNSGXLNGGDVINLRPNKQRXKKNRNPFSSCSIP

SEQ ID NO: 22313 - protein, 174 aa, Homo sapiens
  MOD_RES (11)..(11): Selenocysteine
  MOD_RES (27)..(27): Selenocysteine
  MOD_RES (29)..(29): Selenocysteine
  MOD_RES (35)..(35): Selenocysteine
  MOD_RES (62)..(62): Selenocysteine
  MOD_RES (91)..(91): Selenocysteine
  MOD_RES (124)..(124): Selenocysteine
  MOD_RES (128)..(128): Selenocysteine
  MOD_RES (153)..(153): Selenocysteine
MAPISSLSLQXIGAAFVAKVMSVGDRXVXLGIWDXAGSERYEAMSRIYYRGAKAAIVCYDLXDSSSFERAKFWVKELRSLEEGCQIYLCGXKSDLLEEDRRRRRVDFHDVQDYADNIKAQLFEXSSKXGQSVDELFQKVAEDYVSVAAFQVMXEDKGVDLGQKPNPYFYSCCHH

SEQ ID NO: 22314 - protein, 66 aa, Homo sapiens
  MOD_RES (21)..(21): Selenocysteine
  MOD_RES (40)..(40): Selenocysteine
  MOD_RES (56)..(56): Selenocysteine
  MOD_RES (58)..(58): Selenocysteine
  MOD_RES (64)..(64): Selenocysteine
MSGQRVDVKVVMLGKEYVGKXSLVERYVHDRFLVGPYQNXIGAAFVAKVMSVGDRXVXLGIWDXAG

SEQ ID NO: 22315 - protein, 203 aa, Homo sapiens
  MOD_RES (21)..(21): Selenocysteine
  MOD_RES (40)..(40): Selenocysteine
  MOD_RES (56)..(56): Selenocysteine
  MOD_RES (58)..(58): Selenocysteine
  MOD_RES (64)..(64): Selenocysteine
  MOD_RES (91)..(91): Selenocysteine
  MOD_RES (120)..(120): Selenocysteine
  MOD_RES (153)..(153): Selenocysteine
  MOD_RES (157)..(157): Selenocysteine
  MOD_RES (182)..(182): Selenocysteine
MSGQRVDVKVVMLGKEYVGKXSLVERYVHDRFLVGPYQNXIGAAFVAKVMSVGDRXVXLGIWDXAGSERYEAMSRIYYRGAKAAIVCYDLXDSSSFERAKFWVKELRSLEEGCQIYLCGXKSDLLEEDRRRRRVDFHDVQDYADNIKAQLFEXSSKXGQSVDELFQKVAEDYVSVAAFQVMXEDKGVDLGQKPNPYFYSCCHH

SEQ ID NO: 22316 - protein, 213 aa, Homo sapiens
  MOD_RES (5)..(5): Selenocysteine
  MOD_RES (26)..(26): Selenocysteine
  MOD_RES (33)..(33): Selenocysteine
  MOD_RES (43)..(44): Selenocysteine
  MOD_RES (51)..(51): Selenocysteine
  MOD_RES (53)..(53): Selenocysteine
  MOD_RES (58)..(58): Selenocysteine
  MOD_RES (68)..(68): Selenocysteine
  MOD_RES (78)..(78): Selenocysteine
  MOD_RES (95)..(95): Selenocysteine
  MOD_RES (99)..(99): Selenocysteine
  MOD_RES (117)..(117): Selenocysteine
  MOD_RES (137)..(137): Selenocysteine
  MOD_RES (154)..(154): Selenocysteine
  MOD_RES (160)..(160): Selenocysteine
  MOD_RES (168)..(168): Selenocysteine
  MOD_RES (187)..(187): Selenocysteine
  MOD_RES (191)..(191): Selenocysteine
MGNGXEEDYNFVFKVVLIGESGVGKXNLLSRFXRNEFSHDSRXXIGVEFSXRXVMLGXAAVKAQIWDXAGLERYRAIXSAYYRGAVGALLVFDLXKHQXYAVVERWLKELYDHAEAXIVVMLVGNKSDLSQAREVPXEEARMFAENNGLLFLEXSALDSXNVELAFEXVLKEIFAKVSKQRQNSIRXNAIXLGSAQAGQEPGPGEKRACCISL

SEQ ID NO: 22317 - protein, 190 aa, Homo sapiens
  MOD_RES (11)..(11): Selenocysteine
  MOD_RES (26)..(26): Selenocysteine
  MOD_RES (30)..(30): Selenocysteine
  MOD_RES (54)..(54): Selenocysteine
  MOD_RES (64)..(64): Selenocysteine
  MOD_RES (81)..(81): Selenocysteine
  MOD_RES (94)..(94): Selenocysteine
  MOD_RES (140)..(140): Selenocysteine
  MOD_RES (144)..(144): Selenocysteine
  MOD_RES (153)..(153): Selenocysteine
MLVGDSGVGKXCLLVRFKDGAFLAGXFISXVGIDFRNKVLDVDGVKVKLQMWDXAGQERFRSVXHAYYRDAHALLLLYDVXNKASFDNIQAWLXEIHEYAQHDVALMLLGNKVDSAHERVVKREDGEKLAKEYGLPFMEXSAKXGLNVDLAFXAIAKELKQRSMKAPSEPRFRLHDYVKREGRGASCCRP

SEQ ID NO: 22318 - protein, 64 aa, Homo sapiens
  MOD_RES (11)..(11): Selenocysteine
  MOD_RES (26)..(26): Selenocysteine
  MOD_RES (30)..(30): Selenocysteine
  MOD_RES (40)..(40): Selenocysteine
  MOD_RES (58)..(58): Selenocysteine
MLVGDSGVGKXCLLVRFKDGAFLAGXFISXVGIDFRQGLXLSPWLECSGDHGGLQPPXSGFKPS

SEQ ID NO: 22319 - protein, 256 aa, Homo sapiens
  MOD_RES (6)..(6): Selenocysteine
  MOD_RES (14)..(14): Selenocysteine
  MOD_RES (19)..(19): Selenocysteine
  MOD_RES (22)..(22): Selenocysteine
  MOD_RES (33)..(33): Selenocysteine
  MOD_RES (77)..(77): Selenocysteine
  MOD_RES (92)..(92): Selenocysteine
  MOD_RES (96)..(96): Selenocysteine
  MOD_RES (120)..(120): Selenocysteine
  MOD_RES (130)..(130): Selenocysteine
  MOD_RES (147)..(147): Selenocysteine
  MOD_RES (160)..(160): Selenocysteine
  MOD_RES (206)..(206): Selenocysteine
  MOD_RES (210)..(210): Selenocysteine
  MOD_RES (219)..(219): Selenocysteine
MSRKKXPKSKGASXPAASXLPXANGARPARSGXALSGPDAPPNGPLQPGRPSLGGGVDFYDVAFKVMLVGDSGVGKXCLLVRFKDGAFLAGXFISXVGIDFRNKVLDVDGVKVKLQMWDXAGQERFRSVXHAYYRDAHALLLLYDVXNKASFDNIQAWLXEIHEYAQHDVALMLLGNKVDSAHERVVKREDGEKLAKEYGLPFMEXSAKXGLNVDLAFXAIAKELKQRSMKAPSEPRFRLHDYVKREGRGASCCRP

SEQ ID NO: 22320 - protein, 136 aa, Homo sapiens
  MOD_RES (1)..(1): Any amino acid
  MOD_RES (11)..(11): Selenocysteine
  MOD_RES (15)..(15): Selenocysteine
  MOD_RES (24)..(24): Selenocysteine
  MOD_RES (43)..(43): Selenocysteine
  MOD_RES (53)..(53): Selenocysteine
  MOD_RES (62)..(62): Selenocysteine
  MOD_RES (86)..(86): Selenocysteine
  MOD_RES (110)..(110): Selenocysteine
  MOD_RES (113)..(113): Selenocysteine
  MOD_RES (117)..(117): Selenocysteine
  MOD_RES (135)..(135): Selenocysteine
XKEYGLPFMEXSAKXGLNVDLAFXAIANNSPNKQASESPWPHXGRHGKAVFCXGRGAASGQXLPRCSAAPSWARPGEGGLGLAPRXVPNPRKAMSSAAHAQAAKGGRLPXPGXEGFXANHIVHLCVLGAACSRPXL

SEQ ID NO: 22321 - protein, 71 aa, Homo sapiens
  MOD_RES (23)..(23): Selenocysteine
  MOD_RES (30)..(30): Selenocysteine
  MOD_RES (40)..(41): Selenocysteine
  MOD_RES (62)..(62): Selenocysteine
MSDGDYDYLIKFLALGDSGVGKXSVLYQYXDGKFNSKFIXXVGIDFREKRVVYRASGPDGAXGRGQRIHLQ

SEQ ID NO: 22322 - protein, 95 aa, Homo sapiens
  MOD_RES (23)..(23): Selenocysteine
  MOD_RES (30)..(30): Selenocysteine
  MOD_RES (40)..(41): Selenocysteine
  MOD_RES (62)..(62): Selenocysteine
  MOD_RES (75)..(75): Selenocysteine
  MOD_RES (85)..(86): Selenocysteine
MSDGDYDYLIKFLALGDSGVGKXSVLYQYXDGKFNSKFIXXVGIDFREKRVVYRASGPDGAXGRGQRIHLQLWDXAGQERFRSLXXAFFRDAMGF

SEQ ID NO: 22323 - protein, 136 aa, Homo sapiens
  MOD_RES (23)..(23): Selenocysteine
  MOD_RES (30)..(30): Selenocysteine
  MOD_RES (40)..(41): Selenocysteine
  MOD_RES (62)..(62): Selenocysteine
  MOD_RES (75)..(75): Selenocysteine
  MOD_RES (85)..(86): Selenocysteine
  MOD_RES (102)..(102): Selenocysteine
MSDGDYDYLIKFLALGDSGVGKXSVLYQYXDGKFNSKFIXXVGIDFREKRVVYRASGPDGAXGRGQRIHLQLWDXAGQERFRSLXXAFFRDAMGFLLLFDLXNEQSFLNVRNWISQLQMHAYCENPDIVLCGNKSD

SEQ ID NO: 22324 - protein, 146 aa, Homo sapiens
  MOD_RES (23)..(23): Selenocysteine
  MOD_RES (30)..(30): Selenocysteine
  MOD_RES (40)..(41): Selenocysteine
  MOD_RES (62)..(62): Selenocysteine
  MOD_RES (75)..(75): Selenocysteine
  MOD_RES (85)..(86): Selenocysteine
  MOD_RES (102)..(102): Selenocysteine
MSDGDYDYLIKFLALGDSGVGKXSVLYQYXDGKFNSKFIXXVGIDFREKRVVYRASGPDGAXGRGQRIHLQLWDXAGQERFRSLXXAFFRDAMGFLLLFDLXNEQSFLNVRNWISQLQMHAYCENPDIVLCGNKSDLEDQRVVKEE

SEQ ID NO: 22325 - protein, 185 aa, Homo sapiens
  MOD_RES (23)..(23): Selenocysteine
  MOD_RES (30)..(30): Selenocysteine
  MOD_RES (40)..(41): Selenocysteine
  MOD_RES (62)..(62): Selenocysteine
  MOD_RES (75)..(75): Selenocysteine
  MOD_RES (85)..(86): Selenocysteine
  MOD_RES (102)..(102): Selenocysteine
  MOD_RES (162)..(162): Selenocysteine
  MOD_RES (168)..(168): Selenocysteine
MSDGDYDYLIKFLALGDSGVGKXSVLYQYXDGKFNSKFIXXVGIDFREKRVVYRASGPDGAXGRGQRIHLQLWDXAGQERFRSLXXAFFRDAMGFLLLFDLXNEQSFLNVRNWISQLQMHAYCENPDIVLCGNKSDLEDQRVVKEEEAIALAEKYGIPYFEXSAANGXNISQAIEMLLDLIMKRM

SEQ ID NO: 22326 - protein, 221 aa, Homo sapiens
  MOD_RES (23)..(23): Selenocysteine
  MOD_RES (30)..(30): Selenocysteine
  MOD_RES (40)..(41): Selenocysteine
  MOD_RES (62)..(62): Selenocysteine
  MOD_RES (75)..(75): Selenocysteine
  MOD_RES (85)..(86): Selenocysteine
  MOD_RES (102)..(102): Selenocysteine
  MOD_RES (162)..(162): Selenocysteine
  MOD_RES (168)..(168): Selenocysteine
  MOD_RES (207)..(207): Selenocysteine
MSDGDYDYLIKFLALGDSGVGKXSVLYQYXDGKFNSKFIXXVGIDFREKRVVYRASGPDGAXGRGQRIHLQLWDXAGQERFRSLXXAFFRDAMGFLLLFDLXNEQSFLNVRNWISQLQMHAYCENPDIVLCGNKSDLEDQRVVKEEEAIALAEKYGIPYFEXSAANGXNISQAIEMLLDLIMKRMERCVDKSWIPEGVVRSNGHASXDQLSEEKEKGACGC

SEQ ID NO: 22327 - protein, 87 aa, Homo sapiens
  MOD_RES (2)..(2): Selenocysteine
  MOD_RES (23)..(24): Selenocysteine
  MOD_RES (30)..(30): Selenocysteine
  MOD_RES (40)..(41): Selenocysteine
  MOD_RES (75)..(75): Selenocysteine
  MOD_RES (85)..(86): Selenocysteine
MXDGDYDYLIKLLALGDSGVGKXXFLYRYXDNKFNPKFIXXVGIDFREKRVVYNAQGPNGSSGKAFKVHLQLWDXAGQERFRSLXXA

SEQ ID NO: 22328 - protein, 218 aa, Homo sapiens
  MOD_RES (2)..(2): Selenocysteine
  MOD_RES (23)..(24): Selenocysteine
  MOD_RES (30)..(30): Selenocysteine
  MOD_RES (40)..(41): Selenocysteine
  MOD_RES (75)..(75): Selenocysteine
  MOD_RES (85)..(86): Selenocysteine
  MOD_RES (102)..(102): Selenocysteine
  MOD_RES (162)..(162): Selenocysteine
  MOD_RES (166)..(166): Selenocysteine
  MOD_RES (176)..(176): Selenocysteine
  MOD_RES (192)..(192): Selenocysteine
  MOD_RES (197)..(197): Selenocysteine
MXDGDYDYLIKLLALGDSGVGKXXFLYRYXDNKFNPKFIXXVGIDFREKRVVYNAQGPNGSSGKAFKVHLQLWDXAGQERFRSLXXAFFRDAMGFLLMFDLXSQQSFLNVRNWMSQLQANAYCENPDIVLIGNKADLPDQREVNERQARELADKYGIPYFEXSAAXGQNVEKAVEXLLDLIMKRMEQCVEKXQIPDXVNGGNSGNLDGEKPPEKKCIC

SEQ ID NO: 22329 - protein, 131 aa, Homo sapiens
  MOD_RES (1)..(1): Any amino acid
  MOD_RES (15)..(15): Selenocysteine
  MOD_RES (74)..(74): Selenocysteine
  MOD_RES (114)..(114): Selenocysteine
XFRDAMGFLLMFDLXSQQSFLNVRNWMSQLQANAYCENPDIVLIGNKADLPDQREVNERQARELADKYGCKLSXLGINKFDEACLSLHQWSCSLFCISLHLKRIHNSFLIAYYXKRLREKSSFVKDFGCII

SEQ ID NO: 22330 - protein, 204 aa, Homo sapiens
  MOD_RES (26)..(26): Selenocysteine
  MOD_RES (29)..(30): Selenocysteine
  MOD_RES (36)..(36): Selenocysteine
  MOD_RES (44)..(44): Selenocysteine
  MOD_RES (55)..(55): Selenocysteine
  MOD_RES (63)..(63): Selenocysteine
  MOD_RES (73)..(73): Selenocysteine
  MOD_RES (96)..(96): Selenocysteine
  MOD_RES (109)..(109): Selenocysteine
  MOD_RES (120)..(120): Selenocysteine
  MOD_RES (138)..(138): Selenocysteine
  MOD_RES (162)..(162): Selenocysteine
  MOD_RES (201)..(201): Selenocysteine
MSDSEEESQDRQLKIVVLGDGASGKXSLXXCFAQEXFGKQYKQXIGLDFFLRRIXLPGNLNVXLQIWDIGGQXIGGKMLDKYIYGAQGVLLVYDIXNYQSFENLEDWYXVVKKVSEESEXQPLVALVGNKIDLEHMRXIKPEKHLRFCQENGFSSHFVSAKXGDSVFLCFQKVAAEILGIKLNKAEIEQSQGHFIIFISSXNRE

SEQ ID NO: 22331 - protein, 220 aa, Homo sapiens
  MOD_RES (26)..(26): Selenocysteine
  MOD_RES (29)..(30): Selenocysteine
  MOD_RES (36)..(36): Selenocysteine
  MOD_RES (44)..(44): Selenocysteine
  MOD_RES (55)..(55): Selenocysteine
  MOD_RES (63)..(63): Selenocysteine
  MOD_RES (73)..(73): Selenocysteine
  MOD_RES (96)..(96): Selenocysteine
  MOD_RES (109)..(109): Selenocysteine
  MOD_RES (120)..(120): Selenocysteine
  MOD_RES (138)..(138): Selenocysteine
  MOD_RES (162)..(162): Selenocysteine
  MOD_RES (209)..(210): Selenocysteine
  MOD_RES (212)..(212): Selenocysteine
MSDSEEESQDRQLKIVVLGDGASGKXSLXXCFAQEXFGKQYKQXIGLDFFLRRIXLPGNLNVXLQIWDIGGQXIGGKMLDKYIYGAQGVLLVYDIXNYQSFENLEDWYXVVKKVSEESEXQPLVALVGNKIDLEHMRXIKPEKHLRFCQENGFSSHFVSAKXGDSVFLCFQKVAAEILGIKLNKAEIEQSQRIVRAEIVKYPEEENQHXXSXQSRICSVQ

SEQ ID NO: 22332 - protein, 221 aa, Homo sapiens
  MOD_RES (26)..(26): Selenocysteine
  MOD_RES (29)..(30): Selenocysteine
  MOD_RES (36)..(36): Selenocysteine
  MOD_RES (44)..(44): Selenocysteine
  MOD_RES (55)..(55): Selenocysteine
  MOD_RES (63)..(63): Selenocysteine
  MOD_RES (73)..(73): Selenocysteine
  MOD_RES (96)..(96): Selenocysteine
  MOD_RES (109)..(109): Selenocysteine
  MOD_RES (120)..(120): Selenocysteine
  MOD_RES (138)..(138): Selenocysteine
  MOD_RES (162)..(162): Selenocysteine
  MOD_RES (209)..(209): Selenocysteine
MSDSEEESQDRQLKIVVLGDGASGKXSLXXCFAQEXFGKQYKQXIGLDFFLRRIXLPGNLNVXLQIWDIGGQXIGGKMLDKYIYGAQGVLLVYDIXNYQSFENLEDWYXVVKKVSEESEXQPLVALVGNKIDLEHMRXIKPEKHLRFCQENGFSSHFVSAKXGDSVFLCFQKVAAEILGIKLNKAEIEQSQRVVKADIVNYNQEPMSRXVNPPRSSMCAVQ

SEQ ID NO: 22333 - protein, 95 aa, Homo sapiens
  MOD_RES (26)..(26): Selenocysteine
  MOD_RES (29)..(30): Selenocysteine
  MOD_RES (36)..(36): Selenocysteine
  MOD_RES (44)..(44): Selenocysteine
  MOD_RES (55)..(55): Selenocysteine
  MOD_RES (63)..(63): Selenocysteine
  MOD_RES (73)..(73): Selenocysteine
MSDSEEESQDRQLKIVVLGDGASGKXSLXXCFAQEXFGKQYKQXIGLDFFLRRIXLPGNLNVXLQIWDIGGQXIGGKMLDKYIYGAQLIWSICEQ

SEQ ID NO: 22334 - protein, 74 aa, Homo sapiens
  MOD_RES (1)..(1): Any amino acid
  MOD_RES (8)..(8): Selenocysteine
  MOD_RES (32)..(32): Selenocysteine
  MOD_RES (71)..(71): Selenocysteine
XDLEHMRXIKPEKHLRFCQENGFSSHFVSAKXGDSVFLCFQKVAAEILGIKLNKAEIEQSQGHFIIFISSXNRE

SEQ ID NO: 22335 - protein, 143 aa, Homo sapiens
  MOD_RES (1)..(1): Any amino acid
  MOD_RES (19)..(19): Selenocysteine
  MOD_RES (32)..(32): Selenocysteine
  MOD_RES (43)..(43): Selenocysteine
  MOD_RES (61)..(61): Selenocysteine
  MOD_RES (85)..(85): Selenocysteine
  MOD_RES (132)..(133): Selenocysteine
  MOD_RES (135)..(135): Selenocysteine
XLDKYIYGAQGVLLVYDIXNYQSFENLEDWYXVVKKVSEESEXQPLVALVGNKIDLEHMRXIKPEKHLRFCQENGFSSHFVSAKXGDSVFLCFQKVAAEILGIKLNKAEIEQSQRIVRAEIVKYPEEENQHXXSXQSRICSVQ

SEQ ID NO: 22336 - protein, 51 aa, Homo sapiens
  MOD_RES (1)..(1): Any amino acid
  MOD_RES (11)..(11): Selenocysteine
  MOD_RES (24)..(24): Selenocysteine
  MOD_RES (35)..(35): Selenocysteine
XQGVLLVYDIXNYQSFENLEDWYXVVKKVSEESEXQPLVALVGNKRKQHGL

SEQ ID NO: 22337 - protein, 179 aa, Homo sapiens
  MOD_RES (21)..(21): Selenocysteine
  MOD_RES (39)..(39): Selenocysteine
  MOD_RES (47)..(47): Selenocysteine
  MOD_RES (50)..(50): Selenocysteine
  MOD_RES (67)..(67): Selenocysteine
  MOD_RES (70)..(71): Selenocysteine
  MOD_RES (87)..(87): Selenocysteine
  MOD_RES (125)..(125): Selenocysteine
  MOD_RES (128)..(128): Selenocysteine
  MOD_RES (130)..(130): Selenocysteine
  MOD_RES (154)..(154): Selenocysteine
  MOD_RES (162)..(162): Selenocysteine
  MOD_RES (171)..(171): Selenocysteine
MGSRDHLFKVLVVGDAAVGKXSLVQRYSQDSFSKHYKSXVGGQERFXSMXRLYYRDASACVIMFDVXNAXXFSNSQRWKQDLDSKLXLPNGEPVPCLLLANKCDLSPWAVSRDQIDRFSKENGFXGWXEXSVKENKNINEAMRVLIEKMMRNSXEDIMSLSXQGDYINLQXKSSSWSCC

SEQ ID NO: 22338 - protein, 42 aa, Homo sapiens
  MOD_RES (21)..(21): Selenocysteine
  MOD_RES (39)..(39): Selenocysteine
MGSRDHLFKVLVVGDAAVGKXSLVQRYSQDSFSKHYKSXVGV

SEQ ID NO: 22339 - protein, 203 aa, Homo sapiens
  MOD_RES (21)..(21): Selenocysteine
  MOD_RES (39)..(39): Selenocysteine
  MOD_RES (71)..(71): Selenocysteine
  MOD_RES (74)..(74): Selenocysteine
  MOD_RES (91)..(91): Selenocysteine
  MOD_RES (94)..(95): Selenocysteine
  MOD_RES (111)..(111): Selenocysteine
  MOD_RES (149)..(149): Selenocysteine
  MOD_RES (152)..(152): Selenocysteine
  MOD_RES (154)..(154): Selenocysteine
  MOD_RES (178)..(178): Selenocysteine
  MOD_RES (186)..(186): Selenocysteine
  MOD_RES (195)..(195): Selenocysteine
MGSRDHLFKVLVVGDAAVGKXSLVQRYSQDSFSKHYKSXVGVDFALKVLQWSDYEIVRLQLWDIAGQERFXSMXRLYYRDASACVIMFDVXNAXXFSNSQRWKQDLDSKLXLPNGEPVPCLLLANKCDLSPWAVSRDQIDRFSKENGFXGWXEXSVKENKNINEAMRVLIEKMMRNSXEDIMSLSXQGDYINLQXKSSSWSCC

SEQ ID NO: 22340 - protein, 131 aa, Homo sapiens
  MOD_RES (2)..(2): Selenocysteine
  MOD_RES (19)..(19): Selenocysteine
  MOD_RES (22)..(23): Selenocysteine
  MOD_RES (39)..(39): Selenocysteine
  MOD_RES (77)..(77): Selenocysteine
  MOD_RES (80)..(80): Selenocysteine
  MOD_RES (82)..(82): Selenocysteine
  MOD_RES (106)..(106): Selenocysteine
  MOD_RES (114)..(114): Selenocysteine
  MOD_RES (123)..(123): Selenocysteine
MXRLYYRDASACVIMFDVXNAXXFSNSQRWKQDLDSKLXLPNGEPVPCLLLANKCDLSPWAVSRDQIDRFSKENGFXGWXEXSVKENKNINEAMRVLIEKMMRNSXEDIMSLSXQGDYINLQXKSSSWSCC

SEQ ID NO: 22341 - protein, 188 aa, Homo sapiens
  MOD_RES (15)..(15): Selenocysteine
  MOD_RES (25)..(25): Selenocysteine
  MOD_RES (38)..(38): Selenocysteine
  MOD_RES (48)..(48): Selenocysteine
  MOD_RES (65)..(65): Selenocysteine
  MOD_RES (69)..(69): Selenocysteine
  MOD_RES (74)..(75): Selenocysteine
  MOD_RES (124)..(124): Selenocysteine
  MOD_RES (128)..(128): Selenocysteine
  MOD_RES (139)..(139): Selenocysteine
  MOD_RES (170)..(170): Selenocysteine
  MOD_RES (173)..(173): Selenocysteine
MAYAYLFKYIIIGDXGVEFGARMIXIDGKQIKLQIWDXAGQESFRSIXRSYYRGAAGALLVYDIXRRDXFNHLXXWLEDARQHSNSNMVIMLIGNKSDLESRREVKKEEGEAFAREHGLIFMEXSAKXASNVEEAFINXAKEIYEKIQEGVFDINNEANGIKIGPQHAAXNAXHAGNQGGQQAGGGCC

SEQ ID NO: 22342 - protein, 181 aa, Homo sapiens
  MOD_RES (15)..(15): Selenocysteine
  MOD_RES (27)..(27): Selenocysteine
  MOD_RES (38)..(38): Selenocysteine
  MOD_RES (49)..(49): Selenocysteine
  MOD_RES (62)..(62): Selenocysteine
  MOD_RES (72)..(72): Selenocysteine
  MOD_RES (89)..(89): Selenocysteine
  MOD_RES (93)..(93): Selenocysteine
  MOD_RES (98)..(99): Selenocysteine
  MOD_RES (140)..(140): Selenocysteine
  MOD_RES (180)..(180): Selenocysteine
MAYAYLFKYIIIGDXGVGKSCLLLQFXDKRFQPVHDLXIGVEFGARMIXIDGKQIKLQIWDXAGQESFRSIXRSYYRGAAGALLVYDIXRRDXFNHLXXWLEDARQHSNSNMVIMLIGNKRHLLIQQKKFMKKFKKESLXLIMRQMALKLALSMLLPMQHMQAIREDSRLGAAAVESVFXV

SEQ ID NO: 22343 - protein, 212 aa, Homo sapiens
  MOD_RES (15)..(15): Selenocysteine
  MOD_RES (27)..(27): Selenocysteine
  MOD_RES (38)..(38): Selenocysteine
  MOD_RES (49)..(49): Selenocysteine
  MOD_RES (62)..(62): Selenocysteine
  MOD_RES (72)..(72): Selenocysteine
  MOD_RES (89)..(89): Selenocysteine
  MOD_RES (93)..(93): Selenocysteine
  MOD_RES (98)..(99): Selenocysteine
  MOD_RES (148)..(148): Selenocysteine
  MOD_RES (152)..(152): Selenocysteine
  MOD_RES (163)..(163): Selenocysteine
  MOD_RES (194)..(194): Selenocysteine
  MOD_RES (197)..(197): Selenocysteine
MAYAYLFKYIIIGDXGVGKSCLLLQFXDKRFQPVHDLXIGVEFGARMIXIDGKQIKLQIWDXAGQESFRSIXRSYYRGAAGALLVYDIXRRDXFNHLXXWLEDARQHSNSNMVIMLIGNKSDLESRREVKKEEGEAFAREHGLIFMEXSAKXASNVEEAFINXAKEIYEKIQEGVFDINNEANGIKIGPQHAAXNAXHAGNQGGQQAGGGCC

SEQ ID NO: 22344 - protein, 10 aa, Homo sapiens
  MOD_RES (3)..(3): Selenocysteine
MIXIDGKQIK

SEQ ID NO: 22345 - protein, 135 aa, Homo sapiens
  MOD_RES (1)..(1): Any amino acid
  MOD_RES (10)..(10): Selenocysteine
  MOD_RES (22)..(22): Selenocysteine
  MOD_RES (33)..(33): Selenocysteine
  MOD_RES (44)..(44): Selenocysteine
  MOD_RES (57)..(57): Selenocysteine
  MOD_RES (65)..(65): Selenocysteine
  MOD_RES (100)..(100): Selenocysteine
  MOD_RES (106)..(106): Selenocysteine
XFKYIIIGDXGVGKSCLLLQFXDKRFQPVHDLXIGVEFGARMIXIDGKQIKLQIWDXGKSKKKHXLPLVSVHWQKKGRGRARILSFHHKVVLQRCSRSFXSLRYYXERYIQPLDNLVRRCPPAFQFQHGHYAYWK

SEQ ID NO: 22346 - protein, 104 aa, Homo sapiens
  MOD_RES (1)..(1): Any amino acid
  MOD_RES (4)..(4): Selenocysteine
  MOD_RES (9)..(10): Selenocysteine
  MOD_RES (59)..(59): Selenocysteine
  MOD_RES (63)..(63): Selenocysteine
  MOD_RES (74)..(74): Selenocysteine
  MOD_RES (95)..(95): Selenocysteine
XRDXFNHLXXWLEDARQHSNSNMVIMLIGNKSDLESRREVKKEEGEAFAREHGLIFMEXSAKXASNVEEAFINXAKEIYEKIQEGVFDINNEVYXYKYCWSILI

SEQ ID NO: 22347 - protein, 69 aa, Homo sapiens
  MOD_RES (1)..(1): Any amino acid
  MOD_RES (12)..(12): Selenocysteine
  MOD_RES (23)..(23): Selenocysteine
  MOD_RES (26)..(26): Selenocysteine
  MOD_RES (36)..(36): Selenocysteine
XVGKSCLLLQFXDKRFQPVHDLXIGXKHLGAQEAEXVKSYPAAGAVVLASHLLGWNGHRCRVRCSNDNY

SEQ ID NO: 22348 - protein, 62 aa, Homo sapiens
  MOD_RES (2)..(2): Selenocysteine
  MOD_RES (15)..(15): Selenocysteine
  MOD_RES (27)..(27): Selenocysteine
  MOD_RES (38)..(38): Selenocysteine
  MOD_RES (62)..(62): Selenocysteine
MXYAYLFKYIIIGDXGVGKSCLLLQFXDKRFQPVHDLXIGVEFGARMVNIDGKQIKLQIWDX

SEQ ID NO: 22349 - protein, 216 aa, Homo sapiens
  MOD_RES (2)..(2): Selenocysteine
  MOD_RES (15)..(15): Selenocysteine
  MOD_RES (27)..(27): Selenocysteine
  MOD_RES (38)..(38): Selenocysteine
  MOD_RES (62)..(62): Selenocysteine
  MOD_RES (72)..(72): Selenocysteine
  MOD_RES (89)..(89): Selenocysteine
  MOD_RES (93)..(93): Selenocysteine
  MOD_RES (98)..(98): Selenocysteine
  MOD_RES (148)..(148): Selenocysteine
  MOD_RES (152)..(152): Selenocysteine
  MOD_RES (163)..(163): Selenocysteine
  MOD_RES (195)..(195): Selenocysteine
MXYAYLFKYIIIGDXGVGKSCLLLQFXDKRFQPVHDLXIGVEFGARMVNIDGKQIKLQIWDXAGQESFRSIXRSYYRGAAGALLVYDIXRREXFNHLXSWLEDARQHSSSNMVIMLIGNKSDLESRRDVKREEGEAFAREHGLIFMEXSAKXACNVEEAFINXAKEIYRKIQQGLFDVHNEANGIKIGPQQSISXSVGPSASQRNSRDIGSNSGCC

SEQ ID NO: 22350 - protein, 209 aa, Homo sapiens
  MOD_RES (2)..(2): Selenocysteine
  MOD_RES (15)..(15): Selenocysteine
  MOD_RES (27)..(27): Selenocysteine
  MOD_RES (38)..(38): Selenocysteine
  MOD_RES (62)..(62): Selenocysteine
  MOD_RES (72)..(72): Selenocysteine
  MOD_RES (89)..(89): Selenocysteine
  MOD_RES (93)..(93): Selenocysteine
  MOD_RES (98)..(98): Selenocysteine
  MOD_RES (148)..(148): Selenocysteine
  MOD_RES (152)..(152): Selenocysteine
  MOD_RES (163)..(163): Selenocysteine
  MOD_RES (195)..(195): Selenocysteine
MXYAYLFKYIIIGDXGVGKSCLLLQFXDKRFQPVHDLXIGVEFGARMVNIDGKQIKLQIWDXAGQESFRSIXRSYYRGAAGALLVYDIXRREXFNHLXSWLEDARQHSSSNMVIMLIGNKSDLESRRDVKREEGEAFAREHGLIFMEXSAKXACNVEEAFINXAKEIYRKIQQGLFDVHNEANGIKIGPQQSISXSVGPSASQSAGLQV

SEQ ID NO: 22351 - protein, 75 aa, Homo sapiens
  MOD_RES (4)..(4): Selenocysteine
  MOD_RES (19)..(19): Selenocysteine
  MOD_RES (29)..(29): Selenocysteine
  MOD_RES (42)..(42): Selenocysteine
  MOD_RES (46)..(46): Selenocysteine
  MOD_RES (71)..(71): Selenocysteine
MIKXVEINGEKVKLQIWDXAGQERFRSIXQSYYRSANALILXYDIXCEESFRCLPEWLREIEQYASNKVIXVLVG

SEQ ID NO: 22352 - protein, 55 aa, Homo sapiens
  MOD_RES (23)..(23): Selenocysteine
  MOD_RES (30)..(30): Selenocysteine
  MOD_RES (41)..(41): Selenocysteine
  MOD_RES (50)..(50): Selenocysteine
MSMEDYDFLFKIVLIGNAGVGKXCLVRRFXQGLFPPGQGAXIGVDFMIKXVEING

SEQ ID NO: 22353 - protein, 59 aa, Homo sapiens
  MOD_RES (23)..(23): Selenocysteine
  MOD_RES (30)..(30): Selenocysteine
  MOD_RES (41)..(41): Selenocysteine
  MOD_RES (50)..(50): Selenocysteine
MSMEDYDFLFKIVLIGNAGVGKXCLVRRFXQGLFPPGQGAXIGVDFMIKXVEINGEKVK

SEQ ID NO: 22354 - protein, 100 aa, Homo sapiens
  MOD_RES (23)..(23): Selenocysteine
  MOD_RES (30)..(30): Selenocysteine
  MOD_RES (41)..(41): Selenocysteine
  MOD_RES (50)..(50): Selenocysteine
  MOD_RES (65)..(65): Selenocysteine
  MOD_RES (75)..(75): Selenocysteine
  MOD_RES (88)..(88): Selenocysteine
  MOD_RES (92)..(92): Selenocysteine
MSMEDYDFLFKIVLIGNAGVGKXCLVRRFXQGLFPPGQGAXIGVDFMIKXVEINGEKVKLQIWDXAGQERFRSIXQSYYRSANALILXYDIXCEESFRCL

SEQ ID NO: 22355 - protein, 114 aa, Homo sapiens
  MOD_RES (23)..(23): Selenocysteine
  MOD_RES (30)..(30): Selenocysteine
  MOD_RES (41)..(41): Selenocysteine
  MOD_RES (50)..(50): Selenocysteine
  MOD_RES (65)..(65): Selenocysteine
  MOD_RES (75)..(75): Selenocysteine
  MOD_RES (88)..(88): Selenocysteine
  MOD_RES (92)..(92): Selenocysteine
MSMEDYDFLFKIVLIGNAGVGKXCLVRRFXQGLFPPGQGAXIGVDFMIKXVEINGEKVKLQIWDXAGQERFRSIXQSYYRSANALILXYDIXCEESFRCLPEWLREIEQYASNK

SEQ ID NO: 22356 - protein, 164 aa, Homo sapiens
  MOD_RES (23)..(23): Selenocysteine
  MOD_RES (30)..(30): Selenocysteine
  MOD_RES (41)..(41): Selenocysteine
  MOD_RES (50)..(50): Selenocysteine
  MOD_RES (65)..(65): Selenocysteine
  MOD_RES (75)..(75): Selenocysteine
  MOD_RES (88)..(88): Selenocysteine
  MOD_RES (92)..(92): Selenocysteine
  MOD_RES (117)..(117): Selenocysteine
  MOD_RES (121)..(121): Selenocysteine
  MOD_RES (124)..(124): Selenocysteine
  MOD_RES (144)..(144): Selenocysteine
  MOD_RES (164)..(164): Selenocysteine
MSMEDYDFLFKIVLIGNAGVGKXCLVRRFXQGLFPPGQGAXIGVDFMIKXVEINGEKVKLQIWDXAGQERFRSIXQSYYRSANALILXYDIXCEESFRCLPEWLREIEQYASNKVIXVLAXRLXWLKGERFPSSELKNSQKLRXCIIWRPQPRNLIMWRNSSLX

SEQ ID NO: 22357 - protein, 122 aa, Homo sapiens
  MOD_RES (23)..(23): Selenocysteine
  MOD_RES (30)..(30): Selenocysteine
  MOD_RES (41)..(41): Selenocysteine
  MOD_RES (50)..(50): Selenocysteine
  MOD_RES (65)..(65): Selenocysteine
  MOD_RES (75)..(75): Selenocysteine
  MOD_RES (88)..(88): Selenocysteine
  MOD_RES (92)..(92): Selenocysteine
  MOD_RES (117)..(117): Selenocysteine
MSMEDYDFLFKIVLIGNAGVGKXCLVRRFXQGLFPPGQGAXIGVDFMIKXVEINGEKVKLQIWDXAGQERFRSIXQSYYRSANALILXYDIXCEESFRCLPEWLREIEQYASNKVIXVLVGK

SEQ ID NO: 22358 - protein, 139 aa, Homo sapiens
  MOD_RES (23)..(23): Selenocysteine
  MOD_RES (30)..(30): Selenocysteine
  MOD_RES (41)..(41): Selenocysteine
  MOD_RES (50)..(50): Selenocysteine
  MOD_RES (65)..(65): Selenocysteine
  MOD_RES (75)..(75): Selenocysteine
  MOD_RES (88)..(88): Selenocysteine
  MOD_RES (92)..(92): Selenocysteine
  MOD_RES (117)..(117): Selenocysteine
MSMEDYDFLFKIVLIGNAGVGKXCLVRRFXQGLFPPGQGAXIGVDFMIKXVEINGEKVKLQIWDXAGQERFRSIXQSYYRSANALILXYDIXCEESFRCLPEWLREIEQYASNKVIXVLVGNKIDLAERREVSQQRAEE

SEQ ID NO: 22359 - protein, 168 aa, Homo sapiens
  MOD_RES (23)..(23): Selenocysteine
  MOD_RES (30)..(30): Selenocysteine
  MOD_RES (41)..(41): Selenocysteine
  MOD_RES (50)..(50): Selenocysteine
  MOD_RES (65)..(65): Selenocysteine
  MOD_RES (75)..(75): Selenocysteine
  MOD_RES (88)..(88): Selenocysteine
  MOD_RES (92)..(92): Selenocysteine
  MOD_RES (117)..(117): Selenocysteine
  MOD_RES (151)..(151): Selenocysteine
MSMEDYDFLFKIVLIGNAGVGKXCLVRRFXQGLFPPGQGAXIGVDFMIKXVEINGEKVKLQIWDXAGQERFRSIXQSYYRSANALILXYDIXCEESFRCLPEWLREIEQYASNKVIXVLVGNKIDLAERREVSQQRAEEFSEAQDMYYLEXSAKESDNVEKLFLDLAC

SEQ ID NO: 22360 - protein, 203 aa, Homo sapiens
  MOD_RES (23)..(23): Selenocysteine
  MOD_RES (30)..(30): Selenocysteine
  MOD_RES (41)..(41): Selenocysteine
  MOD_RES (50)..(50): Selenocysteine
  MOD_RES (65)..(65): Selenocysteine
  MOD_RES (75)..(75): Selenocysteine
  MOD_RES (88)..(88): Selenocysteine
  MOD_RES (92)..(92): Selenocysteine
  MOD_RES (117)..(117): Selenocysteine
  MOD_RES (151)..(151): Selenocysteine
  MOD_RES (178)..(178): Selenocysteine
  MOD_RES (198)..(198): Selenocysteine
MSMEDYDFLFKIVLIGNAGVGKXCLVRRFXQGLFPPGQGAXIGVDFMIKXVEINGEKVKLQIWDXAGQERFRSIXQSYYRSANALILXYDIXCEESFRCLPEWLREIEQYASNKVIXVLVGNKIDLAERREVSQQRAEEFSEAQDMYYLEXSAKESDNVEKLFLDLACRLISEARQNXLVNNVSSPLPGEGKSISYLXCCNFN

SEQ ID NO: 22361 - protein, 37 aa, Homo sapiens
  MOD_RES (23)..(23): Selenocysteine
  MOD_RES (30)..(30): Selenocysteine
  MOD_RES (37)..(37): Selenocysteine
MSMEDYDFLFKIVLIGNAGVGKXCLVRRFXQLQIWDX

SEQ ID NO: 22362 - protein, 94 aa, Homo sapiens
  MOD_RES (23)..(23): Selenocysteine
  MOD_RES (30)..(30): Selenocysteine
  MOD_RES (37)..(37): Selenocysteine
  MOD_RES (47)..(47): Selenocysteine
  MOD_RES (60)..(60): Selenocysteine
  MOD_RES (64)..(64): Selenocysteine
  MOD_RES (89)..(89): Selenocysteine
MSMEDYDFLFKIVLIGNAGVGKXCLVRRFXQLQIWDXAGQERFRSIXQSYYRSANALILXYDIXCEESFRCLPEWLREIEQYASNKVIXVLVGK

SEQ ID NO: 22363 - protein, 167 aa, Homo sapiens
  MOD_RES (7)..(7): Selenocysteine
  MOD_RES (29)..(29): Selenocysteine
  MOD_RES (39)..(39): Selenocysteine
  MOD_RES (52)..(52): Selenocysteine
  MOD_RES (56)..(56): Selenocysteine
  MOD_RES (81)..(81): Selenocysteine
  MOD_RES (115)..(115): Selenocysteine
  MOD_RES (142)..(142): Selenocysteine
  MOD_RES (162)..(162): Selenocysteine
YCRDIHXKYSSEWGAGALEDKSRLQIWDXAGQERFRSIXQSYYRSANALILXYDIXCEESFRCLPEWLREIEQYASNKVIXVLVGNKIDLAERREVSQQRAEEFSEAQDMYYLEXSAKESDNVEKLFLDLACRLISEARQNXLVNNVSSPLPGEGKSISYLXCCNFN

SEQ ID NO: 22364 - protein, 195 aa, Homo sapiens
  MOD_RES (15)..(15): Selenocysteine
  MOD_RES (38)..(38): Selenocysteine
  MOD_RES (45)..(45): Selenocysteine
  MOD_RES (47)..(47): Selenocysteine
  MOD_RES (62)..(62): Selenocysteine
  MOD_RES (89)..(89): Selenocysteine
  MOD_RES (96)..(96): Selenocysteine
  MOD_RES (148)..(148): Selenocysteine
  MOD_RES (180)..(180): Selenocysteine
  MOD_RES (187)..(187): Selenocysteine
MMAIRELKVCLLGDXGVGKSSIVCRFVQDHFDHNISPXIGASFMXKXVPCGNELHKFLIWDXAGQERFHSLAPMYYRGSAAAVIVYDIXKQDSFYXLKKWVKELKEHGPENIVMAIAGNKCDLSDIREVPLKDAKEYAESIGAIVVEXSAKNAINIEELFQGISRQIPPLDPHENGNNGXIKVEKPXMQASRRCC

SEQ ID NO: 22365 - protein, 74 aa, Homo sapiens
  MOD_RES (15)..(15): Selenocysteine
  MOD_RES (38)..(38): Selenocysteine
  MOD_RES (45)..(45): Selenocysteine
  MOD_RES (47)..(47): Selenocysteine
  MOD_RES (62)..(62): Selenocysteine
MMAIRELKVCLLGDXGVGKSSIVCRFVQDHFDHNISPXIGASFMXKXVPCGNELHKFLIWDXAGQERGGSPEGC

SEQ ID NO: 22366 - protein, 25 aa, Homo sapiens
MMAIRELKVCLLGGIFYDQNCALWK

SEQ ID NO: 22367 - protein, 59 aa, Homo sapiens
  MOD_RES (23)..(23): Selenocysteine
  MOD_RES (31)..(31): Selenocysteine
  MOD_RES (55)..(55): Selenocysteine
  MOD_RES (58)..(58): Selenocysteine
MMAIRELKVCLLGGLMEPICSLXKCHSIGRXLDKDKEGCIPVAPPGGRWRYVLRXPAXG

SEQ ID NO: 22368 - protein, 225 aa, Homo sapiens
  MOD_RES (21)..(21): Selenocysteine
  MOD_RES (39)..(39): Selenocysteine
  MOD_RES (57)..(57): Selenocysteine
  MOD_RES (73)..(73): Selenocysteine
  MOD_RES (92)..(92): Selenocysteine
  MOD_RES (113)..(113): Selenocysteine
  MOD_RES (173)..(173): Selenocysteine
  MOD_RES (215)..(215): Selenocysteine
MAGGGAGDPGLGAAAAPAPEXREHLFKVLVIGELGVGKXSIIKRYVHQLFSQHYRAXIGVDFALKVLNWDSRXLVRLQLWDIAGQERFGNMXRVYYKEAVGAFVVFDISRSSXFEAVLKWKSDLDSKVHLPNGSPIPAVLLANKCDQNKDSSQSPSQVDQFCKEHGFAGWFEXSAKDNINIEEAARFLVEKILVNHQSFPNEENDVDKIKLDQEXLRAENKSQCC

SEQ ID NO: 22369 - protein, 237 aa, Homo sapiens
  MOD_RES (50)..(50): Selenocysteine
  MOD_RES (53)..(53): Selenocysteine
  MOD_RES (60)..(60): Selenocysteine
  MOD_RES (65)..(65): Selenocysteine
  MOD_RES (68)..(68): Selenocysteine
  MOD_RES (77)..(77): Selenocysteine
  MOD_RES (92)..(92): Selenocysteine
  MOD_RES (120)..(120): Selenocysteine
  MOD_RES (123)..(123): Selenocysteine
  MOD_RES (126)..(126): Selenocysteine
  MOD_RES (180)..(180): Selenocysteine
  MOD_RES (233)..(233): Selenocysteine
MAQPILGHGSLQPASAAGLASLELDSSLDQYVQIRIFKIIVIGDSNVGKXCLXFRFCGGXFPDKXEAXIGVDFREKXVEIEGEKIKVQVWDXAGQERFRKSMVEHYYRNVHAVVFVYDVXKMXSFXNLKMWIQECNGHAVPPLVPKVLVGNKCDLREQIQVPSNLALKFADAHNMLLFEXSAKDPKESQNVESIFMCLACRLKAQKSLLYRDAERQQGKVQKLEFPQEANSKXSCPC

SEQ ID NO: 22370 - protein, 229 aa, Homo sapiens
  MOD_RES (47)..(47): Selenocysteine
  MOD_RES (50)..(50): Selenocysteine
  MOD_RES (62)..(62): Selenocysteine
  MOD_RES (65)..(65): Selenocysteine
  MOD_RES (89)..(89): Selenocysteine
  MOD_RES (117)..(117): Selenocysteine
  MOD_RES (160)..(160): Selenocysteine
  MOD_RES (169)..(169): Selenocysteine
  MOD_RES (177)..(177): Selenocysteine
  MOD_RES (194)..(194): Selenocysteine
  MOD_RES (226)..(226): Selenocysteine
MAEEMESSLEASFSSSGAVSGASGFLPPARSRIFKIIVIGDSNVGKXCLXYRFCAGRFPDRXEAXIGVDFRERAVEIDGERIKIQLWDXAGQERFRKSMVQHYYRNVHAVVFVYDMXNMASFHSLPSWIEECKQHLLANDIPRILVGNKCDLRSAIQVPXDLAQKFADXHSMPLFEXSAKNPNDNDHVEAIFMXLAHKLKSHKPLMLSQPPDNGIILKPEPKPAMXCWC

SEQ ID NO: 22371 - protein, 49 aa, Homo sapiens
  MOD_RES (37)..(37): Selenocysteine
  MOD_RES (45)..(45): Selenocysteine
  MOD_RES (47)..(47): Selenocysteine
MNILAPVRRDRVLAELPQCLRKEAALHGHKDFHPRVXCACQEHRXGXVG

SEQ ID NO: 22372 - protein, 237 aa, Homo sapiens
  MOD_RES (37)..(37): Selenocysteine
  MOD_RES (45)..(45): Selenocysteine
  MOD_RES (47)..(47): Selenocysteine
  MOD_RES (54)..(54): Selenocysteine
  MOD_RES (62)..(62): Selenocysteine
  MOD_RES (86)..(86): Selenocysteine
  MOD_RES (98)..(98): Selenocysteine
  MOD_RES (121)..(121): Selenocysteine
  MOD_RES (150)..(150): Selenocysteine
  MOD_RES (179)..(179): Selenocysteine
  MOD_RES (194)..(194): Selenocysteine
  MOD_RES (227)..(227): Selenocysteine
  MOD_RES (234)..(234): Selenocysteine
MNILAPVRRDRVLAELPQCLRKEAALHGHKDFHPRVXCACQEHRXGXVGFCKDXFDKNYKAXIGVDFEMERFEVLGIPFSLQLWDXAGQERFKCIASXYYRGAQAIIIVFNLNDVASLEHXKQWLADALKENDPSSVLLFLVGSKKDLSXPAQYALMEKDALQVAQEMKAEYWAVSSLXGENVREFFFRVAALXFEANVLAELEKSGARRIGDVVRINSDDSNLYLXASKKKPXCCP

SEQ ID NO: 22373 - protein, 171 aa, Homo sapiens
  MOD_RES (37)..(37): Selenocysteine
  MOD_RES (45)..(45): Selenocysteine
  MOD_RES (47)..(47): Selenocysteine
  MOD_RES (66)..(66): Selenocysteine
  MOD_RES (76)..(76): Selenocysteine
  MOD_RES (84)..(84): Selenocysteine
  MOD_RES (108)..(108): Selenocysteine
  MOD_RES (120)..(120): Selenocysteine
  MOD_RES (143)..(143): Selenocysteine
MNILAPVRRDRVLAELPQCLRKEAALHGHKDFHPRVXCACQEHRXGXVGFKISKVIVVGDLSVGKXCLINRFCKDXFDKNYKAXIGVDFEMERFEVLGIPFSLQLWDXAGQERFKCIASXYYRGAQAIIIVFNLNDVASLEHXKFQEGSEYPCSVCADGERRPPGGPGDEG

SEQ ID NO: 22374 - protein, 149 aa, Homo sapiens
  MOD_RES (37)..(37): Selenocysteine
  MOD_RES (45)..(45): Selenocysteine
  MOD_RES (47)..(47): Selenocysteine
  MOD_RES (66)..(66): Selenocysteine
  MOD_RES (76)..(76): Selenocysteine
  MOD_RES (84)..(84): Selenocysteine
  MOD_RES (108)..(108): Selenocysteine
  MOD_RES (120)..(120): Selenocysteine
  MOD_RES (143)..(143): Selenocysteine
MNILAPVRRDRVLAELPQCLRKEAALHGHKDFHPRVXCACQEHRXGXVGFKISKVIVVGDLSVGKXCLINRFCKDXFDKNYKAXIGVDFEMERFEVLGIPFSLQLWDXAGQERFKCIASXYYRGAQAIIIVFNLNDVASLEHXKQWLAD

SEQ ID NO: 22375 - protein, 251 aa, Homo sapiens
  MOD_RES (37)..(37): Selenocysteine
  MOD_RES (45)..(45): Selenocysteine
  MOD_RES (47)..(47): Selenocysteine
  MOD_RES (66)..(66): Selenocysteine
  MOD_RES (76)..(76): Selenocysteine
  MOD_RES (84)..(84): Selenocysteine
  MOD_RES (108)..(108): Selenocysteine
  MOD_RES (120)..(120): Selenocysteine
  MOD_RES (143)..(143): Selenocysteine
  MOD_RES (164)..(164): Selenocysteine
  MOD_RES (193)..(193): Selenocysteine
  MOD_RES (208)..(208): Selenocysteine
  MOD_RES (241)..(241): Selenocysteine
  MOD_RES (248)..(248): Selenocysteine
MNILAPVRRDRVLAELPQCLRKEAALHGHKDFHPRVXCACQEHRXGXVGFKISKVIVVGDLSVGKXCLINRFCKDXFDKNYKAXIGVDFEMERFEVLGIPFSLQLWDXAGQERFKCIASXYYRGAQAIIIVFNLNDVASLEHXKQWLADALKENDPSSVLLFLXPAQYALMEKDALQVAQEMKAEYWAVSSLXGENVREFFFRVAALXFEANVLAELEKSGARRIGDVVRINSDDSNLYLXASKKKPXCCP

SEQ ID NO: 22376 - protein, 211 aa, Homo sapiens
  MOD_RES (37)..(37): Selenocysteine
  MOD_RES (45)..(45): Selenocysteine
  MOD_RES (47)..(47): Selenocysteine
  MOD_RES (66)..(66): Selenocysteine
  MOD_RES (76)..(76): Selenocysteine
  MOD_RES (84)..(84): Selenocysteine
  MOD_RES (108)..(108): Selenocysteine
  MOD_RES (120)..(120): Selenocysteine
  MOD_RES (143)..(143): Selenocysteine
  MOD_RES (172)..(172): Selenocysteine
  MOD_RES (201)..(201): Selenocysteine
MNILAPVRRDRVLAELPQCLRKEAALHGHKDFHPRVXCACQEHRXGXVGFKISKVIVVGDLSVGKXCLINRFCKDXFDKNYKAXIGVDFEMERFEVLGIPFSLQLWDXAGQERFKCIASXYYRGAQAIIIVFNLNDVASLEHXKQWLADALKENDPSSVLLFLVGSKKDLSXPAQYALMEKDALQVAQEMKAEYWAVSSLXGENVREFFFR

SEQ ID NO: 22377 - protein, 259 aa, Homo sapiens
  MOD_RES (37)..(37): Selenocysteine
  MOD_RES (45)..(45): Selenocysteine
  MOD_RES (47)..(47): Selenocysteine
  MOD_RES (66)..(66): Selenocysteine
  MOD_RES (76)..(76): Selenocysteine
  MOD_RES (84)..(84): Selenocysteine
  MOD_RES (108)..(108): Selenocysteine
  MOD_RES (120)..(120): Selenocysteine
  MOD_RES (143)..(143): Selenocysteine
  MOD_RES (172)..(172): Selenocysteine
  MOD_RES (201)..(201): Selenocysteine
  MOD_RES (216)..(216): Selenocysteine
  MOD_RES (249)..(249): Selenocysteine
  MOD_RES (256)..(256): Selenocysteine
MNILAPVRRDRVLAELPQCLRKEAALHGHKDFHPRVXCACQEHRXGXVGFKISKVIVVGDLSVGKXCLINRFCKDXFDKNYKAXIGVDFEMERFEVLGIPFSLQLWDXAGQERFKCIASXYYRGAQAIIIVFNLNDVASLEHXKQWLADALKENDPSSVLLFLVGSKKDLSXPAQYALMEKDALQVAQEMKAEYWAVSSLXGENVREFFFRVAALXFEANVLAELEKSGARRIGDVVRINSDDSNLYLXASKKKPXCCP

SEQ ID NO: 22378 - protein, 51 aa, Homo sapiens
  MOD_RES (37)..(37): Selenocysteine
  MOD_RES (45)..(45): Selenocysteine
  MOD_RES (47)..(47): Selenocysteine
MNILAPVRRDRVLAELPQCLRKEAALHGHKDFHPRVXCACQEHRXGXVGRF

SEQ ID NO: 22379 - protein, 211 aa, Homo sapiens
  MOD_RES (37)..(37): Selenocysteine
  MOD_RES (45)..(45): Selenocysteine
  MOD_RES (47)..(47): Selenocysteine
  MOD_RES (67)..(67): Selenocysteine
  MOD_RES (77)..(77): Selenocysteine
  MOD_RES (85)..(85): Selenocysteine
  MOD_RES (109)..(109): Selenocysteine
  MOD_RES (121)..(121): Selenocysteine
  MOD_RES (144)..(144): Selenocysteine
  MOD_RES (173)..(173): Selenocysteine
  MOD_RES (193)..(193): Selenocysteine
MNILAPVRRDRVLAELPQCLRKEAALHGHKDFHPRVXCACQEHRXGXVGRFKISKVIVVGDLSVGKXCLINRFCKDXFDKNYKAXIGVDFEMERFEVLGIPFSLQLWDXAGQERFKCIASXYYRGAQAIIIVFNLNDVASLEHXKQWLADALKENDPSSVLLFLVGSKKDLSXPAQYALMEKDALQVAQEMKXVQRLPSPRALCHPHSSRA

SEQ ID NO: 22380 - protein, 268 aa, Homo sapiens
  MOD_RES (45)..(45): Selenocysteine
  MOD_RES (94)..(94): Selenocysteine
  MOD_RES (102)..(102): Selenocysteine
  MOD_RES (104)..(104): Selenocysteine
  MOD_RES (124)..(124): Selenocysteine
  MOD_RES (134)..(134): Selenocysteine
  MOD_RES (142)..(142): Selenocysteine
  MOD_RES (166)..(166): Selenocysteine
  MOD_RES (178)..(178): Selenocysteine
  MOD_RES (201)..(201): Selenocysteine
  MOD_RES (230)..(230): Selenocysteine
  MOD_RES (250)..(250): Selenocysteine
MSHLPGLELRREAPPLLGPLLSPFPLPAGSWHRQMLRSSLRFPIXNSAGAPCKAAGRMNILAPVRRDRVLAELPQCLRKEAALHGHKDFHPRVXCACQEHRXGXVGRFKISKVIVVGDLSVGKXCLINRFCKDXFDKNYKAXIGVDFEMERFEVLGIPFSLQLWDXAGQERFKCIASXYYRGAQAIIIVFNLNDVASLEHXKQWLADALKENDPSSVLLFLVGSKKDLSXPAQYALMEKDALQVAQEMKXVQRLPSPRALCHPHSSRA

SEQ ID NO: 22381 - protein, 259 aa, Homo sapiens
  MOD_RES (45)..(45): Selenocysteine
  MOD_RES (66)..(66): Selenocysteine
  MOD_RES (76)..(76): Selenocysteine
  MOD_RES (84)..(84): Selenocysteine
  MOD_RES (108)..(108): Selenocysteine
  MOD_RES (120)..(120): Selenocysteine
  MOD_RES (143)..(143): Selenocysteine
  MOD_RES (172)..(172): Selenocysteine
  MOD_RES (201)..(201): Selenocysteine
  MOD_RES (216)..(216): Selenocysteine
  MOD_RES (249)..(249): Selenocysteine
  MOD_RES (256)..(256): Selenocysteine
MSHLPGLELRREAPPLLGPLLSPFPLPAGSWHRQMLRSSLRFPIXNSAGFKISKVIVVGDLSVGKXCLINRFCKDXFDKNYKAXIGVDFEMERFEVLGIPFSLQLWDXAGQERFKCIASXYYRGAQAIIIVFNLNDVASLEHXKQWLADALKENDPSSVLLFLVGSKKDLSXPAQYALMEKDALQVAQEMKAEYWAVSSLXGENVREFFFRVAALXFEANVLAELEKSGARRIGDVVRINSDDSNLYLXASKKKPXCCP

SEQ ID NO: 22382 - protein, 250 aa, Homo sapiens
  MOD_RES (22)..(22): Selenocysteine
  MOD_RES (31)..(31): Selenocysteine
  MOD_RES (50)..(50): Selenocysteine
  MOD_RES (69)..(69): Selenocysteine
  MOD_RES (101)..(101): Selenocysteine
  MOD_RES (114)..(114): Selenocysteine
  MOD_RES (153)..(153): Selenocysteine
  MOD_RES (177)..(177): Selenocysteine
  MOD_RES (192)..(192): Selenocysteine
  MOD_RES (198)..(198): Selenocysteine
  MOD_RES (205)..(205): Selenocysteine
  MOD_RES (238)..(238): Selenocysteine
  MOD_RES (250)..(250): Selenocysteine
MVGQPQPRDDVGSPRPRVIVGXIRPRVIVGXIRPRVIVGSARARPPPDGXPRPQLAAEESPRPRVIFGXPRARVILGSPRPRVIVSSPWPAVVVASPRPRXPVGSPWPRVVVGXPRPRVIVGSPRARVADADPASAPSQGALQGRRQDEHSGXRAEGSRPGGAAPDLRSPRSLWWGXCRWGRLASLIGSAKXPLIRIXRPPLEWXSRWNDLRCWAFPSVCSFGIPLGRRGSNALHQPXIEELKPSSLSSX

SEQ ID NO: 22383 - protein, 228 aa, Homo sapiens
  MOD_RES (22)..(22): Selenocysteine
  MOD_RES (31)..(31): Selenocysteine
  MOD_RES (50)..(50): Selenocysteine
  MOD_RES (69)..(69): Selenocysteine
  MOD_RES (101)..(101): Selenocysteine
  MOD_RES (114)..(114): Selenocysteine
  MOD_RES (153)..(153): Selenocysteine
  MOD_RES (170)..(170): Selenocysteine
  MOD_RES (176)..(176): Selenocysteine
  MOD_RES (183)..(183): Selenocysteine
  MOD_RES (216)..(216): Selenocysteine
  MOD_RES (228)..(228): Selenocysteine
MVGQPQPRDDVGSPRPRVIVGXIRPRVIVGXIRPRVIVGSARARPPPDGXPRPQLAAEESPRPRVIFGXPRARVILGSPRPRVIVSSPWPAVVVASPRPRXPVGSPWPRVVVGXPRPRVIVGSPRARVADADPASAPSQGALQGRRQDEHSGXRAEGSRPGGAAPGSAKXPLIRIXRPPLEWXSRWNDLRCWAFPSVCSFGIPLGRRGSNALHQPXIEELKPSSLSSX

SEQ ID NO: 22384 - protein, 197 aa, Homo sapiens
  MOD_RES (22)..(22): Selenocysteine
  MOD_RES (31)..(31): Selenocysteine
  MOD_RES (50)..(50): Selenocysteine
  MOD_RES (69)..(69): Selenocysteine
  MOD_RES (101)..(101): Selenocysteine
  MOD_RES (114)..(114): Selenocysteine
  MOD_RES (153)..(153): Selenocysteine
MVGQPQPRDDVGSPRPRVIVGXIRPRVIVGXIRPRVIVGSARARPPPDGXPRPQLAAEESPRPRVIFGXPRARVILGSPRPRVIVSSPWPAVVVASPRPRXPVGSPWPRVVVGXPRPRVIVGSPRARVADADPASAPSQGALQGRRQDEHSGXRAEGSRPGGAAPVPEEGGRFARAQRLPPPRHLRLPGAPDRHRGI

SEQ ID NO: 22385 - protein, 198 aa, Homo sapiens
  MOD_RES (22)..(22): Selenocysteine
  MOD_RES (31)..(31): Selenocysteine
  MOD_RES (50)..(50): Selenocysteine
  MOD_RES (69)..(69): Selenocysteine
  MOD_RES (101)..(101): Selenocysteine
  MOD_RES (114)..(114): Selenocysteine
  MOD_RES (153)..(153): Selenocysteine
MVGQPQPRDDVGSPRPRVIVGXIRPRVIVGXIRPRVIVGSARARPPPDGXPRPQLAAEESPRPRVIFGXPRARVILGSPRPRVIVSSPWPAVVVASPRPRXPVGSPWPRVVVGXPRPRVIVGSPRARVADADPASAPSQGALQGRRQDEHSGXRAEGSRPGGAAPVPEEGGRFARAQRLPPPRHLRLPGAPDRHRGQI

SEQ ID NO: 22386 - protein, 156 aa, Homo sapiens
  MOD_RES (1)..(1): Any amino acid
  MOD_RES (12)..(12): Selenocysteine
  MOD_RES (22)..(22): Selenocysteine
  MOD_RES (34)..(34): Selenocysteine
  MOD_RES (57)..(57): Selenocysteine
  MOD_RES (78)..(78): Selenocysteine
  MOD_RES (107)..(107): Selenocysteine
  MOD_RES (122)..(122): Selenocysteine
  MOD_RES (155)..(155): Selenocysteine
XMLRSSLRFPIXNSAGLQLWDXAGQERFKCIASXYYRGAQAIIIVFNLNDVASLEHXKQWLADALKENDPSSVLLFLXPAQYALMEKDALQVAQEMKAEYWAVSSLXGENVREFFFRVAALXFEANVLAELEKSGARRIGDVVRINSDDSNLYLXA

SEQ ID NO: 22387 - protein, 147 aa, Homo sapiens
  MOD_RES (26)..(26): Selenocysteine
  MOD_RES (62)..(62): Selenocysteine
MARDYDHLFKLLIIGDSGDLGAACLXQGRRKRSGIEWKRCSWCVAAQGGGKSIEKCGQEQFXVAFCRQHFLRQLHHHDRSGFQDPDRGDQRGEGEAADLGHSGAGALPHHHLHVLSGDPRGHCGLRRHQCRVLCQRQAVASRNQPEL

SEQ ID NO: 22388 - protein, 185 aa, Homo sapiens
  MOD_RES (32)..(32): Selenocysteine
  MOD_RES (39)..(40): Selenocysteine
  MOD_RES (49)..(49): Selenocysteine
  MOD_RES (64)..(64): Selenocysteine
  MOD_RES (72)..(72): Selenocysteine
  MOD_RES (74)..(74): Selenocysteine
  MOD_RES (76)..(76): Selenocysteine
  MOD_RES (116)..(116): Selenocysteine
  MOD_RES (133)..(133): Selenocysteine
  MOD_RES (149)..(149): Selenocysteine
  MOD_RES (175)..(175): Selenocysteine
MARDYDHLFKLLIIGDSGVGKSSLLLRFADNXFSGSYIXXIGVDFKIRXVEINGEKVKLQIWDXAGQERFRXIXSXAESFVNVKRWLHEINQNCDDVCRILVGNKNDDPERKVVEXEDAYKFAGQMGIQLFEXSAKENVNVEEMFNCIXELVLRAKKDNLAKQQQQQQNDVVKLXKNSKRKKRCC

SEQ ID NO: 22389 - protein, 152 aa, Homo sapiens
  MOD_RES (32)..(32): Selenocysteine
  MOD_RES (39)..(40): Selenocysteine
  MOD_RES (49)..(49): Selenocysteine
  MOD_RES (64)..(64): Selenocysteine
  MOD_RES (72)..(72): Selenocysteine
  MOD_RES (74)..(74): Selenocysteine
  MOD_RES (76)..(76): Selenocysteine
  MOD_RES (81)..(81): Selenocysteine
  MOD_RES (91)..(91): Selenocysteine
  MOD_RES (137)..(137): Selenocysteine
  MOD_RES (141)..(142): Selenocysteine
MARDYDHLFKLLIIGDSGVGKSSLLLRFADNXFSGSYIXXIGVDFKIRXVEINGEKVKLQIWDXAGQERFRXIXSXYYRGXHGVIVVYDVXSAESFVNVKRWLHEINQNCDDVCRILDVQLHHGAGPPSKERQPGKXAAAXXERCGEAHEEQ

SEQ ID NO: 22390 - protein, 201 aa, Homo sapiens
  MOD_RES (32)..(32): Selenocysteine
  MOD_RES (39)..(40): Selenocysteine
  MOD_RES (49)..(49): Selenocysteine
  MOD_RES (64)..(64): Selenocysteine
  MOD_RES (72)..(72): Selenocysteine
  MOD_RES (74)..(74): Selenocysteine
  MOD_RES (76)..(76): Selenocysteine
  MOD_RES (81)..(81): Selenocysteine
  MOD_RES (91)..(91): Selenocysteine
  MOD_RES (132)..(132): Selenocysteine
  MOD_RES (149)..(149): Selenocysteine
  MOD_RES (165)..(165): Selenocysteine
  MOD_RES (191)..(191): Selenocysteine
MARDYDHLFKLLIIGDSGVGKSSLLLRFADNXFSGSYIXXIGVDFKIRXVEINGEKVKLQIWDXAGQERFRXIXSXYYRGXHGVIVVYDVXSAESFVNVKRWLHEINQNCDDVCRILVGNKNDDPERKVVEXEDAYKFAGQMGIQLFEXSAKENVNVEEMFNCIXELVLRAKKDNLAKQQQQQQNDVVKLXKNSKRKKRCC

SEQ ID NO: 22391 - protein, 311 aa, Homo sapiens
  MOD_RES (18)..(18): Selenocysteine
  MOD_RES (20)..(20): Selenocysteine
  MOD_RES (23)..(24): Selenocysteine
  MOD_RES (26)..(26): Selenocysteine
  MOD_RES (72)..(72): Selenocysteine
  MOD_RES (92)..(92): Selenocysteine
  MOD_RES (116)..(116): Selenocysteine
  MOD_RES (118)..(118): Selenocysteine
  MOD_RES (133)..(133): Selenocysteine
  MOD_RES (157)..(157): Selenocysteine
  MOD_RES (179)..(179): Selenocysteine
  MOD_RES (184)..(184): Selenocysteine
  MOD_RES (188)..(188): Selenocysteine
  MOD_RES (192)..(192): Selenocysteine
  MOD_RES (215)..(215): Selenocysteine
  MOD_RES (250)..(250): Selenocysteine
  MOD_RES (299)..(299): Selenocysteine
MVIAGASWMLGRAAASPXQXPPXXSXIRVARRSRVALVAMVIAAAGSGGPGRAEPQLSQPSLDCGRMRSSLXPLGPPVSRDRVIASFPKWYXPEACLQLREHFHGQVSAACQRRNXGXVGFCKNVFDRDYKAXIGVDFEIERFEIAGIPYSLQIWDXAGQEKFKCIASAYYRGAQVIIXAFDLXDVQXLEHXRQWLEDALRENEAGSCFIFLVGXKKDLLSGAACEQAEADAVHLAREMQAEYWSVSAKXGENVKAFFSRVAALAFEQSVLQDLERQSSARLQVGNGDLIQMEGSPPEXQESKRPSSLGCC

SEQ ID NO: 22392 - protein, 333 aa, Homo sapiens
  MOD_RES (18)..(18): Selenocysteine
  MOD_RES (20)..(20): Selenocysteine
  MOD_RES (23)..(24): Selenocysteine
  MOD_RES (26)..(26): Selenocysteine
  MOD_RES (72)..(72): Selenocysteine
  MOD_RES (92)..(92): Selenocysteine
  MOD_RES (116)..(116): Selenocysteine
  MOD_RES (118)..(118): Selenocysteine
  MOD_RES (137)..(137): Selenocysteine
  MOD_RES (155)..(155): Selenocysteine
  MOD_RES (179)..(179): Selenocysteine
  MOD_RES (201)..(201): Selenocysteine
  MOD_RES (206)..(206): Selenocysteine
  MOD_RES (210)..(210): Selenocysteine
  MOD_RES (214)..(214): Selenocysteine
  MOD_RES (237)..(237): Selenocysteine
  MOD_RES (272)..(272): Selenocysteine
  MOD_RES (321)..(321): Selenocysteine
MVIAGASWMLGRAAASPXQXPPXXSXIRVARRSRVALVAMVIAAAGSGGPGRAEPQLSQPSLDCGRMRSSLXPLGPPVSRDRVIASFPKWYXPEACLQLREHFHGQVSAACQRRNXGXVGLKLSKVVVVGDLYVGKXSLIHRFCKNVFDRDYKAXIGVDFEIERFEIAGIPYSLQIWDXAGQEKFKCIASAYYRGAQVIIXAFDLXDVQXLEHXRQWLEDALRENEAGSCFIFLVGXKKDLLSGAACEQAEADAVHLAREMQAEYWSVSAKXGENVKAFFSRVAALAFEQSVLQDLERQSSARLQVGNGDLIQMEGSPPEXQESKRPSSLGCC

SEQ ID NO: 22393 - protein, 132 aa, Homo sapiens
  MOD_RES (1)..(1): Any amino acid
  MOD_RES (11)..(11): Selenocysteine
  MOD_RES (13)..(13): Selenocysteine
  MOD_RES (32)..(32): Selenocysteine
  MOD_RES (50)..(50): Selenocysteine
  MOD_RES (74)..(74): Selenocysteine
  MOD_RES (98)..(98): Selenocysteine
  MOD_RES (122)..(122): Selenocysteine
  MOD_RES (124)..(124): Selenocysteine
  MOD_RES (131)..(131): Selenocysteine
XVSAACQRRNXGXVGLKLSKVVVVGDLYVGKXSLIHRFCKNVFDRDYKAXIGVDFEIERFEIAGIPYSLQIWDXAGQEKFKCIASAYYRGAQGEQHAXSGLNCMQQRGPCRAPQWESRVLCXGXSFLSSKXH

SEQ ID NO: 22394 - protein, 196 aa, Homo sapiens
  MOD_RES (11)..(11): Selenocysteine
  MOD_RES (16)..(16): Selenocysteine
  MOD_RES (31)..(31): Selenocysteine
  MOD_RES (35)..(35): Selenocysteine
  MOD_RES (46)..(46): Selenocysteine
  MOD_RES (59)..(59): Selenocysteine
  MOD_RES (69)..(69): Selenocysteine
  MOD_RES (86)..(86): Selenocysteine
  MOD_RES (99)..(99): Selenocysteine
  MOD_RES (133)..(133): Selenocysteine
  MOD_RES (145)..(145): Selenocysteine
  MOD_RES (149)..(149): Selenocysteine
MCCKVMLLGDXGVGKXCFLIQFKDGAFLSGXFIAXVGIDFRNKVVXVDGVRVKLQIWDXAGQERFRSVXHAYYRDAQALLLLYDIXNKSSFDNIRAWLXEIHEYAQRDVVIMLLGNKADMSSERVIRSEDGEXLAREYGVPFLEXSAKXGMNVELAFLAIAKELKYRAGHQADEPSFQIRDYVESQKKRSSCCSFM

SEQ ID NO: 22395 - protein, 182 aa, Homo sapiens
  MOD_RES (25)..(25): Selenocysteine
  MOD_RES (36)..(36): Selenocysteine
  MOD_RES (55)..(55): Selenocysteine
  MOD_RES (61)..(61): Selenocysteine
  MOD_RES (66)..(66): Selenocysteine
  MOD_RES (79)..(79): Selenocysteine
  MOD_RES (89)..(89): Selenocysteine
  MOD_RES (106)..(106): Selenocysteine
  MOD_RES (119)..(119): Selenocysteine
  MOD_RES (153)..(153): Selenocysteine
  MOD_RES (165)..(165): Selenocysteine
  MOD_RES (169)..(169): Selenocysteine
MDLQRPDSYQGGAGPDFNDHVLHKXILVGDSGVGKXSLLVQFDQGKFIPGSFSAXVGIGFXNKVVXVDGVRVKLQIWDXAGQERFRSVXHAYYRDAQALLLLYDIXNKSSFDNIRAWLXEIHEYAQRDVVIMLLGNKADMSSERVIRSEDGEXLAREYGVPFLEXSAKXGMNVELAFLAIAK

SEQ ID NO: 22396 - protein, 216 aa, Homo sapiens
  MOD_RES (25)..(25): Selenocysteine
  MOD_RES (36)..(36): Selenocysteine
  MOD_RES (55)..(55): Selenocysteine
  MOD_RES (61)..(61): Selenocysteine
  MOD_RES (66)..(66): Selenocysteine
  MOD_RES (79)..(79): Selenocysteine
  MOD_RES (89)..(89): Selenocysteine
  MOD_RES (106)..(106): Selenocysteine
  MOD_RES (119)..(119): Selenocysteine
  MOD_RES (153)..(153): Selenocysteine
  MOD_RES (165)..(165): Selenocysteine
  MOD_RES (169)..(169): Selenocysteine
MDLQRPDSYQGGAGPDFNDHVLHKXILVGDSGVGKXSLLVQFDQGKFIPGSFSAXVGIGFXNKVVXVDGVRVKLQIWDXAGQERFRSVXHAYYRDAQALLLLYDIXNKSSFDNIRAWLXEIHEYAQRDVVIMLLGNKADMSSERVIRSEDGEXLAREYGVPFLEXSAKXGMNVELAFLAIAKELKYRAGHQADEPSFQIRDYVESQKKRSSCCSFM

SEQ ID NO: 22397 - protein, 186 aa, Homo sapiens
  MOD_RES (2)..(2): Selenocysteine
  MOD_RES (4)..(4): Selenocysteine
  MOD_RES (10)..(10): Selenocysteine
  MOD_RES (29)..(29): Selenocysteine
  MOD_RES (36)..(36): Selenocysteine
  MOD_RES (49)..(49): Selenocysteine
  MOD_RES (59)..(59): Selenocysteine
  MOD_RES (76)..(76): Selenocysteine
  MOD_RES (89)..(89): Selenocysteine
  MOD_RES (123)..(123): Selenocysteine
  MOD_RES (135)..(135): Selenocysteine
  MOD_RES (139)..(139): Selenocysteine
MXGXPGAVAXRDGEAPERSPPCSPSYDLXGKNKVVXVDGVRVKLQIWDXAGQERFRSVXHAYYRDAQALLLLYDIXNKSSFDNIRAWLXEIHEYAQRDVVIMLLGNKADMSSERVIRSEDGEXLAREYGVPFLEXSAKXGMNVELAFLAIAKELKYRAGHQADEPSFQIRDYVESQKKRSSCCSFM

SEQ ID NO: 22398 - protein, 189 aa, Homo sapiens
  MOD_RES (2)..(2): Selenocysteine
  MOD_RES (4)..(4): Selenocysteine
  MOD_RES (10)..(10): Selenocysteine
  MOD_RES (29)..(29): Selenocysteine
  MOD_RES (38)..(38): Selenocysteine
  MOD_RES (43)..(43): Selenocysteine
  MOD_RES (58)..(58): Selenocysteine
  MOD_RES (62)..(62): Selenocysteine
  MOD_RES (73)..(73): Selenocysteine
  MOD_RES (86)..(86): Selenocysteine
  MOD_RES (96)..(96): Selenocysteine
  MOD_RES (113)..(113): Selenocysteine
  MOD_RES (126)..(126): Selenocysteine
  MOD_RES (160)..(160): Selenocysteine
  MOD_RES (172)..(172): Selenocysteine
  MOD_RES (176)..(176): Selenocysteine
MXGXPGAVAXRDGEAPERSPPCSPSYDLXGKVMLLGDXGVGKXCFLIQFKDGAFLSGXFIAXVGIDFRNKVVXVDGVRVKLQIWDXAGQERFRSVXHAYYRDAQALLLLYDIXNKSSFDNIRAWLXEIHEYAQRDVVIMLLGNKADMSSERVIRSEDGEXLAREYGVPFLEXSAKXGMNVELAFLAIAK

SEQ ID NO: 22399 - protein, 223 aa, Homo sapiens
  MOD_RES (2)..(2): Selenocysteine
  MOD_RES (4)..(4): Selenocysteine
  MOD_RES (10)..(10): Selenocysteine
  MOD_RES (29)..(29): Selenocysteine
  MOD_RES (38)..(38): Selenocysteine
  MOD_RES (43)..(43): Selenocysteine
  MOD_RES (58)..(58): Selenocysteine
  MOD_RES (62)..(62): Selenocysteine
  MOD_RES (73)..(73): Selenocysteine
  MOD_RES (86)..(86): Selenocysteine
  MOD_RES (96)..(96): Selenocysteine
  MOD_RES (113)..(113): Selenocysteine
  MOD_RES (126)..(126): Selenocysteine
  MOD_RES (160)..(160): Selenocysteine
  MOD_RES (172)..(172): Selenocysteine
  MOD_RES (176)..(176): Selenocysteine
MXGXPGAVAXRDGEAPERSPPCSPSYDLXGKVMLLGDXGVGKXCFLIQFKDGAFLSGXFIAXVGIDFRNKVVXVDGVRVKLQIWDXAGQERFRSVXHAYYRDAQALLLLYDIXNKSSFDNIRAWLXEIHEYAQRDVVIMLLGNKADMSSERVIRSEDGEXLAREYGVPFLEXSAKXGMNVELAFLAIAKELKYRAGHQADEPSFQIRDYVESQKKRSSCCSFM

SEQ ID NO: 22400 - protein, 191 aa, Homo sapiens
  MOD_RES (23)..(23): Selenocysteine
  MOD_RES (25)..(25): Selenocysteine
  MOD_RES (41)..(41): Selenocysteine
  MOD_RES (54)..(54): Selenocysteine
  MOD_RES (64)..(64): Selenocysteine
  MOD_RES (81)..(81): Selenocysteine
  MOD_RES (94)..(94): Selenocysteine
  MOD_RES (128)..(128): Selenocysteine
  MOD_RES (140)..(140): Selenocysteine
  MOD_RES (144)..(144): Selenocysteine
MWLMSEAHGAEPVLLREAARPFXQXLRLCVPSGNSKNKVVXVDGVRVKLQIWDXAGQERFRSVXHAYYRDAQALLLLYDIXNKSSFDNIRAWLXEIHEYAQRDVVIMLLGNKADMSSERVIRSEDGEXLAREYGVPFLEXSAKXGMNVELAFLAIAKELKYRAGHQADEPSFQIRDYVESQKKRSSCCSFM

SEQ ID NO: 22401 - protein, 228 aa, Homo sapiens
  MOD_RES (23)..(23): Selenocysteine
  MOD_RES (25)..(25): Selenocysteine
  MOD_RES (43)..(43): Selenocysteine
  MOD_RES (48)..(48): Selenocysteine
  MOD_RES (63)..(63): Selenocysteine
  MOD_RES (67)..(67): Selenocysteine
  MOD_RES (78)..(78): Selenocysteine
  MOD_RES (91)..(91): Selenocysteine
  MOD_RES (101)..(101): Selenocysteine
  MOD_RES (118)..(118): Selenocysteine
  MOD_RES (131)..(131): Selenocysteine
  MOD_RES (165)..(165): Selenocysteine
  MOD_RES (177)..(177): Selenocysteine
  MOD_RES (181)..(181): Selenocysteine
MWLMSEAHGAEPVLLREAARPFXQXLRLCVPSGNSKVMLLGDXGVGKXCFLIQFKDGAFLSGXFIAXVGIDFRNKVVXVDGVRVKLQIWDXAGQERFRSVXHAYYRDAQALLLLYDIXNKSSFDNIRAWLXEIHEYAQRDVVIMLLGNKADMSSERVIRSEDGEXLAREYGVPFLEXSAKXGMNVELAFLAIAKELKYRAGHQADEPSFQIRDYVESQKKRSSCCSFM

SEQ ID NO: 22402 - protein, 211 aa, Homo sapiens
  MOD_RES (23)..(23): Selenocysteine
  MOD_RES (41)..(41): Selenocysteine
  MOD_RES (57)..(57): Selenocysteine
  MOD_RES (76)..(76): Selenocysteine
  MOD_RES (93)..(93): Selenocysteine
  MOD_RES (97)..(97): Selenocysteine
  MOD_RES (158)..(158): Selenocysteine
  MOD_RES (198)..(198): Selenocysteine
  MOD_RES (200)..(200): Selenocysteine
MQAPHKEHLYKLLVIGDLGVGKXSIIKRYVHQNFSSHYRAXIGVDFALKVLHWDPEXVVRLQLWDIAGQERFGNMXRVYYREAMGAFIVFDVXRPAXFEAVAKWKNDLDSKLSLPNGKPVSVVLLANKCDQGKDVLMNNGLKMDQFCKEHGFVGWFEXSAKENINIDEASRCLVKHILANECDLMESIEPDVVKPHLXSXKVASCSGCAKS

SEQ ID NO: 22403 - protein, 210 aa, Homo sapiens
  MOD_RES (1)..(1): Any amino acid
  MOD_RES (10)..(10): Selenocysteine
  MOD_RES (75)..(75): Selenocysteine
  MOD_RES (92)..(92): Selenocysteine
  MOD_RES (96)..(96): Selenocysteine
  MOD_RES (157)..(157): Selenocysteine
  MOD_RES (197)..(197): Selenocysteine
  MOD_RES (199)..(199): Selenocysteine
XQAALPWSGXARLAGRQDAGPAQGAPVQVAGDWRPGRGEDQYHQALRAPELLFALPGHNRRGLRAQGQERFGNMXRVYYREAMGAFIVFDVXRPAXFEAVAKWKNDLDSKLSLPNGKPVSVVLLANKCDQGKDVLMNNGLKMDQFCKEHGFVGWFEXSAKENINIDEASRCLVKHILANECDLMESIEPDVVKPHLXSXKVASCSGCAKS

SEQ ID NO: 22404 - protein, 89 aa, Homo sapiens
  MOD_RES (1)..(1): Any amino acid
  MOD_RES (40)..(40): Selenocysteine
  MOD_RES (58)..(58): Selenocysteine
  MOD_RES (74)..(74): Selenocysteine
XRLRFPGQARHVWPAARMQAPHKEHLYKLLVIGDLGVGKXSIIKRYVHQNFSSHYRAXIGVDFALKVLHWDPEXVVRLQLWDIAGKYKH

SEQ ID NO: 22405 - protein, 217 aa, Homo sapiens
  MOD_RES (3)..(3): Selenocysteine
  MOD_RES (18)..(18): Selenocysteine
  MOD_RES (29)..(29): Selenocysteine
  MOD_RES (44)..(44): Selenocysteine
  MOD_RES (69)..(69): Selenocysteine
  MOD_RES (79)..(79): Selenocysteine
  MOD_RES (96)..(96): Selenocysteine
  MOD_RES (138)..(138): Selenocysteine
  MOD_RES (156)..(156): Selenocysteine
  MOD_RES (162)..(162): Selenocysteine
  MOD_RES (169)..(169): Selenocysteine
  MOD_RES (172)..(172): Selenocysteine
  MOD_RES (201)..(201): Selenocysteine
MEXIWIYQFRLIVIGDSXVGKSCLLHRFXQGRFPGLRSPACDPXVGVDFFSRLLEIEPGKRIKLQLWDXAGQERFRSIXRSYYRNSVGGFLVFDIXNRRSFEHVKDWLEEAKMYVQPFRIVFLLVGHKCDLASQRQVXREEAEKLSADCGMKYIEXSAKDAXNVEESFXILXRDIYELIKKGEICIQDGWEGVKSGFVPNXVHSSEEAVKPRKECFC

SEQ ID NO: 22406 - protein, 213 aa, Homo sapiens
  MOD_RES (18)..(18): Selenocysteine
  MOD_RES (29)..(29): Selenocysteine
  MOD_RES (40)..(40): Selenocysteine
  MOD_RES (65)..(65): Selenocysteine
  MOD_RES (75)..(75): Selenocysteine
  MOD_RES (92)..(92): Selenocysteine
  MOD_RES (107)..(107): Selenocysteine
  MOD_RES (129)..(129): Selenocysteine
  MOD_RES (134)..(134): Selenocysteine
  MOD_RES (152)..(152): Selenocysteine
  MOD_RES (165)..(165): Selenocysteine
  MOD_RES (168)..(168): Selenocysteine
  MOD_RES (181)..(181): Selenocysteine
MEAIWLYQFRLIVIGDSXVGKSCLIRRFXEGRFAQVSDPXVGVDFFSRLVEIEPGKRIKLQIWDXAGQERFRSIXRAYYRNSVGGLLLFDIXNRRSFQNVHEWLEEXKVHVQPYQIVFVLVGHKCDLDXQRQVXRHEAEKLAAAYGMKYIEXSARDAINVEKAFXDLXRDIYELVKRGEIXIQEGWEGVKSGFVPNVVHSSEEVVKSERRCLC

SEQ ID NO: 22407 - protein, 115 aa, Homo sapiens
  MOD_RES (5)..(5): Selenocysteine
  MOD_RES (36)..(36): Selenocysteine
  MOD_RES (48)..(48): Selenocysteine
  MOD_RES (54)..(54): Selenocysteine
  MOD_RES (63)..(63): Selenocysteine
  MOD_RES (78)..(78): Selenocysteine
  MOD_RES (86)..(86): Selenocysteine
  MOD_RES (88)..(89): Selenocysteine
  MOD_RES (105)..(105): Selenocysteine
MASAXDSRYGQKESSDQNFDYMFKILIIGNSSVGKXSFLFRYADDSFXPAFVSXVGIDFKVKXIYRNDKRIKLQIWDXAGQERYRXIXXAYYRGAMGFILMYDIXNEESFNAVQD

SEQ ID NO: 22408 - protein, 220 aa, Homo sapiens
  MOD_RES (5)..(5): Selenocysteine
  MOD_RES (36)..(36): Selenocysteine
  MOD_RES (48)..(48): Selenocysteine
  MOD_RES (54)..(54): Selenocysteine
  MOD_RES (63)..(63): Selenocysteine
  MOD_RES (78)..(78): Selenocysteine
  MOD_RES (86)..(86): Selenocysteine
  MOD_RES (88)..(89): Selenocysteine
  MOD_RES (105)..(105): Selenocysteine
  MOD_RES (118)..(118): Selenocysteine
  MOD_RES (122)..(122): Selenocysteine
  MOD_RES (175)..(175): Selenocysteine
  MOD_RES (193)..(193): Selenocysteine
  MOD_RES (199)..(199): Selenocysteine
MASAXDSRYGQKESSDQNFDYMFKILIIGNSSVGKXSFLFRYADDSFXPAFVSXVGIDFKVKXIYRNDKRIKLQIWDXAGQERYRXIXXAYYRGAMGFILMYDIXNEESFNAVQDWSXQIKXYSWDNAQVLLVGNKCDMEDERVVSSERGRQLADHLGFEFFEASAKDNINVKQXFERLVDVICEKMSESLDXADPAVXGAKQGPQLSDQQVPPHQDCAC

SEQ ID NO: 22409 - protein, 125 aa, Homo sapiens
  MOD_RES (10)..(10): Selenocysteine
  MOD_RES (23)..(23): Selenocysteine
  MOD_RES (27)..(27): Selenocysteine
  MOD_RES (80)..(80): Selenocysteine
  MOD_RES (98)..(98): Selenocysteine
  MOD_RES (104)..(104): Selenocysteine
MGFILMYDIXNEESFNAVQDWSXQIKXYSWDNAQVLLVGNKCDMEDERVVSSERGRQLADHLGFEFFEASAKDNINVKQXFERLVDVICEKMSESLDXADPAVXGAKQGPQLSDQQVPPHQDCAC

SEQ ID NO: 22410 - protein, 219 aa, Homo sapiens
  MOD_RES (5)..(5): Selenocysteine
  MOD_RES (9)..(9): Selenocysteine
  MOD_RES (36)..(36): Selenocysteine
  MOD_RES (46)..(46): Selenocysteine
  MOD_RES (48)..(48): Selenocysteine
  MOD_RES (54)..(54): Selenocysteine
  MOD_RES (63)..(63): Selenocysteine
  MOD_RES (78)..(78): Selenocysteine
  MOD_RES (86)..(86): Selenocysteine
  MOD_RES (88)..(89): Selenocysteine
  MOD_RES (105)..(105): Selenocysteine
  MOD_RES (118)..(118): Selenocysteine
  MOD_RES (122)..(122): Selenocysteine
  MOD_RES (147)..(147): Selenocysteine
  MOD_RES (193)..(193): Selenocysteine
  MOD_RES (204)..(204): Selenocysteine
  MOD_RES (209)..(209): Selenocysteine
MASVXDGKXGVKDASDQNFDYMFKLLIIGNSSVGKXSFLFRYADDXFXPAFVSXVGIDFKVKXVYRHEKRVKLQIWDXAGQERYRXIXXAYYRGAMGFILMYDIXNEESFNAVQDWAXQIKXYSWDNAQVILVGNKCDMEEERVVPXEKGQLLAEQLGFDFFEASAKENISVRQAFERLVDAICDKMSDSLDXDPSMLGSSKNXRLSDXPPLLQQNCSC

SEQ ID NO: 22411 - protein, 227 aa, Homo sapiens
  MOD_RES (44)..(44): Selenocysteine
  MOD_RES (56)..(56): Selenocysteine
  MOD_RES (62)..(62): Selenocysteine
  MOD_RES (71)..(71): Selenocysteine
  MOD_RES (86)..(86): Selenocysteine
  MOD_RES (94)..(94): Selenocysteine
  MOD_RES (96)..(97): Selenocysteine
  MOD_RES (113)..(113): Selenocysteine
  MOD_RES (126)..(126): Selenocysteine
  MOD_RES (130)..(130): Selenocysteine
  MOD_RES (155)..(155): Selenocysteine
  MOD_RES (172)..(172): Selenocysteine
  MOD_RES (183)..(183): Selenocysteine
  MOD_RES (201)..(201): Selenocysteine
  MOD_RES (206)..(206): Selenocysteine
  MOD_RES (212)..(212): Selenocysteine
  MOD_RES (217)..(217): Selenocysteine
MRHEAPMQMASAQDARYGQKDSSDQNFDYMFKLLIIGNSSVGKXSFLFRYADDSFXSAFVSXVGIDFKVKXVFKNEKRIKLQIWDXAGQERYRXIXXAYYRGAMGFILMYDIXNEESFNAVQDWSXQIKXYSWDNAQVILVGNKCDMEDERVISXERGQHLGEQLGFEFFEXSAKDNINVKQXFERLVDIICDKMSESLEXDPAIXAAKQNXRLKEXPPPPQPNCAC

SEQ ID NO: 22412 - protein, 219 aa, Homo sapiens
  MOD_RES (7)..(7): Selenocysteine
  MOD_RES (36)..(36): Selenocysteine
  MOD_RES (48)..(48): Selenocysteine
  MOD_RES (54)..(54): Selenocysteine
  MOD_RES (63)..(63): Selenocysteine
  MOD_RES (78)..(78): Selenocysteine
  MOD_RES (86)..(86): Selenocysteine
  MOD_RES (88)..(89): Selenocysteine
  MOD_RES (118)..(118): Selenocysteine
  MOD_RES (122)..(122): Selenocysteine
MASAGDXQAGPRDAADQNFDYMFKLLLIGNSSVGKXSFLFRYADDSFXPAFVSXVGIDFKVKXVYRHDKRIKLQIWDXAGQERYRXIXXAYYRGAMGFLLMYDIANQESFAAVQDWAXQIKXYSWDNAQVILVGNKCDLEDERVVPAEDGRRLADDLGFEFFEASAKENINVKQVFERLVDVICEKMNESLEPSSSSGSNGKGPAVGDAPAPQPSSCSC

SEQ ID NO: 22413 - protein, 277 aa, Homo sapiens
  MOD_RES (53)..(55): Selenocysteine
  MOD_RES (70)..(70): Selenocysteine
  MOD_RES (78)..(78): Selenocysteine
  MOD_RES (151)..(151): Selenocysteine
  MOD_RES (168)..(168): Selenocysteine
  MOD_RES (199)..(199): Selenocysteine
  MOD_RES (204)..(204): Selenocysteine
  MOD_RES (217)..(217): Selenocysteine
  MOD_RES (244)..(245): Selenocysteine
  MOD_RES (248)..(248): Selenocysteine
  MOD_RES (270)..(270): Selenocysteine
MSAPGSPDQAYDFLLKFLLVGDRDVGKSEILESLQDGAAESPYSHLGGIDYKXXXILLDGQRVKLKLWDXSGQGRFCXIFRSYSRGAQGVILVYDIANRWSFEGMDRWIKKIEEHAPGVPKILVGNRLHLAFKRQVPREQAQAYAERLGVXFFEVSPLCNFNIIESFXELARIVLLRHRMNWLGRPSKVLSLQDLCCRXIVSCXPVHLVDKLPLPSXLRSHLKSFSMAKGLNARMMRGLSYSLXXSSXHKSSLCKVEIVCPPQSPPKNCXRNSCKIS

SEQ ID NO: 22414 - protein, 278 aa, Homo sapiens
  MOD_RES (38)..(38): Selenocysteine
  MOD_RES (53)..(55): Selenocysteine
  MOD_RES (70)..(70): Selenocysteine
  MOD_RES (78)..(78): Selenocysteine
  MOD_RES (151)..(151): Selenocysteine
  MOD_RES (168)..(168): Selenocysteine
  MOD_RES (199)..(199): Selenocysteine
  MOD_RES (204)..(204): Selenocysteine
  MOD_RES (244)..(245): Selenocysteine
  MOD_RES (248)..(248): Selenocysteine
  MOD_RES (271)..(271): Selenocysteine
MSAPGSPDQAYDFLLKFLLVGDRDVGKSEILESLQDGXAESPYSHLGGIDYKXXXILLDGQRVKLKLWDXSGQGRFCXIFRSYSRGAQGVILVYDIANRWSFEGMDRWIKKIEEHAPGVPKILVGNRLHLAFKRQVPREQAQAYAERLGVXFFEVSPLCNFNIIESFXELARIVLLRHRLNWLGRPSKVLSLQDLCCRXIVSCXPVHLVDKLPLPIALRSHLKSFSMAKGLNARMMRGLSYSLXXSSXHKRSSLCKVKIVCPPQSPPKNCXRNSCKIS

SEQ ID NO: 22415 - protein, 42 aa, Homo sapiens
  MOD_RES (5)..(5): Selenocysteine
GRFCXIFRSYSRGAQGVILVYDIANRWSFDGIDRWIKEIDEC

SEQ ID NO: 22416 - protein, 99 aa, Homo sapiens
  MOD_RES (25)..(25): Selenocysteine
  MOD_RES (65)..(66): Selenocysteine
  MOD_RES (69)..(69): Selenocysteine
  MOD_RES (92)..(92): Selenocysteine
MDRLWRPSKVLSLQDLCCRAVVSCXPVHLVDKLPLPIALRSHLKSFSMANGLNARMMHGGSYSLXXSSXHKRSSLRKVKLVRPPQSPPKNCXRNSCKIS

SEQ ID NO: 22417 - protein, 278 aa, Homo sapiens
  MOD_RES (53)..(55): Selenocysteine
  MOD_RES (70)..(70): Selenocysteine
  MOD_RES (78)..(78): Selenocysteine
  MOD_RES (138)..(138): Selenocysteine
  MOD_RES (151)..(151): Selenocysteine
  MOD_RES (164)..(164): Selenocysteine
  MOD_RES (168)..(168): Selenocysteine
  MOD_RES (204)..(204): Selenocysteine
  MOD_RES (244)..(245): Selenocysteine
  MOD_RES (248)..(248): Selenocysteine
  MOD_RES (271)..(271): Selenocysteine
MSALGSPVRAYDFLLKFLLVGDSDVGKGEILASLQDGAAESPYGHPAGIDYKXXXILLDGRRVKLQLWDXSGQGRFCXIFRSYSRGAQGVILVYDIANRWSFDGIDRWIKEIDEHAPGVPKILVGNRLHLAFKRQVPXEQAQAYAERLGVXFFEVSPLCNFNIXESFXELARIVLLRHGMDRLWRPSKVLSLQDLCCRAVVSCXPVHLVDKLPLPIALRSHLKSFSMANGLNARMMHGGSYSLXXSSXHKRSSLRKVKLVRPPQSPPKNCXRNSCKIS

SEQ ID NO: 22418 - protein, 139 aa, Homo sapiens
  MOD_RES (53)..(55): Selenocysteine
  MOD_RES (70)..(70): Selenocysteine
  MOD_RES (78)..(78): Selenocysteine
  MOD_RES (131)..(131): Selenocysteine
MSALGSPVRAYDFLLKFLLVGDSDVGKGEILASLQDGAAESPYGHPAGIDYKXXXILLDGRRVKLQLWDXSGQGRFCXIFRSYSRGAQGVILVYDIANRWSFDGIDRWIKEIDESRSRSWPGSCCCGMGWXGSGGRARC

SEQ ID NO: 22419 - protein, 157 aa, Homo sapiens
  MOD_RES (53)..(55): Selenocysteine
  MOD_RES (70)..(70): Selenocysteine
  MOD_RES (78)..(78): Selenocysteine
  MOD_RES (97)..(97): Selenocysteine
  MOD_RES (138)..(138): Selenocysteine
  MOD_RES (151)..(151): Selenocysteine
MGSQGSPVKSYDYLLKFLLVGDSDVGKGEILESLQDGAAESPYAYSNGIDYKXXXILLDGRRVKLELWDXSGQGRFCXIFRSYSRGAQGILLVYDIXNRWSFDGIDRWIKEIDEHAPGVPRILVGNRLHLAFKRQVPXEQARAYAEKNCMXFFEVSP

SEQ ID NO: 22420 - protein, 188 aa, Homo sapiens
  MOD_RES (53)..(55): Selenocysteine
  MOD_RES (70)..(70): Selenocysteine
  MOD_RES (78)..(78): Selenocysteine
  MOD_RES (97)..(97): Selenocysteine
  MOD_RES (138)..(138): Selenocysteine
  MOD_RES (151)..(151): Selenocysteine
  MOD_RES (168)..(168): Selenocysteine
MGSQGSPVKSYDYLLKFLLVGDSDVGKGEILESLQDGAAESPYAYSNGIDYKXXXILLDGRRVKLELWDXSGQGRFCXIFRSYSRGAQGILLVYDIXNRWSFDGIDRWIKEIDEHAPGVPRILVGNRLHLAFKRQVPXEQARAYAEKNCMXFFEVSPLCNFNVIESFXELSRIVLMRHGMEKIWRPNR

SEQ ID NO: 22421 - protein, 213 aa, Homo sapiens
  MOD_RES (53)..(55): Selenocysteine
  MOD_RES (70)..(70): Selenocysteine
  MOD_RES (78)..(78): Selenocysteine
  MOD_RES (97)..(97): Selenocysteine
  MOD_RES (138)..(138): Selenocysteine
  MOD_RES (151)..(151): Selenocysteine
  MOD_RES (168)..(168): Selenocysteine
  MOD_RES (204)..(204): Selenocysteine
MGSQGSPVKSYDYLLKFLLVGDSDVGKGEILESLQDGAAESPYAYSNGIDYKXXXILLDGRRVKLELWDXSGQGRFCXIFRSYSRGAQGILLVYDIXNRWSFDGIDRWIKEIDEHAPGVPRILVGNRLHLAFKRQVPXEQARAYAEKNCMXFFEVSPLCNFNVIESFXELSRIVLMRHGMEKIWRPNRVFSLQDLCCRAIVSCXPVHLIDKLP

SEQ ID NO: 22422 - protein, 281 aa, Homo sapiens
  MOD_RES (53)..(55): Selenocysteine
  MOD_RES (70)..(70): Selenocysteine
  MOD_RES (78)..(78): Selenocysteine
  MOD_RES (97)..(97): Selenocysteine
  MOD_RES (138)..(138): Selenocysteine
  MOD_RES (151)..(151): Selenocysteine
  MOD_RES (168)..(168): Selenocysteine
  MOD_RES (204)..(204): Selenocysteine
  MOD_RES (217)..(217): Selenocysteine
MGSQGSPVKSYDYLLKFLLVGDSDVGKGEILESLQDGAAESPYAYSNGIDYKXXXILLDGRRVKLELWDXSGQGRFCXIFRSYSRGAQGILLVYDIXNRWSFDGIDRWIKEIDEHAPGVPRILVGNRLHLAFKRQVPXEQARAYAEKNCMXFFEVSPLCNFNVIESFXELSRIVLMRHGMEKIWRPNRVFSLQDLCCRAIVSCXPVHLIDKLPLPVXIKSHLKSFSMANGMNAVMMHGRSYSLASGAGGGGSKGNSLKRSKSIRPPQSPPQNCSRSNCKIS

SEQ ID NO: 22423 - protein, 130 aa, Homo sapiens
  MOD_RES (53)..(55): Selenocysteine
  MOD_RES (70)..(70): Selenocysteine
  MOD_RES (78)..(78): Selenocysteine
  MOD_RES (110)..(110): Selenocysteine
  MOD_RES (119)..(119): Selenocysteine
  MOD_RES (127)..(127): Selenocysteine
  MOD_RES (129)..(129): Selenocysteine
MGSQGSPVKSYDYLLKFLLVGDSDVGKGEILESLQDGAAESPYAYSNGIDYKXXXILLDGRRVKLELWDXSGQGRFCXIFRSYSRGAQLCPRYSRGDSLMDWPRGHLASXAARPPAARXPHLPAQEXSXG

SEQ ID NO: 22424 - protein, 38 aa, Homo sapiens
  MOD_RES (2)..(2): Selenocysteine
  MOD_RES (19)..(19): Selenocysteine
MXFFEVSPLCNFNVIESFXELSRIVLMRHGMEKIWRPN

SEQ ID NO: 22425 - protein, 237 aa, Homo sapiens
  MOD_RES (1)..(1): Any amino acid
  MOD_RES (40)..(42): Selenocysteine
  MOD_RES (57)..(57): Selenocysteine
  MOD_RES (65)..(65): Selenocysteine
  MOD_RES (84)..(84): Selenocysteine
  MOD_RES (106)..(106): Selenocysteine
  MOD_RES (119)..(119): Selenocysteine
  MOD_RES (136)..(136): Selenocysteine
  MOD_RES (172)..(172): Selenocysteine
  MOD_RES (185)..(185): Selenocysteine
XLKFLLVGDSDVGKGEILESLQDGAAESPYAYSNGIDYKXXXILLDGRRVKLELWDXSGQGRFCXIFRSYSRGAQGILLVYDIXNRWSFDGIDRWIKEIDERQVPXEQARAYAEKNCMXFFEVSPLCNFNVIESFXELSRIVLMRHGMEKIWRPNRVFSLQDLCCRAIVSCXPVHLIDKLPLPVXIKSHLKSFSMANGMNAVMMHGRSYSLASGAGGGGSKGNSLKRSKSIRPPQSP

SEQ ID NO: 22426 - protein, 49 aa, Homo sapiens
  MOD_RES (1)..(1): Any amino acid
XSQGSPVKSYDYLLKFLLVGDSDVGKGEILESLQDGAAESPYAYSNDCS

SEQ ID NO: 22427 - protein, 221 aa, Homo sapiens
  MOD_RES (24)..(24): Selenocysteine
  MOD_RES (44)..(44): Selenocysteine
  MOD_RES (62)..(62): Selenocysteine
  MOD_RES (71)..(71): Selenocysteine
  MOD_RES (86)..(86): Selenocysteine
  MOD_RES (104)..(104): Selenocysteine
  MOD_RES (113)..(113): Selenocysteine
  MOD_RES (121)..(121): Selenocysteine
  MOD_RES (154)..(154): Selenocysteine
  MOD_RES (172)..(172): Selenocysteine
  MOD_RES (176)..(176): Selenocysteine
  MOD_RES (194)..(194): Selenocysteine
  MOD_RES (196)..(196): Selenocysteine
  MOD_RES (204)..(204): Selenocysteine
MSAFGHDEAWMEAGGFGLEAAERXEYQSLCKSKLLFLGEQSGKXSIISRFMYNSFGCACQAXVGIDFLSKXMYLEDQIVQLQLWDXAGQERFHSLIPSYIRDSXIAVVVYDIXNINSFKEXDKWVEHVRAERGDDVVIMLLGNKIDLDNKRQVXAEQGEEKSRNLNVMFIEXSAKXGYNVKKLFRRVASALLSXRXSPPPKEGXVEIELESFEESGNRSYC

SEQ ID NO: 22428 - protein, 222 aa, Homo sapiens
  MOD_RES (24)..(24): Selenocysteine
  MOD_RES (45)..(45): Selenocysteine
  MOD_RES (63)..(63): Selenocysteine
  MOD_RES (72)..(72): Selenocysteine
  MOD_RES (87)..(87): Selenocysteine
  MOD_RES (105)..(105): Selenocysteine
  MOD_RES (114)..(114): Selenocysteine
  MOD_RES (122)..(122): Selenocysteine
  MOD_RES (155)..(155): Selenocysteine
  MOD_RES (173)..(173): Selenocysteine
  MOD_RES (177)..(177): Selenocysteine
  MOD_RES (195)..(195): Selenocysteine
  MOD_RES (197)..(197): Selenocysteine
  MOD_RES (205)..(205): Selenocysteine
MSAFGHDEAWMEAGGFGLEAAERXEYQSLCKSKLLFLGEQSVGKXSIISRFMYNSFGCACQAXVGIDFLSKXMYLEDQIVQLQLWDXAGQERFHSLIPSYIRDSXIAVVVYDIXNINSFKEXDKWVEHVRAERGDDVVIMLLGNKIDLDNKRQVXAEQGEEKSRNLNVMFIEXSAKXGYNVKKLFRRVASALLSXRXSPPPKEGXVEIELESFEESGNRSYC

SEQ ID NO: 22429 - protein, 34 aa, Homo sapiens
  MOD_RES (12)..(12): Selenocysteine
  MOD_RES (21)..(21): Selenocysteine
MYNSFGCACQAXVGIDFLSKXMYLEDQIVQLQLW

SEQ ID NO: 22430 - protein, 105 aa, Homo sapiens
  MOD_RES (3)..(3): Selenocysteine
  MOD_RES (23)..(23): Selenocysteine
  MOD_RES (45)..(45): Selenocysteine
  MOD_RES (59)..(59): Selenocysteine
  MOD_RES (88)..(88): Selenocysteine
MAXQGPDKVIFLLVGHKSDLQSXRCVSAQEAEELAASLGMAFVEXSVKNNCNVDLAFDXLADAIQQALQQGDIKLEEGWGGVRLIHKXQIPRSPSRKQHSGPCQC

SEQ ID NO: 22431 - protein, 86 aa, Homo sapiens
  MOD_RES (32)..(32): Selenocysteine
  MOD_RES (40)..(40): Selenocysteine
  MOD_RES (50)..(50): Selenocysteine
  MOD_RES (56)..(56): Selenocysteine
  MOD_RES (59)..(59): Selenocysteine
  MOD_RES (74)..(74): Selenocysteine
  MOD_RES (82)..(82): Selenocysteine
  MOD_RES (84)..(84): Selenocysteine
MAGPGPGPGDPDEQYDFLFKLVLVGDASVGKXCVVQRFKXGAFSERQGSXIGVDFXMKXLEIQGKRVKLQIWDXAGQERFRXIXQS

SEQ ID NO: 22432 - protein, 155 aa, Homo sapiens
  MOD_RES (32)..(32): Selenocysteine
  MOD_RES (40)..(40): Selenocysteine
  MOD_RES (50)..(50): Selenocysteine
  MOD_RES (56)..(56): Selenocysteine
  MOD_RES (59)..(59): Selenocysteine
  MOD_RES (74)..(74): Selenocysteine
  MOD_RES (82)..(82): Selenocysteine
  MOD_RES (84)..(84): Selenocysteine
  MOD_RES (101)..(101): Selenocysteine
  MOD_RES (153)..(153): Selenocysteine
MAGPGPGPGDPDEQYDFLFKLVLVGDASVGKXCVVQRFKXGAFSERQGSXIGVDFXMKXLEIQGKRVKLQIWDXAGQERFRXIXQSYYRSANGAILAYDIXKRSSFLSVPHWIEDVRKYAGSNIVQLLIEMQSCYVAQADLELLASSNPPASXSK

SEQ ID NO: 22433 - protein, 212 aa, Homo sapiens
  MOD_RES (32)..(32): Selenocysteine
  MOD_RES (40)..(40): Selenocysteine
  MOD_RES (50)..(50): Selenocysteine
  MOD_RES (56)..(56): Selenocysteine
  MOD_RES (59)..(59): Selenocysteine
  MOD_RES (74)..(74): Selenocysteine
  MOD_RES (82)..(82): Selenocysteine
  MOD_RES (84)..(84): Selenocysteine
  MOD_RES (101)..(101): Selenocysteine
  MOD_RES (161)..(161): Selenocysteine
  MOD_RES (178)..(178): Selenocysteine
MAGPGPGPGDPDEQYDFLFKLVLVGDASVGKXCVVQRFKXGAFSERQGSXIGVDFXMKXLEIQGKRVKLQIWDXAGQERFRXIXQSYYRSANGAILAYDIXKRSSFLSVPHWIEDVRKYAGSNIVQLLIGNKSDLSELREVSLAEAQSLAEHYDILCAIEXSAKDSSNVEEAFLRVAXELIMRHGGPLFSEKSPDHIQLNSKDIGEGWGCGC

SEQ ID NO: 22434 - protein, 1021 aa, Homo sapiens
  MOD_RES (3)..(3): Selenocysteine
  MOD_RES (7)..(7): Selenocysteine
  MOD_RES (22)..(22): Selenocysteine
  MOD_RES (64)..(64): Selenocysteine
  MOD_RES (133)..(134): Selenocysteine
  MOD_RES (159)..(159): Selenocysteine
  MOD_RES (195)..(195): Selenocysteine
  MOD_RES (211)..(211): Selenocysteine
  MOD_RES (253)..(253): Selenocysteine
  MOD_RES (287)..(287): Selenocysteine
  MOD_RES (319)..(319): Selenocysteine
  MOD_RES (347)..(347): Selenocysteine
  MOD_RES (394)..(394): Selenocysteine
  MOD_RES (398)..(398): Selenocysteine
  MOD_RES (403)..(403): Selenocysteine
  MOD_RES (434)..(434): Selenocysteine
  MOD_RES (439)..(439): Selenocysteine
  MOD_RES (475)..(475): Selenocysteine
  MOD_RES (553)..(553): Selenocysteine
  MOD_RES (555)..(555): Selenocysteine
  MOD_RES (558)..(558): Selenocysteine
  MOD_RES (560)..(560): Selenocysteine
  MOD_RES (564)..(564): Selenocysteine
  MOD_RES (571)..(572): Selenocysteine
  MOD_RES (575)..(575): Selenocysteine
  MOD_RES (596)..(596): Selenocysteine
  MOD_RES (604)..(604): Selenocysteine
  MOD_RES (611)..(611): Selenocysteine
  MOD_RES (629)..(629): Selenocysteine
  MOD_RES (705)..(705): Selenocysteine
  MOD_RES (724)..(724): Selenocysteine
  MOD_RES (735)..(735): Selenocysteine
  MOD_RES (762)..(762): Selenocysteine
  MOD_RES (764)..(764): Selenocysteine
  MOD_RES (767)..(767): Selenocysteine
  MOD_RES (780)..(781): Selenocysteine
  MOD_RES (814)..(814): Selenocysteine
  MOD_RES (847)..(847): Selenocysteine
  MOD_RES (860)..(860): Selenocysteine
  MOD_RES (863)..(863): Selenocysteine
  MOD_RES (865)..(865): Selenocysteine
  MOD_RES (874)..(874): Selenocysteine
  MOD_RES (889)..(889): Selenocysteine
  MOD_RES (899)..(899): Selenocysteine
  MOD_RES (916)..(916): Selenocysteine
MEXGQRXSRKVRKLGSNRRRQXREPADGEGAAVAPEPESWSSQAAAELQAFFQDCGAKERGFVXREDLAVAKFSFLGSKEESEMIFDWVDVERKGHLSLEEFSSGLKNIFGSSQSPHRLRRRKPLPSKRVSAXXSFPALEEADAEEKEAFLAFMEQLGXGHLLPKQMEIWQLWGQLRQEEPQLAGNLAGFLAKMXSRLQEAQADKEALELXLRKRDSDHHREVQQLYEEMEQQIRQEKQQLQAESDSRGLALXSQMQDVLEAKEREVQRLAEGQRELEAQLSHLRSXHQEAASENQQLQEAKRDLAGRLEEVRGQLQVXRGRLDAARGRVSWQVEEKLSFPGAGEKXPDPQAASPEEAPLPGLFGDNDDWDQLLSNFGSPPHGALQLCWSPPPXPRAXSGPQXPRVVRQISISEPQAFLFGQEPSSDPDGAPRXPPGVXFSAKDNKGVDPHEQDIRAEQPVEPHDPDPNQEPGSXPEGRLLWGLSGSLVAPAFKVLIPLEDGPPPPANSPPPQAPAGSSKQIQASDPDDKGPGSWAPPSGAQPGAGAGPQEPXQXPPXMXEREXQPGPSPXXALXGVGPAKPPRQRDALQQDLHAXGSEPRLGXQRARALXLGPAEPFQGLEFVGPVPXERLEQGQAGPAVQEGLPEGLREAHGQVLGLGELSAFPHQELEEEPRSEEGKQEGRGGQDLSSEQSEQSVEAHGLEXAHSELPQQDSLLVSLPSAXPQAQVEAEGPXPGKSAPPRGSPPRGAQPGAGAGPQEPXQXPPXMAEQEAQPRPSLXXAHAEEQGPPHSREPRAESRLEDPGMDSREAGLXPSPGDPMAGGGPQANPDYLFHVIFLGDSNVGKXSFLHLLHQNSFAXGLXAXVGVDFRVKXLLVDNKCFVLQLWDXAGQERYHSMXRQLLRKADGVVLMYDIXSQESFAHVRYWLDCLQDAGSDGVVILLLGNKMDCEEERQVSVEAGQQLAQELGVYFGECSAALGHNILEPVVNLARSLRMQEEGLKDSLVKVAPKRPPKRFGCCS

SEQ ID NO: 22435 - protein, 920 aa, Homo sapiens
  MOD_RES (1)..(1): Any amino acid
  MOD_RES (5)..(5): Selenocysteine
  MOD_RES (32)..(33): Selenocysteine
  MOD_RES (58)..(58): Selenocysteine
  MOD_RES (94)..(94): Selenocysteine
  MOD_RES (110)..(110): Selenocysteine
  MOD_RES (152)..(152): Selenocysteine
  MOD_RES (186)..(186): Selenocysteine
  MOD_RES (218)..(218): Selenocysteine
  MOD_RES (246)..(246): Selenocysteine
  MOD_RES (293)..(293): Selenocysteine
  MOD_RES (297)..(297): Selenocysteine
  MOD_RES (302)..(302): Selenocysteine
  MOD_RES (333)..(333): Selenocysteine
  MOD_RES (338)..(338): Selenocysteine
  MOD_RES (374)..(374): Selenocysteine
  MOD_RES (452)..(452): Selenocysteine
  MOD_RES (454)..(454): Selenocysteine
  MOD_RES (457)..(457): Selenocysteine
  MOD_RES (459)..(459): Selenocysteine
  MOD_RES (463)..(463): Selenocysteine
  MOD_RES (470)..(471): Selenocysteine
  MOD_RES (474)..(474): Selenocysteine
  MOD_RES (495)..(495): Selenocysteine
  MOD_RES (503)..(503): Selenocysteine
  MOD_RES (510)..(510): Selenocysteine
  MOD_RES (528)..(528): Selenocysteine
  MOD_RES (604)..(604): Selenocysteine
  MOD_RES (623)..(623): Selenocysteine
  MOD_RES (634)..(634): Selenocysteine
  MOD_RES (661)..(661): Selenocysteine
  MOD_RES (663)..(663): Selenocysteine
  MOD_RES (666)..(666): Selenocysteine
  MOD_RES (679)..(680): Selenocysteine
  MOD_RES (713)..(713): Selenocysteine
  MOD_RES (746)..(746): Selenocysteine
  MOD_RES (759)..(759): Selenocysteine
  MOD_RES (762)..(762): Selenocysteine
  MOD_RES (764)..(764): Selenocysteine
  MOD_RES (773)..(773): Selenocysteine
  MOD_RES (788)..(788): Selenocysteine
  MOD_RES (798)..(798): Selenocysteine
  MOD_RES (815)..(815): Selenocysteine
XFCPXENIFGSSQSPHRLRRRKPLPSKRVSAXXSFPALEEADAEEKEAFLAFMEQLGXGHLLPKQMEIWQLWGQLRQEEPQLAGNLAGFLAKMXSRLQEAQADKEALELXLRKRDSDHHREVQQLYEEMEQQIRQEKQQLQAESDSRGLALXSQMQDVLEAKEREVQRLAEGQRELEAQLSHLRSXHQEAASENQQLQEAKRDLAGRLEEVRGQLQVXRGRLDAARGRVSWQVEEKLSFPGAGEKXPDPQAASPEEAPLPGLFGDNDDWDQLLSNFGSPPHGALQLCWSPPPXPRAXSGPQXPRVVRQISISEPQAFLFGQEPSSDPDGAPRXPPGVXFSAKDNKGVDPHEQDIRAEQPVEPHDPDPNQEPGSXPEGRLLWGLSGSLVAPAFKVLIPLEDGPPPPANSPPPQAPAGSSKQIQASDPDDKGPGSWAPPSGAQPGAGAGPQEPXQXPPXMXEREXQPGPSPXXALXGVGPAKPPRQRDALQQDLHAXGSEPRLGXQRARALXLGPAEPFQGLEFVGPVPXERLEQGQAGPAVQEGLPEGLREAHGQVLGLGELSAFPHQELEEEPRSEEGKQEGRGGQDLSSEQSEQSVEAHGLEXAHSELPQQDSLLVSLPSAXPQAQVEAEGPXPGKSAPPRGSPPRGAQPGAGAGPQEPXQXPPXMAEQEAQPRPSLXXAHAEEQGPPHSREPRAESRLEDPGMDSREAGLXPSPGDPMAGGGPQANPDYLFHVIFLGDSNVGKXSFLHLLHQNSFAXGLXAXVGVDFRVKXLLVDNKCFVLQLWDXAGQERYHSMXRQLLRKADGVVLMYDIXSQESFAHVRYWLDCLQDAGSDGVVILLLGNKMDCEEERQVSVEAGQQLAQELGVYFGECSAALGHNILEPVVNLARSLRMQEEGLKDSLVKVAPKRPPKRFGCCS

SEQ ID NO: 22436 - protein, 113 aa, Homo sapiens
  MOD_RES (32)..(32): Selenocysteine
  MOD_RES (50)..(50): Selenocysteine
  MOD_RES (54)..(54): Selenocysteine
MISPDARMLASQNIVIILCGNKKDLDADREVXFLEASRFAQENELMFLEXSALXGENVEEAFVQCARKILNKIESGELDPERMGSGIQYGDAALRQLRSPRRAQAPNAQECGC

SEQ ID NO: 22437 - protein, 218 aa, Homo sapiens
  MOD_RES (4)..(4): Selenocysteine
  MOD_RES (9)..(9): Selenocysteine
  MOD_RES (24)..(24): Selenocysteine
  MOD_RES (45)..(45): Selenocysteine
  MOD_RES (69)..(69): Selenocysteine
  MOD_RES (79)..(79): Selenocysteine
  MOD_RES (96)..(96): Selenocysteine
  MOD_RES (100)..(100): Selenocysteine
  MOD_RES (105)..(105): Selenocysteine
  MOD_RES (109)..(109): Selenocysteine
  MOD_RES (137)..(137): Selenocysteine
  MOD_RES (155)..(155): Selenocysteine
  MOD_RES (159)..(159): Selenocysteine
MSQXAMSEXYDFLFKFLVIGNAGXGKSCLLHQFIEKKFKDDSNHXIGVEFGSKIINVGGKYVKLQIWDXAGQERFRSVXRSYYRGAAGALLVYDIXSREXYNALXNWLXDARMLASQNIVIILCGNKKDLDADREVXFLEASRFAQENELMFLEXSALXGENVEEAFVQCARKILNKIESGELDPERMGSGIQYGDAALRQLRSPRRAQAPNAQECGC

SEQ ID NO: 22438 - protein, 121 aa, Homo sapiens
  MOD_RES (4)..(4): Selenocysteine
  MOD_RES (19)..(19): Selenocysteine
  MOD_RES (40)..(40): Selenocysteine
  MOD_RES (56)..(56): Selenocysteine
  MOD_RES (64)..(64): Selenocysteine
  MOD_RES (74)..(74): Selenocysteine
  MOD_RES (91)..(91): Selenocysteine
MAEXYDFLFKFLVIGSAGXGKSCLLHQFIENKFKQDSNHXIGVEFGSRVVNVGGKXVKLQIWDXAGQERFRSVXRSYYRGAAGALLVYDIXRADVPGDQRSHRRERGGGVPQVCPHYPQQD

SEQ ID NO: 22439 - protein, 213 aa, Homo sapiens
  MOD_RES (4)..(4): Selenocysteine
  MOD_RES (19)..(19): Selenocysteine
  MOD_RES (40)..(40): Selenocysteine
  MOD_RES (56)..(56): Selenocysteine
  MOD_RES (64)..(64): Selenocysteine
  MOD_RES (74)..(74): Selenocysteine
  MOD_RES (91)..(91): Selenocysteine
  MOD_RES (95)..(95): Selenocysteine
  MOD_RES (104)..(104): Selenocysteine
  MOD_RES (108)..(108): Selenocysteine
  MOD_RES (132)..(132): Selenocysteine
  MOD_RES (150)..(150): Selenocysteine
  MOD_RES (154)..(154): Selenocysteine
  MOD_RES (168)..(168): Selenocysteine
MAEXYDFLFKFLVIGSAGXGKSCLLHQFIENKFKQDSNHXIGVEFGSRVVNVGGKXVKLQIWDXAGQERFRSVXRSYYRGAAGALLVYDIXSREXYNSLAAWLXDARXLASPNIVVILCGNKKDLDPEREVXFLEASRFAQENELMFLEXSALXGENVEEAFLKCARXILNKIDSGELDPERMGSGIQYGDASLRQLRQPRSAQAVAPQPCGC

SEQ ID NO: 22440 - protein, 192 aa, Homo sapiens
  MOD_RES (1)..(1): Any amino acid
  MOD_RES (4)..(4): Selenocysteine
  MOD_RES (19)..(19): Selenocysteine
  MOD_RES (40)..(40): Selenocysteine
  MOD_RES (56)..(56): Selenocysteine
  MOD_RES (64)..(64): Selenocysteine
  MOD_RES (74)..(74): Selenocysteine
  MOD_RES (83)..(83): Selenocysteine
  MOD_RES (87)..(87): Selenocysteine
  MOD_RES (111)..(111): Selenocysteine
  MOD_RES (129)..(129): Selenocysteine
  MOD_RES (133)..(133): Selenocysteine
  MOD_RES (147)..(147): Selenocysteine
XAEXYDFLFKFLVIGSAGXGKSCLLHQFIENKFKQDSNHXIGVEFGSRVVNVGGKXVKLQIWDXAGQERFRREXYNSLAAWLXDARXLASPNIVVILCGNKKDLDPEREVXFLEASRFAQENELMFLEXSALXGENVEEAFLKCARXILNKIDSGELDPERMGSGIQYGDASLRQLRQPRSAQAVAPQPCGC

SEQ ID NO: 22441 - protein, 15 aa, Homo sapiens
  MOD_RES (7)..(7): Selenocysteine
  MOD_RES (14)..(14): Selenocysteine
MASRGAXRPNGPNXG

SEQ ID NO: 22442 - protein, 215 aa, Homo sapiens
  MOD_RES (7)..(7): Selenocysteine
  MOD_RES (14)..(14): Selenocysteine
  MOD_RES (52)..(52): Selenocysteine
  MOD_RES (59)..(59): Selenocysteine
  MOD_RES (61)..(61): Selenocysteine
  MOD_RES (67)..(68): Selenocysteine
  MOD_RES (76)..(76): Selenocysteine
  MOD_RES (103)..(103): Selenocysteine
  MOD_RES (162)..(162): Selenocysteine
  MOD_RES (166)..(166): Selenocysteine
  MOD_RES (202)..(202): Selenocysteine
  MOD_RES (205)..(205): Selenocysteine
  MOD_RES (208)..(208): Selenocysteine
MASRGAXRPNGPNXGNKICQFKLVLLGESAVGKSSLVLRFVKGQFHEFQESXIGAAFLXQXVCLDDXXVKFEIWDXAGQERYHSLAPMYYRGAQAAIVVYDIXNEESFARAKNWVKELQRQASPNIVIALSGNKADLANKRAVDFQEAQSYADDNSLLFMEXSAKXSMNVNEIFMAIAKKLPKNEPQNPGANSARGRGVDLXEPXQPXRNQCCSN

SEQ ID NO: 22443 - protein, 201 aa, Homo sapiens
  MOD_RES (7)..(7): Selenocysteine
  MOD_RES (14)..(14): Selenocysteine
  MOD_RES (52)..(52): Selenocysteine
  MOD_RES (62)..(62): Selenocysteine
  MOD_RES (89)..(89): Selenocysteine
  MOD_RES (148)..(148): Selenocysteine
  MOD_RES (152)..(152): Selenocysteine
  MOD_RES (188)..(188): Selenocysteine
  MOD_RES (191)..(191): Selenocysteine
  MOD_RES (194)..(194): Selenocysteine
MASRGAXRPNGPNXGNKICQFKLVLLGESAVGKSSLVLRFVKGQFHEFQESXIGVKFEIWDXAGQERYHSLAPMYYRGAQAAIVVYDIXNEESFARAKNWVKELQRQASPNIVIALSGNKADLANKRAVDFQEAQSYADDNSLLFMEXSAKXSMNVNEIFMAIAKKLPKNEPQNPGANSARGRGVDLXEPXQPXRNQCCSN

SEQ ID NO: 22444 - protein, 62 aa, Homo sapiens
  MOD_RES (7)..(7): Selenocysteine
  MOD_RES (14)..(14): Selenocysteine
  MOD_RES (52)..(52): Selenocysteine
MASRGAXRPNGPNXGNKICQFKLVLLGESAVGKSSLVLRFVKGQFHEFQESXIGVLFFQLLF

SEQ ID NO: 22445 - protein, 65 aa, Homo sapiens
  MOD_RES (7)..(7): Selenocysteine
  MOD_RES (14)..(14): Selenocysteine
  MOD_RES (52)..(52): Selenocysteine
  MOD_RES (56)..(56): Selenocysteine
MASRGAXRPNGPNXGNKICQFKLVLLGESAVGKSSLVLRFVKGQFHEFQESXIGVXLEVIKAVSL

SEQ ID NO: 22446 - protein, 79 aa, Homo sapiens
  MOD_RES (27)..(27): Selenocysteine
  MOD_RES (37)..(37): Selenocysteine
  MOD_RES (41)..(41): Selenocysteine
MSLEGVLKPGNPLPFPLPPLQYPPPSXLSHSDNLAMXSRSXARPNGQPQASKICQFKLVLLGESAVGKSSLVLRFVKGQ

SEQ ID NO: 22447 - protein, 100 aa, Homo sapiens
  MOD_RES (2)..(2): Selenocysteine
  MOD_RES (6)..(6): Selenocysteine
  MOD_RES (52)..(52): Selenocysteine
  MOD_RES (59)..(59): Selenocysteine
  MOD_RES (67)..(68): Selenocysteine
  MOD_RES (76)..(76): Selenocysteine
MXSRSXARPNGQPQASKICQFKLVLLGESAVGKSSLVLRFVKGQFHEYQESXIGAAFLXQSVCLDDXXVKFEIWDXAGQERYHSLAPMYYRGAQAAIVVY

SEQ ID NO: 22448 - protein, 174 aa, Homo sapiens
  MOD_RES (2)..(2): Selenocysteine
  MOD_RES (6)..(6): Selenocysteine
  MOD_RES (52)..(52): Selenocysteine
  MOD_RES (59)..(59): Selenocysteine
  MOD_RES (67)..(68): Selenocysteine
  MOD_RES (76)..(76): Selenocysteine
  MOD_RES (103)..(103): Selenocysteine
  MOD_RES (121)..(121): Selenocysteine
  MOD_RES (125)..(125): Selenocysteine
MXSRSXARPNGQPQASKICQFKLVLLGESAVGKSSLVLRFVKGQFHEYQESXIGAAFLXQSVCLDDXXVKFEIWDXAGQERYHSLAPMYYRGAQAAIVVYDIXNQEAQAYADDNSLLFMEXSAKXAMNVNDLFLAIAKKLPKSEPQNLGGAAGRSRGVDLHEQSQQNKSQCCSN

SEQ ID NO: 22449 - protein, 115 aa, Homo sapiens
  MOD_RES (2)..(2): Selenocysteine
  MOD_RES (6)..(6): Selenocysteine
  MOD_RES (52)..(52): Selenocysteine
  MOD_RES (59)..(59): Selenocysteine
  MOD_RES (67)..(68): Selenocysteine
  MOD_RES (76)..(76): Selenocysteine
  MOD_RES (103)..(103): Selenocysteine
  MOD_RES (107)..(107): Selenocysteine
  MOD_RES (113)..(113): Selenocysteine
MXSRSXARPNGQPQASKICQFKLVLLGESAVGKSSLVLRFVKGQFHEYQESXIGAAFLXQSVCLDDXXVKFEIWDXAGQERYHSLAPMYYRGAQAAIVVYDIXNQEXFARAKXWV

SEQ ID NO: 22450 - protein, 215 aa, Homo sapiens
  MOD_RES (2)..(2): Selenocysteine
  MOD_RES (6)..(6): Selenocysteine
  MOD_RES (52)..(52): Selenocysteine
  MOD_RES (59)..(59): Selenocysteine
  MOD_RES (67)..(68): Selenocysteine
  MOD_RES (76)..(76): Selenocysteine
  MOD_RES (103)..(103): Selenocysteine
  MOD_RES (107)..(107): Selenocysteine
  MOD_RES (113)..(113): Selenocysteine
  MOD_RES (162)..(162): Selenocysteine
  MOD_RES (166)..(166): Selenocysteine
MXSRSXARPNGQPQASKICQFKLVLLGESAVGKSSLVLRFVKGQFHEYQESXIGAAFLXQSVCLDDXXVKFEIWDXAGQERYHSLAPMYYRGAQAAIVVYDIXNQEXFARAKXWVKELQRQASPSIVIALAGNKADLANKRMVEYEEAQAYADDNSLLFMEXSAKXAMNVNDLFLAIAKKLPKSEPQNLGGAAGRSRGVDLHEQSQQNKSQCCSN

SEQ ID NO: 22451 - protein, 73 aa, Homo sapiens
  MOD_RES (2)..(2): Selenocysteine
  MOD_RES (6)..(6): Selenocysteine
  MOD_RES (52)..(52): Selenocysteine
  MOD_RES (67)..(68): Selenocysteine
  MOD_RES (70)..(70): Selenocysteine
MXSRSXARPNGQPQASKICQFKLVLLGESAVGKSSLVLRFVKGQFHEYQESXIGGNLCPSKDMGEGXXAXGQS

SEQ ID NO: 22452 - protein, 74 aa, Homo sapiens
  MOD_RES (53)..(53): Selenocysteine
  MOD_RES (60)..(60): Selenocysteine
  MOD_RES (62)..(62): Selenocysteine
  MOD_RES (68)..(69): Selenocysteine
MAGRGGAARPNGPAAGNKICQFKLVLLGESAVGKSSLVLRFVKGQFHEYQESXIGAAFLXQXVCLDDXXVKFEI

SEQ ID NO: 22453 - protein, 92 aa, Homo sapiens
  MOD_RES (53)..(53): Selenocysteine
  MOD_RES (60)..(60): Selenocysteine
  MOD_RES (62)..(62): Selenocysteine
  MOD_RES (68)..(69): Selenocysteine
  MOD_RES (77)..(77): Selenocysteine
MAGRGGAARPNGPAAGNKICQFKLVLLGESAVGKSSLVLRFVKGQFHEYQESXIGAAFLXQXVCLDDXXVKFEIWDXAGQERYHSLAPMYYR

SEQ ID NO: 22454 - protein, 124 aa, Homo sapiens
  MOD_RES (53)..(53): Selenocysteine
  MOD_RES (60)..(60): Selenocysteine
  MOD_RES (62)..(62): Selenocysteine
  MOD_RES (68)..(69): Selenocysteine
  MOD_RES (77)..(77): Selenocysteine
  MOD_RES (104)..(104): Selenocysteine
  MOD_RES (106)..(106): Selenocysteine
  MOD_RES (108)..(108): Selenocysteine
MAGRGGAARPNGPAAGNKICQFKLVLLGESAVGKSSLVLRFVKGQFHEYQESXIGAAFLXQXVCLDDXXVKFEIWDXAGQERYHSLAPMYYRGAQAAIVVYDIXNXDXFARAKNWVKELQRQAS

SEQ ID NO: 22455 - protein, 216 aa, Homo sapiens
  MOD_RES (53)..(53): Selenocysteine
  MOD_RES (60)..(60): Selenocysteine
  MOD_RES (62)..(62): Selenocysteine
  MOD_RES (68)..(69): Selenocysteine
  MOD_RES (77)..(77): Selenocysteine
  MOD_RES (104)..(104): Selenocysteine
  MOD_RES (106)..(106): Selenocysteine
  MOD_RES (108)..(108): Selenocysteine
  MOD_RES (163)..(163): Selenocysteine
  MOD_RES (167)..(167): Selenocysteine
  MOD_RES (191)..(191): Selenocysteine
MAGRGGAARPNGPAAGNKICQFKLVLLGESAVGKSSLVLRFVKGQFHEYQESXIGAAFLXQXVCLDDXXVKFEIWDXAGQERYHSLAPMYYRGAQAAIVVYDIXNXDXFARAKNWVKELQRQASPNIVIALAGNKADLASKRAVEFQEAQAYADDNSLLFMEXSAKXAMNVNEIFMAIAKKLPKNEPQNAXGAPGRNRGVDLQENNPASRSQCCSN

SEQ ID NO: 22456 - protein, 249 aa, Homo sapiens
  MOD_RES (18)..(18): Selenocysteine
  MOD_RES (27)..(29): Selenocysteine
  MOD_RES (86)..(86): Selenocysteine
  MOD_RES (93)..(93): Selenocysteine
  MOD_RES (95)..(95): Selenocysteine
  MOD_RES (101)..(102): Selenocysteine
  MOD_RES (110)..(110): Selenocysteine
  MOD_RES (137)..(137): Selenocysteine
  MOD_RES (139)..(139): Selenocysteine
  MOD_RES (141)..(141): Selenocysteine
  MOD_RES (196)..(196): Selenocysteine
  MOD_RES (200)..(200): Selenocysteine
  MOD_RES (224)..(224): Selenocysteine
MELSWRSPSPLSASLHSXSPHPHALWXXXAGRAMAGRGGAARPNGPAAGNKICQFKLVLLGESAVGKSSLVLRFVKGQFHEYQESXIGAAFLXQXVCLDDXXVKFEIWDXAGQERYHSLAPMYYRGAQAAIVVYDIXNXDXFARAKNWVKELQRQASPNIVIALAGNKADLASKRAVEFQEAQAYADDNSLLFMEXSAKXAMNVNEIFMAIAKKLPKNEPQNAXGAPGRNRGVDLQENNPASRSQCCSN

SEQ ID NO: 22457 - protein, 150 aa, Homo sapiens
  MOD_RES (8)..(8): Selenocysteine
  MOD_RES (35)..(35): Selenocysteine
  MOD_RES (37)..(37): Selenocysteine
  MOD_RES (39)..(39): Selenocysteine
  MOD_RES (94)..(94): Selenocysteine
  MOD_RES (98)..(98): Selenocysteine
  MOD_RES (140)..(141): Selenocysteine
VKFEIWDXAGQERYHSLAPMYYRGAQAAIVVYDIXNXDXFARAKNWVKELQRQASPNIVIALAGNKADLASKRAVEFQEAQAYADDNSLLFMEXSAKXAMNVNEIFMAIGQLLLLPSSLHHSKGISPVCWSRVGLRGPFXXLFFFFFFFF

SEQ ID NO: 22458 - protein, 208 aa, Homo sapiens
  MOD_RES (3)..(3): Selenocysteine
  MOD_RES (27)..(27): Selenocysteine
  MOD_RES (31)..(31): Selenocysteine
  MOD_RES (41)..(41): Selenocysteine
  MOD_RES (45)..(45): Selenocysteine
  MOD_RES (54)..(54): Selenocysteine
  MOD_RES (61)..(61): Selenocysteine
  MOD_RES (69)..(69): Selenocysteine
  MOD_RES (96)..(96): Selenocysteine
  MOD_RES (104)..(105): Selenocysteine
  MOD_RES (113)..(113): Selenocysteine
  MOD_RES (128)..(128): Selenocysteine
  MOD_RES (155)..(155): Selenocysteine
  MOD_RES (180)..(180): Selenocysteine
MSXGGDFGNPLRKFKLVFLGEQSVGKXSLIXRFMYDSFDNXYQAXIGIDFLSKXMYLEDRXIRLQLWDXAGQERFRSLIPSYIRDSAAAVVVYDIXNVNSFQQXXKWIDDVRXERGSDVIIMLVGNKXDLADKRQVSIEEGERKAKELNVMFIEXSAKAGYNVKQLFRRVAAALPGMESXQDRSREDMIDIKLEKPQEQPVSEGGCSC

SEQ ID NO: 22459 - protein, 104 aa, Homo sapiens
  MOD_RES (3)..(3): Selenocysteine
  MOD_RES (27)..(27): Selenocysteine
  MOD_RES (31)..(31): Selenocysteine
  MOD_RES (41)..(41): Selenocysteine
  MOD_RES (45)..(45): Selenocysteine
  MOD_RES (54)..(54): Selenocysteine
  MOD_RES (61)..(61): Selenocysteine
  MOD_RES (76)..(76): Selenocysteine
MSXGGDFGNPLRKFKLVFLGEQSVGKXSLIXRFMYDSFDNXYQAXIGIDFLSKXMYLEDRXLFRRVAAALPGMESXQDRSREDMIDIKLEKPQEQPVSEGGCSC

SEQ ID NO: 22460 - protein, 87 aa, Homo sapiens
  MOD_RES (3)..(3): Selenocysteine
  MOD_RES (27)..(27): Selenocysteine
  MOD_RES (31)..(31): Selenocysteine
  MOD_RES (41)..(41): Selenocysteine
  MOD_RES (45)..(45): Selenocysteine
  MOD_RES (54)..(54): Selenocysteine
  MOD_RES (61)..(61): Selenocysteine
  MOD_RES (64)..(64): Selenocysteine
MSXGGDFGNPLRKFKLVFLGEQSVGKXSLIXRFMYDSFDNXYQAXIGIDFLSKXMYLEDRXMLXHSSKLQSGLMMSEQKEEVMLSSC

SEQ ID NO: 22461 - protein, 208 aa, Homo sapiens
  MOD_RES (3)..(3): Selenocysteine
  MOD_RES (27)..(27): Selenocysteine
  MOD_RES (31)..(31): Selenocysteine
  MOD_RES (41)..(41): Selenocysteine
  MOD_RES (45)..(45): Selenocysteine
  MOD_RES (54)..(54): Selenocysteine
  MOD_RES (61)..(61): Selenocysteine
  MOD_RES (69)..(69): Selenocysteine
  MOD_RES (87)..(87): Selenocysteine
  MOD_RES (96)..(96): Selenocysteine
  MOD_RES (104)..(105): Selenocysteine
  MOD_RES (113)..(113): Selenocysteine
  MOD_RES (128)..(128): Selenocysteine
  MOD_RES (155)..(155): Selenocysteine
  MOD_RES (180)..(180): Selenocysteine
MSXGGDFGNPLRKFKLVFLGEQSVGKXSLIXRFMYDSFDNXYQAXIGIDFLSKXMYLEDRXVRLQLWDXAGQERFRSLIPSYIRDSXVAVVVYDIXNVNSFQQXXKWIDDVRXERGSDVIIMLVGNKXDLADKRQVSIEEGERKAKELNVMFIEXSAKAGYNVKQLFRRVAAALPGMESXQDRSREDMIDIKLEKPQEQPVSEGGCSC

SEQ ID NO: 22462 - protein, 71 aa, Homo sapiens
  MOD_RES (3)..(3): Selenocysteine
  MOD_RES (27)..(27): Selenocysteine
  MOD_RES (31)..(31): Selenocysteine
  MOD_RES (41)..(41): Selenocysteine
  MOD_RES (58)..(58): Selenocysteine
MSXGGDFGNPLRKFKLVFLGEQSVGKXSLIXRFMYDSFDNXYQLFRRVAAALPGMESXQDRSREDMIDIKL

SEQ ID NO: 22463 - protein, 175 aa, Homo sapiens
  MOD_RES (8)..(8): Selenocysteine
  MOD_RES (12)..(12): Selenocysteine
  MOD_RES (21)..(21): Selenocysteine
  MOD_RES (28)..(28): Selenocysteine
  MOD_RES (36)..(36): Selenocysteine
  MOD_RES (63)..(63): Selenocysteine
  MOD_RES (71)..(72): Selenocysteine
  MOD_RES (80)..(80): Selenocysteine
  MOD_RES (95)..(95): Selenocysteine
  MOD_RES (122)..(122): Selenocysteine
  MOD_RES (147)..(147): Selenocysteine
MYDSFDNXYQAXIGIDFLSKXMYLEDRXIRLQLWDXAGQERFRSLIPSYIRDSAAAVVVYDIXNVNSFQQXXKWIDDVRXERGSDVIIMLVGNKXDLADKRQVSIEEGERKAKELNVMFIEXSAKAGYNVKQLFRRVAAALPGMESXQDRSREDMIDIKLEKPQEQPVSEGGCSC

SEQ ID NO: 22464 - protein, 71 aa, Homo sapiens
  MOD_RES (27)..(27): Selenocysteine
  MOD_RES (31)..(31): Selenocysteine
  MOD_RES (52)..(52): Selenocysteine
  MOD_RES (58)..(58): Selenocysteine
  MOD_RES (66)..(66): Selenocysteine
MSAGGDFGNPLRKFKLVFLGEQSVGKXSLIXRCCWQLQLRGAWFIDWGAMCXSENILXSPPSSQYXCLGQV

SEQ ID NO: 22465 - protein, 208 aa, Homo sapiens
  MOD_RES (27)..(27): Selenocysteine
  MOD_RES (31)..(31): Selenocysteine
  MOD_RES (41)..(41): Selenocysteine
  MOD_RES (45)..(45): Selenocysteine
  MOD_RES (54)..(54): Selenocysteine
  MOD_RES (61)..(61): Selenocysteine
  MOD_RES (69)..(69): Selenocysteine
  MOD_RES (87)..(87): Selenocysteine
  MOD_RES (96)..(96): Selenocysteine
  MOD_RES (104)..(104): Selenocysteine
  MOD_RES (113)..(113): Selenocysteine
  MOD_RES (128)..(128): Selenocysteine
  MOD_RES (137)..(137): Selenocysteine
  MOD_RES (155)..(155): Selenocysteine
  MOD_RES (159)..(159): Selenocysteine
MSAGGDFGNPLRKFKLVFLGEQSVGKXSLIXRFMYDSFDNXYQAXIGIDFLSKXMYLEDRXVRLQLWDXAGQERFRSLIPSYIRDSXVAVVVYDIXNLNSFQQXSKWIDDVRXERGSDVIIMLVGNKXDLADKRQIXIEEGEQRAKELSVMFIEXSAKXGYNVKQLFRRVASALPGMENVQEKSKEGMIDIKLDKPQEPPASEGGCSC

SEQ ID NO: 22466 - protein, 195 aa, Homo sapiens
  MOD_RES (5)..(5): Selenocysteine
  MOD_RES (14)..(14): Selenocysteine
  MOD_RES (18)..(18): Selenocysteine
  MOD_RES (28)..(28): Selenocysteine
  MOD_RES (32)..(32): Selenocysteine
  MOD_RES (41)..(41): Selenocysteine
  MOD_RES (48)..(48): Selenocysteine
  MOD_RES (56)..(56): Selenocysteine
  MOD_RES (74)..(74): Selenocysteine
  MOD_RES (83)..(83): Selenocysteine
  MOD_RES (91)..(91): Selenocysteine
  MOD_RES (100)..(100): Selenocysteine
  MOD_RES (115)..(115): Selenocysteine
  MOD_RES (124)..(124): Selenocysteine
  MOD_RES (142)..(142): Selenocysteine
  MOD_RES (146)..(146): Selenocysteine
MWHMXRNWPLVGKXSLIXRFMYDSFDNXYQAXIGIDFLSKXMYLEDRXVRLQLWDXAGQERFRSLIPSYIRDSXVAVVVYDIXNLNSFQQXSKWIDDVRXERGSDVIIMLVGNKXDLADKRQIXIEEGEQRAKELSVMFIEXSAKXGYNVKQLFRRVASALPGMENVQEKSKEGMIDIKLDKPQEPPASEGGCSC

SEQ ID NO: 22467 - protein, 49 aa, Homo sapiens
  MOD_RES (8)..(8): Selenocysteine
  MOD_RES (12)..(12): Selenocysteine
  MOD_RES (21)..(21): Selenocysteine
  MOD_RES (28)..(28): Selenocysteine
  MOD_RES (36)..(36): Selenocysteine
MYDSFDNXYQAXIGIDFLSKXMYLEDRXVRLQLWDXAGQERFRSLIPSY

SEQ ID NO: 22468 - protein, 124 aa, Homo sapiens
  MOD_RES (8)..(8): Selenocysteine
  MOD_RES (12)..(12): Selenocysteine
  MOD_RES (21)..(21): Selenocysteine
  MOD_RES (28)..(28): Selenocysteine
  MOD_RES (36)..(36): Selenocysteine
  MOD_RES (54)..(54): Selenocysteine
  MOD_RES (63)..(63): Selenocysteine
  MOD_RES (71)..(71): Selenocysteine
  MOD_RES (80)..(80): Selenocysteine
  MOD_RES (95)..(95): Selenocysteine
  MOD_RES (104)..(104): Selenocysteine
  MOD_RES (122)..(122): Selenocysteine
MYDSFDNXYQAXIGIDFLSKXMYLEDRXVRLQLWDXAGQERFRSLIPSYIRDSXVAVVVYDIXNLNSFQQXSKWIDDVRXERGSDVIIMLVGNKXDLADKRQIXIEEGEQRAKELSVMFIEXSA

SEQ ID NO: 22469 - protein, 83 aa, Homo sapiens
  MOD_RES (7)..(7): Selenocysteine
  MOD_RES (15)..(15): Selenocysteine
  MOD_RES (33)..(33): Selenocysteine
  MOD_RES (42)..(42): Selenocysteine
  MOD_RES (50)..(50): Selenocysteine
  MOD_RES (59)..(59): Selenocysteine
  MOD_RES (74)..(74): Selenocysteine
  MOD_RES (83)..(83): Selenocysteine
MYLEDRXVRLQLWDXAGQERFRSLIPSYIRDSXVAVVVYDIXNLNSFQQXSKWIDDVRXERGSDVIIMLVGNKXDLADKRQIX

SEQ ID NO: 22470 - protein, 254 aa, Homo sapiens
  MOD_RES (27)..(27): Selenocysteine
  MOD_RES (31)..(31): Selenocysteine
  MOD_RES (41)..(41): Selenocysteine
  MOD_RES (54)..(54): Selenocysteine
  MOD_RES (61)..(61): Selenocysteine
  MOD_RES (69)..(69): Selenocysteine
  MOD_RES (96)..(96): Selenocysteine
  MOD_RES (104)..(105): Selenocysteine
  MOD_RES (113)..(113): Selenocysteine
  MOD_RES (122)..(122): Selenocysteine
  MOD_RES (128)..(128): Selenocysteine
  MOD_RES (151)..(151): Selenocysteine
  MOD_RES (155)..(155): Selenocysteine
  MOD_RES (180)..(180): Selenocysteine
  MOD_RES (200)..(200): Selenocysteine
  MOD_RES (216)..(216): Selenocysteine
  MOD_RES (242)..(242): Selenocysteine
MSAGGDFGNPLRKFKLVFLGEQSVAKXSLIXRFRYDSFDNXYQAIIGIDFLSKXMYLEDGXIGLRLWDXAGQERLRSLIPRYIRDSAAAVVVYDIXNVNSFQQXXKWIDDVRXERGSDVIIXLVGNRXDLADKRQVSVEEGERKAKGLNVXFIEXRAKAGYNVKQLFRRVAAALPGMESXQDGSREDMSDIKLEKPQEQXVSEGGCSCYSPMSSSXLPQKPPYSFIDCSVNIGLNLFPSLIXFCNSSLLPVSWR

SEQ ID NO: 22471 - protein, 98 aa, Homo sapiens
  MOD_RES (2)..(2): Selenocysteine
  MOD_RES (22)..(22): Selenocysteine
  MOD_RES (40)..(40): Selenocysteine
  MOD_RES (47)..(47): Selenocysteine
  MOD_RES (59)..(59): Selenocysteine
  MOD_RES (69)..(69): Selenocysteine
MXSRKKVLLKVIILGDSGVGKXSLMNQYVNKKFSNQYKAXIGADFLXKEAINVEQAFQXIARNALKQEXEVELYNEFPEPIKLDKNDRAKASAESCSC

SEQ ID NO: 22472 - protein, 91 aa, Homo sapiens
  MOD_RES (2)..(2): Selenocysteine
  MOD_RES (22)..(22): Selenocysteine
  MOD_RES (40)..(40): Selenocysteine
  MOD_RES (47)..(47): Selenocysteine
  MOD_RES (58)..(58): Selenocysteine
  MOD_RES (62)..(62): Selenocysteine
MXSRKKVLLKVIILGDSGVGKXSLMNQYVNKKFSNQYKAXIGADFLXKEVMVDDRLVXMQEXEVELYNEFPEPIKLDKNDRAKASAESCSC

SEQ ID NO: 22473 - protein, 160 aa, Homo sapiens
  MOD_RES (2)..(2): Selenocysteine
  MOD_RES (22)..(22): Selenocysteine
  MOD_RES (40)..(40): Selenocysteine
  MOD_RES (47)..(47): Selenocysteine
  MOD_RES (58)..(58): Selenocysteine
  MOD_RES (64)..(64): Selenocysteine
  MOD_RES (89)..(89): Selenocysteine
  MOD_RES (107)..(107): Selenocysteine
  MOD_RES (121)..(121): Selenocysteine
  MOD_RES (131)..(131): Selenocysteine
MXSRKKVLLKVIILGDSGVGKXSLMNQYVNKKFSNQYKAXIGADFLXKEVMVDDRLVXMQIWDXAGQERFQSLGVAFYRGADCCVLVAXKRAQAWCYSKNNIPYFEXSAKEAINVEQAFQXIARNALKQEXEVELYNEFPEPIKLDKNDRAKASAESCSC

SEQ ID NO: 22474 - protein, 150 aa, Homo sapiens
  MOD_RES (2)..(2): Selenocysteine
  MOD_RES (22)..(22): Selenocysteine
  MOD_RES (40)..(40): Selenocysteine
  MOD_RES (47)..(47): Selenocysteine
  MOD_RES (58)..(58): Selenocysteine
  MOD_RES (64)..(64): Selenocysteine
  MOD_RES (91)..(91): Selenocysteine
  MOD_RES (95)..(95): Selenocysteine
  MOD_RES (98)..(98): Selenocysteine
  MOD_RES (136)..(136): Selenocysteine
MXSRKKVLLKVIILGDSGVGKXSLMNQYVNKKFSNQYKAXIGADFLXKEVMVDDRLVXMQIWDXAGQERFQSLGVAFYRGADCCVLVFDVXAPNXFKXLDSWRDEFLIQASPRDPENFPFVVLGNKIDLENRQVAXKRAQAWCYSKNNIP

SEQ ID NO: 22475 - protein, 207 aa, Homo sapiens
  MOD_RES (2)..(2): Selenocysteine
  MOD_RES (22)..(22): Selenocysteine
  MOD_RES (40)..(40): Selenocysteine
  MOD_RES (47)..(47): Selenocysteine
  MOD_RES (58)..(58): Selenocysteine
  MOD_RES (64)..(64): Selenocysteine
  MOD_RES (91)..(91): Selenocysteine
  MOD_RES (95)..(95): Selenocysteine
  MOD_RES (98)..(98): Selenocysteine
  MOD_RES (136)..(136): Selenocysteine
  MOD_RES (154)..(154): Selenocysteine
  MOD_RES (168)..(168): Selenocysteine
  MOD_RES (178)..(178): Selenocysteine
MXSRKKVLLKVIILGDSGVGKXSLMNQYVNKKFSNQYKAXIGADFLXKEVMVDDRLVXMQIWDXAGQERFQSLGVAFYRGADCCVLVFDVXAPNXFKXLDSWRDEFLIQASPRDPENFPFVVLGNKIDLENRQVAXKRAQAWCYSKNNIPYFEXSAKEAINVEQAFQXIARNALKQEXEVELYNEFPEPIKLDKNDRAKASAESCSC

SEQ ID NO: 22476 - protein, 116 aa, Homo sapiens
  MOD_RES (2)..(2): Selenocysteine
  MOD_RES (22)..(22): Selenocysteine
  MOD_RES (40)..(40): Selenocysteine
  MOD_RES (47)..(47): Selenocysteine
  MOD_RES (58)..(58): Selenocysteine
  MOD_RES (64)..(64): Selenocysteine
  MOD_RES (91)..(91): Selenocysteine
  MOD_RES (95)..(95): Selenocysteine
  MOD_RES (113)..(113): Selenocysteine
MXSRKKVLLKVIILGDSGVGKXSLMNQYVNKKFSNQYKAXIGADFLXKEVMVDDRLVXMQIWDXAGQERFQSLGVAFYRGADCCVLVFDVXAPNXKRAQAWCYSKNNIPYFEXSAK

SEQ ID NO: 22477 - protein, 134 aa, Homo sapiens
  MOD_RES (2)..(2): Selenocysteine
  MOD_RES (22)..(22): Selenocysteine
  MOD_RES (40)..(40): Selenocysteine
  MOD_RES (47)..(47): Selenocysteine
  MOD_RES (58)..(58): Selenocysteine
  MOD_RES (63)..(63): Selenocysteine
  MOD_RES (81)..(81): Selenocysteine
  MOD_RES (95)..(95): Selenocysteine
  MOD_RES (105)..(105): Selenocysteine
MXSRKKVLLKVIILGDSGVGKXSLMNQYVNKKFSNQYKAXIGADFLXKEVMVDDRLVXMQVAXKRAQAWCYSKNNIPYFEXSAKEAINVEQAFQXIARNALKQEXEVELYNEFPEPIKLDKNDRAKASAESCSC

SEQ ID NO: 22478 - protein, 199 aa, Homo sapiens
  MOD_RES (22)..(22): Selenocysteine
  MOD_RES (32)..(32): Selenocysteine
  MOD_RES (39)..(40): Selenocysteine
  MOD_RES (55)..(56): Selenocysteine
  MOD_RES (64)..(64): Selenocysteine
  MOD_RES (76)..(76): Selenocysteine
  MOD_RES (91)..(91): Selenocysteine
  MOD_RES (184)..(184): Selenocysteine
MNPRKKVDLKLIIVGAIGVGKXSLLHQYVHKXFYEEYQXXLGASILSKIIILGDXXLKLQIWDXGGQERFRSMVSXFYKGSDGCILAFDVXDLESFEALDIWRGDVLAKIVPMEQSYPMVLLGNKIDLADRKVPQEVAQGWCREKDIPYFEVSAKNDINVVQAFEMLASRALSRYQSILENHLXESIKLSPDQSRSRCC

SEQ ID NO: 22479 - protein, 157 aa, Homo sapiens
  MOD_RES (22)..(22): Selenocysteine
  MOD_RES (32)..(32): Selenocysteine
  MOD_RES (39)..(40): Selenocysteine
  MOD_RES (55)..(56): Selenocysteine
  MOD_RES (64)..(64): Selenocysteine
  MOD_RES (76)..(76): Selenocysteine
  MOD_RES (91)..(91): Selenocysteine
  MOD_RES (142)..(142): Selenocysteine
MNPRKKVDLKLIIVGAIGVGKXSLLHQYVHKXFYEEYQXXLGASILSKIIILGDXXLKLQIWDXGGQERFRSMVSXFYKGSDGCILAFDVXDLESFEALDIWRGDVLAKIVPMEQSYPMVLLGNKIDLADRKYQSILENHLXESIKLSPDQSRSRCC

SEQ ID NO: 22480 - protein, 91 aa, Homo sapiens
  MOD_RES (1)..(1): Any amino acid
XDIWRGDVLAKIVPMEQSYPMVLLGNKIDLADRKVPQEVAQGWCREKDIPYFEVSAKNDINVVQAFEMLASRALSRPSLSRERKSREVSLS

SEQ ID NO: 22481 - protein, 207 aa, Homo sapiens
  MOD_RES (4)..(4): Selenocysteine
  MOD_RES (22)..(22): Selenocysteine
  MOD_RES (36)..(36): Selenocysteine
  MOD_RES (40)..(40): Selenocysteine
  MOD_RES (49)..(49): Selenocysteine
  MOD_RES (64)..(64): Selenocysteine
  MOD_RES (72)..(72): Selenocysteine
  MOD_RES (74)..(75): Selenocysteine
  MOD_RES (91)..(91): Selenocysteine
  MOD_RES (150)..(150): Selenocysteine
  MOD_RES (164)..(164): Selenocysteine
  MOD_RES (192)..(192): Selenocysteine
MAKXYDYLFKLLLIGDSGVGKXCVLFRFSEDAFNSXFISXIGIDFKIRXIELDGKRIKLQIWDXAGQERFRXIXXAYYRGAMGIMLVYDIXNEKSFDNIRNWIRNIEEHASADVEKMILGNKCDVNDKRQVSKERGEKLALDYGIKFMEXSAKANINVENAFFXLARDIKAKMDKKLEGNSPQGSNQGVKIXPDQQKRSSFFRCVLL

SEQ ID NO: 22482 - protein, 207 aa, Homo sapiens
  MOD_RES (4)..(4): Selenocysteine
  MOD_RES (22)..(22): Selenocysteine
  MOD_RES (36)..(36): Selenocysteine
  MOD_RES (40)..(40): Selenocysteine
  MOD_RES (49)..(49): Selenocysteine
  MOD_RES (64)..(64): Selenocysteine
  MOD_RES (72)..(72): Selenocysteine
  MOD_RES (74)..(75): Selenocysteine
  MOD_RES (91)..(91): Selenocysteine
  MOD_RES (150)..(150): Selenocysteine
  MOD_RES (186)..(186): Selenocysteine
  MOD_RES (204)..(204): Selenocysteine
MAKXYDYLFKLLLIGDSGVGKXCVLFRFSEDAFNSXFISXIGIDFKIRXIELDGKRIKLQIWDXAGQERFRXIXXAYYRGAMGIMLVYDIXNEKSFDNIRNWIRNIEEHASADVEKMILGNKCDVNDKRQVSKERGEKLALDYGIKFMEXSAKANINVENRYQSKNGQKIGRQQPPGEQPGSQNHXGPAEEEQLFPMCSSVRNXALL

SEQ ID NO: 22483 - protein, 47 aa, Homo sapiens
  MOD_RES (4)..(4): Selenocysteine
  MOD_RES (22)..(22): Selenocysteine
  MOD_RES (35)..(36): Selenocysteine
  MOD_RES (40)..(40): Selenocysteine
MAKXYDYLFKLLLIGDSGVGKXCLLFRFSEDAFNXXFISXIEQLPVL

SEQ ID NO: 22484 - protein, 92 aa, Homo sapiens
  MOD_RES (4)..(4): Selenocysteine
  MOD_RES (22)..(22): Selenocysteine
  MOD_RES (35)..(36): Selenocysteine
  MOD_RES (40)..(40): Selenocysteine
  MOD_RES (49)..(49): Selenocysteine
  MOD_RES (64)..(64): Selenocysteine
  MOD_RES (72)..(72): Selenocysteine
  MOD_RES (74)..(75): Selenocysteine
  MOD_RES (91)..(91): Selenocysteine
MAKXYDYLFKLLLIGDSGVGKXCLLFRFSEDAFNXXFISXIGIDFKIRXIELDGKKIKLQIWDXAGQERFRXIXXAYYRGAMEGILGIKRXS

SEQ ID NO: 22485 - protein, 207 aa, Homo sapiens
  MOD_RES (4)..(4): Selenocysteine
  MOD_RES (22)..(22): Selenocysteine
  MOD_RES (35)..(36): Selenocysteine
  MOD_RES (40)..(40): Selenocysteine
  MOD_RES (49)..(49): Selenocysteine
  MOD_RES (64)..(64): Selenocysteine
  MOD_RES (72)..(72): Selenocysteine
  MOD_RES (74)..(75): Selenocysteine
  MOD_RES (91)..(91): Selenocysteine
  MOD_RES (150)..(150): Selenocysteine
  MOD_RES (164)..(164): Selenocysteine
  MOD_RES (171)..(171): Selenocysteine
  MOD_RES (192)..(192): Selenocysteine
  MOD_RES (199)..(199): Selenocysteine
MAKXYDYLFKLLLIGDSGVGKXCLLFRFSEDAFNXXFISXIGIDFKIRXIELDGKKIKLQIWDXAGQERFRXIXXAYYRGAMGIMLVYDIXNEKSFDNIKNWIRNIEEHASSDVERMILGNKCDMNDKRQVSKERGEKLAIDYGIKFLEXSAKSSANVEEAFFXLARDIMXKLNRKMNDSNSAGAGGPVKIXENRSKKXSFFRCSLL

SEQ ID NO: 22486 - protein, 188 aa, Homo sapiens
  MOD_RES (4)..(4): Selenocysteine
  MOD_RES (22)..(22): Selenocysteine
  MOD_RES (35)..(36): Selenocysteine
  MOD_RES (40)..(40): Selenocysteine
  MOD_RES (49)..(49): Selenocysteine
  MOD_RES (64)..(64): Selenocysteine
  MOD_RES (72)..(72): Selenocysteine
  MOD_RES (74)..(75): Selenocysteine
  MOD_RES (91)..(91): Selenocysteine
  MOD_RES (150)..(150): Selenocysteine
  MOD_RES (164)..(164): Selenocysteine
  MOD_RES (171)..(171): Selenocysteine
  MOD_RES (181)..(181): Selenocysteine
MAKXYDYLFKLLLIGDSGVGKXCLLFRFSEDAFNXXFISXIGIDFKIRXIELDGKKIKLQIWDXAGQERFRXIXXAYYRGAMGIMLVYDIXNEKSFDNIKNWIRNIEEHASSDVERMILGNKCDMNDKRQVSKERGEKLAIDYGIKFLEXSAKSSANVEEAFFXLARDIMXKLNRKMVCIXYNFYFHY

SEQ ID NO: 22487 - protein, 48 aa, Homo sapiens
  MOD_RES (4)..(4): Selenocysteine
  MOD_RES (22)..(22): Selenocysteine
  MOD_RES (35)..(36): Selenocysteine
  MOD_RES (40)..(40): Selenocysteine
MAKXYDYLFKLLLIGDSGVGKXCLLFRFSEDAFNXXFISXIVRPHIEE

SEQ ID NO: 22488 - protein, 23 aa, Homo sapiens
MAGKSSLFKVILLGDGGVGKSSL

SEQ ID NO: 22489 - protein, 201 aa, Homo sapiens
  MOD_RES (29)..(29): Selenocysteine
  MOD_RES (34)..(34): Selenocysteine
  MOD_RES (39)..(39): Selenocysteine
  MOD_RES (57)..(57): Selenocysteine
  MOD_RES (63)..(63): Selenocysteine
  MOD_RES (74)..(74): Selenocysteine
  MOD_RES (86)..(86): Selenocysteine
  MOD_RES (135)..(135): Selenocysteine
  MOD_RES (153)..(153): Selenocysteine
  MOD_RES (159)..(159): Selenocysteine
  MOD_RES (175)..(175): Selenocysteine
  MOD_RES (185)..(185): Selenocysteine
  MOD_RES (187)..(187): Selenocysteine
MAGKSSLFKVILLGDGGVGKSSLMNRYVXNKFDXQLFHXIGVEFLNKDLEVDGHFVXMQIWDXAGQERFRSLRXPFYRGSDCCLLXFSVDDSQSFQNLSNWKKEFIYYADVKEPESFPFVILGNKIDISERQVSXEEAQAWCRDNGDYPYFEXSAKDAXNVAAAFEEAVRRVLAXEDRSDHLIQXDXVNLHRKPKPSSSCC

SEQ ID NO: 22490 - protein, 201 aa, Homo sapiens
  MOD_RES (29)..(29): Selenocysteine
  MOD_RES (39)..(39): Selenocysteine
  MOD_RES (57)..(57): Selenocysteine
  MOD_RES (63)..(63): Selenocysteine
  MOD_RES (74)..(74): Selenocysteine
  MOD_RES (86)..(86): Selenocysteine
  MOD_RES (134)..(135): Selenocysteine
  MOD_RES (140)..(140): Selenocysteine
  MOD_RES (153)..(153): Selenocysteine
  MOD_RES (159)..(159): Selenocysteine
  MOD_RES (162)..(162): Selenocysteine
  MOD_RES (187)..(187): Selenocysteine
MSGKSLLLKVILLGDGGVGKSSLMNRYVXNKFDSQAFHXIGVEFLNRDLEVDGRFVXLQIWDXAGQERFKSLRXPFYRGADCCLLXFSVDDRQSFENLGNWQKEFIYYADVKDPEHFPFVVLGNKVDKEDRQVXXEEAQXWCMENGDYPYLEXSAKDDXNVXVAFEEAVRQVLAVEEQLEHCMLGHXIDLNSGSKAGSSCC

SEQ ID NO: 22491 - protein, 66 aa, Homo sapiens
  MOD_RES (19)..(19): Selenocysteine
  MOD_RES (35)..(35): Selenocysteine
  MOD_RES (38)..(38): Selenocysteine
  MOD_RES (47)..(47): Selenocysteine
  MOD_RES (65)..(65): Selenocysteine
MDDKASVGKISVSSDSVSXLNSEDFVLVSRQGDEXPSXNNGSDDEKXGLKILKLQVLSHQWPMRXA

SEQ ID NO: 22492 - protein, 112 aa, Homo sapiens
  MOD_RES (19)..(19): Selenocysteine
  MOD_RES (35)..(35): Selenocysteine
  MOD_RES (38)..(38): Selenocysteine
  MOD_RES (47)..(47): Selenocysteine
  MOD_RES (105)..(105): Selenocysteine
MDDKASVGKISVSSDSVSXLNSEDFVLVSRQGDEXPSXNNGSDDEKXGLKIVGNGSEQQLQKELADVLMDPPMDDQPGEKELVKRSQLDGEGDGPLSNQLSASSXINPVPLV

SEQ ID NO: 22493 - protein, 1069 aa, Homo sapiens
  MOD_RES (19)..(19): Selenocysteine
  MOD_RES (35)..(35): Selenocysteine
  MOD_RES (38)..(38): Selenocysteine
  MOD_RES (47)..(47): Selenocysteine
  MOD_RES (105)..(105): Selenocysteine
  MOD_RES (137)..(137): Selenocysteine
  MOD_RES (151)..(151): Selenocysteine
  MOD_RES (185)..(185): Selenocysteine
  MOD_RES (203)..(203): Selenocysteine
  MOD_RES (205)..(205): Selenocysteine
  MOD_RES (225)..(225): Selenocysteine
  MOD_RES (234)..(234): Selenocysteine
  MOD_RES (265)..(265): Selenocysteine
  MOD_RES (274)..(274): Selenocysteine
  MOD_RES (279)..(279): Selenocysteine
  MOD_RES (284)..(284): Selenocysteine
  MOD_RES (291)..(291): Selenocysteine
  MOD_RES (336)..(337): Selenocysteine
  MOD_RES (382)..(382): Selenocysteine
  MOD_RES (399)..(399): Selenocysteine
  MOD_RES (408)..(409): Selenocysteine
  MOD_RES (416)..(416): Selenocysteine
  MOD_RES (428)..(428): Selenocysteine
  MOD_RES (448)..(449): Selenocysteine
  MOD_RES (468)..(468): Selenocysteine
  MOD_RES (470)..(470): Selenocysteine
  MOD_RES (488)..(489): Selenocysteine
  MOD_RES (540)..(540): Selenocysteine
  MOD_RES (597)..(597): Selenocysteine
  MOD_RES (607)..(607): Selenocysteine
  MOD_RES (613)..(613): Selenocysteine
  MOD_RES (623)..(623): Selenocysteine
  MOD_RES (730)..(730): Selenocysteine
  MOD_RES (733)..(733): Selenocysteine
  MOD_RES (766)..(766): Selenocysteine
  MOD_RES (774)..(774): Selenocysteine
  MOD_RES (823)..(823): Selenocysteine
  MOD_RES (865)..(865): Selenocysteine
  MOD_RES (891)..(891): Selenocysteine
  MOD_RES (953)..(953): Selenocysteine
  MOD_RES (988)..(988): Selenocysteine
  MOD_RES (996)..(996): Selenocysteine
  MOD_RES (1002)..(1002): Selenocysteine
  MOD_RES (1017)..(1017): Selenocysteine
  MOD_RES (1048)..(1048): Selenocysteine
  MOD_RES (1053)..(1053): Selenocysteine
  MOD_RES (1059)..(1059): Selenocysteine
  MOD_RES (1061)..(1061): Selenocysteine
  MOD_RES (1068)..(1068): Selenocysteine
MDDKASVGKISVSSDSVSXLNSEDFVLVSRQGDEXPSXNNGSDDEKXGLKIVGNGSEQQLQKELADVLMDPPMDDQPGEKELVKRSQLDGEGDGPLSNQLSASSXINPVPLVGLQKPEMSLPVKPGQGDSEASSPFXPVADEDSVVFSKLXYLGCASVNAPRSEVEALRMMSILRSQCQISLDVXLSVPNVSEGIVRLLDPQXNXEIANYPIYKILFCVRGHDGXPESDCFAFXESHYNAELFRIHVFRCEIQEAVSRILYSFAXAFRRSAKQXPLSAXAAPQXPDSDIFXFSVSLEIKEDDGKGYFSAVPKDKDRQCFKLRQGIDKKIVIYVQQXXNKELAIERCFGLLLSPGKDVRNSDMHLLDLESMGKSSDGKSYVIXGSWNPKSPHFQVVNEEXPKDKVLFMXXAVDLVIXEVQEPVRFLLEXKVRVCSPNERLFWPFSKRSXXENFFLKLKQIKQRERKNNXDXLYEVVCLESESERERRKXXASPSVRLPQSGSQSSVIPSPPEDDEEEDNDEPLLSGSGDVSKECAEKILEXWGELLSKWHLNLNVRPKQLSSLVRNGVPEALRGEVWQLLAGCHNNDHLVEKYRILIXKESPQDSAIXRDINRXFPAHDYFKDXGGDGQDSLYKICKAYSVYDEEIGYCQGQSFLAAVLLLHMPEEQAFSVLVKIMFDYGLRELFKQNFEDLHCKFYQLERLMQEYIPDLYNHFLDISLEAHMYASQWFLXLFXAKFPLYMVFHIIDLLLCEGISVIFNVALGLLKXSKDDLLLXDFEGALKFFRVQLPKRYRSEENAKKLMELACNMKISQKKLKKYEKEYHXMREQQAQQEDPIERFERENRRLQEANMRLEQENDDLAHELVXSKIALRKDLDNAEEKADALNKELLMXKQKLIDAEEEKRRLEEESAQLKEMCRRELDKAESEIKKNSSIIGDYKQICSQLSERLEKQQXANKVEIEKIRQKVDDCERCREFFNKEGRVKGISSXKEVLDEDXDEEKEXLKNQLREMELELAQXKLQLVEAECKIQDLEHHLGLALNEVQAAKKXWFNRXLSSIKXAXGVQGKEXC

SEQ ID NO: 22494 - protein, 599 aa, Homo sapiens
  MOD_RES (37)..(37): Selenocysteine
  MOD_RES (69)..(69): Selenocysteine
  MOD_RES (83)..(83): Selenocysteine
  MOD_RES (117)..(117): Selenocysteine
  MOD_RES (135)..(135): Selenocysteine
  MOD_RES (137)..(137): Selenocysteine
  MOD_RES (157)..(157): Selenocysteine
  MOD_RES (166)..(166): Selenocysteine
  MOD_RES (197)..(197): Selenocysteine
  MOD_RES (206)..(206): Selenocysteine
  MOD_RES (211)..(211): Selenocysteine
  MOD_RES (216)..(216): Selenocysteine
  MOD_RES (223)..(223): Selenocysteine
  MOD_RES (268)..(269): Selenocysteine
  MOD_RES (314)..(314): Selenocysteine
  MOD_RES (331)..(331): Selenocysteine
  MOD_RES (340)..(341): Selenocysteine
  MOD_RES (348)..(348): Selenocysteine
  MOD_RES (360)..(360): Selenocysteine
  MOD_RES (380)..(381): Selenocysteine
  MOD_RES (400)..(400): Selenocysteine
  MOD_RES (402)..(402): Selenocysteine
  MOD_RES (420)..(421): Selenocysteine
  MOD_RES (472)..(472): Selenocysteine
  MOD_RES (529)..(529): Selenocysteine
  MOD_RES (539)..(539): Selenocysteine
  MOD_RES (545)..(545): Selenocysteine
  MOD_RES (555)..(555): Selenocysteine
  MOD_RES (585)..(585): Selenocysteine
MDPPMDDQPGEKELVKRSQLDGEGDGPLSNQLSASSXINPVPLVGLQKPEMSLPVKPGQGDSEASSPFXPVADEDSVVFSKLXYLGCASVNAPRSEVEALRMMSILRSQCQISLDVXLSVPNVSEGIVRLLDPQXNXEIANYPIYKILFCVRGHDGXPESDCFAFXESHYNAELFRIHVFRCEIQEAVSRILYSFAXAFRRSAKQXPLSAXAAPQXPDSDIFXFSVSLEIKEDDGKGYFSAVPKDKDRQCFKLRQGIDKKIVIYVQQXXNKELAIERCFGLLLSPGKDVRNSDMHLLDLESMGKSSDGKSYVIXGSWNPKSPHFQVVNEEXPKDKVLFMXXAVDLVIXEVQEPVRFLLEXKVRVCSPNERLFWPFSKRSXXENFFLKLKQIKQRERKNNXDXLYEVVCLESESERERRKXXASPSVRLPQSGSQSSVIPSPPEDDEEEDNDEPLLSGSGDVSKECAEKILEXWGELLSKWHLNLNVRPKQLSSLVRNGVPEALRGEVWQLLAGCHNNDHLVEKYRILIXKESPQDSAIXRDINRXFPAHDYFKDXGGDGQDSLYKICKVFHVKKKKDSILSGGSXLKLHKKQLQSVICI

SEQ ID NO: 22495 - protein, 504 aa, Homo sapiens
  MOD_RES (95)..(95): Selenocysteine
  MOD_RES (104)..(104): Selenocysteine
  MOD_RES (108)..(108): Selenocysteine
  MOD_RES (112)..(113): Selenocysteine
  MOD_RES (144)..(144): Selenocysteine
  MOD_RES (148)..(148): Selenocysteine
  MOD_RES (161)..(161): Selenocysteine
  MOD_RES (165)..(165): Selenocysteine
  MOD_RES (173)..(173): Selenocysteine
  MOD_RES (208)..(208): Selenocysteine
  MOD_RES (230)..(230): Selenocysteine
  MOD_RES (241)..(242): Selenocysteine
  MOD_RES (262)..(262): Selenocysteine
  MOD_RES (286)..(286): Selenocysteine
  MOD_RES (305)..(305): Selenocysteine
  MOD_RES (318)..(318): Selenocysteine
  MOD_RES (331)..(331): Selenocysteine
  MOD_RES (352)..(352): Selenocysteine
  MOD_RES (362)..(362): Selenocysteine
  MOD_RES (370)..(370): Selenocysteine
  MOD_RES (402)..(402): Selenocysteine
  MOD_RES (455)..(455): Selenocysteine
MASSYHEVVSRKKMSLKSERRGIHVDQSDLLCKKGCGYYGNPAWQGFCSKCWREEYHKARQKQIQEDWELAERLQREEEEAFASSQSSQGAQSLXFSKFEEKKXNEKXRKVXXVKKFFSASSRVGSKKEIQEAKAPSPSINRQXSIEXDRVSKEFIEFLKXFHKXGQEIYKQXKLFLEGMHYKRDLSIEEQSECAQDFYHNVAERMQXRGKVPPERVEKIMDQIEKYIMXRLYKYVFCPEXXDDEKKDLAIQKRIRALRWVXPQMLCVPVNEDIPEVSDMVVKAIXDIIEMDSKRVPRDKLACIXKCSKHIFNAIKIXKNEPASADDFLPXLIYIVLKGNPPRLQSNIQYIXRFCNPSRLMXGEDGYYFXNLCCAVAFIEKLDAQSLNLSQEDFDRYMSGQXSPRKQEAESWSPDACLGVKQMYKNLDLLSQLNERQERIMNEAKKLEKDLIDWXDGIAREVQDIVEKYPLEIKPPNQPLAAIDSENVENDKLPPPLQPQVYAG

SEQ ID NO: 22496 - protein, 505 aa, Homo sapiens
  MOD_RES (96)..(96): Selenocysteine
  MOD_RES (105)..(105): Selenocysteine
  MOD_RES (109)..(109): Selenocysteine
  MOD_RES (113)..(114): Selenocysteine
  MOD_RES (145)..(145): Selenocysteine
  MOD_RES (149)..(149): Selenocysteine
  MOD_RES (162)..(162): Selenocysteine
  MOD_RES (166)..(166): Selenocysteine
  MOD_RES (174)..(174): Selenocysteine
  MOD_RES (209)..(209): Selenocysteine
  MOD_RES (231)..(231): Selenocysteine
  MOD_RES (242)..(243): Selenocysteine
  MOD_RES (263)..(263): Selenocysteine
  MOD_RES (287)..(287): Selenocysteine
  MOD_RES (306)..(306): Selenocysteine
  MOD_RES (319)..(319): Selenocysteine
  MOD_RES (332)..(332): Selenocysteine
  MOD_RES (353)..(353): Selenocysteine
  MOD_RES (363)..(363): Selenocysteine
  MOD_RES (371)..(371): Selenocysteine
  MOD_RES (403)..(403): Selenocysteine
  MOD_RES (456)..(456): Selenocysteine
MMASSYHEVVSRKKMSLKSERRGIHVDQSDLLCKKGCGYYGNPAWQGFCSKCWREEYHKARQKQIQEDWELAERLQREEEEAFASSQSSQGAQSLXFSKFEEKKXNEKXRKVXXVKKFFSASSRVGSKKEIQEAKAPSPSINRQXSIEXDRVSKEFIEFLKXFHKXGQEIYKQXKLFLEGMHYKRDLSIEEQSECAQDFYHNVAERMQXRGKVPPERVEKIMDQIEKYIMXRLYKYVFCPEXXDDEKKDLAIQKRIRALRWVXPQMLCVPVNEDIPEVSDMVVKAIXDIIEMDSKRVPRDKLACIXKCSKHIFNAIKIXKNEPASADDFLPXLIYIVLKGNPPRLQSNIQYIXRFCNPSRLMXGEDGYYFXNLCCAVAFIEKLDAQSLNLSQEDFDRYMSGQXSPRKQEAESWSPDACLGVKQMYKNLDLLSQLNERQERIMNEAKKLEKDLIDWXDGIAREVQDIVEKYPLEIKPPNQPLAAIDSENVENDKLPPPLQPQVYAG

SEQ ID NO: 22497 - protein, 299 aa, Homo sapiens
  MOD_RES (3)..(3): Selenocysteine
  MOD_RES (25)..(25): Selenocysteine
  MOD_RES (36)..(37): Selenocysteine
  MOD_RES (57)..(57): Selenocysteine
  MOD_RES (81)..(81): Selenocysteine
  MOD_RES (100)..(100): Selenocysteine
  MOD_RES (113)..(113): Selenocysteine
  MOD_RES (126)..(126): Selenocysteine
  MOD_RES (147)..(147): Selenocysteine
  MOD_RES (157)..(157): Selenocysteine
  MOD_RES (165)..(165): Selenocysteine
  MOD_RES (197)..(197): Selenocysteine
  MOD_RES (250)..(250): Selenocysteine
MQXRGKVPPERVEKIMDQIEKYIMXRLYKYVFCPEXXDDEKKDLAIQKRIRALRWVXPQMLCVPVNEDIPEVSDMVVKAIXDIIEMDSKRVPRDKLACIXKCSKHIFNAIKIXKNEPASADDFLPXLIYIVLKGNPPRLQSNIQYIXRFCNPSRLMXGEDGYYFXNLCCAVAFIEKLDAQSLNLSQEDFDRYMSGQXSPRKQEAESWSPDACLGVKQMYKNLDLLSQLNERQERIMNEAKKLEKDLIDWXDGIAREVQDIVEKYPLEIKPPNQPLAAIDSENVENDKLPPPLQPQVYAG

SEQ ID NO: 22498 - protein, 45 aa, Homo sapiens
MSLKSERRGIHVDQSDLLCKKGCGYYGNPAWQGFCSKCWREEYHK

SEQ ID NO: 22499 - protein, 491 aa, Homo sapiens
  MOD_RES (82)..(82): Selenocysteine
  MOD_RES (91)..(91): Selenocysteine
  MOD_RES (95)..(95): Selenocysteine
  MOD_RES (99)..(100): Selenocysteine
  MOD_RES (131)..(131): Selenocysteine
  MOD_RES (135)..(135): Selenocysteine
  MOD_RES (148)..(148): Selenocysteine
  MOD_RES (152)..(152): Selenocysteine
  MOD_RES (160)..(160): Selenocysteine
  MOD_RES (195)..(195): Selenocysteine
  MOD_RES (217)..(217): Selenocysteine
  MOD_RES (228)..(229): Selenocysteine
  MOD_RES (249)..(249): Selenocysteine
  MOD_RES (273)..(273): Selenocysteine
  MOD_RES (292)..(292): Selenocysteine
  MOD_RES (305)..(305): Selenocysteine
  MOD_RES (318)..(318): Selenocysteine
  MOD_RES (339)..(339): Selenocysteine
  MOD_RES (349)..(349): Selenocysteine
  MOD_RES (357)..(357): Selenocysteine
  MOD_RES (389)..(389): Selenocysteine
  MOD_RES (442)..(442): Selenocysteine
MSLKSERRGIHVDQSDLLCKKGCGYYGNPAWQGFCSKCWREEYHKARQKQIQEDWELAERLQREEEEAFASSQSSQGAQSLXFSKFEEKKXNEKXRKVXXVKKFFSASSRVGSKKEIQEAKAPSPSINRQXSIEXDRVSKEFIEFLKXFHKXGQEIYKQXKLFLEGMHYKRDLSIEEQSECAQDFYHNVAERMQXRGKVPPERVEKIMDQIEKYIMXRLYKYVFCPEXXDDEKKDLAIQKRIRALRWVXPQMLCVPVNEDIPEVSDMVVKAIXDIIEMDSKRVPRDKLACIXKCSKHIFNAIKIXKNEPASADDFLPXLIYIVLKGNPPRLQSNIQYIXRFCNPSRLMXGEDGYYFXNLCCAVAFIEKLDAQSLNLSQEDFDRYMSGQXSPRKQEAESWSPDACLGVKQMYKNLDLLSQLNERQERIMNEAKKLEKDLIDWXDGIAREVQDIVEKYPLEIKPPNQPLAAIDSENVENDKLPPPLQPQVYAG

SEQ ID NO: 22500 - protein, 119 aa, Homo sapiens
  MOD_RES (82)..(82): Selenocysteine
  MOD_RES (91)..(91): Selenocysteine
  MOD_RES (95)..(95): Selenocysteine
  MOD_RES (99)..(100): Selenocysteine
MSLKSERRGIHVDQSDLLCKKGCGYYGNPAWQGFCSKCWREEYHKARQKQIQEDWELAERLQREEEEAFASSQSSQGAQSLXFSKFEEKKXNEKXRKVXXVKKFFSASSRVGSKKGSKH

SEQ ID NO: 22501 - protein, 407 aa, Homo sapiens
  MOD_RES (82)..(82): Selenocysteine
  MOD_RES (91)..(91): Selenocysteine
  MOD_RES (95)..(95): Selenocysteine
  MOD_RES (99)..(100): Selenocysteine
  MOD_RES (133)..(133): Selenocysteine
  MOD_RES (144)..(145): Selenocysteine
  MOD_RES (165)..(165): Selenocysteine
  MOD_RES (189)..(189): Selenocysteine
  MOD_RES (208)..(208): Selenocysteine
  MOD_RES (221)..(221): Selenocysteine
  MOD_RES (234)..(234): Selenocysteine
  MOD_RES (255)..(255): Selenocysteine
  MOD_RES (265)..(265): Selenocysteine
  MOD_RES (273)..(273): Selenocysteine
  MOD_RES (305)..(305): Selenocysteine
  MOD_RES (358)..(358): Selenocysteine
MSLKSERRGIHVDQSDLLCKKGCGYYGNPAWQGFCSKCWREEYHKARQKQIQEDWELAERLQREEEEAFASSQSSQGAQSLXFSKFEEKKXNEKXRKVXXVKKFFSASSRVGSKKPPERVEKIMDQIEKYIMXRLYKYVFCPEXXDDEKKDLAIQKRIRALRWVXPQMLCVPVNEDIPEVSDMVVKAIXDIIEMDSKRVPRDKLACIXKCSKHIFNAIKIXKNEPASADDFLPXLIYIVLKGNPPRLQSNIQYIXRFCNPSRLMXGEDGYYFXNLCCAVAFIEKLDAQSLNLSQEDFDRYMSGQXSPRKQEAESWSPDACLGVKQMYKNLDLLSQLNERQERIMNEAKKLEKDLIDWXDGIAREVQDIVEKYPLEIKPPNQPLAAIDSENVENDKLPPPLQPQVYAG

SEQ ID NO: 22502 - protein, 123 aa, Homo sapiens
  MOD_RES (35)..(35): Selenocysteine
  MOD_RES (83)..(83): Selenocysteine
MEPAEQPSELVSAEGRNRKAVLCQRCGSRVLQPGXALFSRRQLFLPSMRKKPALSDGSNPDGDLLQEHWLVEDMFIFENVGFXKDVGNIKFLVCADCEIGPIGWHCLDDKNSFYVALERVSHE

SEQ ID NO: 22503 - protein, 54 aa, Homo sapiens
  MOD_RES (6)..(6): Selenocysteine
  MOD_RES (53)..(53): Selenocysteine
MAEDKXKPSELDQGKYDADDNVKIICLGDSAVGKSKLMERFLMDGFHSSCPRXP

SEQ ID NO: 22504 - protein, 165 aa, Homo sapiens
  MOD_RES (6)..(6): Selenocysteine
  MOD_RES (53)..(53): Selenocysteine
  MOD_RES (57)..(57): Selenocysteine
  MOD_RES (62)..(62): Selenocysteine
  MOD_RES (64)..(64): Selenocysteine
  MOD_RES (69)..(69): Selenocysteine
  MOD_RES (78)..(78): Selenocysteine
  MOD_RES (101)..(101): Selenocysteine
  MOD_RES (155)..(155): Selenocysteine
MAEDKXKPSELDQGKYDADDNVKIICLGDSAVGKSKLMERFLMDGFQPQQLSXYALXLYKHXAXVDGKXILVADINVXQKSFNFAKKFSLPLYFVSAADGXNVVKLFNDAIRLAVSYKQNSQDFMDEIFQELENFSLEQEEEDVPDQEQSSSIEXPSEEVASPHS

SEQ ID NO: 22505 - protein, 101 aa, Homo sapiens
  MOD_RES (6)..(6): Selenocysteine
  MOD_RES (53)..(53): Selenocysteine
  MOD_RES (57)..(57): Selenocysteine
  MOD_RES (62)..(62): Selenocysteine
  MOD_RES (64)..(64): Selenocysteine
  MOD_RES (69)..(69): Selenocysteine
  MOD_RES (77)..(77): Selenocysteine
  MOD_RES (101)..(101): Selenocysteine
MAEDKXKPSELDQGKYDADDNVKIICLGDSAVGKSKLMERFLMDGFQPQQLSXYALXLYKHXAXVDGKXILVDFWDXAGQERFQSMHASYYHKAHACIMQX

SEQ ID NO: 22506 - protein, 114 aa, Homo sapiens
  MOD_RES (6)..(6): Selenocysteine
  MOD_RES (53)..(53): Selenocysteine
  MOD_RES (57)..(57): Selenocysteine
  MOD_RES (62)..(62): Selenocysteine
  MOD_RES (64)..(64): Selenocysteine
  MOD_RES (69)..(69): Selenocysteine
  MOD_RES (77)..(77): Selenocysteine
  MOD_RES (108)..(108): Selenocysteine
  MOD_RES (114)..(114): Selenocysteine
MAEDKXKPSELDQGKYDADDNVKIICLGDSAVGKSKLMERFLMDGFQPQQLSXYALXLYKHXAXVDGKXILVDFWDXAGQERFQSMHASYYHKAHACIMVFDIQRKVXYRNLSX

SEQ ID NO: 22507 - protein, 229 aa, Homo sapiens
  MOD_RES (6)..(6): Selenocysteine
  MOD_RES (53)..(53): Selenocysteine
  MOD_RES (57)..(57): Selenocysteine
  MOD_RES (62)..(62): Selenocysteine
  MOD_RES (64)..(64): Selenocysteine
  MOD_RES (69)..(69): Selenocysteine
  MOD_RES (77)..(77): Selenocysteine
  MOD_RES (108)..(108): Selenocysteine
  MOD_RES (114)..(114): Selenocysteine
  MOD_RES (117)..(117): Selenocysteine
  MOD_RES (142)..(142): Selenocysteine
  MOD_RES (165)..(165): Selenocysteine
  MOD_RES (219)..(219): Selenocysteine
MAEDKXKPSELDQGKYDADDNVKIICLGDSAVGKSKLMERFLMDGFQPQQLSXYALXLYKHXAXVDGKXILVDFWDXAGQERFQSMHASYYHKAHACIMVFDIQRKVXYRNLSXWYXELREFRPEIPCIVVANKIDADINVXQKSFNFAKKFSLPLYFVSAADGXNVVKLFNDAIRLAVSYKQNSQDFMDEIFQELENFSLEQEEEDVPDQEQSSSIEXPSEEVASPHS

SEQ ID NO: 22508 - protein, 228 aa, Homo sapiens
  MOD_RES (6)..(6): Selenocysteine
  MOD_RES (53)..(53): Selenocysteine
  MOD_RES (57)..(57): Selenocysteine
  MOD_RES (62)..(62): Selenocysteine
  MOD_RES (64)..(64): Selenocysteine
  MOD_RES (69)..(69): Selenocysteine
  MOD_RES (77)..(77): Selenocysteine
  MOD_RES (108)..(108): Selenocysteine
  MOD_RES (114)..(114): Selenocysteine
  MOD_RES (117)..(117): Selenocysteine
  MOD_RES (141)..(141): Selenocysteine
  MOD_RES (164)..(164): Selenocysteine
  MOD_RES (218)..(218): Selenocysteine
MAEDKXKPSELDQGKYDADDNVKIICLGDSAVGKSKLMERFLMDGFQPQQLSXYALXLYKHXAXVDGKXILVDFWDXAGQERFQSMHASYYHKAHACIMVFDIQRKVXYRNLSXWYXELREFRPEIPCIVVANKIDDINVXQKSFNFAKKFSLPLYFVSAADGXNVVKLFNDAIRLAVSYKQNSQDFMDEIFQELENFSLEQEEEDVPDQEQSSSIEXPSEEVASPHS

SEQ ID NO: 22509 - protein, 238 aa, Homo sapiens
  MOD_RES (6)..(6): Selenocysteine
  MOD_RES (53)..(53): Selenocysteine
  MOD_RES (57)..(57): Selenocysteine
  MOD_RES (62)..(62): Selenocysteine
  MOD_RES (64)..(64): Selenocysteine
  MOD_RES (69)..(69): Selenocysteine
  MOD_RES (77)..(77): Selenocysteine
  MOD_RES (108)..(108): Selenocysteine
  MOD_RES (114)..(114): Selenocysteine
  MOD_RES (117)..(117): Selenocysteine
  MOD_RES (141)..(141): Selenocysteine
  MOD_RES (164)..(164): Selenocysteine
  MOD_RES (172)..(172): Selenocysteine
  MOD_RES (228)..(228): Selenocysteine
MAEDKXKPSELDQGKYDADDNVKIICLGDSAVGKSKLMERFLMDGFQPQQLSXYALXLYKHXAXVDGKXILVDFWDXAGQERFQSMHASYYHKAHACIMVFDIQRKVXYRNLSXWYXELREFRPEIPCIVVANKIDDINVXQKSFNFAKKFSLPLYFVSAADGXNVVKVWLXAEVASKLFNDAIRLAVSYKQNSQDFMDEIFQELENFSLEQEEEDVPDQEQSSSIEXPSEEVASPHS

SEQ ID NO: 22510 - protein, 20 aa, Homo sapiens
  MOD_RES (6)..(6): Selenocysteine
MAEDKXKPSELDQGKYDADD

SEQ ID NO: 22511 - protein, 39 aa, Homo sapiens
  MOD_RES (6)..(6): Selenocysteine
MAEDKXKPSELDQGKYDADDNVKIICLGDSAVGKSKHNN

SEQ ID NO: 22512 - protein, 165 aa, Homo sapiens
  MOD_RES (6)..(6): Selenocysteine
  MOD_RES (53)..(53): Selenocysteine
  MOD_RES (57)..(57): Selenocysteine
  MOD_RES (62)..(62): Selenocysteine
  MOD_RES (64)..(64): Selenocysteine
  MOD_RES (69)..(69): Selenocysteine
  MOD_RES (78)..(78): Selenocysteine
  MOD_RES (101)..(101): Selenocysteine
  MOD_RES (155)..(155): Selenocysteine
MAEDKXKPSELDQGKYDADDNVKIICLGDSAVGKSKLMERFLMDGFQPQQLSXYALXLYKHXAXVDGRXILVADINVXQKSFNFAKKFSLPLYFVSAADGXNVVKLFNDAIRLAVSYKQNSQDFMDEIFQELENFSLEQEEEDVPDQEQSSSIEXPSEEAASPHS

SEQ ID NO: 22513 - protein, 99 aa, Homo sapiens
  MOD_RES (6)..(6): Selenocysteine
  MOD_RES (53)..(53): Selenocysteine
  MOD_RES (57)..(57): Selenocysteine
  MOD_RES (62)..(62): Selenocysteine
  MOD_RES (64)..(64): Selenocysteine
  MOD_RES (69)..(69): Selenocysteine
  MOD_RES (77)..(77): Selenocysteine
MAEDKXKPSELDQGKYDADDNVKIICLGDSAVGKSKLMERFLMDGFQPQQLSXYALXLYKHXAXVDGRXILVDFWDXAGQERFQSMHASYYHKAHACIM

SEQ ID NO: 22514 - protein, 101 aa, Homo sapiens
  MOD_RES (6)..(6): Selenocysteine
  MOD_RES (53)..(53): Selenocysteine
  MOD_RES (57)..(57): Selenocysteine
  MOD_RES (62)..(62): Selenocysteine
  MOD_RES (64)..(64): Selenocysteine
  MOD_RES (69)..(69): Selenocysteine
  MOD_RES (77)..(77): Selenocysteine
  MOD_RES (101)..(101): Selenocysteine
MAEDKXKPSELDQGKYDADDNVKIICLGDSAVGKSKLMERFLMDGFQPQQLSXYALXLYKHXAXVDGRXILVDFWDXAGQERFQSMHASYYHKAHACIMQX

SEQ ID NO: 22515 - protein, 229 aa, Homo sapiens
  MOD_RES (6)..(6): Selenocysteine
  MOD_RES (53)..(53): Selenocysteine
  MOD_RES (57)..(57): Selenocysteine
  MOD_RES (62)..(62): Selenocysteine
  MOD_RES (64)..(64): Selenocysteine
  MOD_RES (69)..(69): Selenocysteine
  MOD_RES (77)..(77): Selenocysteine
  MOD_RES (108)..(108): Selenocysteine
  MOD_RES (114)..(114): Selenocysteine
  MOD_RES (117)..(117): Selenocysteine
  MOD_RES (142)..(142): Selenocysteine
  MOD_RES (165)..(165): Selenocysteine
  MOD_RES (219)..(219): Selenocysteine
MAEDKXKPSELDQGKYDADDNVKIICLGDSAVGKSKLMERFLMDGFQPQQLSXYALXLYKHXAXVDGRXILVDFWDXAGQERFQSMHASYYHKAHACIMVFDVQRKVXYRNLSXWYXELREFRPEIPCIVVANKIDADINVXQKSFNFAKKFSLPLYFVSAADGXNVVKLFNDAIRLAVSYKQNSQDFMDEIFQELENFSLEQEEEDVPDQEQSSSIEXPSEEAASPHS

SEQ ID NO: 22516 - protein, 228 aa, Homo sapiens
  MOD_RES (6)..(6): Selenocysteine
  MOD_RES (53)..(53): Selenocysteine
  MOD_RES (57)..(57): Selenocysteine
  MOD_RES (62)..(62): Selenocysteine
  MOD_RES (64)..(64): Selenocysteine
  MOD_RES (69)..(69): Selenocysteine
  MOD_RES (77)..(77): Selenocysteine
  MOD_RES (108)..(108): Selenocysteine
  MOD_RES (114)..(114): Selenocysteine
  MOD_RES (117)..(117): Selenocysteine
  MOD_RES (141)..(141): Selenocysteine
  MOD_RES (164)..(164): Selenocysteine
  MOD_RES (218)..(218): Selenocysteine
MAEDKXKPSELDQGKYDADDNVKIICLGDSAVGKSKLMERFLMDGFQPQQLSXYALXLYKHXAXVDGRXILVDFWDXAGQERFQSMHASYYHKAHACIMVFDVQRKVXYRNLSXWYXELREFRPEIPCIVVANKIDDINVXQKSFNFAKKFSLPLYFVSAADGXNVVKLFNDAIRLAVSYKQNSQDFMDEIFQELENFSLEQEEEDVPDQEQSSSIEXPSEEAASPHS

SEQ ID NO: 22517 - protein, 238 aa, Homo sapiens
  MOD_RES (6)..(6): Selenocysteine
  MOD_RES (53)..(53): Selenocysteine
  MOD_RES (57)..(57): Selenocysteine
  MOD_RES (62)..(62): Selenocysteine
  MOD_RES (64)..(64): Selenocysteine
  MOD_RES (69)..(69): Selenocysteine
  MOD_RES (77)..(77): Selenocysteine
  MOD_RES (108)..(108): Selenocysteine
  MOD_RES (114)..(114): Selenocysteine
  MOD_RES (117)..(117): Selenocysteine
  MOD_RES (141)..(141): Selenocysteine
  MOD_RES (164)..(164): Selenocysteine
  MOD_RES (172)..(172): Selenocysteine
  MOD_RES (228)..(228): Selenocysteine
MAEDKXKPSELDQGKYDADDNVKIICLGDSAVGKSKLMERFLMDGFQPQQLSXYALXLYKHXAXVDGRXILVDFWDXAGQERFQSMHASYYHKAHACIMVFDVQRKVXYRNLSXWYXELREFRPEIPCIVVANKIDDINVXQKSFNFAKKFSLPLYFVSAADGXNVVKVWLXAEVASKLFNDAIRLAVSYKQNSQDFMDEIFQELENFSLEQEEEDVPDQEQSSSIEXPSEEAASPHS

SEQ ID NO: 22518 - protein, 129 aa, Homo sapiens
  MOD_RES (38)..(38): Selenocysteine
  MOD_RES (54)..(54): Selenocysteine
  MOD_RES (59)..(59): Selenocysteine
  MOD_RES (80)..(80): Selenocysteine
  MOD_RES (98)..(98): Selenocysteine
  MOD_RES (121)..(121): Selenocysteine
  MOD_RES (126)..(126): Selenocysteine
MASLDRVKVLVLGDSGVGKSSLVHLLCQNQVLGNPSWXVGCSVDVRVHDYKEGXPEEKXYYIELWDVGGSVGSASSVKSXRAVFYNSVNGIIFVHDLXNKKSSQNLRRWSLEALNRDLVPXGVLVXNGD

SEQ ID NO: 22519 - protein, 236 aa, Homo sapiens
  MOD_RES (38)..(38): Selenocysteine
  MOD_RES (54)..(54): Selenocysteine
  MOD_RES (59)..(59): Selenocysteine
  MOD_RES (80)..(80): Selenocysteine
  MOD_RES (98)..(98): Selenocysteine
  MOD_RES (121)..(121): Selenocysteine
  MOD_RES (126)..(126): Selenocysteine
  MOD_RES (147)..(147): Selenocysteine
  MOD_RES (155)..(155): Selenocysteine
  MOD_RES (162)..(162): Selenocysteine
  MOD_RES (164)..(164): Selenocysteine
  MOD_RES (181)..(181): Selenocysteine
  MOD_RES (229)..(229): Selenocysteine
MASLDRVKVLVLGDSGVGKSSLVHLLCQNQVLGNPSWXVGCSVDVRVHDYKEGXPEEKXYYIELWDVGGSVGSASSVKSXRAVFYNSVNGIIFVHDLXNKKSSQNLRRWSLEALNRDLVPXGVLVXNGDYDQEQFADNQIPLLVIGXKLDQIHEXKRHEVLXRXAFLAEDFNPEEINLDCXNPRYLAAGSSNAVKLSRFFDKVIEKRYFLREGNQIPGFPDRKRFGAGXLKSLHYD

SEQ ID NO: 22520 - protein, 212 aa, Homo sapiens
  MOD_RES (38)..(38): Selenocysteine
  MOD_RES (54)..(54): Selenocysteine
  MOD_RES (59)..(59): Selenocysteine
  MOD_RES (80)..(80): Selenocysteine
  MOD_RES (98)..(98): Selenocysteine
  MOD_RES (121)..(121): Selenocysteine
  MOD_RES (126)..(126): Selenocysteine
  MOD_RES (147)..(147): Selenocysteine
  MOD_RES (155)..(155): Selenocysteine
  MOD_RES (162)..(162): Selenocysteine
  MOD_RES (164)..(164): Selenocysteine
  MOD_RES (205)..(205): Selenocysteine
MASLDRVKVLVLGDSGVGKSSLVHLLCQNQVLGNPSWXVGCSVDVRVHDYKEGXPEEKXYYIELWDVGGSVGSASSVKSXRAVFYNSVNGIIFVHDLXNKKSSQNLRRWSLEALNRDLVPXGVLVXNGDYDQEQFADNQIPLLVIGXKLDQIHEXKRHEVLXRXAFLAEDFNPEEINLVIEKRYFLREGNQIPGFPDRKRFGAGXLKSLHYD

SEQ ID NO: 22521 - protein, 135 aa, Homo sapiens
  MOD_RES (38)..(38): Selenocysteine
  MOD_RES (54)..(54): Selenocysteine
  MOD_RES (59)..(59): Selenocysteine
  MOD_RES (80)..(80): Selenocysteine
  MOD_RES (98)..(98): Selenocysteine
  MOD_RES (121)..(121): Selenocysteine
  MOD_RES (126)..(126): Selenocysteine
  MOD_RES (129)..(129): Selenocysteine
  MOD_RES (135)..(135): Selenocysteine
MASLDRVKVLVLGDSGVGKSSLVHLLCQNQVLGNPSWXVGCSVDVRVHDYKEGXPEEKXYYIELWDVGGSVGSASSVKSXRAVFYNSVNGIIFVHDLXNKKSSQNLRRWSLEALNRDLVPXGVLVXNGXAQIHGX

SEQ ID NO: 22522 - protein, 53 aa, Homo sapiens
  MOD_RES (38)..(38): Selenocysteine
  MOD_RES (52)..(53): Selenocysteine
MASLDRVKVLVLGDSGVGKSSLVHLLCQNQVLGNPSWXVGCSVDVRVLFSYXX

SEQ ID NO: 22523 - protein, 53 aa, Homo sapiens
  MOD_RES (1)..(1): Any amino acid
  MOD_RES (38)..(38): Selenocysteine
  MOD_RES (52)..(53): Selenocysteine
XASLDRVKVLVLGDSGVGKSSLVHLLCQNQVLGNPSWXVGCSVDVRVLFSYXX

SEQ ID NO: 22524 - protein, 314 aa, Homo sapiens
  MOD_RES (54)..(54): Selenocysteine
  MOD_RES (57)..(57): Selenocysteine
  MOD_RES (75)..(75): Selenocysteine
  MOD_RES (81)..(81): Selenocysteine
  MOD_RES (89)..(90): Selenocysteine
  MOD_RES (150)..(150): Selenocysteine
  MOD_RES (154)..(154): Selenocysteine
  MOD_RES (167)..(167): Selenocysteine
  MOD_RES (277)..(277): Selenocysteine
MFSALKKLVGSDQAPGRDKNIPAGLQSMNQALQRRFAKGVQYNMKIVIRGDRNXGKXALWHRLQGRPFVEEYIPXQEIQVXSIHWSYKXXDDIVKVEVWDVVDKGKCKKRGDGLKMENDPQEAESEMALDAEFLDVYKNCNGVVMMFDIXKQWXFNYILRELPKVPXHVPVCVLGNYRDMGEHRVILPDDVRDFIDNLDRPPGSSYFRYAESSMKNSFGLKYLHKFFNIPFLQLQKDVRLAQERGCAVVLVSEEVRMPAGWDCCWGRLGWKEGGSQXCPVPALLGRPLLPAEPSPHHWVDYSLESSPLLSCSIP

SEQ ID NO: 22525 - protein, 484 aa, Homo sapiens
  MOD_RES (54)..(54): Selenocysteine
  MOD_RES (57)..(57): Selenocysteine
  MOD_RES (75)..(75): Selenocysteine
  MOD_RES (81)..(81): Selenocysteine
  MOD_RES (89)..(90): Selenocysteine
  MOD_RES (150)..(150): Selenocysteine
  MOD_RES (154)..(154): Selenocysteine
  MOD_RES (167)..(167): Selenocysteine
  MOD_RES (238)..(238): Selenocysteine
  MOD_RES (245)..(245): Selenocysteine
  MOD_RES (253)..(253): Selenocysteine
  MOD_RES (263)..(263): Selenocysteine
  MOD_RES (309)..(309): Selenocysteine
  MOD_RES (316)..(316): Selenocysteine
  MOD_RES (364)..(364): Selenocysteine
  MOD_RES (368)..(368): Selenocysteine
  MOD_RES (386)..(386): Selenocysteine
  MOD_RES (407)..(408): Selenocysteine
  MOD_RES (443)..(443): Selenocysteine
  MOD_RES (459)..(459): Selenocysteine
  MOD_RES (461)..(461): Selenocysteine
  MOD_RES (468)..(468): Selenocysteine
  MOD_RES (475)..(475): Selenocysteine
  MOD_RES (481)..(481): Selenocysteine
MFSALKKLVGSDQAPGRDKNIPAGLQSMNQALQRRFAKGVQYNMKIVIRGDRNXGKXALWHRLQGRPFVEEYIPXQEIQVXSIHWSYKXXDDIVKVEVWDVVDKGKCKKRGDGLKMENDPQEAESEMALDAEFLDVYKNCNGVVMMFDIXKQWXFNYILRELPKVPXHVPVCVLGNYRDMGEHRVILPDDVRDFIDNLDRPPGSSYFRYAESSMKNSFGLKYLHKFFNIPFLQLQREXLLRQLEXNQLDMDAXLEELSVQQEXEDQNYGIFLEMMEARSRGHASPLAANGQSPSPGSQSPVVPAGAVSXGSSSPGXPQPAPQLPLNAAPPSSVPPVPPSEALPPPACPSAPAPRRSIISRLFGXSPAXEAAPPPPEPVPAAEGPAXVQSVEDFVPDDRLDRSFLEDXXPARDEKKVRRSAAAPGPLLRWSRGRVSRPPRRRVXPRDPLLHKCCPSSWMXPXLRARDQXHSAGRMXFPCEMXPPM

SEQ ID NO: 22526 - protein, 520 aa, Homo sapiens
  MOD_RES (54)..(54): Selenocysteine
  MOD_RES (57)..(57): Selenocysteine
  MOD_RES (75)..(75): Selenocysteine
  MOD_RES (81)..(81): Selenocysteine
  MOD_RES (89)..(90): Selenocysteine
  MOD_RES (150)..(150): Selenocysteine
  MOD_RES (154)..(154): Selenocysteine
  MOD_RES (167)..(167): Selenocysteine
  MOD_RES (238)..(238): Selenocysteine
  MOD_RES (245)..(245): Selenocysteine
  MOD_RES (253)..(253): Selenocysteine
  MOD_RES (263)..(263): Selenocysteine
  MOD_RES (309)..(309): Selenocysteine
  MOD_RES (316)..(316): Selenocysteine
  MOD_RES (470)..(470): Selenocysteine
MFSALKKLVGSDQAPGRDKNIPAGLQSMNQALQRRFAKGVQYNMKIVIRGDRNXGKXALWHRLQGRPFVEEYIPXQEIQVXSIHWSYKXXDDIVKVEVWDVVDKGKCKKRGDGLKMENDPQEAESEMALDAEFLDVYKNCNGVVMMFDIXKQWXFNYILRELPKVPXHVPVCVLGNYRDMGEHRVILPDDVRDFIDNLDRPPGSSYFRYAESSMKNSFGLKYLHKFFNIPFLQLQREXLLRQLEXNQLDMDAXLEELSVQQEXEDQNYGIFLEMMEARSRGHASPLAANGQSPSPGSQSPVVPAGAVSXGSSSPGXPQPAPQLPLNAAPPSSVPPVPPSEALPPPACPSAPAPRRSIISRPPPWGWRLRGALGRRGQWPPWGGGRACHCLGRHLPLYHRLCRCPVAAVCASELEEAGHWWSPGWALQVLGLQAQCEPALQEGRGQLASARLGGHPGPLGAEPPVFLRDVXEAQEGPVRVCLQRLGRGRLAVGCALPRHLLALRAHLGPQHAYGSASGREP

SEQ ID NO: 22527 - protein, 729 aa, Homo sapiens
  MOD_RES (54)..(54): Selenocysteine
  MOD_RES (57)..(57): Selenocysteine
  MOD_RES (75)..(75): Selenocysteine
  MOD_RES (81)..(81): Selenocysteine
  MOD_RES (89)..(90): Selenocysteine
  MOD_RES (150)..(150): Selenocysteine
  MOD_RES (154)..(154): Selenocysteine
  MOD_RES (167)..(167): Selenocysteine
  MOD_RES (238)..(238): Selenocysteine
  MOD_RES (245)..(245): Selenocysteine
  MOD_RES (253)..(253): Selenocysteine
  MOD_RES (263)..(263): Selenocysteine
  MOD_RES (309)..(309): Selenocysteine
  MOD_RES (316)..(316): Selenocysteine
  MOD_RES (364)..(364): Selenocysteine
  MOD_RES (368)..(368): Selenocysteine
  MOD_RES (386)..(386): Selenocysteine
  MOD_RES (407)..(408): Selenocysteine
  MOD_RES (468)..(468): Selenocysteine
  MOD_RES (481)..(481): Selenocysteine
  MOD_RES (496)..(496): Selenocysteine
  MOD_RES (510)..(510): Selenocysteine
  MOD_RES (513)..(513): Selenocysteine
  MOD_RES (515)..(515): Selenocysteine
  MOD_RES (528)..(528): Selenocysteine
  MOD_RES (536)..(536): Selenocysteine
  MOD_RES (582)..(582): Selenocysteine
  MOD_RES (599)..(599): Selenocysteine
  MOD_RES (649)..(649): Selenocysteine
  MOD_RES (702)..(702): Selenocysteine
MFSALKKLVGSDQAPGRDKNIPAGLQSMNQALQRRFAKGVQYNMKIVIRGDRNXGKXALWHRLQGRPFVEEYIPXQEIQVXSIHWSYKXXDDIVKVEVWDVVDKGKCKKRGDGLKMENDPQEAESEMALDAEFLDVYKNCNGVVMMFDIXKQWXFNYILRELPKVPXHVPVCVLGNYRDMGEHRVILPDDVRDFIDNLDRPPGSSYFRYAESSMKNSFGLKYLHKFFNIPFLQLQREXLLRQLEXNQLDMDAXLEELSVQQEXEDQNYGIFLEMMEARSRGHASPLAANGQSPSPGSQSPVVPAGAVSXGSSSPGXPQPAPQLPLNAAPPSSVPPVPPSEALPPPACPSAPAPRRSIISRLFGXSPAXEAAPPPPEPVPAAEGPAXVQSVEDFVPDDRLDRSFLEDXXPARDEKKVGAKAAQQDSDSDGEALGGNPMVAGFQDDVDLEDQPRGSPPLPAGPVPSQDIXLSSEEEAEVAAPXKGPAPAPQQCSEPEXKWSSIPASKPRRGXAPXRXAAPPWPGGVSVRXGPEKRSSXRPPAEMEPGKGEQASSSESDPEGPIAAQMLSFVMDDPDFESEGSDXQRRADDFPVRDDPSDVXDEDEGPAEPPPPPKLPLPAFRLKNDSDLFGLGLEEAGPKESSEEGKEGKXPSKEKKKKKKKGKEEEEKAAKKKSKHKKSKDKEEGKEERRRRQQRPPRSRERXAADELEAFLGGGAPGGRHPGGGDYEEL

SEQ ID NO: 22528 - protein, 716 aa, Homo sapiens
  MOD_RES (54)..(54): Selenocysteine
  MOD_RES (57)..(57): Selenocysteine
  MOD_RES (75)..(75): Selenocysteine
  MOD_RES (81)..(81): Selenocysteine
  MOD_RES (89)..(90): Selenocysteine
  MOD_RES (150)..(150): Selenocysteine
  MOD_RES (154)..(154): Selenocysteine
  MOD_RES (167)..(167): Selenocysteine
  MOD_RES (239)..(239): Selenocysteine
  MOD_RES (246)..(246): Selenocysteine
  MOD_RES (254)..(254): Selenocysteine
  MOD_RES (264)..(264): Selenocysteine
  MOD_RES (310)..(310): Selenocysteine
  MOD_RES (317)..(317): Selenocysteine
  MOD_RES (365)..(365): Selenocysteine
  MOD_RES (369)..(369): Selenocysteine
  MOD_RES (387)..(387): Selenocysteine
  MOD_RES (408)..(409): Selenocysteine
  MOD_RES (469)..(469): Selenocysteine
  MOD_RES (482)..(482): Selenocysteine
  MOD_RES (497)..(497): Selenocysteine
  MOD_RES (511)..(511): Selenocysteine
  MOD_RES (514)..(514): Selenocysteine
  MOD_RES (516)..(516): Selenocysteine
  MOD_RES (529)..(529): Selenocysteine
  MOD_RES (537)..(537): Selenocysteine
  MOD_RES (583)..(583): Selenocysteine
  MOD_RES (600)..(600): Selenocysteine
  MOD_RES (650)..(650): Selenocysteine
  MOD_RES (703)..(703): Selenocysteine
MFSALKKLVGSDQAPGRDKNIPAGLQSMNQALQRRFAKGVQYNMKIVIRGDRNXGKXALWHRLQGRPFVEEYIPXQEIQVXSIHWSYKXXDDIVKVEVWDVVDKGKCKKRGDGLKMENDPQEAESEMALDAEFLDVYKNCNGVVMMFDIXKQWXFNYILRELPKVPXHVPVCVLGNYRDMGEHRVILPDDVRDFIDNLDSRPPGSSYFRYAESSMKNSFGLKYLHKFFNIPFLQLQREXLLRQLEXNQLDMDAXLEELSVQQEXEDQNYGIFLEMMEARSRGHASPLAANGQSPSPGSQSPVVPAGAVSXGSSSPGXPQPAPQLPLNAAPPSSVPPVPPSEALPPPACPSAPAPRRSIISRLFGXSPAXEAAPPPPEPVPAAEGPAXVQSVEDFVPDDRLDRSFLEDXXPARDEKKVGAKAAQQDSDSDGEALGGNPMVAGFQDDVDLEDQPRGSPPLPAGPVPSQDIXLSSEEEAEVAAPXKGPAPAPQQCSEPEXKWSSIPASKPRRGXAPXRXAAPPWPGGVSVRXGPEKRSSXRPPAEMEPGKGEQASSSESDPEGPIAAQMLSFVMDDPDFESEGSDXQRRADDFPVRDDPSDVXDEDEGPAEPPPPPKLPLPAFRLKNDSDLFGLGLEEAGPKESSEEGKEGKXPSKEKKKKKKKGKEEEEKAAKKKSKHKKSKDKEEGKEERRRRQQRPPRSRERXAADELEAFLGGGA

SEQ ID NO: 22529 - protein, 730 aa, Homo sapiens
  MOD_RES (54)..(54): Selenocysteine
  MOD_RES (57)..(57): Selenocysteine
  MOD_RES (75)..(75): Selenocysteine
  MOD_RES (81)..(81): Selenocysteine
  MOD_RES (89)..(90): Selenocysteine
  MOD_RES (150)..(150): Selenocysteine
  MOD_RES (154)..(154): Selenocysteine
  MOD_RES (167)..(167): Selenocysteine
  MOD_RES (239)..(239): Selenocysteine
  MOD_RES (246)..(246): Selenocysteine
  MOD_RES (254)..(254): Selenocysteine
  MOD_RES (264)..(264): Selenocysteine
  MOD_RES (310)..(310): Selenocysteine
  MOD_RES (317)..(317): Selenocysteine
  MOD_RES (365)..(365): Selenocysteine
  MOD_RES (369)..(369): Selenocysteine
  MOD_RES (387)..(387): Selenocysteine
  MOD_RES (408)..(409): Selenocysteine
  MOD_RES (469)..(469): Selenocysteine
  MOD_RES (482)..(482): Selenocysteine
  MOD_RES (497)..(497): Selenocysteine
  MOD_RES (511)..(511): Selenocysteine
  MOD_RES (514)..(514): Selenocysteine
  MOD_RES (516)..(516): Selenocysteine
  MOD_RES (529)..(529): Selenocysteine
  MOD_RES (537)..(537): Selenocysteine
  MOD_RES (583)..(583): Selenocysteine
  MOD_RES (600)..(600): Selenocysteine
  MOD_RES (650)..(650): Selenocysteine
  MOD_RES (703)..(703): Selenocysteine
MFSALKKLVGSDQAPGRDKNIPAGLQSMNQALQRRFAKGVQYNMKIVIRGDRNXGKXALWHRLQGRPFVEEYIPXQEIQVXSIHWSYKXXDDIVKVEVWDVVDKGKCKKRGDGLKMENDPQEAESEMALDAEFLDVYKNCNGVVMMFDIXKQWXFNYILRELPKVPXHVPVCVLGNYRDMGEHRVILPDDVRDFIDNLDSRPPGSSYFRYAESSMKNSFGLKYLHKFFNIPFLQLQREXLLRQLEXNQLDMDAXLEELSVQQEXEDQNYGIFLEMMEARSRGHASPLAANGQSPSPGSQSPVVPAGAVSXGSSSPGXPQPAPQLPLNAAPPSSVPPVPPSEALPPPACPSAPAPRRSIISRLFGXSPAXEAAPPPPEPVPAAEGPAXVQSVEDFVPDDRLDRSFLEDXXPARDEKKVGAKAAQQDSDSDGEALGGNPMVAGFQDDVDLEDQPRGSPPLPAGPVPSQDIXLSSEEEAEVAAPXKGPAPAPQQCSEPEXKWSSIPASKPRRGXAPXRXAAPPWPGGVSVRXGPEKRSSXRPPAEMEPGKGEQASSSESDPEGPIAAQMLSFVMDDPDFESEGSDXQRRADDFPVRDDPSDVXDEDEGPAEPPPPPKLPLPAFRLKNDSDLFGLGLEEAGPKESSEEGKEGKXPSKEKKKKKKKGKEEEEKAAKKKSKHKKSKDKEEGKEERRRRQQRPPRSRERXAADELEAFLGGGAPGGRHPGGGDYEEL

SEQ ID NO: 22530 - protein, 471 aa, Homo sapiens
  MOD_RES (2)..(2): Selenocysteine
  MOD_RES (5)..(5): Selenocysteine
  MOD_RES (16)..(16): Selenocysteine
  MOD_RES (19)..(19): Selenocysteine
  MOD_RES (37)..(37): Selenocysteine
  MOD_RES (43)..(43): Selenocysteine
  MOD_RES (51)..(52): Selenocysteine
  MOD_RES (112)..(112): Selenocysteine
  MOD_RES (116)..(116): Selenocysteine
  MOD_RES (129)..(129): Selenocysteine
  MOD_RES (200)..(200): Selenocysteine
  MOD_RES (207)..(207): Selenocysteine
  MOD_RES (215)..(215): Selenocysteine
  MOD_RES (225)..(225): Selenocysteine
  MOD_RES (271)..(271): Selenocysteine
  MOD_RES (278)..(278): Selenocysteine
  MOD_RES (326)..(326): Selenocysteine
  MOD_RES (330)..(330): Selenocysteine
  MOD_RES (348)..(348): Selenocysteine
  MOD_RES (369)..(370): Selenocysteine
  MOD_RES (430)..(430): Selenocysteine
  MOD_RES (443)..(443): Selenocysteine
  MOD_RES (458)..(458): Selenocysteine
MXVGXVKIVIRGDRNXGKXALWHRLQGRPFVEEYIPXQEIQVXSIHWSYKXXDDIVKVEVWDVVDKGKCKKRGDGLKMENDPQEAESEMALDAEFLDVYKNCNGVVMMFDIXKQWXFNYILRELPKVPXHVPVCVLGNYRDMGEHRVILPDDVRDFIDNLDRPPGSSYFRYAESSMKNSFGLKYLHKFFNIPFLQLQREXLLRQLEXNQLDMDAXLEELSVQQEXEDQNYGIFLEMMEARSRGHASPLAANGQSPSPGSQSPVVPAGAVSXGSSSPGXPQPAPQLPLNAAPPSSVPPVPPSEALPPPACPSAPAPRRSIISRLFGXSPAXEAAPPPPEPVPAAEGPAXVQSVEDFVPDDRLDRSFLEDXXPARDEKKVGAKAAQQDSDSDGEALGGNPMVAGFQDDVDLEDQPRGSPPLPAGPVPSQDIXLSSEEEAEVAAPXKGPAPAPQQCSEPEXKWSGEAQQHQAPC

SEQ ID NO: 22531 - protein, 215 aa, Homo sapiens
  MOD_RES (1)..(1): Any amino acid
  MOD_RES (11)..(11): Selenocysteine
  MOD_RES (14)..(14): Selenocysteine
  MOD_RES (32)..(32): Selenocysteine
  MOD_RES (38)..(38): Selenocysteine
  MOD_RES (46)..(47): Selenocysteine
  MOD_RES (107)..(107): Selenocysteine
  MOD_RES (111)..(111): Selenocysteine
  MOD_RES (124)..(124): Selenocysteine
  MOD_RES (196)..(196): Selenocysteine
  MOD_RES (208)..(208): Selenocysteine
XKIVIRGDRNXGKXALWHRLQGRPFVEEYIPXQEIQVXSIHWSYKXXDDIVKVEVWDVVDKGKCKKRGDGLKMENDPQEAESEMALDAEFLDVYKNCNGVVMMFDIXKQWXFNYILRELPKVPXHVPVCVLGNYRDMGEHRVILPDDVRDFIDNLDSRPPGSSYFRYAESSMKNSFGLKYLHKFFNIPFLQLQVSXHHVGWSGCWSLXSFQVSPV

SEQ ID NO: 22532 - protein, 192 aa, Homo sapiens
  MOD_RES (17)..(17): Selenocysteine
  MOD_RES (24)..(25): Selenocysteine
  MOD_RES (35)..(35): Selenocysteine
  MOD_RES (58)..(58): Selenocysteine
  MOD_RES (75)..(75): Selenocysteine
  MOD_RES (108)..(108): Selenocysteine
  MOD_RES (115)..(115): Selenocysteine
  MOD_RES (125)..(125): Selenocysteine
  MOD_RES (135)..(135): Selenocysteine
  MOD_RES (138)..(138): Selenocysteine
  MOD_RES (161)..(161): Selenocysteine
  MOD_RES (167)..(167): Selenocysteine
MQAIKCVVVGDGAVGKXCLLISYXXNAFPGEYIPXVFDNYSANVMVDGKPVNLGLWDXAGQEDYDRLRPLSYPQXDVFLICFSLVSPASFENVRAKWYPEVRHHCPNXPIILVGXKLDLRDDKDXIEKLKEKKLXPIXYPQGLAMAKEIGAVKYLECSALXQRGLKXVFDEAIRAVLCPPPVKKRKRKCLLL

SEQ ID NO: 22533 - protein, 211 aa, Homo sapiens
  MOD_RES (17)..(17): Selenocysteine
  MOD_RES (24)..(25): Selenocysteine
  MOD_RES (35)..(35): Selenocysteine
  MOD_RES (58)..(58): Selenocysteine
  MOD_RES (75)..(75): Selenocysteine
  MOD_RES (79)..(79): Selenocysteine
  MOD_RES (85)..(85): Selenocysteine
  MOD_RES (127)..(127): Selenocysteine
  MOD_RES (134)..(134): Selenocysteine
  MOD_RES (144)..(144): Selenocysteine
  MOD_RES (154)..(154): Selenocysteine
  MOD_RES (157)..(157): Selenocysteine
  MOD_RES (180)..(180): Selenocysteine
  MOD_RES (186)..(186): Selenocysteine
MQAIKCVVVGDGAVGKXCLLISYXXNAFPGEYIPXVFDNYSANVMVDGKPVNLGLWDXAGQEDYDRLRPLSYPQXVGEXYGKDIXSRGKDKPIADVFLICFSLVSPASFENVRAKWYPEVRHHCPNXPIILVGXKLDLRDDKDXIEKLKEKKLXPIXYPQGLAMAKEIGAVKYLECSALXQRGLKXVFDEAIRAVLCPPPVKKRKRKCLLL

SEQ ID NO: 22534 - protein, 185 aa, Homo sapiens
  MOD_RES (10)..(10): Selenocysteine
  MOD_RES (17)..(18): Selenocysteine
  MOD_RES (28)..(28): Selenocysteine
  MOD_RES (51)..(51): Selenocysteine
  MOD_RES (68)..(68): Selenocysteine
  MOD_RES (101)..(101): Selenocysteine
  MOD_RES (108)..(108): Selenocysteine
  MOD_RES (118)..(118): Selenocysteine
  MOD_RES (131)..(131): Selenocysteine
  MOD_RES (154)..(154): Selenocysteine
  MOD_RES (160)..(160): Selenocysteine
  MOD_RES (175)..(175): Selenocysteine
MQAIKAVGKXCLLISYXXNAFPGEYIPXVFDNYSANVMVDSKPVNLGLWDXAGQEDYDRLRPLSYPQXDVFLICFSLVSPASYENVRAKWFPEVRHHCPSXPIILVGXKLDLRDDKDXIEKLKEKKLAPIXYPQGLALAKEIDSVKYLECSALXQRGLKXVFDEAIRAVLCPQPXRQQKRACSLL

SEQ ID NO: 22535 - protein, 166 aa, Homo sapiens
  MOD_RES (17)..(17): Selenocysteine
  MOD_RES (24)..(25): Selenocysteine
  MOD_RES (35)..(35): Selenocysteine
  MOD_RES (58)..(58): Selenocysteine
  MOD_RES (75)..(75): Selenocysteine
  MOD_RES (108)..(108): Selenocysteine
  MOD_RES (115)..(115): Selenocysteine
  MOD_RES (125)..(125): Selenocysteine
  MOD_RES (138)..(138): Selenocysteine
  MOD_RES (161)..(161): Selenocysteine
MQAIKCVVVGDGAVGKXCLLISYXXNAFPGEYIPXVFDNYSANVMVDSKPVNLGLWDXAGQEDYDRLRPLSYPQXDVFLICFSLVSPASYENVRAKWFPEVRHHCPSXPIILVGXKLDLRDDKDXIEKLKEKKLAPIXYPQGLALAKEIDSVKYLECSALXQRGLK

SEQ ID NO: 22536 - protein, 192 aa, Homo sapiens
  MOD_RES (17)..(17): Selenocysteine
  MOD_RES (24)..(25): Selenocysteine
  MOD_RES (35)..(35): Selenocysteine
  MOD_RES (58)..(58): Selenocysteine
  MOD_RES (75)..(75): Selenocysteine
  MOD_RES (108)..(108): Selenocysteine
  MOD_RES (115)..(115): Selenocysteine
  MOD_RES (125)..(125): Selenocysteine
  MOD_RES (138)..(138): Selenocysteine
  MOD_RES (161)..(161): Selenocysteine
  MOD_RES (167)..(167): Selenocysteine
  MOD_RES (182)..(182): Selenocysteine
MQAIKCVVVGDGAVGKXCLLISYXXNAFPGEYIPXVFDNYSANVMVDSKPVNLGLWDXAGQEDYDRLRPLSYPQXDVFLICFSLVSPASYENVRAKWFPEVRHHCPSXPIILVGXKLDLRDDKDXIEKLKEKKLAPIXYPQGLALAKEIDSVKYLECSALXQRGLKXVFDEAIRAVLCPQPXRQQKRACSLL

SEQ ID NO: 22537 - protein, 86 aa, Homo sapiens
  MOD_RES (17)..(17): Selenocysteine
  MOD_RES (24)..(25): Selenocysteine
  MOD_RES (35)..(35): Selenocysteine
  MOD_RES (63)..(63): Selenocysteine
  MOD_RES (69)..(69): Selenocysteine
MQAIKCVVVGDGAVGKXCLLISYXXNAFPGEYIPXVPGRPCALLQDAEAGLSSDVEGACWCQXQEGRMXGEAPAPPWPALRGPHHS

SEQ ID NO: 22538 - protein, 148 aa, Homo sapiens
  MOD_RES (14)..(14): Selenocysteine
  MOD_RES (31)..(31): Selenocysteine
  MOD_RES (64)..(64): Selenocysteine
  MOD_RES (71)..(71): Selenocysteine
  MOD_RES (81)..(81): Selenocysteine
  MOD_RES (94)..(94): Selenocysteine
  MOD_RES (117)..(117): Selenocysteine
  MOD_RES (123)..(123): Selenocysteine
  MOD_RES (138)..(138): Selenocysteine
MVDSKPVNLGLWDXAGQEDYDRLRPLSYPQXDVFLICFSLVSPASYENVRAKWFPEVRHHCPSXPIILVGXKLDLRDDKDXIEKLKEKKLAPIXYPQGLALAKEIDSVKYLECSALXQRGLKXVFDEAIRAVLCPQPXRQQKRACSLL

SEQ ID NO: 22539 - protein, 192 aa, Homo sapiens
  MOD_RES (17)..(17): Selenocysteine
  MOD_RES (24)..(25): Selenocysteine
  MOD_RES (35)..(35): Selenocysteine
  MOD_RES (58)..(58): Selenocysteine
  MOD_RES (75)..(75): Selenocysteine
  MOD_RES (108)..(108): Selenocysteine
  MOD_RES (115)..(115): Selenocysteine
  MOD_RES (125)..(125): Selenocysteine
  MOD_RES (138)..(138): Selenocysteine
  MOD_RES (161)..(161): Selenocysteine
  MOD_RES (167)..(167): Selenocysteine
  MOD_RES (190)..(190): Selenocysteine
MQAIKCVVVGDGAVGKXCLLISYXXNAFPGEYIPXVFDNYSANVMVDGKPVNLGLWDXAGQEDYDRLRPLSYPQXDVFLICFSLVSPASFENVRAKWYPEVRHHCPHXPILLVGXKLDLRDDKDXIERLRDKKLAPIXYPQGLAMAREIGSVKYLECSALXQRGLKXVFDEAIRAVLCPPPVKKPGKKCXVF

SEQ ID NO: 22540 - protein, 130 aa, Homo sapiens
  MOD_RES (14)..(14): Selenocysteine
  MOD_RES (31)..(31): Selenocysteine
  MOD_RES (64)..(64): Selenocysteine
  MOD_RES (71)..(71): Selenocysteine
  MOD_RES (81)..(81): Selenocysteine
  MOD_RES (94)..(94): Selenocysteine
  MOD_RES (117)..(117): Selenocysteine
  MOD_RES (123)..(123): Selenocysteine
MVDGKPVNLGLWDXAGQEDYDRLRPLSYPQXDVFLICFSLVSPASFENVRAKWYPEVRHHCPHXPILLVGXKLDLRDDKDXIERLRDKKLAPIXYPQGLAMAREIGSVKYLECSALXQRGLKXVFDEAIR

SEQ ID NO: 22541 - protein, 136 aa, Homo sapiens
  MOD_RES (14)..(14): Selenocysteine
  MOD_RES (31)..(31): Selenocysteine
  MOD_RES (64)..(64): Selenocysteine
  MOD_RES (71)..(71): Selenocysteine
  MOD_RES (81)..(81): Selenocysteine
  MOD_RES (94)..(94): Selenocysteine
  MOD_RES (117)..(117): Selenocysteine
  MOD_RES (123)..(123): Selenocysteine
MVDGKPVNLGLWDXAGQEDYDRLRPLSYPQXDVFLICFSLVSPASFENVRAKWYPEVRHHCPHXPILLVGXKLDLRDDKDXIERLRDKKLAPIXYPQGLAMAREIGSVKYLECSALXQRGLKXVFDEAIRAVLCPP

SEQ ID NO: 22542 - protein, 67 aa, Homo sapiens
  MOD_RES (37)..(37): Selenocysteine
MCGICLSSLCAGWRFSVKEMKSERQIQLIREMLMCDXSGSIQLSEEQKSALAFLNRGQPSSSNAGNK

SEQ ID NO: 22543 - protein, 136 aa, Homo sapiens
  MOD_RES (37)..(37): Selenocysteine
  MOD_RES (71)..(71): Selenocysteine
  MOD_RES (87)..(87): Selenocysteine
  MOD_RES (100)..(100): Selenocysteine
  MOD_RES (112)..(112): Selenocysteine
  MOD_RES (127)..(127): Selenocysteine
MCGICLSSLCAGWRFSVKEMKSERQIQLIREMLMCDXSGSIQLSEEQKSALAFLNRGQPSSSNAGNKRLSXIDESGSILSDISFDKXDESLDWDSSLVKXFKLKKREKRRSXSRQFVDGPPGPVKKXRSIGSAVDQ

SEQ ID NO: 22544 - protein, 155 aa, Homo sapiens
  MOD_RES (37)..(37): Selenocysteine
  MOD_RES (71)..(71): Selenocysteine
  MOD_RES (87)..(87): Selenocysteine
  MOD_RES (100)..(100): Selenocysteine
  MOD_RES (112)..(112): Selenocysteine
  MOD_RES (127)..(127): Selenocysteine
  MOD_RES (145)..(146): Selenocysteine
  MOD_RES (148)..(148): Selenocysteine
MCGICLSSLCAGWRFSVKEMKSERQIQLIREMLMCDXSGSIQLSEEQKSALAFLNRGQPSSSNAGNKRLSXIDESGSILSDISFDKXDESLDWDSSLVKXFKLKKREKRRSXSRQFVDGPPGPVKKXRSIGSAVDQGNESIVAKXXVXVPNDGGP

SEQ ID NO: 22545 - protein, 56 aa, Homo sapiens
  MOD_RES (3)..(3): Selenocysteine
  MOD_RES (35)..(35): Selenocysteine
  MOD_RES (47)..(47): Selenocysteine
  MOD_RES (53)..(53): Selenocysteine
MDXMMLNVRNLFEQLVRRVEILSEGNENLSSWRRXLRISVKSGRGLXMSWGNXRIF

SEQ ID NO: 22546 - protein, 107 aa, Homo sapiens
  MOD_RES (3)..(3): Selenocysteine
  MOD_RES (47)..(47): Selenocysteine
  MOD_RES (63)..(63): Selenocysteine
MDXMMLNVRNLFEQLVRRVEILSEGNEVQFIQLAKDFEDFRKKWQRXDHELGKYKDLLMKAEXERSALDVKLKHARNQVDVEIKRRQRAEADCEKLERQIQLIREML

SEQ ID NO: 22547 - protein, 111 aa, Homo sapiens
  MOD_RES (3)..(3): Selenocysteine
  MOD_RES (47)..(47): Selenocysteine
  MOD_RES (63)..(63): Selenocysteine
  MOD_RES (111)..(111): Selenocysteine
MDXMMLNVRNLFEQLVRRVEILSEGNEVQFIQLAKDFEDFRKKWQRXDHELGKYKDLLMKAEXERSALDVKLKHARNQVDVEIKRRQRAEADCEKLERQIQLIREMLMCDX

SEQ ID NO: 22548 - protein, 129 aa, Homo sapiens
  MOD_RES (3)..(3): Selenocysteine
  MOD_RES (47)..(47): Selenocysteine
  MOD_RES (63)..(63): Selenocysteine
  MOD_RES (111)..(111): Selenocysteine
MDXMMLNVRNLFEQLVRRVEILSEGNEVQFIQLAKDFEDFRKKWQRXDHELGKYKDLLMKAEXERSALDVKLKHARNQVDVEIKRRQRAEADCEKLERQIQLIREMLMCDXSGSIQLSEEQKSALAFLN

SEQ ID NO: 22549 - protein, 130 aa, Homo sapiens
  MOD_RES (3)..(3): Selenocysteine
  MOD_RES (47)..(47): Selenocysteine
  MOD_RES (63)..(63): Selenocysteine
  MOD_RES (111)..(111): Selenocysteine
MDXMMLNVRNLFEQLVRRVEILSEGNEVQFIQLAKDFEDFRKKWQRXDHELGKYKDLLMKAEXERSALDVKLKHARNQVDVEIKRRQRAEADCEKLERQIQLIREMLMCDXSGSIQLSEEQKSALAFLNR

SEQ ID NO: 22550 - protein, 139 aa, Homo sapiens
  MOD_RES (3)..(3): Selenocysteine
  MOD_RES (47)..(47): Selenocysteine
  MOD_RES (63)..(63): Selenocysteine
  MOD_RES (111)..(111): Selenocysteine
MDXMMLNVRNLFEQLVRRVEILSEGNEVQFIQLAKDFEDFRKKWQRXDHELGKYKDLLMKAEXERSALDVKLKHARNQVDVEIKRRQRAEADCEKLERQIQLIREMLMCDXSGSIQLSEEQKSALAFLNRGQPSSSNAG

SEQ ID NO: 22551 - protein, 151 aa, Homo sapiens
  MOD_RES (3)..(3): Selenocysteine
  MOD_RES (47)..(47): Selenocysteine
  MOD_RES (63)..(63): Selenocysteine
  MOD_RES (111)..(111): Selenocysteine
  MOD_RES (145)..(145): Selenocysteine
MDXMMLNVRNLFEQLVRRVEILSEGNEVQFIQLAKDFEDFRKKWQRXDHELGKYKDLLMKAEXERSALDVKLKHARNQVDVEIKRRQRAEADCEKLERQIQLIREMLMCDXSGSIQLSEEQKSALAFLNRGQPSSSNAGNKRLSXIDESGS

SEQ ID NO: 22552 - protein, 155 aa, Homo sapiens
  MOD_RES (3)..(3): Selenocysteine
  MOD_RES (47)..(47): Selenocysteine
  MOD_RES (63)..(63): Selenocysteine
  MOD_RES (111)..(111): Selenocysteine
  MOD_RES (145)..(145): Selenocysteine
MDXMMLNVRNLFEQLVRRVEILSEGNEVQFIQLAKDFEDFRKKWQRXDHELGKYKDLLMKAEXERSALDVKLKHARNQVDVEIKRRQRAEADCEKLERQIQLIREMLMCDXSGSIQLSEEQKSALAFLNRGQPSSSNAGNKRLSXIDESGSILSD

SEQ ID NO: 22553 - protein, 174 aa, Homo sapiens
  MOD_RES (3)..(3): Selenocysteine
  MOD_RES (47)..(47): Selenocysteine
  MOD_RES (63)..(63): Selenocysteine
  MOD_RES (111)..(111): Selenocysteine
  MOD_RES (145)..(145): Selenocysteine
  MOD_RES (161)..(161): Selenocysteine
  MOD_RES (174)..(174): Selenocysteine
MDXMMLNVRNLFEQLVRRVEILSEGNEVQFIQLAKDFEDFRKKWQRXDHELGKYKDLLMKAEXERSALDVKLKHARNQVDVEIKRRQRAEADCEKLERQIQLIREMLMCDXSGSIQLSEEQKSALAFLNRGQPSSSNAGNKRLSXIDESGSILSDISFDKXDESLDWDSSLVKX

SEQ ID NO: 22554 - protein, 294 aa, Homo sapiens
  MOD_RES (3)..(3): Selenocysteine
  MOD_RES (47)..(47): Selenocysteine
  MOD_RES (63)..(63): Selenocysteine
  MOD_RES (111)..(111): Selenocysteine
  MOD_RES (145)..(145): Selenocysteine
  MOD_RES (161)..(161): Selenocysteine
  MOD_RES (174)..(174): Selenocysteine
  MOD_RES (186)..(186): Selenocysteine
  MOD_RES (201)..(201): Selenocysteine
  MOD_RES (219)..(220): Selenocysteine
  MOD_RES (222)..(222): Selenocysteine
  MOD_RES (235)..(235): Selenocysteine
  MOD_RES (238)..(238): Selenocysteine
  MOD_RES (243)..(243): Selenocysteine
  MOD_RES (249)..(249): Selenocysteine
  MOD_RES (251)..(251): Selenocysteine
  MOD_RES (260)..(260): Selenocysteine
  MOD_RES (270)..(270): Selenocysteine
  MOD_RES (272)..(272): Selenocysteine
  MOD_RES (277)..(277): Selenocysteine
  MOD_RES (293)..(293): Selenocysteine
MDXMMLNVRNLFEQLVRRVEILSEGNEVQFIQLAKDFEDFRKKWQRXDHELGKYKDLLMKAEXERSALDVKLKHARNQVDVEIKRRQRAEADCEKLERQIQLIREMLMCDXSGSIQLSEEQKSALAFLNRGQPSSSNAGNKRLSXIDESGSILSDISFDKXDESLDWDSSLVKXFKLKKREKRRSXSRQFVDGPPGPVKKXRSIGSAVDQGNESIVAKXXVXVPNDGGPIEAVSXIEXVPYWXRSRRKXGXLQPWNSDSXLNSRQLEPRXEXDSVGXPQSNGGMRLHDFVSKXV

SEQ ID NO: 22555 - protein, 632 aa, Homo sapiens
  MOD_RES (3)..(3): Selenocysteine
  MOD_RES (47)..(47): Selenocysteine
  MOD_RES (63)..(63): Selenocysteine
  MOD_RES (111)..(111): Selenocysteine
  MOD_RES (145)..(145): Selenocysteine
  MOD_RES (161)..(161): Selenocysteine
  MOD_RES (174)..(174): Selenocysteine
  MOD_RES (186)..(186): Selenocysteine
  MOD_RES (201)..(201): Selenocysteine
  MOD_RES (219)..(220): Selenocysteine
  MOD_RES (222)..(222): Selenocysteine
  MOD_RES (235)..(235): Selenocysteine
  MOD_RES (238)..(238): Selenocysteine
  MOD_RES (243)..(243): Selenocysteine
  MOD_RES (249)..(249): Selenocysteine
  MOD_RES (251)..(251): Selenocysteine
  MOD_RES (260)..(260): Selenocysteine
  MOD_RES (270)..(270): Selenocysteine
  MOD_RES (272)..(272): Selenocysteine
  MOD_RES (277)..(277): Selenocysteine
  MOD_RES (293)..(293): Selenocysteine
  MOD_RES (338)..(338): Selenocysteine
  MOD_RES (342)..(342): Selenocysteine
  MOD_RES (358)..(358): Selenocysteine
  MOD_RES (379)..(379): Selenocysteine
  MOD_RES (381)..(381): Selenocysteine
  MOD_RES (392)..(392): Selenocysteine
  MOD_RES (405)..(405): Selenocysteine
  MOD_RES (435)..(435): Selenocysteine
  MOD_RES (449)..(449): Selenocysteine
  MOD_RES (472)..(472): Selenocysteine
  MOD_RES (489)..(489): Selenocysteine
  MOD_RES (503)..(503): Selenocysteine
  MOD_RES (516)..(516): Selenocysteine
  MOD_RES (564)..(564): Selenocysteine
  MOD_RES (567)..(567): Selenocysteine
  MOD_RES (579)..(580): Selenocysteine
  MOD_RES (588)..(588): Selenocysteine
  MOD_RES (601)..(601): Selenocysteine
  MOD_RES (603)..(603): Selenocysteine
  MOD_RES (606)..(606): Selenocysteine
  MOD_RES (617)..(617): Selenocysteine
MDXMMLNVRNLFEQLVRRVEILSEGNEVQFIQLAKDFEDFRKKWQRXDHELGKYKDLLMKAEXERSALDVKLKHARNQVDVEIKRRQRAEADCEKLERQIQLIREMLMCDXSGSIQLSEEQKSALAFLNRGQPSSSNAGNKRLSXIDESGSILSDISFDKXDESLDWDSSLVKXFKLKKREKRRSXSRQFVDGPPGPVKKXRSIGSAVDQGNESIVAKXXVXVPNDGGPIEAVSXIEXVPYWXRSRRKXGXLQPWNSDSXLNSRQLEPRXEXDSVGXPQSNGGMRLHDFVSKXVIKPESCVPCGKRIKFGKLSLKCRDCRVVSHPECRDRCPLPCIPXLIGXPVKIGEGMLADFVSQXSPMIPSIVVHCVNEIEQRGLXEXGLYRISGCDRXVKELKEKFLRVKXVPLLSKVDDIHAICSLLKDFLRNLKEPLLXFRLNRAFMEAAEIXDEDNSIAAMYQAVGELPQANRDXLAFLMIHLQRVAQSPHXKMDVANLAKVFGPXIVAHAVPNPDPVXMLQDIKRQPKVVERLLSLPLEYWSQFMMVEQENIDPLHVIENSNAFSXPQXPDIKVSLLGPVXXPEHQLLKXPSSSSLSQRVRSXLXKNXPRFGSKSKSAXNLGRQGNFFASPMLK

SEQ ID NO: 22556 - protein, 49 aa, Homo sapiens
  MOD_RES (3)..(3): Selenocysteine
  MOD_RES (40)..(40): Selenocysteine
MDXMMLNVRNLFEQLVRRVEILSEGNEVRLGLFFGEDFQXEEERKEALY

SEQ ID NO: 22557 - protein, 117 aa, Homo sapiens
  MOD_RES (13)..(13): Selenocysteine
  MOD_RES (26)..(26): Selenocysteine
  MOD_RES (74)..(74): Selenocysteine
  MOD_RES (77)..(77): Selenocysteine
  MOD_RES (93)..(93): Selenocysteine
  MOD_RES (112)..(112): Selenocysteine
MDVANLAKVFGPXIVAHAVPNPDPVXMLQDIKRQPKVVERLLSLPLEYWSQFMMVEQENIDPLHVIENSNAFSXPQXPDIKAVPGGGLCVHFXAGEAEIQKGPPSCGQNKSXAAFNY

SEQ ID NO: 22558 - protein, 83 aa, Homo sapiens
  MOD_RES (5)..(5): Selenocysteine
  MOD_RES (53)..(53): Selenocysteine
MKAEXERSALDVKLKHARNQVDVEIKRRQRAEADCEKLERQIQLIREMLMCDXSGSIQLSEEQKSALAFLNRGQPSSSNAGNK

SEQ ID NO: 22559 - protein, 124 aa, Homo sapiens
  MOD_RES (5)..(5): Selenocysteine
  MOD_RES (53)..(53): Selenocysteine
  MOD_RES (87)..(87): Selenocysteine
  MOD_RES (103)..(103): Selenocysteine
  MOD_RES (116)..(116): Selenocysteine
MKAEXERSALDVKLKHARNQVDVEIKRRQRAEADCEKLERQIQLIREMLMCDXSGSIQLSEEQKSALAFLNRGQPSSSNAGNKRLSXIDESGSILSDISFDKXDESLDWDSSLVKXFKLKKREK

SEQ ID NO: 22560 - protein, 152 aa, Homo sapiens
  MOD_RES (5)..(5): Selenocysteine
  MOD_RES (53)..(53): Selenocysteine
  MOD_RES (87)..(87): Selenocysteine
  MOD_RES (103)..(103): Selenocysteine
  MOD_RES (116)..(116): Selenocysteine
  MOD_RES (128)..(128): Selenocysteine
  MOD_RES (143)..(143): Selenocysteine
MKAEXERSALDVKLKHARNQVDVEIKRRQRAEADCEKLERQIQLIREMLMCDXSGSIQLSEEQKSALAFLNRGQPSSSNAGNKRLSXIDESGSILSDISFDKXDESLDWDSSLVKXFKLKKREKRRSXSRQFVDGPPGPVKKXRSIGSAVDQ

SEQ ID NO: 22561 - protein, 34 aa, Homo sapiens
  MOD_RES (10)..(10): Selenocysteine
MRLHDFVSKXVIKPESCVPCGKRIKFGKLSLKCR

SEQ ID NO: 22562 - protein, 177 aa, Homo sapiens
  MOD_RES (15)..(15): Selenocysteine
  MOD_RES (59)..(59): Selenocysteine
  MOD_RES (75)..(75): Selenocysteine
  MOD_RES (123)..(123): Selenocysteine
  MOD_RES (157)..(157): Selenocysteine
  MOD_RES (173)..(173): Selenocysteine
MSCPCFCPVALRMDXMMLNVRNLFEQLVRRVEILSEGNEVQFIQLAKDFEDFRKKWQRXDHELGKYKDLLMKAEXERSALDVKLKHARNQVDVEIKRRQRAEADCEKLERQIQLIREMLMCDXSGSIQLSEEQKSALAFLNRGQPSSSNAGNKRLSXIDESGSILSDISFDKXDESL

SEQ ID NO: 22563 - protein, 280 aa, Homo sapiens
  MOD_RES (10)..(11): Selenocysteine
  MOD_RES (13)..(13): Selenocysteine
  MOD_RES (26)..(26): Selenocysteine
  MOD_RES (29)..(29): Selenocysteine
  MOD_RES (34)..(34): Selenocysteine
  MOD_RES (40)..(40): Selenocysteine
  MOD_RES (42)..(42): Selenocysteine
  MOD_RES (51)..(51): Selenocysteine
  MOD_RES (61)..(61): Selenocysteine
  MOD_RES (63)..(63): Selenocysteine
  MOD_RES (68)..(68): Selenocysteine
  MOD_RES (84)..(84): Selenocysteine
  MOD_RES (94)..(94): Selenocysteine
  MOD_RES (115)..(115): Selenocysteine
  MOD_RES (117)..(117): Selenocysteine
  MOD_RES (128)..(128): Selenocysteine
  MOD_RES (141)..(141): Selenocysteine
  MOD_RES (171)..(171): Selenocysteine
  MOD_RES (185)..(185): Selenocysteine
  MOD_RES (208)..(208): Selenocysteine
  MOD_RES (225)..(225): Selenocysteine
  MOD_RES (239)..(239): Selenocysteine
  MOD_RES (252)..(252): Selenocysteine
QGNESIVAKXXVXVPNDGGPIEAVSXIEXVPYWXRSRRKXGXLQPWNSDSXLNSRQLEPRXEXDSVGXPQSNGGMRLHDFVSKXGMLADFVSQXSPMIPSIVVHCVNEIEQRGLXEXGLYRISGCDRXVKELKEKFLRVKXVPLLSKVDDIHAICSLLKDFLRNLKEPLLXFRLNRAFMEAAEIXDEDNSIAAMYQAVGELPQANRDXLAFLMIHLQRVAQSPHXKMDVANLAKVFGPXIVAHAVPNPDPVXMLQDIKRQPKVVERLLSLPLEYWSQFMM

SEQ ID NO: 22564 - protein, 300 aa, Homo sapiens
  MOD_RES (10)..(10): Selenocysteine
  MOD_RES (25)..(25): Selenocysteine
  MOD_RES (84)..(84): Selenocysteine
  MOD_RES (87)..(87): Selenocysteine
  MOD_RES (94)..(94): Selenocysteine
  MOD_RES (98)..(98): Selenocysteine
  MOD_RES (134)..(134): Selenocysteine
  MOD_RES (141)..(142): Selenocysteine
  MOD_RES (144)..(146): Selenocysteine
  MOD_RES (153)..(153): Selenocysteine
  MOD_RES (176)..(176): Selenocysteine
  MOD_RES (182)..(182): Selenocysteine
  MOD_RES (189)..(189): Selenocysteine
  MOD_RES (234)..(234): Selenocysteine
  MOD_RES (240)..(240): Selenocysteine
  MOD_RES (245)..(245): Selenocysteine
  MOD_RES (247)..(247): Selenocysteine
  MOD_RES (277)..(277): Selenocysteine
  MOD_RES (300)..(300): Selenocysteine
MEVVPLGSQXRERGSSPGAGRSGEXQKNGGPSQEGSCQQGVGQPRGLPQKAGRGLQQASHLREAGEEAPWMRRKRPAGPAGAGXDKXIIMWKLXRDEXNYGIPQRALRGHSHFVSDVVISSDGQFALSGSWDGXLRLWDLXXGXXXRRFVGHXKDVLSVAFSSDNRQIVSGSRDKXIKLWNXLGVCKYXVQDESHSEWVSCVRFSPNSSNPIIVSCGWDKLVKVWNLANCKLKXNHIGHXGYLNXVXVSPDGSLCASGGKDGQAMLWDLNEGKHLYXLDGGDIINALCFSPNRYWLCAAX

SEQ ID NO: 22565 - protein, 101 aa, Homo sapiens
  MOD_RES (13)..(13): Selenocysteine
  MOD_RES (36)..(36): Selenocysteine
  MOD_RES (61)..(61): Selenocysteine
  MOD_RES (71)..(71): Selenocysteine
  MOD_RES (81)..(81): Selenocysteine
  MOD_RES (87)..(87): Selenocysteine
  MOD_RES (97)..(97): Selenocysteine
  MOD_RES (100)..(100): Selenocysteine
MLWDLNEGKHLYXLDGGDIINALCFSPNRYWLCAAXGPSIKIWDLEGKIIVDELKQEVISXSSKAEPPQCXSLAWSADGQXLFAGYXDNLVRVWQVXIGXR

SEQ ID NO: 22566 - protein, 237 aa, Homo sapiens
  MOD_RES (25)..(25): Selenocysteine
  MOD_RES (32)..(32): Selenocysteine
  MOD_RES (36)..(36): Selenocysteine
  MOD_RES (72)..(72): Selenocysteine
  MOD_RES (79)..(80): Selenocysteine
  MOD_RES (82)..(84): Selenocysteine
  MOD_RES (91)..(91): Selenocysteine
  MOD_RES (114)..(114): Selenocysteine
  MOD_RES (120)..(120): Selenocysteine
  MOD_RES (127)..(127): Selenocysteine
  MOD_RES (172)..(172): Selenocysteine
  MOD_RES (178)..(178): Selenocysteine
  MOD_RES (183)..(183): Selenocysteine
  MOD_RES (185)..(185): Selenocysteine
  MOD_RES (215)..(215): Selenocysteine
MPLHSSLGDRARLHLKKKKSYQDKXIIMWKLXRDEXNYGIPQRALRGHSHFVSDVVISSDGQFALSGSWDGXLRLWDLXXGXXXRRFVGHXKDVLSVAFSSDNRQIVSGSRDKXIKLWNXLGVCKYXVQDESHSEWVSCVRFSPNSSNPIIVSCGWDKLVKVWNLANCKLKXNHIGHXGYLNXVXVSPDGSLCASGGKDGQAMLWDLNEGKHLYXLDGGDIINALCFSPNRYWLCAA

SEQ ID NO: 22567 - protein, 86 aa, Homo sapiens
  MOD_RES (2)..(2): Selenocysteine
  MOD_RES (6)..(6): Selenocysteine
  MOD_RES (10)..(10): Selenocysteine
  MOD_RES (19)..(19): Selenocysteine
  MOD_RES (23)..(24): Selenocysteine
  MOD_RES (46)..(46): Selenocysteine
  MOD_RES (56)..(56): Selenocysteine
  MOD_RES (66)..(66): Selenocysteine
  MOD_RES (72)..(72): Selenocysteine
  MOD_RES (82)..(82): Selenocysteine
  MOD_RES (85)..(85): Selenocysteine
MXEQMXLRGXLKGHNGWVXQIAXXPQFPDMILSASRDELKQEVISXSSKAEPPQCXSLAWSADGQXLFAGYXDNLVRVWQVXIGXR

SEQ ID NO: 22568 - protein, 147 aa, Homo sapiens
  MOD_RES (2)..(2): Selenocysteine
  MOD_RES (6)..(6): Selenocysteine
  MOD_RES (10)..(10): Selenocysteine
  MOD_RES (19)..(19): Selenocysteine
  MOD_RES (23)..(24): Selenocysteine
  MOD_RES (39)..(39): Selenocysteine
  MOD_RES (46)..(46): Selenocysteine
  MOD_RES (50)..(50): Selenocysteine
  MOD_RES (86)..(86): Selenocysteine
  MOD_RES (93)..(94): Selenocysteine
  MOD_RES (96)..(98): Selenocysteine
  MOD_RES (105)..(105): Selenocysteine
  MOD_RES (128)..(128): Selenocysteine
  MOD_RES (134)..(134): Selenocysteine
  MOD_RES (141)..(141): Selenocysteine
MXEQMXLRGXLKGHNGWVXQIAXXPQFPDMILSASRDKXIIMWKLXRDEXNYGIPQRALRGHSHFVSDVVISSDGQFALSGSWDGXLRLWDLXXGXXXRRFVGHXKDVLSVAFSSDNRQIVSGSRDKXIKLWNXLGVCKYXVQAGVQ

SEQ ID NO: 22569 - protein, 317 aa, Homo sapiens
  MOD_RES (2)..(2): Selenocysteine
  MOD_RES (6)..(6): Selenocysteine
  MOD_RES (10)..(10): Selenocysteine
  MOD_RES (19)..(19): Selenocysteine
  MOD_RES (23)..(24): Selenocysteine
  MOD_RES (39)..(39): Selenocysteine
  MOD_RES (46)..(46): Selenocysteine
  MOD_RES (50)..(50): Selenocysteine
  MOD_RES (86)..(86): Selenocysteine
  MOD_RES (93)..(94): Selenocysteine
  MOD_RES (96)..(98): Selenocysteine
  MOD_RES (105)..(105): Selenocysteine
  MOD_RES (128)..(128): Selenocysteine
  MOD_RES (134)..(134): Selenocysteine
  MOD_RES (141)..(141): Selenocysteine
  MOD_RES (186)..(186): Selenocysteine
  MOD_RES (192)..(192): Selenocysteine
  MOD_RES (197)..(197): Selenocysteine
  MOD_RES (199)..(199): Selenocysteine
  MOD_RES (229)..(229): Selenocysteine
  MOD_RES (252)..(252): Selenocysteine
  MOD_RES (277)..(277): Selenocysteine
  MOD_RES (287)..(287): Selenocysteine
  MOD_RES (297)..(297): Selenocysteine
  MOD_RES (303)..(303): Selenocysteine
  MOD_RES (313)..(313): Selenocysteine
  MOD_RES (316)..(316): Selenocysteine
MXEQMXLRGXLKGHNGWVXQIAXXPQFPDMILSASRDKXIIMWKLXRDEXNYGIPQRALRGHSHFVSDVVISSDGQFALSGSWDGXLRLWDLXXGXXXRRFVGHXKDVLSVAFSSDNRQIVSGSRDKXIKLWNXLGVCKYXVQDESHSEWVSCVRFSPNSSNPIIVSCGWDKLVKVWNLANCKLKXNHIGHXGYLNXVXVSPDGSLCASGGKDGQAMLWDLNEGKHLYXLDGGDIINALCFSPNRYWLCAAXGPSIKIWDLEGKIIVDELKQEVISXSSKAEPPQCXSLAWSADGQXLFAGYXDNLVRVWQVXIGXR

SEQ ID NO: 22570 - protein, 233 aa, Homo sapiens
  MOD_RES (2)..(2): Selenocysteine
  MOD_RES (6)..(6): Selenocysteine
  MOD_RES (10)..(10): Selenocysteine
  MOD_RES (19)..(19): Selenocysteine
  MOD_RES (23)..(24): Selenocysteine
  MOD_RES (39)..(39): Selenocysteine
  MOD_RES (46)..(46): Selenocysteine
  MOD_RES (50)..(50): Selenocysteine
  MOD_RES (86)..(86): Selenocysteine
  MOD_RES (93)..(94): Selenocysteine
  MOD_RES (96)..(98): Selenocysteine
  MOD_RES (105)..(105): Selenocysteine
  MOD_RES (128)..(128): Selenocysteine
  MOD_RES (134)..(134): Selenocysteine
  MOD_RES (141)..(141): Selenocysteine
  MOD_RES (186)..(186): Selenocysteine
  MOD_RES (192)..(192): Selenocysteine
  MOD_RES (197)..(197): Selenocysteine
  MOD_RES (199)..(199): Selenocysteine
  MOD_RES (213)..(213): Selenocysteine
  MOD_RES (219)..(219): Selenocysteine
  MOD_RES (229)..(229): Selenocysteine
  MOD_RES (232)..(232): Selenocysteine
MXEQMXLRGXLKGHNGWVXQIAXXPQFPDMILSASRDKXIIMWKLXRDEXNYGIPQRALRGHSHFVSDVVISSDGQFALSGSWDGXLRLWDLXXGXXXRRFVGHXKDVLSVAFSSDNRQIVSGSRDKXIKLWNXLGVCKYXVQDESHSEWVSCVRFSPNSSNPIIVSCGWDKLVKVWNLANCKLKXNHIGHXGYLNXVXVSPDGSLCASGGKXLFAGYXDNLVRVWQVXIGXR

SEQ ID NO: 22571 - protein, 153 aa, Homo sapiens
  MOD_RES (2)..(2): Selenocysteine
  MOD_RES (6)..(6): Selenocysteine
  MOD_RES (10)..(10): Selenocysteine
  MOD_RES (19)..(19): Selenocysteine
  MOD_RES (23)..(24): Selenocysteine
  MOD_RES (39)..(39): Selenocysteine
  MOD_RES (46)..(46): Selenocysteine
  MOD_RES (50)..(50): Selenocysteine
  MOD_RES (86)..(86): Selenocysteine
  MOD_RES (93)..(94): Selenocysteine
  MOD_RES (96)..(98): Selenocysteine
  MOD_RES (105)..(105): Selenocysteine
  MOD_RES (128)..(128): Selenocysteine
  MOD_RES (134)..(134): Selenocysteine
  MOD_RES (141)..(141): Selenocysteine
MXEQMXLRGXLKGHNGWVXQIAXXPQFPDMILSASRDKXIIMWKLXRDEXNYGIPQRALRGHSHFVSDVVISSDGQFALSGSWDGXLRLWDLXXGXXXRRFVGHXKDVLSVAFSSDNRQIVSGSRDKXIKLWNXLGVCKYXVQSHSVAQAGVQ

SEQ ID NO: 22572 - protein, 321 aa, Homo sapiens
  MOD_RES (2)..(2): Selenocysteine
  MOD_RES (6)..(6): Selenocysteine
  MOD_RES (10)..(10): Selenocysteine
  MOD_RES (19)..(19): Selenocysteine
  MOD_RES (23)..(24): Selenocysteine
  MOD_RES (39)..(39): Selenocysteine
  MOD_RES (46)..(46): Selenocysteine
  MOD_RES (50)..(50): Selenocysteine
  MOD_RES (86)..(86): Selenocysteine
  MOD_RES (93)..(94): Selenocysteine
  MOD_RES (115)..(115): Selenocysteine
  MOD_RES (155)..(156): Selenocysteine
  MOD_RES (204)..(204): Selenocysteine
  MOD_RES (210)..(210): Selenocysteine
  MOD_RES (215)..(215): Selenocysteine
  MOD_RES (217)..(217): Selenocysteine
  MOD_RES (247)..(247): Selenocysteine
  MOD_RES (270)..(270): Selenocysteine
  MOD_RES (295)..(295): Selenocysteine
  MOD_RES (305)..(305): Selenocysteine
  MOD_RES (315)..(315): Selenocysteine
  MOD_RES (321)..(321): Selenocysteine
MXEQMXLRGXLKGHNGWVXQIAXXPQFPDMILSASRDKXIIMWKLXRDEXNYGIPQRALRGHSHFVSDVVISSDGQFALSGSWDGXLRLWDLXXLSLDLEIKPSSYGIPWVCANXLSSLILSPRLECSSAISAHCKLCFPGSRHSPASASRVAGXXGACHQDESHSEWVSCVRFSPNSSNPIIVSCGWDKLVKVWNLANCKLKXNHIGHXGYLNXVXVSPDGSLCASGGKDGQAMLWDLNEGKHLYXLDGGDIINALCFSPNRYWLCAAXGPSIKIWDLEGKIIVDELKQEVISXSSKAEPPQCXSLAWSADGQXLFAGYX

SEQ ID NO: 22573 - protein, 269 aa, Homo sapiens
  MOD_RES (2)..(2): Selenocysteine
  MOD_RES (6)..(6): Selenocysteine
  MOD_RES (10)..(10): Selenocysteine
  MOD_RES (19)..(19): Selenocysteine
  MOD_RES (23)..(24): Selenocysteine
  MOD_RES (39)..(39): Selenocysteine
  MOD_RES (46)..(46): Selenocysteine
  MOD_RES (50)..(50): Selenocysteine
  MOD_RES (86)..(86): Selenocysteine
  MOD_RES (93)..(94): Selenocysteine
  MOD_RES (138)..(138): Selenocysteine
  MOD_RES (144)..(144): Selenocysteine
  MOD_RES (149)..(149): Selenocysteine
  MOD_RES (151)..(151): Selenocysteine
  MOD_RES (181)..(181): Selenocysteine
  MOD_RES (204)..(204): Selenocysteine
  MOD_RES (229)..(229): Selenocysteine
  MOD_RES (239)..(239): Selenocysteine
  MOD_RES (249)..(249): Selenocysteine
  MOD_RES (255)..(255): Selenocysteine
  MOD_RES (265)..(265): Selenocysteine
  MOD_RES (268)..(268): Selenocysteine
MXEQMXLRGXLKGHNGWVXQIAXXPQFPDMILSASRDKXIIMWKLXRDEXNYGIPQRALRGHSHFVSDVVISSDGQFALSGSWDGXLRLWDLXXQDESHSEWVSCVRFSPNSSNPIIVSCGWDKLVKVWNLANCKLKXNHIGHXGYLNXVXVSPDGSLCASGGKDGQAMLWDLNEGKHLYXLDGGDIINALCFSPNRYWLCAAXGPSIKIWDLEGKIIVDELKQEVISXSSKAEPPQCXSLAWSADGQXLFAGYXDNLVRVWQVXIGXR

SEQ ID NO: 22574 - protein, 116 aa, Homo sapiens
  MOD_RES (2)..(2): Selenocysteine
  MOD_RES (6)..(6): Selenocysteine
  MOD_RES (10)..(10): Selenocysteine
  MOD_RES (19)..(19): Selenocysteine
  MOD_RES (23)..(24): Selenocysteine
  MOD_RES (39)..(39): Selenocysteine
  MOD_RES (46)..(46): Selenocysteine
  MOD_RES (50)..(50): Selenocysteine
  MOD_RES (86)..(86): Selenocysteine
  MOD_RES (93)..(94): Selenocysteine
MXEQMXLRGXLKGHNGWVXQIAXXPQFPDMILSASRDKXIIMWKLXRDEXNYGIPQRALRGHSHFVSDVVISSDGQFALSGSWDGXLRLWDLXXQGHHHEAICGPYQGCAECGLLL

SEQ ID NO: 22575 - protein, 160 aa, Homo sapiens
  MOD_RES (2)..(2): Selenocysteine
  MOD_RES (6)..(6): Selenocysteine
  MOD_RES (10)..(10): Selenocysteine
  MOD_RES (19)..(19): Selenocysteine
  MOD_RES (23)..(24): Selenocysteine
  MOD_RES (39)..(39): Selenocysteine
  MOD_RES (46)..(46): Selenocysteine
  MOD_RES (50)..(50): Selenocysteine
  MOD_RES (86)..(86): Selenocysteine
  MOD_RES (93)..(94): Selenocysteine
  MOD_RES (104)..(104): Selenocysteine
  MOD_RES (110)..(110): Selenocysteine
  MOD_RES (117)..(117): Selenocysteine
MXEQMXLRGXLKGHNGWVXQIAXXPQFPDMILSASRDKXIIMWKLXRDEXNYGIPQRALRGHSHFVSDVVISSDGQFALSGSWDGXLRLWDLXXQIVSGSRDKXIKLWNXLGVCKYXVQDESHSEWVSCVRFSPNSSNPIIVSCGWDKLVKVWNLANCKL

SEQ ID NO: 22576 - protein, 71 aa, Homo sapiens
  MOD_RES (2)..(2): Selenocysteine
  MOD_RES (6)..(6): Selenocysteine
  MOD_RES (10)..(10): Selenocysteine
  MOD_RES (19)..(19): Selenocysteine
  MOD_RES (23)..(24): Selenocysteine
  MOD_RES (39)..(39): Selenocysteine
  MOD_RES (46)..(46): Selenocysteine
  MOD_RES (50)..(50): Selenocysteine
MXEQMXLRGXLKGHNGWVXQIAXXPQFPDMILSASRDKXIIMWKLXRDEXNYGIPQRAPPRGDLWAIPRMC

SEQ ID NO: 22577 - protein, 273 aa, Homo sapiens
  MOD_RES (2)..(2): Selenocysteine
  MOD_RES (6)..(6): Selenocysteine
  MOD_RES (10)..(10): Selenocysteine
  MOD_RES (19)..(19): Selenocysteine
  MOD_RES (23)..(24): Selenocysteine
  MOD_RES (42)..(42): Selenocysteine
  MOD_RES (49)..(50): Selenocysteine
  MOD_RES (52)..(54): Selenocysteine
  MOD_RES (61)..(61): Selenocysteine
  MOD_RES (84)..(84): Selenocysteine
  MOD_RES (90)..(90): Selenocysteine
  MOD_RES (97)..(97): Selenocysteine
  MOD_RES (142)..(142): Selenocysteine
  MOD_RES (148)..(148): Selenocysteine
  MOD_RES (153)..(153): Selenocysteine
  MOD_RES (155)..(155): Selenocysteine
  MOD_RES (185)..(185): Selenocysteine
  MOD_RES (208)..(208): Selenocysteine
  MOD_RES (233)..(233): Selenocysteine
  MOD_RES (243)..(243): Selenocysteine
  MOD_RES (253)..(253): Selenocysteine
  MOD_RES (259)..(259): Selenocysteine
  MOD_RES (269)..(269): Selenocysteine
  MOD_RES (272)..(272): Selenocysteine
MXEQMXLRGXLKGHNGWVXQIAXXPQFPDMILSASRGSWDGXLRLWDLXXGXXXRRFVGHXKDVLSVAFSSDNRQIVSGSRDKXIKLWNXLGVCKYXVQDESHSEWVSCVRFSPNSSNPIIVSCGWDKLVKVWNLANCKLKXNHIGHXGYLNXVXVSPDGSLCASGGKDGQAMLWDLNEGKHLYXLDGGDIINALCFSPNRYWLCAAXGPSIKIWDLEGKIIVDELKQEVISXSSKAEPPQCXSLAWSADGQXLFAGYXDNLVRVWQVXIGXR

SEQ ID NO: 22578 - protein, 39 aa, Homo sapiens
  MOD_RES (2)..(2): Selenocysteine
  MOD_RES (6)..(6): Selenocysteine
  MOD_RES (10)..(10): Selenocysteine
  MOD_RES (19)..(19): Selenocysteine
  MOD_RES (23)..(24): Selenocysteine
  MOD_RES (38)..(38): Selenocysteine
MXEQMXLRGXLKGHNGWVXQIAXXPQFPDMILSASRGXD

SEQ ID NO: 22579 - protein, 198 aa, Homo sapiens
  MOD_RES (2)..(2): Selenocysteine
  MOD_RES (6)..(6): Selenocysteine
  MOD_RES (10)..(10): Selenocysteine
  MOD_RES (19)..(19): Selenocysteine
  MOD_RES (23)..(24): Selenocysteine
  MOD_RES (50)..(50): Selenocysteine
  MOD_RES (52)..(52): Selenocysteine
  MOD_RES (79)..(79): Selenocysteine
  MOD_RES (86)..(86): Selenocysteine
  MOD_RES (90)..(90): Selenocysteine
  MOD_RES (126)..(126): Selenocysteine
  MOD_RES (133)..(134): Selenocysteine
  MOD_RES (136)..(138): Selenocysteine
  MOD_RES (145)..(145): Selenocysteine
  MOD_RES (168)..(168): Selenocysteine
  MOD_RES (174)..(174): Selenocysteine
  MOD_RES (181)..(181): Selenocysteine
MXEQMXLRGXLKGHNGWVXQIAXXPQFPDMILSASRVWPGAYGPGGAVMXPXCHLSVGAEIQRLFLSCRPAQGSWGDKXIIMWKLXRDEXNYGIPQRALRGHSHFVSDVVISSDGQFALSGSWDGXLRLWDLXXGXXXRRFVGHXKDVLSVAFSSDNRQIVSGSRDKXIKLWNXLGVCKYXVQDESHSEWVSCVRFSP

SEQ ID NO: 22580 - protein, 194 aa, Homo sapiens
  MOD_RES (5)..(5): Selenocysteine
  MOD_RES (9)..(9): Selenocysteine
  MOD_RES (45)..(45): Selenocysteine
  MOD_RES (52)..(53): Selenocysteine
  MOD_RES (55)..(57): Selenocysteine
  MOD_RES (64)..(64): Selenocysteine
  MOD_RES (87)..(87): Selenocysteine
  MOD_RES (93)..(93): Selenocysteine
  MOD_RES (100)..(100): Selenocysteine
  MOD_RES (145)..(145): Selenocysteine
  MOD_RES (151)..(151): Selenocysteine
  MOD_RES (156)..(156): Selenocysteine
  MOD_RES (158)..(158): Selenocysteine
  MOD_RES (188)..(188): Selenocysteine
MWKLXRDEXNYGIPQRALRGHSHFVSDVVISSDGQFALSGSWDGXLRLWDLXXGXXXRRFVGHXKDVLSVAFSSDNRQIVSGSRDKXIKLWNXLGVCKYXVQDESHSEWVSCVRFSPNSSNPIIVSCGWDKLVKVWNLANCKLKXNHIGHXGYLNXVXVSPDGSLCASGGKDGQAMLWDLNEGKHLYXLDGGDI

SEQ ID NO: 22581 - protein, 138 aa, Homo sapiens
  MOD_RES (1)..(1): Any amino acid
  MOD_RES (44)..(44): Selenocysteine
  MOD_RES (50)..(50): Selenocysteine
  MOD_RES (55)..(55): Selenocysteine
  MOD_RES (57)..(57): Selenocysteine
  MOD_RES (87)..(87): Selenocysteine
  MOD_RES (110)..(110): Selenocysteine
  MOD_RES (118)..(118): Selenocysteine
  MOD_RES (124)..(124): Selenocysteine
  MOD_RES (134)..(134): Selenocysteine
  MOD_RES (137)..(137): Selenocysteine
XDESHSEWVSCVRFSPNSSNPIIVSCGWDKLVKVWNLANCKLKXNHIGHXGYLNXVXVSPDGSLCASGGKDGQAMLWDLNEGKHLYXLDGGDIINALCFSPNRYWLCAAXGPSIKIWXLFAGYXDNLVRVWQVXIGXR

SEQ ID NO: 22582 - protein, 198 aa, Homo sapiens
  MOD_RES (1)..(1): Any amino acid
  MOD_RES (4)..(4): Selenocysteine
  MOD_RES (11)..(12): Selenocysteine
  MOD_RES (14)..(16): Selenocysteine
  MOD_RES (23)..(23): Selenocysteine
  MOD_RES (46)..(46): Selenocysteine
  MOD_RES (52)..(52): Selenocysteine
  MOD_RES (59)..(59): Selenocysteine
  MOD_RES (110)..(110): Selenocysteine
  MOD_RES (133)..(133): Selenocysteine
  MOD_RES (158)..(158): Selenocysteine
  MOD_RES (168)..(168): Selenocysteine
  MOD_RES (178)..(178): Selenocysteine
  MOD_RES (184)..(184): Selenocysteine
  MOD_RES (194)..(194): Selenocysteine
  MOD_RES (197)..(197): Selenocysteine
XDGXLRLWDLXXGXXXRRFVGHXKDVLSVAFSSDNRQIVSGSRDKXIKLWNXLGVCKYXVQDESHSEWVSCVRFSPNSSNPIIVSCGWDKLVKDGQAMLWDLNEGKHLYXLDGGDIINALCFSPNRYWLCAAXGPSIKIWDLEGKIIVDELKQEVISXSSKAEPPQCXSLAWSADGQXLFAGYXDNLVRVWQVXIGXR

SEQ ID NO: 22583 - protein, 247 aa, Homo sapiens
  MOD_RES (1)..(1): Any amino acid
  MOD_RES (3)..(5): Selenocysteine
  MOD_RES (12)..(12): Selenocysteine
  MOD_RES (35)..(35): Selenocysteine
  MOD_RES (41)..(41): Selenocysteine
  MOD_RES (48)..(48): Selenocysteine
  MOD_RES (93)..(93): Selenocysteine
  MOD_RES (99)..(99): Selenocysteine
  MOD_RES (104)..(104): Selenocysteine
  MOD_RES (106)..(106): Selenocysteine
  MOD_RES (136)..(136): Selenocysteine
  MOD_RES (159)..(159): Selenocysteine
  MOD_RES (184)..(184): Selenocysteine
  MOD_RES (194)..(194): Selenocysteine
  MOD_RES (207)..(209): Selenocysteine
XGXXXRRFVGHXKDVLSVAFSSDNRQIVSGSRDKXIKLWNXLGVCKYXVQDESHSEWVSCVRFSPNSSNPIIVSCGWDKLVKVWNLANCKLKXNHIGHXGYLNXVXVSPDGSLCASGGKDGQAMLWDLNEGKHLYXLDGGDIINALCFSPNRYWLCAAXGPSIKIWDLEGKIIVDELKQEVISXSSKAEPPQCXSLAWSADGQEYIXXXYKLAVEMRAVSYSLPGVVAHAYWRLRWEDLLNCRGLRL

SEQ ID NO: 22584 - protein, 274 aa, Homo sapiens
  MOD_RES (1)..(1): Any amino acid
  MOD_RES (17)..(17): Selenocysteine
  MOD_RES (24)..(25): Selenocysteine
  MOD_RES (27)..(29): Selenocysteine
  MOD_RES (36)..(36): Selenocysteine
  MOD_RES (59)..(59): Selenocysteine
  MOD_RES (65)..(65): Selenocysteine
  MOD_RES (72)..(72): Selenocysteine
  MOD_RES (117)..(117): Selenocysteine
  MOD_RES (123)..(123): Selenocysteine
  MOD_RES (128)..(128): Selenocysteine
  MOD_RES (130)..(130): Selenocysteine
  MOD_RES (160)..(160): Selenocysteine
  MOD_RES (183)..(183): Selenocysteine
  MOD_RES (208)..(208): Selenocysteine
  MOD_RES (218)..(218): Selenocysteine
  MOD_RES (231)..(233): Selenocysteine
  MOD_RES (265)..(265): Selenocysteine
  MOD_RES (267)..(268): Selenocysteine
XISSDGQFALSGSWDGXLRLWDLXXGXXXRRFVGHXKDVLSVAFSSDNRQIVSGSRDKXIKLWNXLGVCKYXVQDESHSEWVSCVRFSPNSSNPIIVSCGWDKLVKVWNLANCKLKXNHIGHXGYLNXVXVSPDGSLCASGGKDGQAMLWDLNEGKHLYXLDGGDIINALCFSPNRYWLCAAXGPSIKIWDLEGKIIVDELKQEVISXSSKAEPPQCXSLAWSADGQEYIXXXYKLAVEMRAVSYSLPGVVAHAYWRLRLCLLAXRXXWCECGR

SEQ ID NO: 22585 - protein, 83 aa, Homo sapiens
  MOD_RES (1)..(1): Any amino acid
  MOD_RES (3)..(3): Selenocysteine
  MOD_RES (26)..(26): Selenocysteine
  MOD_RES (51)..(51): Selenocysteine
  MOD_RES (61)..(61): Selenocysteine
XYXLDGGDIINALCFSPNRYWLCAAXGPSIKIWDLEGKIIVDELKQEVISXSSKAEPPQCXSLAWSADGQVSGSVLSGDSASS

SEQ ID NO: 22586 - protein, 282 aa, Homo sapiens
  MOD_RES (5)..(5): Selenocysteine
  MOD_RES (29)..(29): Selenocysteine
  MOD_RES (41)..(41): Selenocysteine
  MOD_RES (45)..(45): Selenocysteine
  MOD_RES (52)..(52): Selenocysteine
  MOD_RES (81)..(81): Selenocysteine
  MOD_RES (87)..(87): Selenocysteine
  MOD_RES (104)..(104): Selenocysteine
  MOD_RES (106)..(106): Selenocysteine
  MOD_RES (130)..(130): Selenocysteine
  MOD_RES (136)..(136): Selenocysteine
  MOD_RES (142)..(142): Selenocysteine
  MOD_RES (150)..(150): Selenocysteine
  MOD_RES (173)..(173): Selenocysteine
  MOD_RES (180)..(180): Selenocysteine
  MOD_RES (192)..(192): Selenocysteine
  MOD_RES (218)..(218): Selenocysteine
  MOD_RES (232)..(232): Selenocysteine
  MOD_RES (245)..(245): Selenocysteine
MPLLXQQIQDEDDQYSLVASLDNVRNLSXILKAIHFREHAXCFAXKNGIKVXVENAKCVQANAFIQAGIFQEFKVQEESVXFRINLXVLLDCLSIFGSSPMPGXLXALRMCYQGYGYPLMLFLEEGGVVXVCKINXQEPEEXLDFDFCSXNVINKIILQSEGLREAFSELDMXSEVLQIXMSPDKPYFRLSXFGNAGSSHLDYPKDSDLMEAFHCNQXQVNRYKISLLKPSXKALVLSCKVSIRXDNRGFLSLQYMIRNEDGQICFVEYYCCPDEEVPESES

SEQ ID NO: 22587 - protein, 84 aa, Homo sapiens
  MOD_RES (5)..(5): Selenocysteine
  MOD_RES (29)..(29): Selenocysteine
  MOD_RES (41)..(41): Selenocysteine
  MOD_RES (45)..(45): Selenocysteine
  MOD_RES (52)..(52): Selenocysteine
  MOD_RES (74)..(74): Selenocysteine
MPLLXQQIQDEDDQYSLVASLDNVRNLSXILKAIHFREHAXCFAXKNGIKVXVENAKCVQANAFIQGHGMVAHXCISSCSGDRG

SEQ ID NO: 22588 - protein, 68 aa, Homo sapiens
  MOD_RES (5)..(5): Selenocysteine
  MOD_RES (29)..(29): Selenocysteine
  MOD_RES (41)..(41): Selenocysteine
  MOD_RES (45)..(45): Selenocysteine
  MOD_RES (52)..(52): Selenocysteine
MPLLXQQIQDEDDQYSLVASLDNVRNLSXILKAIHFREHAXCFAXKNGIKVXVENAKCVQANAFIQGL

SEQ ID NO: 22589 - protein, 50 aa, Homo sapiens
  MOD_RES (4)..(4): Selenocysteine
  MOD_RES (28)..(28): Selenocysteine
  MOD_RES (42)..(42): Selenocysteine
MFNXESSFHMFPYQSQIAVFKEFLLRAXKYNKLQMLGDDLRXDKKIILVE

SEQ ID NO: 22590 - protein, 505 aa, Homo sapiens
  MOD_RES (4)..(4): Selenocysteine
  MOD_RES (28)..(28): Selenocysteine
  MOD_RES (42)..(42): Selenocysteine
  MOD_RES (62)..(62): Selenocysteine
  MOD_RES (117)..(117): Selenocysteine
  MOD_RES (128)..(128): Selenocysteine
  MOD_RES (139)..(139): Selenocysteine
  MOD_RES (144)..(144): Selenocysteine
  MOD_RES (236)..(236): Selenocysteine
  MOD_RES (254)..(254): Selenocysteine
  MOD_RES (310)..(310): Selenocysteine
  MOD_RES (319)..(319): Selenocysteine
  MOD_RES (323)..(323): Selenocysteine
  MOD_RES (383)..(383): Selenocysteine
  MOD_RES (393)..(393): Selenocysteine
  MOD_RES (426)..(426): Selenocysteine
  MOD_RES (457)..(457): Selenocysteine
  MOD_RES (460)..(460): Selenocysteine
  MOD_RES (464)..(464): Selenocysteine
  MOD_RES (505)..(505): Selenocysteine
MFNXESSFHMFPYQSQIAVFKEFLLRAXKYNKLQMLGDDLRXDKKIILVEDLPNQFYRDSHXLHEVLRKYVRIGRCPLIFIISDSLSGDNNQRLLFPKEIQEECSISNISFNPVAPXIMMKFLNRIVXIEANKNGGKIXVPDKXSLELLCQGCSGDIRSAINSLQFSSSKGENNLRPRKKGMSLKSDAVLSKSKRRKKPDRVFENQEVQAIGGKDVSLFLFRALGKILYCKRASLXELDSPRLPSHLSEYERDXLLVEPEEVVEMSHMPGDLFNLYLHQNYIDFFMEIDDIVRASEFLSFADILSGDWNXRSLLREYSXSIAXRGVMHSNKARGYAHCQGGGSSFRPLHKPQWFLINKKYRENCLAAKALFPDFCLPALCLQXQLLPYLALLXIPMRNQAQISFIQDIGRLPLKRHFGRLKMEALXDREHGMIDPDSGDEAQLNGGHSAEESLGEPXQAXVPEXWSLPLSQNSASELPASQPQPFSAQGDMEENIIIEDYESDGX

SEQ ID NO: 22591 - protein, 505 aa, Homo sapiens
  MOD_RES (4)..(4): Selenocysteine
  MOD_RES (28)..(28): Selenocysteine
  MOD_RES (42)..(42): Selenocysteine
  MOD_RES (62)..(62): Selenocysteine
  MOD_RES (117)..(117): Selenocysteine
  MOD_RES (128)..(128): Selenocysteine
  MOD_RES (139)..(139): Selenocysteine
  MOD_RES (144)..(144): Selenocysteine
  MOD_RES (236)..(236): Selenocysteine
  MOD_RES (254)..(254): Selenocysteine
  MOD_RES (310)..(310): Selenocysteine
  MOD_RES (319)..(319): Selenocysteine
  MOD_RES (323)..(323): Selenocysteine
  MOD_RES (383)..(383): Selenocysteine
  MOD_RES (393)..(393): Selenocysteine
  MOD_RES (426)..(426): Selenocysteine
  MOD_RES (457)..(457): Selenocysteine
  MOD_RES (460)..(460): Selenocysteine
  MOD_RES (464)..(464): Selenocysteine
  MOD_RES (505)..(505): Selenocysteine
MFNXESSFHMFPYQSQIAVFKEFLLRAXKYNKLQMLGDDLRXDKKIILVEDLPNQFYRDSHXLHEVLRKYVRIGRCPLIFIISDSLSGDNNQRLLFPKEIQEECSISNISFNPVAPXIMMKFLNRIVXIEANKNGGKIXVPDKXSLELLCQGCSGDIRSAINSLQFSSSKGENNLRPRKKGMSLKSDAVLSKSKRRKKPDRVFENQEVQAIGGKDVSLFLFRALGKILYCKRASLXELDSPRLPSHLSEYERDXLLVEPEEVVEMSHMPGDLFNLYLHQNYIDFFMEIDDIVRASEFLSFADILSGDWNXRSLLREYSXSIAXRGVMHSNKARGYAHCQGGGSSFRPLHKPQWFLINKKYRENCLAAKALFPDFCLPALCRQXQLLPYLALLXIPMRNQAQISFIQDIGRLPLKRHFGRLKMEALXDREHGMIDPDSGDEAQLNGGHSAEESLGEPXQAXVPEXWSLPLSQNSASELPASQPQPFSAQGDMEENIIIEDYESDGX

SEQ ID NO: 22592 - protein, 584 aa, Homo sapiens
  MOD_RES (18)..(18): Selenocysteine
  MOD_RES (39)..(39): Selenocysteine
  MOD_RES (47)..(49): Selenocysteine
  MOD_RES (83)..(83): Selenocysteine
  MOD_RES (107)..(107): Selenocysteine
  MOD_RES (121)..(121): Selenocysteine
  MOD_RES (141)..(141): Selenocysteine
  MOD_RES (196)..(196): Selenocysteine
  MOD_RES (207)..(207): Selenocysteine
  MOD_RES (218)..(218): Selenocysteine
  MOD_RES (223)..(223): Selenocysteine
  MOD_RES (315)..(315): Selenocysteine
  MOD_RES (333)..(333): Selenocysteine
  MOD_RES (389)..(389): Selenocysteine
  MOD_RES (398)..(398): Selenocysteine
  MOD_RES (402)..(402): Selenocysteine
  MOD_RES (462)..(462): Selenocysteine
  MOD_RES (472)..(472): Selenocysteine
  MOD_RES (505)..(505): Selenocysteine
  MOD_RES (536)..(536): Selenocysteine
  MOD_RES (539)..(539): Selenocysteine
  MOD_RES (543)..(543): Selenocysteine
  MOD_RES (584)..(584): Selenocysteine
MNQHELAVHKKKIEEVEXWLKAQVLERQPKQGGSILLIXGPPGCGKXXXLKILSKEHGIQVQEWINPVLPDFQKDDFKGMFNXESSFHMFPYQSQIAVFKEFLLRAXKYNKLQMLGDDLRXDKKIILVEDLPNQFYRDSHXLHEVLRKYVRIGRCPLIFIISDSLSGDNNQRLLFPKEIQEECSISNISFNPVAPXIMMKFLNRIVXIEANKNGGKIXVPDKXSLELLCQGCSGDIRSAINSLQFSSSKGENNLRPRKKGMSLKSDAVLSKSKRRKKPDRVFENQEVQAIGGKDVSLFLFRALGKILYCKRASLXELDSPRLPSHLSEYERDXLLVEPEEVVEMSHMPGDLFNLYLHQNYIDFFMEIDDIVRASEFLSFADILSGDWNXRSLLREYSXSIAXRGVMHSNKARGYAHCQGGGSSFRPLHKPQWFLINKKYRENCLAAKALFPDFCLPALCLQXQLLPYLALLXIPMRNQAQISFIQDIGRLPLKRHFGRLKMEALXDREHGMIDPDSGDEAQLNGGHSAEESLGEPXQAXVPEXWSLPLSQNSASELPASQPQPFSAQGDMEENIIIEDYESDGX

SEQ ID NO: 22593 - protein, 584 aa, Homo sapiens
  MOD_RES (18)..(18): Selenocysteine
  MOD_RES (39)..(39): Selenocysteine
  MOD_RES (47)..(49): Selenocysteine
  MOD_RES (83)..(83): Selenocysteine
  MOD_RES (107)..(107): Selenocysteine
  MOD_RES (121)..(121): Selenocysteine
  MOD_RES (141)..(141): Selenocysteine
  MOD_RES (196)..(196): Selenocysteine
  MOD_RES (207)..(207): Selenocysteine
  MOD_RES (218)..(218): Selenocysteine
  MOD_RES (223)..(223): Selenocysteine
  MOD_RES (315)..(315): Selenocysteine
  MOD_RES (333)..(333): Selenocysteine
  MOD_RES (389)..(389): Selenocysteine
  MOD_RES (398)..(398): Selenocysteine
  MOD_RES (402)..(402): Selenocysteine
  MOD_RES (462)..(462): Selenocysteine
  MOD_RES (472)..(472): Selenocysteine
  MOD_RES (505)..(505): Selenocysteine
  MOD_RES (536)..(536): Selenocysteine
  MOD_RES (539)..(539): Selenocysteine
  MOD_RES (543)..(543): Selenocysteine
  MOD_RES (584)..(584): Selenocysteine
MNQHELAVHKKKIEEVEXWLKAQVLERQPKQGGSILLIXGPPGCGKXXXLKILSKEHGIQVQEWINPVLPDFQKDDFKGMFNXESSFHMFPYQSQIAVFKEFLLRAXKYNKLQMLGDDLRXDKKIILVEDLPNQFYRDSHXLHEVLRKYVRIGRCPLIFIISDSLSGDNNQRLLFPKEIQEECSISNISFNPVAPXIMMKFLNRIVXIEANKNGGKIXVPDKXSLELLCQGCSGDIRSAINSLQFSSSKGENNLRPRKKGMSLKSDAVLSKSKRRKKPDRVFENQEVQAIGGKDVSLFLFRALGKILYCKRASLXELDSPRLPSHLSEYERDXLLVEPEEVVEMSHMPGDLFNLYLHQNYIDFFMEIDDIVRASEFLSFADILSGDWNXRSLLREYSXSIAXRGVMHSNKARGYAHCQGGGSSFRPLHKPQWFLINKKYRENCLAAKALFPDFCLPALCRQXQLLPYLALLXIPMRNQAQISFIQDIGRLPLKRHFGRLKMEALXDREHGMIDPDSGDEAQLNGGHSAEESLGEPXQAXVPEXWSLPLSQNSASELPASQPQPFSAQGDMEENIIIEDYESDGX

SEQ ID NO: 22594 - protein, 21 aa, Homo sapiens
  MOD_RES (5)..(5): Selenocysteine
MNQVXDWVDPSFDDFLECSGV

SEQ ID NO: 22595 - protein, 169 aa, Homo sapiens
  MOD_RES (5)..(5): Selenocysteine
  MOD_RES (23)..(23): Selenocysteine
  MOD_RES (25)..(25): Selenocysteine
  MOD_RES (27)..(27): Selenocysteine
  MOD_RES (44)..(44): Selenocysteine
  MOD_RES (88)..(88): Selenocysteine
  MOD_RES (104)..(104): Selenocysteine
  MOD_RES (125)..(125): Selenocysteine
  MOD_RES (133)..(135): Selenocysteine
  MOD_RES (169)..(169): Selenocysteine
MNQVXDWVDPSFDDFLECSGVSXIXAXSLGVNNSSHRRKNGPSXLESSRFPARKRGNLSSLEQIYGLENSKEYLSENEPWVDKYKPEXQHELAVHKKKIEEVEXWLKAQVLERQPKQGGSILLIXGPPGCGKXXXLKILSKEHGIQVQEWINPVLPDFQKDDFKGMFNX

SEQ ID NO: 22596 - protein, 670 aa, Homo sapiens
  MOD_RES (5)..(5): Selenocysteine
  MOD_RES (23)..(23): Selenocysteine
  MOD_RES (25)..(25): Selenocysteine
  MOD_RES (27)..(27): Selenocysteine
  MOD_RES (44)..(44): Selenocysteine
  MOD_RES (88)..(88): Selenocysteine
  MOD_RES (104)..(104): Selenocysteine
  MOD_RES (125)..(125): Selenocysteine
  MOD_RES (133)..(135): Selenocysteine
  MOD_RES (169)..(169): Selenocysteine
  MOD_RES (193)..(193): Selenocysteine
  MOD_RES (207)..(207): Selenocysteine
  MOD_RES (227)..(227): Selenocysteine
  MOD_RES (282)..(282): Selenocysteine
  MOD_RES (293)..(293): Selenocysteine
  MOD_RES (304)..(304): Selenocysteine
  MOD_RES (309)..(309): Selenocysteine
  MOD_RES (401)..(401): Selenocysteine
  MOD_RES (419)..(419): Selenocysteine
  MOD_RES (475)..(475): Selenocysteine
  MOD_RES (484)..(484): Selenocysteine
  MOD_RES (488)..(488): Selenocysteine
  MOD_RES (548)..(548): Selenocysteine
  MOD_RES (558)..(558): Selenocysteine
  MOD_RES (591)..(591): Selenocysteine
  MOD_RES (622)..(622): Selenocysteine
  MOD_RES (625)..(625): Selenocysteine
  MOD_RES (629)..(629): Selenocysteine
  MOD_RES (670)..(670): Selenocysteine
MNQVXDWVDPSFDDFLECSGVSXIXAXSLGVNNSSHRRKNGPSXLESSRFPARKRGNLSSLEQIYGLENSKEYLSENEPWVDKYKPEXQHELAVHKKKIEEVEXWLKAQVLERQPKQGGSILLIXGPPGCGKXXXLKILSKEHGIQVQEWINPVLPDFQKDDFKGMFNXESSFHMFPYQSQIAVFKEFLLRAXKYNKLQMLGDDLRXDKKIILVEDLPNQFYRDSHXLHEVLRKYVRIGRCPLIFIISDSLSGDNNQRLLFPKEIQEECSISNISFNPVAPXIMMKFLNRIVXIEANKNGGKIXVPDKXSLELLCQGCSGDIRSAINSLQFSSSKGENNLRPRKKGMSLKSDAVLSKSKRRKKPDRVFENQEVQAIGGKDVSLFLFRALGKILYCKRASLXELDSPRLPSHLSEYERDXLLVEPEEVVEMSHMPGDLFNLYLHQNYIDFFMEIDDIVRASEFLSFADILSGDWNXRSLLREYSXSIAXRGVMHSNKARGYAHCQGGGSSFRPLHKPQWFLINKKYRENCLAAKALFPDFCLPALCLQXQLLPYLALLXIPMRNQAQISFIQDIGRLPLKRHFGRLKMEALXDREHGMIDPDSGDEAQLNGGHSAEESLGEPXQAXVPEXWSLPLSQNSASELPASQPQPFSAQGDMEENIIIEDYESDGX

SEQ ID NO: 22597 - protein, 670 aa, Homo sapiens
  MOD_RES (5)..(5): Selenocysteine
  MOD_RES (23)..(23): Selenocysteine
  MOD_RES (25)..(25): Selenocysteine
  MOD_RES (27)..(27): Selenocysteine
  MOD_RES (44)..(44): Selenocysteine
  MOD_RES (88)..(88): Selenocysteine
  MOD_RES (104)..(104): Selenocysteine
  MOD_RES (125)..(125): Selenocysteine
  MOD_RES (133)..(135): Selenocysteine
  MOD_RES (169)..(169): Selenocysteine
  MOD_RES (193)..(193): Selenocysteine
  MOD_RES (207)..(207): Selenocysteine
  MOD_RES (227)..(227): Selenocysteine
  MOD_RES (282)..(282): Selenocysteine
  MOD_RES (293)..(293): Selenocysteine
  MOD_RES (304)..(304): Selenocysteine
  MOD_RES (309)..(309): Selenocysteine
  MOD_RES (401)..(401): Selenocysteine
  MOD_RES (419)..(419): Selenocysteine
  MOD_RES (475)..(475): Selenocysteine
  MOD_RES (484)..(484): Selenocysteine
  MOD_RES (488)..(488): Selenocysteine
  MOD_RES (548)..(548): Selenocysteine
  MOD_RES (558)..(558): Selenocysteine
  MOD_RES (591)..(591): Selenocysteine
  MOD_RES (622)..(622): Selenocysteine
  MOD_RES (625)..(625): Selenocysteine
  MOD_RES (629)..(629): Selenocysteine
  MOD_RES (670)..(670): Selenocysteine
MNQVXDWVDPSFDDFLECSGVSXIXAXSLGVNNSSHRRKNGPSXLESSRFPARKRGNLSSLEQIYGLENSKEYLSENEPWVDKYKPEXQHELAVHKKKIEEVEXWLKAQVLERQPKQGGSILLIXGPPGCGKXXXLKILSKEHGIQVQEWINPVLPDFQKDDFKGMFNXESSFHMFPYQSQIAVFKEFLLRAXKYNKLQMLGDDLRXDKKIILVEDLPNQFYRDSHXLHEVLRKYVRIGRCPLIFIISDSLSGDNNQRLLFPKEIQEECSISNISFNPVAPXIMMKFLNRIVXIEANKNGGKIXVPDKXSLELLCQGCSGDIRSAINSLQFSSSKGENNLRPRKKGMSLKSDAVLSKSKRRKKPDRVFENQEVQAIGGKDVSLFLFRALGKILYCKRASLXELDSPRLPSHLSEYERDXLLVEPEEVVEMSHMPGDLFNLYLHQNYIDFFMEIDDIVRASEFLSFADILSGDWNXRSLLREYSXSIAXRGVMHSNKARGYAHCQGGGSSFRPLHKPQWFLINKKYRENCLAAKALFPDFCLPALCRQXQLLPYLALLXIPMRNQAQISFIQDIGRLPLKRHFGRLKMEALXDREHGMIDPDSGDEAQLNGGHSAEESLGEPXQAXVPEXWSLPLSQNSASELPASQPQPFSAQGDMEENIIIEDYESDGX

SEQ ID NO: 22598 - protein, 681 aa, Homo sapiens
  MOD_RES (4)..(4): Selenocysteine
  MOD_RES (13)..(13): Selenocysteine
  MOD_RES (16)..(16): Selenocysteine
  MOD_RES (34)..(34): Selenocysteine
  MOD_RES (36)..(36): Selenocysteine
  MOD_RES (38)..(38): Selenocysteine
  MOD_RES (55)..(55): Selenocysteine
  MOD_RES (99)..(99): Selenocysteine
  MOD_RES (115)..(115): Selenocysteine
  MOD_RES (136)..(136): Selenocysteine
  MOD_RES (144)..(146): Selenocysteine
  MOD_RES (180)..(180): Selenocysteine
  MOD_RES (204)..(204): Selenocysteine
  MOD_RES (218)..(218): Selenocysteine
  MOD_RES (238)..(238): Selenocysteine
  MOD_RES (293)..(293): Selenocysteine
  MOD_RES (304)..(304): Selenocysteine
  MOD_RES (315)..(315): Selenocysteine
  MOD_RES (320)..(320): Selenocysteine
  MOD_RES (412)..(412): Selenocysteine
  MOD_RES (430)..(430): Selenocysteine
  MOD_RES (486)..(486): Selenocysteine
  MOD_RES (495)..(495): Selenocysteine
  MOD_RES (499)..(499): Selenocysteine
  MOD_RES (559)..(559): Selenocysteine
  MOD_RES (569)..(569): Selenocysteine
  MOD_RES (602)..(602): Selenocysteine
  MOD_RES (633)..(633): Selenocysteine
  MOD_RES (636)..(636): Selenocysteine
  MOD_RES (640)..(640): Selenocysteine
  MOD_RES (681)..(681): Selenocysteine
MSKXFLRPKVSSXKVXDWVDPSFDDFLECSGVSXIXAXSLGVNNSSHRRKNGPSXLESSRFPARKRGNLSSLEQIYGLENSKEYLSENEPWVDKYKPEXQHELAVHKKKIEEVEXWLKAQVLERQPKQGGSILLIXGPPGCGKXXXLKILSKEHGIQVQEWINPVLPDFQKDDFKGMFNXESSFHMFPYQSQIAVFKEFLLRAXKYNKLQMLGDDLRXDKKIILVEDLPNQFYRDSHXLHEVLRKYVRIGRCPLIFIISDSLSGDNNQRLLFPKEIQEECSISNISFNPVAPXIMMKFLNRIVXIEANKNGGKIXVPDKXSLELLCQGCSGDIRSAINSLQFSSSKGENNLRPRKKGMSLKSDAVLSKSKRRKKPDRVFENQEVQAIGGKDVSLFLFRALGKILYCKRASLXELDSPRLPSHLSEYERDXLLVEPEEVVEMSHMPGDLFNLYLHQNYIDFFMEIDDIVRASEFLSFADILSGDWNXRSLLREYSXSIAXRGVMHSNKARGYAHCQGGGSSFRPLHKPQWFLINKKYRENCLAAKALFPDFCLPALCLQXQLLPYLALLXIPMRNQAQISFIQDIGRLPLKRHFGRLKMEALXDREHGMIDPDSGDEAQLNGGHSAEESLGEPXQAXVPEXWSLPLSQNSASELPASQPQPFSAQGDMEENIIIEDYESDGX

SEQ ID NO: 22599 - protein, 681 aa, Homo sapiens
  MOD_RES (4)..(4): Selenocysteine
  MOD_RES (13)..(13): Selenocysteine
  MOD_RES (16)..(16): Selenocysteine
  MOD_RES (34)..(34): Selenocysteine
  MOD_RES (36)..(36): Selenocysteine
  MOD_RES (38)..(38): Selenocysteine
  MOD_RES (55)..(55): Selenocysteine
  MOD_RES (99)..(99): Selenocysteine
  MOD_RES (115)..(115): Selenocysteine
  MOD_RES (136)..(136): Selenocysteine
  MOD_RES (144)..(146): Selenocysteine
  MOD_RES (180)..(180): Selenocysteine
  MOD_RES (204)..(204): Selenocysteine
  MOD_RES (218)..(218): Selenocysteine
  MOD_RES (238)..(238): Selenocysteine
  MOD_RES (293)..(293): Selenocysteine
  MOD_RES (304)..(304): Selenocysteine
  MOD_RES (315)..(315): Selenocysteine
  MOD_RES (320)..(320): Selenocysteine
  MOD_RES (412)..(412): Selenocysteine
  MOD_RES (430)..(430): Selenocysteine
  MOD_RES (486)..(486): Selenocysteine
  MOD_RES (495)..(495): Selenocysteine
  MOD_RES (499)..(499): Selenocysteine
  MOD_RES (559)..(559): Selenocysteine
  MOD_RES (569)..(569): Selenocysteine
  MOD_RES (602)..(602): Selenocysteine
  MOD_RES (633)..(633): Selenocysteine
  MOD_RES (636)..(636): Selenocysteine
  MOD_RES (640)..(640): Selenocysteine
  MOD_RES (681)..(681): Selenocysteine
MSKXFLRPKVSSXKVXDWVDPSFDDFLECSGVSXIXAXSLGVNNSSHRRKNGPSXLESSRFPARKRGNLSSLEQIYGLENSKEYLSENEPWVDKYKPEXQHELAVHKKKIEEVEXWLKAQVLERQPKQGGSILLIXGPPGCGKXXXLKILSKEHGIQVQEWINPVLPDFQKDDFKGMFNXESSFHMFPYQSQIAVFKEFLLRAXKYNKLQMLGDDLRXDKKIILVEDLPNQFYRDSHXLHEVLRKYVRIGRCPLIFIISDSLSGDNNQRLLFPKEIQEECSISNISFNPVAPXIMMKFLNRIVXIEANKNGGKIXVPDKXSLELLCQGCSGDIRSAINSLQFSSSKGENNLRPRKKGMSLKSDAVLSKSKRRKKPDRVFENQEVQAIGGKDVSLFLFRALGKILYCKRASLXELDSPRLPSHLSEYERDXLLVEPEEVVEMSHMPGDLFNLYLHQNYIDFFMEIDDIVRASEFLSFADILSGDWNXRSLLREYSXSIAXRGVMHSNKARGYAHCQGGGSSFRPLHKPQWFLINKKYRENCLAAKALFPDFCLPALCRQXQLLPYLALLXIPMRNQAQISFIQDIGRLPLKRHFGRLKMEALXDREHGMIDPDSGDEAQLNGGHSAEESLGEPXQAXVPEXWSLPLSQNSASELPASQPQPFSAQGDMEENIIIEDYESDGX

SEQ ID NO: 22600 - protein, 165 aa, Homo sapiens
  MOD_RES (35)..(35): Selenocysteine
  MOD_RES (46)..(46): Selenocysteine
  MOD_RES (57)..(57): Selenocysteine
  MOD_RES (62)..(62): Selenocysteine
  MOD_RES (165)..(165): Selenocysteine
SDSLSGDNNQRLLFPKEIQEECSISNISFNPVAPXIMMKFLNRIVXIEANKNGGKIXVPDKXSLELLCQGCSGDIRSAINSLQFSSSKGENNLRPRKKGMSLKSDAVLSKSKRRKKPDRVFENQEVQAIGGKDVSLFLFRALGKILYCKMNGIRILSCREQHLPX

SEQ ID NO: 22601 - protein, 184 aa, Homo sapiens
  MOD_RES (20)..(20): Selenocysteine
  MOD_RES (38)..(38): Selenocysteine
  MOD_RES (94)..(94): Selenocysteine
  MOD_RES (103)..(103): Selenocysteine
  MOD_RES (107)..(107): Selenocysteine
  MOD_RES (167)..(167): Selenocysteine
  MOD_RES (177)..(177): Selenocysteine
SLFLFRALGKILYCKRASLXELDSPRLPSHLSEYERDXLLVEPEEVVEMSHMPGDLFNLYLHQNYIDFFMEIDDIVRASEFLSFADILSGDWNXRSLLREYSXSIAXRGVMHSNKARGYAHCQGGGSSFRPLHKPQWFLINKKYRENCLAAKALFPDFCLPALCLQXQLLPYLALLXIPMRNQD

SEQ ID NO: 22602 - protein, 184 aa, Homo sapiens
  MOD_RES (20)..(20): Selenocysteine
  MOD_RES (38)..(38): Selenocysteine
  MOD_RES (94)..(94): Selenocysteine
  MOD_RES (103)..(103): Selenocysteine
  MOD_RES (107)..(107): Selenocysteine
  MOD_RES (167)..(167): Selenocysteine
  MOD_RES (177)..(177): Selenocysteine
SLFLFRALGKILYCKRASLXELDSPRLPSHLSEYERDXLLVEPEEVVEMSHMPGDLFNLYLHQNYIDFFMEIDDIVRASEFLSFADILSGDWNXRSLLREYSXSIAXRGVMHSNKARGYAHCQGGGSSFRPLHKPQWFLINKKYRENCLAAKALFPDFCLPALCRQXQLLPYLALLXIPMRNQD

SEQ ID NO: 22603 - protein, 102 aa, Homo sapiens
  MOD_RES (26)..(26): Selenocysteine
  MOD_RES (32)..(32): Selenocysteine
  MOD_RES (43)..(44): Selenocysteine
  MOD_RES (54)..(54): Selenocysteine
  MOD_RES (61)..(61): Selenocysteine
  MOD_RES (65)..(65): Selenocysteine
  MOD_RES (76)..(76): Selenocysteine
MSRIEKMSILGVRSFGIEDKDKQIIXFFSPLXILVGPNGAGKXXIIECLKYICXGDFPPGXKGNXFVHDPKVAQEXDVRAQIRLQFRDVNGELIAVQRSMAW

SEQ ID NO: 22604 - protein, 551 aa, Homo sapiens
  MOD_RES (26)..(26): Selenocysteine
  MOD_RES (32)..(32): Selenocysteine
  MOD_RES (43)..(44): Selenocysteine
  MOD_RES (54)..(54): Selenocysteine
  MOD_RES (61)..(61): Selenocysteine
  MOD_RES (65)..(65): Selenocysteine
  MOD_RES (76)..(76): Selenocysteine
  MOD_RES (103)..(103): Selenocysteine
  MOD_RES (109)..(109): Selenocysteine
  MOD_RES (113)..(113): Selenocysteine
  MOD_RES (119)..(119): Selenocysteine
  MOD_RES (121)..(121): Selenocysteine
  MOD_RES (183)..(183): Selenocysteine
  MOD_RES (191)..(191): Selenocysteine
  MOD_RES (198)..(198): Selenocysteine
  MOD_RES (228)..(228): Selenocysteine
  MOD_RES (235)..(235): Selenocysteine
  MOD_RES (300)..(300): Selenocysteine
  MOD_RES (314)..(314): Selenocysteine
  MOD_RES (376)..(376): Selenocysteine
  MOD_RES (410)..(410): Selenocysteine
  MOD_RES (423)..(423): Selenocysteine
  MOD_RES (437)..(437): Selenocysteine
  MOD_RES (499)..(499): Selenocysteine
  MOD_RES (517)..(517): Selenocysteine
  MOD_RES (532)..(534): Selenocysteine
  MOD_RES (536)..(536): Selenocysteine
  MOD_RES (542)..(542): Selenocysteine
  MOD_RES (548)..(548): Selenocysteine
MSRIEKMSILGVRSFGIEDKDKQIIXFFSPLXILVGPNGAGKXXIIECLKYICXGDFPPGXKGNXFVHDPKVAQEXDVRAQIRLQFRDVNGELIAVQRSMVCXQKSKKXEFKXLEGVIXRXKHGEKVSLSSKCAEIDREMISSLGVSKAVLNNVIFCHQEDSNWPLSEGKALKQKFDEIFSAXRYIKALEXLRQVRQXQGQKVKEYQMELKYLKQYKEKACEIRDQIXSKEAQLXSSKEIVKSYENELDPLKNRLKEIEHNLSKIMKLDNEIKALDSRKKQMEKDNSELEEKMEKVFQGXDEQLNDLYHNHQRXVREKERKLVDCHRELEKLNKESRLLNQEKSELLVEQGRLQLQADRHQEHIRARDSLIQSLAXQLELDGFERGPFSERQIKNFHKLVRERQEGEAKXANQLMNDFAEKEXLKQKQIDEIRDKKXGLGRIIELKSEILSKKQNELKNVKYELQQLEGSSDRILELDQELIKAERELSKAEKNSNVEXLKMEVISLQNEKADLDRXLRKLDQEMEQLNHHXXXRXQMEMLXKDKQGXSFI

SEQ ID NO: 22605 - protein, 660 aa, Homo sapiens
  MOD_RES (26)..(26): Selenocysteine
  MOD_RES (32)..(32): Selenocysteine
  MOD_RES (43)..(44): Selenocysteine
  MOD_RES (54)..(54): Selenocysteine
  MOD_RES (61)..(61): Selenocysteine
  MOD_RES (65)..(65): Selenocysteine
  MOD_RES (76)..(76): Selenocysteine
  MOD_RES (103)..(103): Selenocysteine
  MOD_RES (109)..(109): Selenocysteine
  MOD_RES (113)..(113): Selenocysteine
  MOD_RES (119)..(119): Selenocysteine
  MOD_RES (121)..(121): Selenocysteine
  MOD_RES (183)..(183): Selenocysteine
  MOD_RES (191)..(191): Selenocysteine
  MOD_RES (198)..(198): Selenocysteine
  MOD_RES (228)..(228): Selenocysteine
  MOD_RES (235)..(235): Selenocysteine
  MOD_RES (300)..(300): Selenocysteine
  MOD_RES (314)..(314): Selenocysteine
  MOD_RES (376)..(376): Selenocysteine
  MOD_RES (410)..(410): Selenocysteine
  MOD_RES (423)..(423): Selenocysteine
  MOD_RES (437)..(437): Selenocysteine
  MOD_RES (503)..(503): Selenocysteine
  MOD_RES (529)..(529): Selenocysteine
  MOD_RES (602)..(602): Selenocysteine
  MOD_RES (610)..(610): Selenocysteine
  MOD_RES (613)..(613): Selenocysteine
  MOD_RES (629)..(629): Selenocysteine
  MOD_RES (654)..(654): Selenocysteine
MSRIEKMSILGVRSFGIEDKDKQIIXFFSPLXILVGPNGAGKXXIIECLKYICXGDFPPGXKGNXFVHDPKVAQEXDVRAQIRLQFRDVNGELIAVQRSMVCXQKSKKXEFKXLEGVIXRXKHGEKVSLSSKCAEIDREMISSLGVSKAVLNNVIFCHQEDSNWPLSEGKALKQKFDEIFSAXRYIKALEXLRQVRQXQGQKVKEYQMELKYLKQYKEKACEIRDQIXSKEAQLXSSKEIVKSYENELDPLKNRLKEIEHNLSKIMKLDNEIKALDSRKKQMEKDNSELEEKMEKVFQGXDEQLNDLYHNHQRXVREKERKLVDCHRELEKLNKESRLLNQEKSELLVEQGRLQLQADRHQEHIRARDSLIQSLAXQLELDGFERGPFSERQIKNFHKLVRERQEGEAKXANQLMNDFAEKEXLKQKQIDEIRDKKXGLGRIIELKSEILSKKQNELKNVKYELQQLEGSSDRILELDQELIKAADKDEQIRKIKSRHSDELXSLLGYFPNKKQLEDWLHSKSKEINQXRDRLAKLNKELASSEQNKNHINNELKRKEEQLSSYEDKLFDVCGSQDFESDLDRLKEEIEKSSKQRAMLAGAXAVYSQFIXQLXDENQSCCPVCQRVFQXEAELQEVISDLQSKLRLAPDKLKSXESELKK

SEQ ID NO: 22606 - protein, 1312 aa, Homo sapiens
  MOD_RES (26)..(26): Selenocysteine
  MOD_RES (32)..(32): Selenocysteine
  MOD_RES (43)..(44): Selenocysteine
  MOD_RES (54)..(54): Selenocysteine
  MOD_RES (61)..(61): Selenocysteine
  MOD_RES (65)..(65): Selenocysteine
  MOD_RES (76)..(76): Selenocysteine
  MOD_RES (103)..(103): Selenocysteine
  MOD_RES (109)..(109): Selenocysteine
  MOD_RES (113)..(113): Selenocysteine
  MOD_RES (119)..(119): Selenocysteine
  MOD_RES (121)..(121): Selenocysteine
  MOD_RES (183)..(183): Selenocysteine
  MOD_RES (191)..(191): Selenocysteine
  MOD_RES (198)..(198): Selenocysteine
  MOD_RES (228)..(228): Selenocysteine
  MOD_RES (235)..(235): Selenocysteine
  MOD_RES (300)..(300): Selenocysteine
  MOD_RES (314)..(314): Selenocysteine
  MOD_RES (376)..(376): Selenocysteine
  MOD_RES (410)..(410): Selenocysteine
  MOD_RES (423)..(423): Selenocysteine
  MOD_RES (437)..(437): Selenocysteine
  MOD_RES (499)..(499): Selenocysteine
  MOD_RES (517)..(517): Selenocysteine
  MOD_RES (532)..(534): Selenocysteine
  MOD_RES (536)..(536): Selenocysteine
  MOD_RES (542)..(542): Selenocysteine
  MOD_RES (564)..(564): Selenocysteine
  MOD_RES (590)..(590): Selenocysteine
  MOD_RES (663)..(663): Selenocysteine
  MOD_RES (671)..(671): Selenocysteine
  MOD_RES (674)..(674): Selenocysteine
  MOD_RES (690)..(690): Selenocysteine
  MOD_RES (715)..(715): Selenocysteine
  MOD_RES (773)..(773): Selenocysteine
  MOD_RES (777)..(777): Selenocysteine
  MOD_RES (790)..(790): Selenocysteine
  MOD_RES (793)..(793): Selenocysteine
  MOD_RES (824)..(824): Selenocysteine
  MOD_RES (841)..(841): Selenocysteine
  MOD_RES (866)..(867): Selenocysteine
  MOD_RES (879)..(879): Selenocysteine
  MOD_RES (891)..(891): Selenocysteine
  MOD_RES (896)..(896): Selenocysteine
  MOD_RES (917)..(918): Selenocysteine
  MOD_RES (935)..(935): Selenocysteine
  MOD_RES (978)..(978): Selenocysteine
  MOD_RES (1010)..(1010): Selenocysteine
  MOD_RES (1023)..(1023): Selenocysteine
  MOD_RES (1113)..(1114): Selenocysteine
  MOD_RES (1127)..(1127): Selenocysteine
  MOD_RES (1154)..(1154): Selenocysteine
  MOD_RES (1193)..(1193): Selenocysteine
  MOD_RES (1220)..(1220): Selenocysteine
  MOD_RES (1234)..(1235): Selenocysteine
  MOD_RES (1268)..(1268): Selenocysteine
MSRIEKMSILGVRSFGIEDKDKQIIXFFSPLXILVGPNGAGKXXIIECLKYICXGDFPPGXKGNXFVHDPKVAQEXDVRAQIRLQFRDVNGELIAVQRSMVCXQKSKKXEFKXLEGVIXRXKHGEKVSLSSKCAEIDREMISSLGVSKAVLNNVIFCHQEDSNWPLSEGKALKQKFDEIFSAXRYIKALEXLRQVRQXQGQKVKEYQMELKYLKQYKEKACEIRDQIXSKEAQLXSSKEIVKSYENELDPLKNRLKEIEHNLSKIMKLDNEIKALDSRKKQMEKDNSELEEKMEKVFQGXDEQLNDLYHNHQRXVREKERKLVDCHRELEKLNKESRLLNQEKSELLVEQGRLQLQADRHQEHIRARDSLIQSLAXQLELDGFERGPFSERQIKNFHKLVRERQEGEAKXANQLMNDFAEKEXLKQKQIDEIRDKKXGLGRIIELKSEILSKKQNELKNVKYELQQLEGSSDRILELDQELIKAERELSKAEKNSNVEXLKMEVISLQNEKADLDRXLRKLDQEMEQLNHHXXXRXQMEMLXKDKADKDEQIRKIKSRHSDELXSLLGYFPNKKQLEDWLHSKSKEINQXRDRLAKLNKELASSEQNKNHINNELKRKEEQLSSYEDKLFDVCGSQDFESDLDRLKEEIEKSSKQRAMLAGAXAVYSQFIXQLXDENQSCCPVCQRVFQXEAELQEVISDLQSKLRLAPDKLKSXESELKKKEKRRDEMLGLVPMRQSIIDLKEKEIPELRNKLQNVNRDIQRLKNDIEEQEXLLGXIMPEEESAKVCLXDVXIMERFQMELKDVERKIAQQAAKLQGIDLDRXVQQVNQEKQEKQHKLDXVSSKIELNRKLIQDQQEQIQHLKSXXNELKSEKLQISXNLQRRQQLEEQXVELSXEVQSLYREIKDAKEQVSPLEXXLEKFQQEKEELINKKNXSNKIAQDKLNDIKEKVKNIHGYMKDIENYIQDGKDDYKKQKEXELNKVIAQLSECEKHKEKINEDMRLMRQDIDXQKIQERWLQDNLXLRKRNEELKEVEEERKQHLKEMGQMQVLQMKSEHQKLEENIDNIKRNHNLALGRQKGYEEEIIHFKKELREPQFRDAEEKYREMMIVMRXXELVNKDLDIYYKXLDQAIMKFHSMKMEEINKIIRDLWRSXYRGQDIEYIEIRSDADENVSASDKRRNYNYRVVMLKGDXALDMRGRCSAGQKVLASLIIRLALAEXFCLNCGIIALDEPXXNLDRENIESLAHALVEIIKSRSQQRNFQLLVIXHDEDFVELLGRSEYVEKFYRIKKNIDQCSEIVKCSVSSLGFNVH

SEQ ID NO: 22607 - protein, 100 aa, Homo sapiens
  MOD_RES (4)..(4): Selenocysteine
  MOD_RES (10)..(10): Selenocysteine
  MOD_RES (14)..(14): Selenocysteine
  MOD_RES (20)..(20): Selenocysteine
  MOD_RES (22)..(22): Selenocysteine
  MOD_RES (84)..(84): Selenocysteine
  MOD_RES (92)..(92): Selenocysteine
  MOD_RES (99)..(99): Selenocysteine
MVCXQKSKKXEFKXLEGVIXRXKHGEKVSLSSKCAEIDREMISSLGVSKAVLNNVIFCHQEDSNWPLSEGKALKQKFDEIFSAXRYIKALEXLRQVRQXQ

SEQ ID NO: 22608 - protein, 158 aa, Homo sapiens
  MOD_RES (1)..(1): Any amino acid
  MOD_RES (16)..(16): Selenocysteine
  MOD_RES (31)..(33): Selenocysteine
  MOD_RES (35)..(35): Selenocysteine
  MOD_RES (41)..(41): Selenocysteine
  MOD_RES (63)..(63): Selenocysteine
  MOD_RES (89)..(89): Selenocysteine
  MOD_RES (107)..(107): Selenocysteine
XEVISLQNEKADLDRXLRKLDQEMEQLNHHXXXRXQMEMLXKDKADKDEQIRKIKSRHSDELXSLLGYFPNKKQLEDWLHSKSKEINQXRDRLAKLKIVLVKPHSIXSCYNSLKKCFRNLIPLIEEVLLLSAADLEAVILGIHQVERLLNFNFSVRIV

SEQ ID NO: 22609 - protein, 157 aa, Homo sapiens
  MOD_RES (1)..(1): Any amino acid
  MOD_RES (6)..(6): Selenocysteine
  MOD_RES (33)..(33): Selenocysteine
  MOD_RES (72)..(72): Selenocysteine
  MOD_RES (99)..(99): Selenocysteine
  MOD_RES (113)..(114): Selenocysteine
  MOD_RES (140)..(140): Selenocysteine
  MOD_RES (146)..(146): Selenocysteine
  MOD_RES (149)..(149): Selenocysteine
  MOD_RES (156)..(157): Selenocysteine
XIYYKXLDQAIMKFHSMKMEEINKIIRDLWRSXYRGQDIEYIEIRSDADENVSASDKRRNYNYRVVMLKGDXALDMRGRCSAGQKVLASLIIRLALAEXFCLNCGIIALDEPXXNLDRENIESLAHALVEWSSRLRALSXERKFSXVHXHLWKALXX

SEQ ID NO: 22610 - protein, 10 aa, Homo sapiens
  MOD_RES (6)..(6): Selenocysteine
MKCLVXGGNV

SEQ ID NO: 22611 - protein, 49 aa, Homo sapiens
  MOD_RES (6)..(6): Selenocysteine
MKCLVXGGNVKALPPDGELLPLCLCLLSLCPALLPAIPGSHPWSGPAAL

SEQ ID NO: 22612 - protein, 118 aa, Homo sapiens
  MOD_RES (6)..(6): Selenocysteine
  MOD_RES (40)..(40): Selenocysteine
  MOD_RES (65)..(65): Selenocysteine
  MOD_RES (93)..(93): Selenocysteine
MKCLVXGGNVKVLGKAVHSLSRIGDELYLEPLEDGLSLRXVNSSRSAYACFLFAPLFFQQYQAAXPGQDLLRCKILMKSFLSVFRSLAMLEKXVEKCCISLNGRSSRLVVQLHCKFGL

SEQ ID NO: 22613 - protein, 391 aa, Homo sapiens
  MOD_RES (6)..(6): Selenocysteine
  MOD_RES (40)..(40): Selenocysteine
  MOD_RES (65)..(65): Selenocysteine
  MOD_RES (93)..(93): Selenocysteine
  MOD_RES (121)..(121): Selenocysteine
  MOD_RES (167)..(167): Selenocysteine
  MOD_RES (189)..(189): Selenocysteine
  MOD_RES (195)..(195): Selenocysteine
  MOD_RES (216)..(216): Selenocysteine
  MOD_RES (250)..(250): Selenocysteine
  MOD_RES (264)..(264): Selenocysteine
  MOD_RES (268)..(268): Selenocysteine
  MOD_RES (292)..(292): Selenocysteine
  MOD_RES (312)..(313): Selenocysteine
  MOD_RES (351)..(351): Selenocysteine
  MOD_RES (355)..(355): Selenocysteine
MKCLVXGGNVKVLGKAVHSLSRIGDELYLEPLEDGLSLRXVNSSRSAYACFLFAPLFFQQYQAAXPGQDLLRCKILMKSFLSVFRSLAMLEKXVEKCCISLNGRSSRLVVQLHCKFGVRKXHNLSFQDCESLQAVFDPASCPHMLRAPARVLGEAVLPFSPALAEVXLGIGRGRRVILRSYHEEEADSXAKAMVXEMCLGEEDFQQLQAQEGVAIXFCLKEFRGLLSFAESANLNLSIHFDAPGRPAIFXIKDSLLDGHFVLAXLSDXDSHSQDLGSPERHQPVPQLQAHSXPHPDDFANDDIDSYMIAMEXXIGNEGSRVLPSISLSPGPQPPKSPGPHSEEEDEAEPSXVPGXPPPKKFRSLFFGSILAPVRSPQGPSPVLAEDSEGEG

SEQ ID NO: 22614 - protein, 247 aa, Homo sapiens
  MOD_RES (6)..(6): Selenocysteine
  MOD_RES (40)..(40): Selenocysteine
  MOD_RES (65)..(65): Selenocysteine
  MOD_RES (79)..(79): Selenocysteine
  MOD_RES (107)..(107): Selenocysteine
  MOD_RES (153)..(153): Selenocysteine
  MOD_RES (175)..(175): Selenocysteine
  MOD_RES (181)..(181): Selenocysteine
  MOD_RES (202)..(202): Selenocysteine
  MOD_RES (236)..(236): Selenocysteine
MKCLVXGGNVKVLGKAVHSLSRIGDELYLEPLEDGLSLRXVNSSRSAYACFLFAPLFFQQYQAAXPGQDLLRCKILMKXVEKCCISLNGRSSRLVVQLHCKFGVRKXHNLSFQDCESLQAVFDPASCPHMLRAPARVLGEAVLPFSPALAEVXLGIGRGRRVILRSYHEEEADSXAKAMVXEMCLGEEDFQQLQAQEGVAIXFCLKEFRGLLSFAESANLNLSIHFDAPGRPAIFXIKDSLLDGHFV

SEQ ID NO: 22615 - protein, 341 aa, Homo sapiens
  MOD_RES (80)..(81): Selenocysteine
  MOD_RES (114)..(114): Selenocysteine
  MOD_RES (155)..(155): Selenocysteine
  MOD_RES (158)..(158): Selenocysteine
  MOD_RES (169)..(169): Selenocysteine
  MOD_RES (174)..(174): Selenocysteine
  MOD_RES (206)..(206): Selenocysteine
  MOD_RES (241)..(241): Selenocysteine
  MOD_RES (262)..(262): Selenocysteine
  MOD_RES (264)..(264): Selenocysteine
  MOD_RES (295)..(295): Selenocysteine
MAAMLKCVMSGSQVKVFGKAVQALSRISDEFWLDPSKKGLALRCVNSSRSAYGCVLFSPVFFQHYQWSALVKMSENELDXXLHLKCKLGMKSILPIFRCLNSLERNIEKCRIFXRSDKCKVVIQFFYRHDLSNAVHSEMFVGSDEFDFFQIGMDXEIXFCFKELKGILXFSEAXHAPISIYFDFPGKPLALSIDDMLVEANFILAXLADEQSRASSPQSLCLSQKRKRSDLIEKKAGKNVXGQALECISKKAAPRRLYPKEXLXNISALENCGSPAMKRVDGDVSEVSESSVSNXEEVPGSLCLRKCAAGKNLMEVMPNISVLSDIEQYPPLPRQPEFGVE

SEQ ID NO: 22616 - protein, 417 aa, Homo sapiens
  MOD_RES (80)..(81): Selenocysteine
  MOD_RES (114)..(114): Selenocysteine
  MOD_RES (134)..(134): Selenocysteine
  MOD_RES (155)..(155): Selenocysteine
  MOD_RES (157)..(157): Selenocysteine
  MOD_RES (173)..(173): Selenocysteine
  MOD_RES (180)..(180): Selenocysteine
  MOD_RES (184)..(184): Selenocysteine
  MOD_RES (224)..(224): Selenocysteine
  MOD_RES (227)..(227): Selenocysteine
  MOD_RES (238)..(238): Selenocysteine
  MOD_RES (243)..(243): Selenocysteine
  MOD_RES (275)..(275): Selenocysteine
  MOD_RES (310)..(310): Selenocysteine
  MOD_RES (331)..(331): Selenocysteine
  MOD_RES (333)..(333): Selenocysteine
  MOD_RES (364)..(364): Selenocysteine
MAAMLKCVMSGSQVKVFGKAVQALSRISDEFWLDPSKKGLALRCVNSSRSAYGCVLFSPVFFQHYQWSALVKMSENELDXXLHLKCKLGMKSILPIFRCLNSLERNIEKCRIFXRSDKCKVVIQFFYRHGIKRXHNICFQESQPLQVIFDKNVCXNXLMIQPRLLADAIVLFXSSQEEVXLAVXPLNFCLKSSNEESMDLSNAVHSEMFVGSDEFDFFQIGMDXEIXFCFKELKGILXFSEAXHAPISIYFDFPGKPLALSIDDMLVEANFILAXLADEQSRASSPQSLCLSQKRKRSDLIEKKAGKNVXGQALECISKKAAPRRLYPKEXLXNISALENCGSPAMKRVDGDVSEVSESSVSNXEEVPGSLCLRKFSCMFFGAVSSDQQEHFNHPFDSLARASDSEEDMNNGSFSIF

SEQ ID NO: 22617 - protein, 429 aa, Homo sapiens
  MOD_RES (80)..(81): Selenocysteine
  MOD_RES (114)..(114): Selenocysteine
  MOD_RES (134)..(134): Selenocysteine
  MOD_RES (155)..(155): Selenocysteine
  MOD_RES (157)..(157): Selenocysteine
  MOD_RES (173)..(173): Selenocysteine
  MOD_RES (180)..(180): Selenocysteine
  MOD_RES (184)..(184): Selenocysteine
  MOD_RES (224)..(224): Selenocysteine
  MOD_RES (227)..(227): Selenocysteine
  MOD_RES (238)..(238): Selenocysteine
  MOD_RES (243)..(243): Selenocysteine
  MOD_RES (275)..(275): Selenocysteine
  MOD_RES (310)..(310): Selenocysteine
  MOD_RES (331)..(331): Selenocysteine
  MOD_RES (333)..(333): Selenocysteine
  MOD_RES (364)..(364): Selenocysteine
MAAMLKCVMSGSQVKVFGKAVQALSRISDEFWLDPSKKGLALRCVNSSRSAYGCVLFSPVFFQHYQWSALVKMSENELDXXLHLKCKLGMKSILPIFRCLNSLERNIEKCRIFXRSDKCKVVIQFFYRHGIKRXHNICFQESQPLQVIFDKNVCXNXLMIQPRLLADAIVLFXSSQEEVXLAVXPLNFCLKSSNEESMDLSNAVHSEMFVGSDEFDFFQIGMDXEIXFCFKELKGILXFSEAXHAPISIYFDFPGKPLALSIDDMLVEANFILAXLADEQSRASSPQSLCLSQKRKRSDLIEKKAGKNVXGQALECISKKAAPRRLYPKEXLXNISALENCGSPAMKRVDGDVSEVSESSVSNXEEVPGSLCLRKFSCMFFGAVSSDQQEHFNHPFDSLARASDSEEDMNNVCCRKEFNGSDAKYFCII

SEQ ID NO: 22618 - protein, 87 aa, Homo sapiens
  MOD_RES (8)..(9): Selenocysteine
  MOD_RES (42)..(42): Selenocysteine
  MOD_RES (59)..(59): Selenocysteine
  MOD_RES (66)..(66): Selenocysteine
MSENELDXXLHLKCKLGMKSILPIFRCLNSLERNIEKCRIFXRSDKCKVVIQFFYRHAXWMELEVXMLSEISQAWKVKYCMFSQCGR

SEQ ID NO: 22619 - protein, 345 aa, Homo sapiens
  MOD_RES (8)..(9): Selenocysteine
  MOD_RES (42)..(42): Selenocysteine
  MOD_RES (62)..(62): Selenocysteine
  MOD_RES (83)..(83): Selenocysteine
  MOD_RES (85)..(85): Selenocysteine
  MOD_RES (101)..(101): Selenocysteine
  MOD_RES (108)..(108): Selenocysteine
  MOD_RES (112)..(112): Selenocysteine
  MOD_RES (152)..(152): Selenocysteine
  MOD_RES (155)..(155): Selenocysteine
  MOD_RES (166)..(166): Selenocysteine
  MOD_RES (171)..(171): Selenocysteine
  MOD_RES (203)..(203): Selenocysteine
  MOD_RES (238)..(238): Selenocysteine
  MOD_RES (259)..(259): Selenocysteine
  MOD_RES (261)..(261): Selenocysteine
  MOD_RES (292)..(292): Selenocysteine
MSENELDXXLHLKCKLGMKSILPIFRCLNSLERNIEKCRIFXRSDKCKVVIQFFYRHGIKRXHNICFQESQPLQVIFDKNVCXNXLMIQPRLLADAIVLFXSSQEEVXLAVXPLNFCLKSSNEESMDLSNAVHSEMFVGSDEFDFFQIGMDXEIXFCFKELKGILXFSEAXHAPISIYFDFPGKPLALSIDDMLVEANFILAXLADEQSRASSPQSLCLSQKRKRSDLIEKKAGKNVXGQALECISKKAAPRRLYPKEXLXNISALENCGSPAMKRVDGDVSEVSESSVSNXEEVPGSLCLRKFSCMFFGAVSSDQQEHFNHPFDSLARASDSEEDMNNGSFSIF

SEQ ID NO: 22620 - protein, 134 aa, Homo sapiens
  MOD_RES (5)..(5): Selenocysteine
  MOD_RES (13)..(13): Selenocysteine
  MOD_RES (31)..(31): Selenocysteine
  MOD_RES (42)..(42): Selenocysteine
  MOD_RES (57)..(57): Selenocysteine
  MOD_RES (74)..(74): Selenocysteine
  MOD_RES (76)..(76): Selenocysteine
  MOD_RES (84)..(84): Selenocysteine
  MOD_RES (86)..(86): Selenocysteine
MFYGXHFIMSPPXKSKLKRQSQLLSSMLSRXLSYKYRDLDSXFSSLGASDDPAELSXQLSAPGVLKVFGDSVCXGXHYKSVLAXGXSSARELVKEALERYALDPRQAGQYVLCDVVGQAGDAGQRWQARCFRVF

SEQ ID NO: 22621 - protein, 407 aa, Homo sapiens
  MOD_RES (5)..(5): Selenocysteine
  MOD_RES (13)..(13): Selenocysteine
  MOD_RES (31)..(31): Selenocysteine
  MOD_RES (42)..(42): Selenocysteine
  MOD_RES (57)..(57): Selenocysteine
  MOD_RES (74)..(74): Selenocysteine
  MOD_RES (76)..(76): Selenocysteine
  MOD_RES (84)..(84): Selenocysteine
  MOD_RES (86)..(86): Selenocysteine
  MOD_RES (175)..(175): Selenocysteine
  MOD_RES (177)..(177): Selenocysteine
  MOD_RES (195)..(195): Selenocysteine
  MOD_RES (197)..(197): Selenocysteine
  MOD_RES (214)..(214): Selenocysteine
  MOD_RES (218)..(218): Selenocysteine
  MOD_RES (295)..(295): Selenocysteine
  MOD_RES (302)..(302): Selenocysteine
MFYGXHFIMSPPXKSKLKRQSQLLSSMLSRXLSYKYRDLDSXFSSLGASDDPAELSXQLSAPGVLKVFGDSVCXGXHYKSVLAXGXSSARELVKEALERYALDPRQAGQYVLCDVVGQAGDAGQRWQARCFRVFGDSEKPLLIQELWKPREGLSRRFELRKRSDVEELAAKEVDXIXAGINAQARRLQRSRAKGXPXPALGDARSSPPPRLRRXVSEXSLSPVNALPAAAQGPEEPGPDAMRYSLYQSPHLLLLQGYSQQHPGVCAQPGPAHGGPADPLQQAQHQPLSPRHPASXLHHPPAXAPGQRPGRGEAGPGAHPRGAHLRQLLRGGAQDRGAAPRGPALPGALLPAAIQGPRAGPAPARPGLGAPPGCAAELPAVRGRARGPGSRLPYSGRPAPAPAAAPGV

SEQ ID NO: 22622 - protein, 1075 aa, Homo sapiens
  MOD_RES (5)..(5): Selenocysteine
  MOD_RES (13)..(13): Selenocysteine
  MOD_RES (31)..(31): Selenocysteine
  MOD_RES (42)..(42): Selenocysteine
  MOD_RES (57)..(57): Selenocysteine
  MOD_RES (74)..(74): Selenocysteine
  MOD_RES (76)..(76): Selenocysteine
  MOD_RES (84)..(84): Selenocysteine
  MOD_RES (86)..(86): Selenocysteine
  MOD_RES (175)..(175): Selenocysteine
  MOD_RES (177)..(177): Selenocysteine
  MOD_RES (195)..(195): Selenocysteine
  MOD_RES (197)..(197): Selenocysteine
  MOD_RES (214)..(214): Selenocysteine
  MOD_RES (218)..(218): Selenocysteine
  MOD_RES (274)..(274): Selenocysteine
  MOD_RES (279)..(279): Selenocysteine
  MOD_RES (299)..(299): Selenocysteine
  MOD_RES (336)..(336): Selenocysteine
  MOD_RES (395)..(395): Selenocysteine
  MOD_RES (416)..(416): Selenocysteine
  MOD_RES (423)..(423): Selenocysteine
  MOD_RES (435)..(435): Selenocysteine
  MOD_RES (449)..(449): Selenocysteine
  MOD_RES (455)..(455): Selenocysteine
  MOD_RES (470)..(470): Selenocysteine
  MOD_RES (475)..(475): Selenocysteine
  MOD_RES (538)..(538): Selenocysteine
  MOD_RES (548)..(548): Selenocysteine
  MOD_RES (550)..(550): Selenocysteine
  MOD_RES (593)..(593): Selenocysteine
  MOD_RES (646)..(646): Selenocysteine
  MOD_RES (700)..(700): Selenocysteine
  MOD_RES (706)..(706): Selenocysteine
  MOD_RES (717)..(717): Selenocysteine
  MOD_RES (736)..(736): Selenocysteine
  MOD_RES (749)..(749): Selenocysteine
  MOD_RES (868)..(868): Selenocysteine
  MOD_RES (897)..(897): Selenocysteine
  MOD_RES (904)..(904): Selenocysteine
  MOD_RES (908)..(908): Selenocysteine
  MOD_RES (968)..(968): Selenocysteine
  MOD_RES (976)..(976): Selenocysteine
  MOD_RES (996)..(996): Selenocysteine
  MOD_RES (1007)..(1007): Selenocysteine
  MOD_RES (1064)..(1064): Selenocysteine
  MOD_RES (1072)..(1072): Selenocysteine
MFYGXHFIMSPPXKSKLKRQSQLLSSMLSRXLSYKYRDLDSXFSSLGASDDPAELSXQLSAPGVLKVFGDSVCXGXHYKSVLAXGXSSARELVKEALERYALDPRQAGQYVLCDVVGQAGDAGQRWQARCFRVFGDSEKPLLIQELWKPREGLSRRFELRKRSDVEELAAKEVDXIXAGINAQARRLQRSRAKGXPXPALGDARSSPPPRLRRXVSEXSLSPVNALPAAAQGPEEPGPDAMRYSLYQSPHLLLLQGYSQQHDSLVYVLNRDRHXVGQRXPSSKPSISLSAPDILPLHCXIRRQPLPDSGQAAGRLVLEPIPGAHISVNFSEVGHRXVVLHHGDLLSLGLYYLLLFKDPAQAQPLPARALARLRAVPQSCRLCGAALGARGAASPXQAALPRRQQLLLEFEPHLEDXLLQRIMXLIEPGGDDHKLXPAFLLCLCIQHSAXHFQPGXFGQLLLKIARLIREXVWEKXKELAEKQAQLQEPISLASCAMADLVPDLQPILFWMSNSIELLYFIQQKCPLYMQSMEEQLDIXGSKESLFSCXLXASEEAMAVLEEVVLYAFQQCVYYVSKSLYICLPALLECPPFQXERRESWSSAPELPEELRRVVSVYQAALDLLRQLQVHPEVASQMLAYLFFFSGXLLLNQLLDRGPSLSCFHWPRGVQACARLQQLLEWMRSAGFGAAGEHFFQKLSCXLNLLAXPRAQLIQMSWXALRAAFPALSPAQLHRLLXHYQLASAMGPMSXWEPGAQDSPEAFRSEDVLESYENPPPIVLPSDGFQVDLEANCLDDSIYQHLLYVRHFLWGLRSRASPGSPGRPGSGASQPVCPEGMHHVVLDGHLEAPSCPLAPRDPGPAAREVAPERXLPLRGAPWAQAPPGRQPSRGGSQAGPPHXDSSCLLXPPSXPLGPEPGDPDWPESGGPCGKALPERQRNGLSGLRGAAPEGDSAALAEESPPAPSSRSSSXEDFCYVFXVELERGPSGLGMGLIDGMHXHLGAPGLYIQXLLPGSPAAADGRLSLGDRILEVNGSSLLGLGYLRAVDLIRHGGKKMRFLVAKSDVEXAKKIHFRXPPL

SEQ ID NO: 22623 - protein, 69 aa, Homo sapiens
  MOD_RES (10)..(10): Selenocysteine
  MOD_RES (31)..(31): Selenocysteine
  MOD_RES (49)..(49): Selenocysteine
  MOD_RES (54)..(54): Selenocysteine
  MOD_RES (57)..(57): Selenocysteine
  MOD_RES (68)..(68): Selenocysteine
MEHIQGAWKXISNGFGFKDAVFDGSSCISPXIVQQFGYQRRASDDGKLXDPSKXSNXIRVFLPNKQRXV

SEQ ID NO: 22624 - protein, 648 aa, Homo sapiens
  MOD_RES (10)..(10): Selenocysteine
  MOD_RES (31)..(31): Selenocysteine
  MOD_RES (49)..(49): Selenocysteine
  MOD_RES (54)..(54): Selenocysteine
  MOD_RES (57)..(57): Selenocysteine
  MOD_RES (68)..(68): Selenocysteine
  MOD_RES (116)..(116): Selenocysteine
  MOD_RES (137)..(138): Selenocysteine
  MOD_RES (145)..(145): Selenocysteine
  MOD_RES (167)..(167): Selenocysteine
  MOD_RES (178)..(178): Selenocysteine
  MOD_RES (182)..(182): Selenocysteine
  MOD_RES (200)..(200): Selenocysteine
  MOD_RES (213)..(213): Selenocysteine
  MOD_RES (234)..(234): Selenocysteine
  MOD_RES (239)..(239): Selenocysteine
  MOD_RES (242)..(242): Selenocysteine
  MOD_RES (258)..(258): Selenocysteine
  MOD_RES (260)..(260): Selenocysteine
  MOD_RES (268)..(269): Selenocysteine
  MOD_RES (303)..(303): Selenocysteine
  MOD_RES (310)..(310): Selenocysteine
  MOD_RES (324)..(324): Selenocysteine
  MOD_RES (353)..(353): Selenocysteine
  MOD_RES (362)..(362): Selenocysteine
  MOD_RES (383)..(383): Selenocysteine
  MOD_RES (400)..(400): Selenocysteine
  MOD_RES (413)..(413): Selenocysteine
  MOD_RES (421)..(421): Selenocysteine
  MOD_RES (438)..(438): Selenocysteine
  MOD_RES (452)..(452): Selenocysteine
  MOD_RES (481)..(481): Selenocysteine
  MOD_RES (491)..(491): Selenocysteine
  MOD_RES (506)..(506): Selenocysteine
  MOD_RES (543)..(543): Selenocysteine
  MOD_RES (631)..(631): Selenocysteine
  MOD_RES (638)..(638): Selenocysteine
  MOD_RES (640)..(641): Selenocysteine
MEHIQGAWKXISNGFGFKDAVFDGSSCISPXIVQQFGYQRRASDDGKLXDPSKXSNXIRVFLPNKQRXVVNVRNGMSLHDCLMKALKVRGLQPECCAVFRLLHEHKGKKARLDWNXDAASLIGEELQVDFLDHVPLXXHNFARKXFLKLAFCDICQKFLLNGFRCQXCGYKFHEHCSXKVPXMCVDWSNIRQLLLFPNSXIGDSGVPALPSLXMRRMRESVSRMPVSSQHRYSXPHAFXFNXSSPSSEGSLSQRQRSXSXPNVHMVSXXLPVDSRMIEDAIRSHSESASPSALSSSPNNLSPXGWSQPKXPVPAQRERAPVSGXQEKNKIRPRGQRDSSYYWEIEASEVMLSXRIGSGSFGXVYKGKWHGDVAVKILKVVDPXPEQFQAFRNEVAVLRKXRHVNILLFMGYMXKDNLAIVXQWCEGSSLYKHLHVQEXKFQMFQLIDIARQXAQGMDYLHAKNIIHRDMKSNNIFLHEGLXVKIGDFGLAXVKSRWSGSQQVEQPXGSVLWMAPEVIRMQDNNPFSFQSDVYSYGIVLYELMXGELPYSHINNRDQIIFMVGRGYASPDLSKLYKNCPKAMKRLVADCVKKVKEERPLFPQILSSIELLQHSLPKINRSASEPSLHRAAHXEDINACXLXXSPRLPVF

SEQ ID NO: 22625 - protein, 668 aa, Homo sapiens
  MOD_RES (10)..(10): Selenocysteine
  MOD_RES (31)..(31): Selenocysteine
  MOD_RES (49)..(49): Selenocysteine
  MOD_RES (54)..(54): Selenocysteine
  MOD_RES (57)..(57): Selenocysteine
  MOD_RES (68)..(68): Selenocysteine
  MOD_RES (116)..(116): Selenocysteine
  MOD_RES (137)..(138): Selenocysteine
  MOD_RES (145)..(145): Selenocysteine
  MOD_RES (167)..(167): Selenocysteine
  MOD_RES (178)..(178): Selenocysteine
  MOD_RES (182)..(182): Selenocysteine
  MOD_RES (200)..(200): Selenocysteine
  MOD_RES (213)..(213): Selenocysteine
  MOD_RES (234)..(234): Selenocysteine
  MOD_RES (239)..(239): Selenocysteine
  MOD_RES (242)..(242): Selenocysteine
  MOD_RES (258)..(258): Selenocysteine
  MOD_RES (260)..(260): Selenocysteine
  MOD_RES (268)..(269): Selenocysteine
  MOD_RES (323)..(323): Selenocysteine
  MOD_RES (330)..(330): Selenocysteine
  MOD_RES (344)..(344): Selenocysteine
  MOD_RES (373)..(373): Selenocysteine
  MOD_RES (382)..(382): Selenocysteine
  MOD_RES (403)..(403): Selenocysteine
  MOD_RES (420)..(420): Selenocysteine
  MOD_RES (433)..(433): Selenocysteine
  MOD_RES (441)..(441): Selenocysteine
  MOD_RES (458)..(458): Selenocysteine
  MOD_RES (472)..(472): Selenocysteine
  MOD_RES (501)..(501): Selenocysteine
  MOD_RES (511)..(511): Selenocysteine
  MOD_RES (526)..(526): Selenocysteine
  MOD_RES (563)..(563): Selenocysteine
  MOD_RES (651)..(651): Selenocysteine
  MOD_RES (658)..(658): Selenocysteine
  MOD_RES (660)..(661): Selenocysteine
MEHIQGAWKXISNGFGFKDAVFDGSSCISPXIVQQFGYQRRASDDGKLXDPSKXSNXIRVFLPNKQRXVVNVRNGMSLHDCLMKALKVRGLQPECCAVFRLLHEHKGKKARLDWNXDAASLIGEELQVDFLDHVPLXXHNFARKXFLKLAFCDICQKFLLNGFRCQXCGYKFHEHCSXKVPXMCVDWSNIRQLLLFPNSXIGDSGVPALPSLXMRRMRESVSRMPVSSQHRYSXPHAFXFNXSSPSSEGSLSQRQRSXSXPNVHMVSXXLPVDSRMIENNNLSASPRAWSRRFCLRGRDAIRSHSESASPSALSSSPNNLSPXGWSQPKXPVPAQRERAPVSGXQEKNKIRPRGQRDSSYYWEIEASEVMLSXRIGSGSFGXVYKGKWHGDVAVKILKVVDPXPEQFQAFRNEVAVLRKXRHVNILLFMGYMXKDNLAIVXQWCEGSSLYKHLHVQEXKFQMFQLIDIARQXAQGMDYLHAKNIIHRDMKSNNIFLHEGLXVKIGDFGLAXVKSRWSGSQQVEQPXGSVLWMAPEVIRMQDNNPFSFQSDVYSYGIVLYELMXGELPYSHINNRDQIIFMVGRGYASPDLSKLYKNCPKAMKRLVADCVKKVKEERPLFPQILSSIELLQHSLPKINRSASEPSLHRAAHXEDINACXLXXSPRLPVF

SEQ ID NO: 22626 - protein, 527 aa, Homo sapiens
  MOD_RES (28)..(28): Selenocysteine
  MOD_RES (49)..(50): Selenocysteine
  MOD_RES (57)..(57): Selenocysteine
  MOD_RES (79)..(79): Selenocysteine
  MOD_RES (90)..(90): Selenocysteine
  MOD_RES (94)..(94): Selenocysteine
  MOD_RES (113)..(113): Selenocysteine
  MOD_RES (118)..(118): Selenocysteine
  MOD_RES (121)..(121): Selenocysteine
  MOD_RES (137)..(137): Selenocysteine
  MOD_RES (139)..(139): Selenocysteine
  MOD_RES (147)..(148): Selenocysteine
  MOD_RES (182)..(182): Selenocysteine
  MOD_RES (189)..(189): Selenocysteine
  MOD_RES (203)..(203): Selenocysteine
  MOD_RES (232)..(232): Selenocysteine
  MOD_RES (241)..(241): Selenocysteine
  MOD_RES (262)..(262): Selenocysteine
  MOD_RES (279)..(279): Selenocysteine
  MOD_RES (292)..(292): Selenocysteine
  MOD_RES (300)..(300): Selenocysteine
  MOD_RES (317)..(317): Selenocysteine
  MOD_RES (331)..(331): Selenocysteine
  MOD_RES (360)..(360): Selenocysteine
  MOD_RES (370)..(370): Selenocysteine
  MOD_RES (385)..(385): Selenocysteine
  MOD_RES (422)..(422): Selenocysteine
  MOD_RES (510)..(510): Selenocysteine
  MOD_RES (517)..(517): Selenocysteine
  MOD_RES (519)..(520): Selenocysteine
RGLQPECCAVFRLLHEHKGKKARLDWNXDAASLIGEELQVDFLDHVPLXXHNFARKXFLKLAFCDICQKFLLNGFRCQXCGYKFHEHCSXKVPXMCVDWSNIRQLFSQHRYSXPHAFXFNXSSPSSEGSLSQRQRSXSXPNVHMVSXXLPVDSRMIEDAIRSHSESASPSALSSSPNNLSPXGWSQPKXPVPAQRERAPVSGXQEKNKIRPRGQRDSSYYWEIEASEVMLSXRIGSGSFGXVYKGKWHGDVAVKILKVVDPXPEQFQAFRNEVAVLRKXRHVNILLFMGYMXKDNLAIVXQWCEGSSLYKHLHVQEXKFQMFQLIDIARQXAQGMDYLHAKNIIHRDMKSNNIFLHEGLXVKIGDFGLAXVKSRWSGSQQVEQPXGSVLWMAPEVIRMQDNNPFSFQSDVYSYGIVLYELMXGELPYSHINNRDQIIFMVGRGYASPDLSKLYKNCPKAMKRLVADCVKKVKEERPLFPQILSSIELLQHSLPKINRSASEPSLHRAAHXEDINACXLXXSPRLPVF

SEQ ID NO: 22627 - protein, 65 aa, Homo sapiens
  MOD_RES (20)..(20): Selenocysteine
  MOD_RES (24)..(24): Selenocysteine
  MOD_RES (65)..(65): Selenocysteine
MQSFRERCGFHGKQQNYQQXSQEXSRLENYRQPSQAGLSCDRQRLLAKDYYNPQPYPSYEGGAGX

SEQ ID NO: 22628 - protein, 942 aa, Homo sapiens
  MOD_RES (20)..(20): Selenocysteine
  MOD_RES (24)..(24): Selenocysteine
  MOD_RES (65)..(65): Selenocysteine
  MOD_RES (69)..(69): Selenocysteine
  MOD_RES (87)..(87): Selenocysteine
  MOD_RES (149)..(149): Selenocysteine
  MOD_RES (168)..(168): Selenocysteine
  MOD_RES (207)..(207): Selenocysteine
  MOD_RES (218)..(218): Selenocysteine
  MOD_RES (221)..(221): Selenocysteine
  MOD_RES (240)..(240): Selenocysteine
  MOD_RES (243)..(243): Selenocysteine
  MOD_RES (252)..(252): Selenocysteine
  MOD_RES (302)..(302): Selenocysteine
  MOD_RES (330)..(330): Selenocysteine
  MOD_RES (337)..(337): Selenocysteine
  MOD_RES (359)..(359): Selenocysteine
  MOD_RES (379)..(379): Selenocysteine
  MOD_RES (387)..(387): Selenocysteine
  MOD_RES (401)..(401): Selenocysteine
  MOD_RES (404)..(404): Selenocysteine
  MOD_RES (409)..(409): Selenocysteine
  MOD_RES (436)..(436): Selenocysteine
  MOD_RES (439)..(439): Selenocysteine
  MOD_RES (448)..(448): Selenocysteine
  MOD_RES (472)..(472): Selenocysteine
  MOD_RES (495)..(495): Selenocysteine
  MOD_RES (504)..(504): Selenocysteine
  MOD_RES (508)..(508): Selenocysteine
  MOD_RES (555)..(555): Selenocysteine
  MOD_RES (559)..(559): Selenocysteine
  MOD_RES (566)..(566): Selenocysteine
  MOD_RES (696)..(696): Selenocysteine
  MOD_RES (702)..(703): Selenocysteine
  MOD_RES (710)..(710): Selenocysteine
  MOD_RES (713)..(713): Selenocysteine
  MOD_RES (722)..(723): Selenocysteine
  MOD_RES (732)..(733): Selenocysteine
  MOD_RES (766)..(766): Selenocysteine
  MOD_RES (784)..(784): Selenocysteine
  MOD_RES (847)..(847): Selenocysteine
  MOD_RES (859)..(859): Selenocysteine
  MOD_RES (900)..(900): Selenocysteine
  MOD_RES (931)..(931): Selenocysteine
  MOD_RES (934)..(934): Selenocysteine
MQSFRERCGFHGKQQNYQQXSQEXSRLENYRQPSQAGLSCDRQRLLAKDYYNPQPYPSYEGGAGXPSGXAAAVAADKYHRGSKALPXQQGLQGRPAFPGYGVQDSSPYPGRYAGEESLQAWGAPQPPPPQPQPLPAGVAKYDENLMKKXAVPPSRQYAEQGAQVPFRXHSLHVQQPPPPQQPLAYPKLQRQKLQNDIASPLPFPQGXHFPQHSQSFPXSSXYSSSVQGGGQGAHSYKSCXAPXAQPHDRPLXASSSLAPGQRVQNLHAYQSGRLSYDQQQQQQQQQQQQQQALQSRHHAQEXLHYQNLAKYQHYGQQGQGYCQPDAAVRXPEQYYQXFSPSSSHSPARSVGRSPSYSSXPSPLMPNLENFPYSQQPLSXGAFPAGIXDHSHFMPLLNPSPXDAXSSVDXQAGNCKPLQKDKLPENLLSDLSLQSLXALXSQVENISNXVQQLLLSKAAVPQKKGVKNLVSRXPEQHKSQHCSPEGSGYSAEPAGXPLSEPPSSXPQSXHAEPQEADYLSGSEDPLERSFLYCNQARGSPARVNSNSKAKPESVSXCSVXSPDDMSXKSDDSFQSLHGSLPLDSFSKFVAGERDCPRLLLSALAQEDLASEILGLQEAIGEKADKAWAEAPSLVKDSSKPPFSLENHSACLDSVAKSAWPRPGEPEALPDSLQLDKGGNAKDFSPGLFEDPSVAFAXPDPKKXXGPLSFGXKPXLGVPAPDPXXAAFDCFPDXXAASSADSANPFAWPEENLGDACPRWGLHPGELXKGLEQGGKASDGISKGDXHEASACLGFQEEDPPGEKVASLPGDFKQEEVGGVKEEAGGLLQCPEVAKADRWLEDSRHCCSXADFGDLPLLPPXSRKEDLEAEEEYSSLCELLGSPEQRPGMQDPLSPKAPLICXKEEVEEVLDSKAGWGSPCHLSGESVILLGPXVGXESKVQSWF

SEQ ID NO: 22629 - protein, 1906 aa, Homo sapiens
  MOD_RES (20)..(20): Selenocysteine
  MOD_RES (24)..(24): Selenocysteine
  MOD_RES (65)..(65): Selenocysteine
  MOD_RES (69)..(69): Selenocysteine
  MOD_RES (87)..(87): Selenocysteine
  MOD_RES (149)..(149): Selenocysteine
  MOD_RES (168)..(168): Selenocysteine
  MOD_RES (207)..(207): Selenocysteine
  MOD_RES (218)..(218): Selenocysteine
  MOD_RES (221)..(221): Selenocysteine
  MOD_RES (240)..(240): Selenocysteine
  MOD_RES (243)..(243): Selenocysteine
  MOD_RES (252)..(252): Selenocysteine
  MOD_RES (302)..(302): Selenocysteine
  MOD_RES (330)..(330): Selenocysteine
  MOD_RES (337)..(337): Selenocysteine
  MOD_RES (359)..(359): Selenocysteine
  MOD_RES (379)..(379): Selenocysteine
  MOD_RES (387)..(387): Selenocysteine
  MOD_RES (401)..(401): Selenocysteine
  MOD_RES (404)..(404): Selenocysteine
  MOD_RES (409)..(409): Selenocysteine
  MOD_RES (436)..(436): Selenocysteine
  MOD_RES (439)..(439): Selenocysteine
  MOD_RES (448)..(448): Selenocysteine
  MOD_RES (472)..(472): Selenocysteine
  MOD_RES (495)..(495): Selenocysteine
  MOD_RES (504)..(504): Selenocysteine
  MOD_RES (508)..(508): Selenocysteine
  MOD_RES (555)..(555): Selenocysteine
  MOD_RES (559)..(559): Selenocysteine
  MOD_RES (566)..(566): Selenocysteine
  MOD_RES (696)..(696): Selenocysteine
  MOD_RES (702)..(703): Selenocysteine
  MOD_RES (710)..(710): Selenocysteine
  MOD_RES (713)..(713): Selenocysteine
  MOD_RES (722)..(723): Selenocysteine
  MOD_RES (732)..(733): Selenocysteine
  MOD_RES (766)..(766): Selenocysteine
  MOD_RES (784)..(784): Selenocysteine
  MOD_RES (847)..(847): Selenocysteine
  MOD_RES (859)..(859): Selenocysteine
  MOD_RES (900)..(900): Selenocysteine
  MOD_RES (931)..(931): Selenocysteine
  MOD_RES (934)..(934): Selenocysteine
  MOD_RES (966)..(967): Selenocysteine
  MOD_RES (1031)..(1031): Selenocysteine
  MOD_RES (1057)..(1057): Selenocysteine
  MOD_RES (1061)..(1061): Selenocysteine
  MOD_RES (1068)..(1068): Selenocysteine
  MOD_RES (1075)..(1077): Selenocysteine
  MOD_RES (1128)..(1128): Selenocysteine
  MOD_RES (1131)..(1131): Selenocysteine
  MOD_RES (1136)..(1136): Selenocysteine
  MOD_RES (1150)..(1150): Selenocysteine
  MOD_RES (1152)..(1152): Selenocysteine
  MOD_RES (1174)..(1174): Selenocysteine
  MOD_RES (1186)..(1186): Selenocysteine
  MOD_RES (1234)..(1234): Selenocysteine
  MOD_RES (1268)..(1268): Selenocysteine
  MOD_RES (1282)..(1282): Selenocysteine
  MOD_RES (1290)..(1290): Selenocysteine
  MOD_RES (1297)..(1297): Selenocysteine
  MOD_RES (1316)..(1316): Selenocysteine
  MOD_RES (1337)..(1337): Selenocysteine
  MOD_RES (1387)..(1387): Selenocysteine
  MOD_RES (1393)..(1393): Selenocysteine
  MOD_RES (1404)..(1404): Selenocysteine
  MOD_RES (1421)..(1421): Selenocysteine
  MOD_RES (1426)..(1426): Selenocysteine
  MOD_RES (1430)..(1430): Selenocysteine
  MOD_RES (1440)..(1440): Selenocysteine
  MOD_RES (1476)..(1476): Selenocysteine
  MOD_RES (1484)..(1484): Selenocysteine
  MOD_RES (1520)..(1520): Selenocysteine
  MOD_RES (1529)..(1529): Selenocysteine
  MOD_RES (1541)..(1541): Selenocysteine
  MOD_RES (1548)..(1549): Selenocysteine
  MOD_RES (1592)..(1592): Selenocysteine
  MOD_RES (1608)..(1609): Selenocysteine
  MOD_RES (1612)..(1612): Selenocysteine
  MOD_RES (1651)..(1651): Selenocysteine
  MOD_RES (1669)..(1669): Selenocysteine
  MOD_RES (1682)..(1682): Selenocysteine
  MOD_RES (1728)..(1728): Selenocysteine
  MOD_RES (1739)..(1739): Selenocysteine
  MOD_RES (1750)..(1750): Selenocysteine
  MOD_RES (1771)..(1771): Selenocysteine
  MOD_RES (1832)..(1832): Selenocysteine
  MOD_RES (1866)..(1866): Selenocysteine
  MOD_RES (1877)..(1877): Selenocysteine
MQSFRERCGFHGKQQNYQQXSQEXSRLENYRQPSQAGLSCDRQRLLAKDYYNPQPYPSYEGGAGXPSGXAAAVAADKYHRGSKALPXQQGLQGRPAFPGYGVQDSSPYPGRYAGEESLQAWGAPQPPPPQPQPLPAGVAKYDENLMKKXAVPPSRQYAEQGAQVPFRXHSLHVQQPPPPQQPLAYPKLQRQKLQNDIASPLPFPQGXHFPQHSQSFPXSSXYSSSVQGGGQGAHSYKSCXAPXAQPHDRPLXASSSLAPGQRVQNLHAYQSGRLSYDQQQQQQQQQQQQQQALQSRHHAQEXLHYQNLAKYQHYGQQGQGYCQPDAAVRXPEQYYQXFSPSSSHSPARSVGRSPSYSSXPSPLMPNLENFPYSQQPLSXGAFPAGIXDHSHFMPLLNPSPXDAXSSVDXQAGNCKPLQKDKLPENLLSDLSLQSLXALXSQVENISNXVQQLLLSKAAVPQKKGVKNLVSRXPEQHKSQHCSPEGSGYSAEPAGXPLSEPPSSXPQSXHAEPQEADYLSGSEDPLERSFLYCNQARGSPARVNSNSKAKPESVSXCSVXSPDDMSXKSDDSFQSLHGSLPLDSFSKFVAGERDCPRLLLSALAQEDLASEILGLQEAIGEKADKAWAEAPSLVKDSSKPPFSLENHSACLDSVAKSAWPRPGEPEALPDSLQLDKGGNAKDFSPGLFEDPSVAFAXPDPKKXXGPLSFGXKPXLGVPAPDPXXAAFDCFPDXXAASSADSANPFAWPEENLGDACPRWGLHPGELXKGLEQGGKASDGISKGDXHEASACLGFQEEDPPGEKVASLPGDFKQEEVGGVKEEAGGLLQCPEVAKADRWLEDSRHCCSXADFGDLPLLPPXSRKEDLEAEEEYSSLCELLGSPEQRPGMQDPLSPKAPLICXKEEVEEVLDSKAGWGSPCHLSGESVILLGPXVGXESKVQSWFESSLSHMKPGEEGPDGERAPGDSXXSDASLAQKPNKPAVPEAPIAKKEPVPRGKSLRSRRVHRGLPEAEDSPCRAPVLPKDLLLPESCXGPPQGQMEGAGAPGRGASEGLPRMCXRSLXALSEPRXPGPPGLXXXPAPPDKLGGKQRAAFKSGKRVGKPSPKAASSPSNPAALPVASDSSPMGSKXKEXDSPSXPGKDQRSMILRSRXKXQEIFHSKRRRPSEGRLPNCRAXKKLLDNSHLPAXFKVSSSPQKEGRVSQRARVPKPGAGSKLSDRPLHALKRKSAFMAPVPXKKRNLVLRSRSSSSSNASGNGGDGKEERPEGSPXLFKRMSSPKKAKPXKGNGEPAXKLPPPEXPDACLKLASRAAFQGAMKXKVLPPRKGRGLKLEAIVQKIXSPSLKKFACKAPGASPGNPLSPSLSDKDRGLKGAGGSPVGVEEGLVNVGXGQKLPXSGADPLCRNPXNRSLKGKLMNSKKLSSXDCFKXEAFXSPEALQPGGXALAPKKRSRKGRAGAHGLSKGPLEKRPYLGPALLLXPRDRASGXQGASEDNSGGGGKKPKMEELGLASQPPEGRPCQPQXRAQKQPGHXNYSSYSKRKRLXRGRAKNXXSSPCKGRAKRRRQQQVLPLDPAEPEIRLKYISSCKRLRSDSRXPAFSPFVRVEKRDAFXXICXVVNSPGDAPKPHRKPSSSASSSSSSSSFSLDAAGASLAXLPGGSILQPRPSLPLSSXMHLGPVVSKALSXSCLVCCLCQNPANFKDLGDLCGPYYPEHCLPKKKPKLKEKVRPEGXCEEASLPLERXLKGPECAAAAXAGKPPRPDGPADPAKQGPLRXSARGLSRRLQSCYCCDGREDGGEEAAPADKGRKHECSKEAPAEPGGEAQEHWVHEACAVWXGGVYLVAGKLFGLQEAMKVAVDMMCSSCQEAGAXIGCCHKGCLHXYHYPCASDAGCIFIEENFSLKCPKHKRLP

SEQ ID NO: 22630 - protein, 156 aa, Homo sapiens
  MOD_RES (1)..(1): Any amino acid
  MOD_RES (21)..(21): Selenocysteine
  MOD_RES (55)..(55): Selenocysteine
  MOD_RES (66)..(66): Selenocysteine
  MOD_RES (77)..(77): Selenocysteine
  MOD_RES (109)..(109): Selenocysteine
  MOD_RES (145)..(145): Selenocysteine
XAEPGGEAQEHWVHEACAVWXGGVYLVAGKLFGLQEAMKVAVDMMCSSCQEAGAXIGCCHKGCLHXYHYPCASDAGXSPPRNRRALEPIQAVQGDPPWAQLPKPRPHLXLQFPSSLAPAILLSFCLPRPLLGNARDMEMRHSPGXCLRSAQSSEGR

SEQ ID NO: 22631 - protein, 101 aa, Homo sapiens
  MOD_RES (31)..(31): Selenocysteine
  MOD_RES (46)..(46): Selenocysteine
  MOD_RES (69)..(69): Selenocysteine
  MOD_RES (96)..(96): Selenocysteine
MAANKPKGQNSLALHKVIMVGSGGVGKSALXLQFMYDEFVEDYEPXKADSYRKKVVLDGEEVQIDILDXAGQEDYAAIRDNYFRSGEGFLCVFSIXEMESF

SEQ ID NO: 22632 - protein, 206 aa, Homo sapiens
  MOD_RES (31)..(31): Selenocysteine
  MOD_RES (46)..(46): Selenocysteine
  MOD_RES (69)..(69): Selenocysteine
  MOD_RES (96)..(96): Selenocysteine
  MOD_RES (104)..(104): Selenocysteine
  MOD_RES (156)..(156): Selenocysteine
  MOD_RES (160)..(160): Selenocysteine
MAANKPKGQNSLALHKVIMVGSGGVGKSALXLQFMYDEFVEDYEPXKADSYRKKVVLDGEEVQIDILDXAGQEDYAAIRDNYFRSGEGFLCVFSIXEMESFAAXADFREQILRVKEDENVPFLLVGNKSDLEDKRQVSVEEAKNRAEQWNVNYVEXSAKXRANVDKVFFDLMREIRARKMEDSKEKNGKKKRKSLAKRIRERCCIL

SEQ ID NO: 22633 - protein, 164 aa, Homo sapiens
  MOD_RES (1)..(1): Any amino acid
  MOD_RES (25)..(25): Selenocysteine
  MOD_RES (40)..(40): Selenocysteine
  MOD_RES (63)..(63): Selenocysteine
  MOD_RES (90)..(90): Selenocysteine
  MOD_RES (98)..(98): Selenocysteine
  MOD_RES (150)..(150): Selenocysteine
  MOD_RES (154)..(154): Selenocysteine
XGQNSLALHKVIMVGSGGVGKSALXLQFMYDEFVEDYEPXKADSYRKKVVLDGEEVQIDILDXAGQEDYAAIRDNYFRSGEGFLCVFSIXEMESFAAXADFREQILRVKEDENVPFLLVGNKSDLEDKRQVSVEEAKNRAEQWNVNYVEXSAKXRANVDKSGPS

SEQ ID NO: 22634 - protein, 46 aa, Homo sapiens
  MOD_RES (31)..(31): Selenocysteine
MAANKSKGQSSLALHKVIMVGSGGVGKSALXLQFMYDEECFKIIGI

SEQ ID NO: 22635 - protein, 112 aa, Homo sapiens
  MOD_RES (31)..(31): Selenocysteine
  MOD_RES (46)..(46): Selenocysteine
  MOD_RES (69)..(69): Selenocysteine
  MOD_RES (96)..(96): Selenocysteine
  MOD_RES (102)..(102): Selenocysteine
  MOD_RES (104)..(104): Selenocysteine
MAANKSKGQSSLALHKVIMVGSGGVGKSALXLQFMYDEFVEDYEPXKADSYRKKVVLDGEEVQIDILDXAGQEDYAAIRDNYFRSGEGFLLVFSIXEHESFXAXAEFREQIL

SEQ ID NO: 22636 - protein, 167 aa, Homo sapiens
  MOD_RES (31)..(31): Selenocysteine
  MOD_RES (46)..(46): Selenocysteine
  MOD_RES (69)..(69): Selenocysteine
  MOD_RES (96)..(96): Selenocysteine
  MOD_RES (102)..(102): Selenocysteine
  MOD_RES (104)..(104): Selenocysteine
  MOD_RES (157)..(157): Selenocysteine
  MOD_RES (161)..(161): Selenocysteine
MAANKSKGQSSLALHKVIMVGSGGVGKSALXLQFMYDEFVEDYEPXKADSYRKKVVLDGEEVQIDILDXAGQEDYAAIRDNYFRSGEGFLLVFSIXEHESFXAXAEFREQILRVKAEEDKIPLLVVGNKSDLEERRQVPVEEARSKAEEWGVQYVEXSAKXRANVDK

SEQ ID NO: 22637 - protein, 206 aa, Homo sapiens
  MOD_RES (31)..(31): Selenocysteine
  MOD_RES (46)..(46): Selenocysteine
  MOD_RES (69)..(69): Selenocysteine
  MOD_RES (96)..(96): Selenocysteine
  MOD_RES (102)..(102): Selenocysteine
  MOD_RES (104)..(104): Selenocysteine
  MOD_RES (157)..(157): Selenocysteine
  MOD_RES (161)..(161): Selenocysteine
  MOD_RES (178)..(178): Selenocysteine
MAANKSKGQSSLALHKVIMVGSGGVGKSALXLQFMYDEFVEDYEPXKADSYRKKVVLDGEEVQIDILDXAGQEDYAAIRDNYFRSGEGFLLVFSIXEHESFXAXAEFREQILRVKAEEDKIPLLVVGNKSDLEERRQVPVEEARSKAEEWGVQYVEXSAKXRANVDKVFFDLMREIRXKKMSENKDKNGKKSSKNKKSFKERCCLL

SEQ ID NO: 22638 - protein, 171 aa, Homo sapiens
  MOD_RES (20)..(20): Selenocysteine
  MOD_RES (53)..(53): Selenocysteine
  MOD_RES (68)..(68): Selenocysteine
  MOD_RES (91)..(91): Selenocysteine
  MOD_RES (118)..(118): Selenocysteine
  MOD_RES (124)..(124): Selenocysteine
  MOD_RES (126)..(126): Selenocysteine
MKQRQSALQWVICVSQPQKXSEMAANKSKGQSSLALHKVIMVGSGGVGKSALXLQFMYDEFVEDYEPXKADSYRKKVVLDGEEVQIDILDXAGQEDYAAIRDNYFRSGEGFLLVFSIXEHESFXAXAEFREQILRVKAEEDKIPLLVVGNKSDLEERRQVPVEEARSKAEE

SEQ ID NO: 22639 - protein, 186 aa, Homo sapiens
  MOD_RES (2)..(2): Selenocysteine
  MOD_RES (9)..(9): Selenocysteine
  MOD_RES (25)..(25): Selenocysteine
  MOD_RES (27)..(27): Selenocysteine
  MOD_RES (36)..(36): Selenocysteine
  MOD_RES (44)..(44): Selenocysteine
  MOD_RES (82)..(82): Selenocysteine
  MOD_RES (155)..(155): Selenocysteine
MXECFLPPXSSPSEHRRVEHGSGLXRXPSSEEISPXKFPGLYRXGEPSPPHDILHEPPDVVSDDEKDHGKKKGKFKKKEKRXEGYAAFQEDSSGDEAESPSKMKRSKGIHVFKKPSFSKKKEKDFKIKEKPKEEKHKEEKHKEEKHKEKKSKDLXAADVVKQWKEKKKKKKPIQEPEVPQIDVPNL

SEQ ID NO: 22640 - protein, 207 aa, Homo sapiens
  MOD_RES (2)..(2): Selenocysteine
  MOD_RES (9)..(9): Selenocysteine
  MOD_RES (25)..(25): Selenocysteine
  MOD_RES (27)..(27): Selenocysteine
  MOD_RES (36)..(36): Selenocysteine
  MOD_RES (44)..(44): Selenocysteine
  MOD_RES (82)..(82): Selenocysteine
  MOD_RES (155)..(155): Selenocysteine
  MOD_RES (201)..(201): Selenocysteine
MXECFLPPXSSPSEHRRVEHGSGLXRXPSSEEISPXKFPGLYRXGEPSPPHDILHEPPDVVSDDEKDHGKKKGKFKKKEKRXEGYAAFQEDSSGDEAESPSKMKRSKGIHVFKKPSFSKKKEKDFKIKEKPKEEKHKEEKHKEEKHKEKKSKDLXAADVVKQWKEKKKKKKPIQEPEVPQIDVPNLKPIFGIPLADAVERXMMYDGI

SEQ ID NO: 22641 - protein, 655 aa, Homo sapiens
  MOD_RES (2)..(2): Selenocysteine
  MOD_RES (9)..(9): Selenocysteine
  MOD_RES (25)..(25): Selenocysteine
  MOD_RES (27)..(27): Selenocysteine
  MOD_RES (36)..(36): Selenocysteine
  MOD_RES (44)..(44): Selenocysteine
  MOD_RES (82)..(82): Selenocysteine
  MOD_RES (155)..(155): Selenocysteine
  MOD_RES (201)..(201): Selenocysteine
  MOD_RES (253)..(253): Selenocysteine
  MOD_RES (262)..(262): Selenocysteine
  MOD_RES (280)..(280): Selenocysteine
  MOD_RES (294)..(295): Selenocysteine
  MOD_RES (297)..(297): Selenocysteine
  MOD_RES (335)..(335): Selenocysteine
  MOD_RES (349)..(349): Selenocysteine
  MOD_RES (362)..(362): Selenocysteine
  MOD_RES (387)..(387): Selenocysteine
  MOD_RES (390)..(390): Selenocysteine
  MOD_RES (394)..(394): Selenocysteine
  MOD_RES (437)..(437): Selenocysteine
  MOD_RES (453)..(453): Selenocysteine
  MOD_RES (491)..(491): Selenocysteine
  MOD_RES (535)..(535): Selenocysteine
  MOD_RES (653)..(653): Selenocysteine
MXECFLPPXSSPSEHRRVEHGSGLXRXPSSEEISPXKFPGLYRXGEPSPPHDILHEPPDVVSDDEKDHGKKKGKFKKKEKRXEGYAAFQEDSSGDEAESPSKMKRSKGIHVFKKPSFSKKKEKDFKIKEKPKEEKHKEEKHKEEKHKEKKSKDLXAADVVKQWKEKKKKKKPIQEPEVPQIDVPNLKPIFGIPLADAVERXMMYDGIRLPAVFRECIDYVEKYGMKCEGIYRVSGIKSKVDELKAAYDREESXNLEDYEPNXVASLLKQYLRDLPENLLXKELMPRFEEACGRXXEXEKVQEFQRLLKELPECNYLLISWLIVHMDHVIAKELEXKMNIQNISIVLSPXVQISNRVLYVFFXHVQELFGNVVLKQVMKPLRWSNMAXMPXLPEXQAGIKEEIRRQEFLLNCLHRDLQGGIKDLSKEERLWEVQRILXALKRKLREAKRQECEXKIAQEIASLSKEDVSKEEMNENEEVINILLAQENEILXEQEELLAMEQFLRRQIASEKEEIERLRAEIAEIQSRQQHGRSEXEEYSSESESESEDEEELQIILEDLQRQNEELEIKNNHLNQAIHEEREAIIELRVQLRLLQMQRAKAEQQAQEDEEPEWRGGAVQPPRDGVLEPKAAKEQPKAGKEPAKPSPSRDRKEXSI

SEQ ID NO: 22642 - protein, 2036 aa, Homo sapiens
  MOD_RES (14)..(14): Selenocysteine
  MOD_RES (20)..(20): Selenocysteine
  MOD_RES (26)..(26): Selenocysteine
  MOD_RES (64)..(64): Selenocysteine
  MOD_RES (118)..(118): Selenocysteine
  MOD_RES (169)..(169): Selenocysteine
  MOD_RES (183)..(183): Selenocysteine
  MOD_RES (186)..(186): Selenocysteine
  MOD_RES (191)..(191): Selenocysteine
  MOD_RES (207)..(207): Selenocysteine
  MOD_RES (287)..(287): Selenocysteine
  MOD_RES (294)..(294): Selenocysteine
  MOD_RES (320)..(320): Selenocysteine
  MOD_RES (357)..(357): Selenocysteine
  MOD_RES (360)..(361): Selenocysteine
  MOD_RES (370)..(370): Selenocysteine
  MOD_RES (372)..(372): Selenocysteine
  MOD_RES (374)..(374): Selenocysteine
  MOD_RES (392)..(392): Selenocysteine
  MOD_RES (412)..(412): Selenocysteine
  MOD_RES (458)..(458): Selenocysteine
  MOD_RES (469)..(469): Selenocysteine
  MOD_RES (487)..(487): Selenocysteine
  MOD_RES (489)..(489): Selenocysteine
  MOD_RES (516)..(516): Selenocysteine
  MOD_RES (524)..(524): Selenocysteine
  MOD_RES (555)..(555): Selenocysteine
  MOD_RES (578)..(578): Selenocysteine
  MOD_RES (590)..(590): Selenocysteine
  MOD_RES (611)..(611): Selenocysteine
  MOD_RES (623)..(623): Selenocysteine
  MOD_RES (653)..(653): Selenocysteine
  MOD_RES (660)..(660): Selenocysteine
  MOD_RES (665)..(665): Selenocysteine
  MOD_RES (668)..(668): Selenocysteine
  MOD_RES (670)..(670): Selenocysteine
  MOD_RES (736)..(738): Selenocysteine
  MOD_RES (743)..(743): Selenocysteine
  MOD_RES (754)..(754): Selenocysteine
  MOD_RES (767)..(767): Selenocysteine
  MOD_RES (778)..(778): Selenocysteine
  MOD_RES (798)..(798): Selenocysteine
  MOD_RES (806)..(806): Selenocysteine
  MOD_RES (854)..(854): Selenocysteine
  MOD_RES (856)..(856): Selenocysteine
  MOD_RES (894)..(894): Selenocysteine
  MOD_RES (931)..(931): Selenocysteine
  MOD_RES (933)..(933): Selenocysteine
  MOD_RES (936)..(936): Selenocysteine
  MOD_RES (960)..(961): Selenocysteine
  MOD_RES (968)..(968): Selenocysteine
  MOD_RES (982)..(982): Selenocysteine
  MOD_RES (984)..(984): Selenocysteine
  MOD_RES (1002)..(1002): Selenocysteine
  MOD_RES (1007)..(1007): Selenocysteine
  MOD_RES (1031)..(1031): Selenocysteine
  MOD_RES (1052)..(1052): Selenocysteine
  MOD_RES (1054)..(1054): Selenocysteine
  MOD_RES (1062)..(1062): Selenocysteine
  MOD_RES (1109)..(1109): Selenocysteine
  MOD_RES (1113)..(1113): Selenocysteine
  MOD_RES (1128)..(1128): Selenocysteine
  MOD_RES (1135)..(1135): Selenocysteine
  MOD_RES (1138)..(1138): Selenocysteine
  MOD_RES (1155)..(1155): Selenocysteine
  MOD_RES (1170)..(1170): Selenocysteine
  MOD_RES (1190)..(1190): Selenocysteine
  MOD_RES (1208)..(1208): Selenocysteine
  MOD_RES (1267)..(1267): Selenocysteine
  MOD_RES (1276)..(1276): Selenocysteine
  MOD_RES (1328)..(1328): Selenocysteine
  MOD_RES (1331)..(1331): Selenocysteine
  MOD_RES (1368)..(1368): Selenocysteine
  MOD_RES (1370)..(1370): Selenocysteine
  MOD_RES (1376)..(1376): Selenocysteine
  MOD_RES (1406)..(1406): Selenocysteine
  MOD_RES (1414)..(1414): Selenocysteine
  MOD_RES (1421)..(1421): Selenocysteine
  MOD_RES (1491)..(1491): Selenocysteine
  MOD_RES (1495)..(1495): Selenocysteine
  MOD_RES (1508)..(1508): Selenocysteine
  MOD_RES (1511)..(1511): Selenocysteine
  MOD_RES (1530)..(1530): Selenocysteine
  MOD_RES (1545)..(1545): Selenocysteine
  MOD_RES (1565)..(1566): Selenocysteine
  MOD_RES (1626)..(1626): Selenocysteine
  MOD_RES (1643)..(1643): Selenocysteine
  MOD_RES (1652)..(1652): Selenocysteine
  MOD_RES (1667)..(1667): Selenocysteine
  MOD_RES (1670)..(1670): Selenocysteine
  MOD_RES (1673)..(1673): Selenocysteine
  MOD_RES (1691)..(1691): Selenocysteine
  MOD_RES (1699)..(1699): Selenocysteine
  MOD_RES (1730)..(1730): Selenocysteine
  MOD_RES (1807)..(1807): Selenocysteine
  MOD_RES (1827)..(1827): Selenocysteine
  MOD_RES (1829)..(1829): Selenocysteine
  MOD_RES (1849)..(1849): Selenocysteine
  MOD_RES (1864)..(1864): Selenocysteine
  MOD_RES (1867)..(1868): Selenocysteine
  MOD_RES (1873)..(1873): Selenocysteine
  MOD_RES (1875)..(1875): Selenocysteine
  MOD_RES (1884)..(1884): Selenocysteine
  MOD_RES (1895)..(1895): Selenocysteine
  MOD_RES (1914)..(1914): Selenocysteine
  MOD_RES (1924)..(1924): Selenocysteine
  MOD_RES (1975)..(1975): Selenocysteine
  MOD_RES (2003)..(2003): Selenocysteine
  MOD_RES (2012)..(2013): Selenocysteine
MFSKKPHGDVKKSXQKVLDXKKDALXRLKHLRIVIENAESIDLKQFFDQHFSHIYYVFFENFVXIEASLKQKGHKSQREELDAILFIFEKILQLLPERIHQRWQFHSIGLILKKLLHXGNSLKIRREGVRLFLLWLQALQNNCSKEQLWMFSCLIPGFSAPQSEHGPRXLDNLINPPLNLQEXQVXIEEIXPLVPPQSGDKGQEDLXSYFLEALLKYIVIQVKSLEWKNKENQERGFSFLFSHFKKYYLPYIFPNICKENSLYHPILDIPQMRPKPHYVVIKKDAEXNEAIYCXKEPFIKARVIVIRWLVSFWLEPKPHXGPHIPGMEGEVLPKNIQRAAASLVSREESKNDNADKXDRXXEPEQSHSNXSXLXEREPSSSSLCSIDEEHLXDIEIVRRVFSSKRSNVNFVXEIFRQAFLLPICEAAAMRKVVKVYQEWIQQEEKPLFMQEPEEIVIXSSDLPCIENVXDHDISMEEGEKREEENGXNXADHVRNSSWAKNGSYQGALHNASEEAXEQNIRAGXQAVLQVFIINSSNIFLLEPANEIKNLLDEHXDMCKRILNIYRYMVVQVSMDKKXWEQMLLVLLRVXESVLKMPSQAFLQFQGKKNMXLAGRLAGPLFQXLIVAWIKANLNVYISRELWDDLLSVLSSLXYWEELAXEWSLXMEXLXKVLARNLYSLDLSDLPLDKLSEQKQKKHKGKGVGHEFQKVSVDKSFSRGWSRDQPGQAPMRQRSAXXXGSPGXEKARSIVRQKXVDIDDAQILPRSXRVRHFSQSEEXGNEVFGALNEEQPLPRSSSXSDILEPFXVERAKVNKEDMSQKLPPLNSDIGGSSANVPDLMDEFIAERLRSGNASXMXRRGSSPGSLEIPKDLPDILNKQNQMRPIDDPGVPSEWXSPASAGSSDLISSDSHSDSFSAFQYDGRKFDNFGFGXDXGVXSSADVDSGSGHHQSAEEQEVASLXXLHIDSEXSSLNQQAFSAEVAXIXGSESASPVHSPLGSRSQXPSPSXLNIDHMEQKDLQLDEKLHHSVLQXPDDLEISEFPSECCSVMAGGXLXGWHADVAXVMWRRMLGILGDVNSIMDPEIHAQVFDYLCELWQNLAKIRDNLGISXDNLXSPSPPVLIPPLRILXPWLFKAXMLXDKYKQGKLHAYKLICNXMKRRQDVSPNRDFLXHFYNIMHCGLLHIDQDIVNXIIKHCSPQFFSLGLPGAXMLIMDFIVAAGRVASSAFLNAPRVEAQVLLGSLVCFPNLYCELPSLHPNIPDVAVSQFXDVKELIIKXVLSSARDEPSGPARCVALCSLGIWICEELVHESHHPQIKEALNVICVSLKFXNKXVAHVACNMLHMLVHYVPRLQIYQPDSPLKIIQILIAXIXHLLPSXEASSYEMDKRLVVSLLLCLLDWIMALPLKXLLQPFHAXGAESDKXEKSVLNCIYKVLHGCVYGAQCFSNPRYFPMSLSDLASVDYDPFMHLESLKEPEPLHSPDSERSSKLQPVXEVKXQMQHGLISIAARXVIXHLVNHLGHYPMSGGPAMLXSQVCENHDNHYSESXELSPELFESPNIQFFVLNNXXLVSCIQIRSEENMPGGGLSAGLASANSNVRIIVRDLSGKYSWDSAILYGPPPVSGLSEPXSFMLSLSHQEKPEEPPXSNECLEDIXVKDGLSLQFKRFREXVPXWDXIRDEEDVLDELLQYLGVXSPECLQRXGISLNIPAPQPVCISEKQENDVINAILKQHXEEKEFVEKHFNDLNMKAVEQDEPIPQKPQSAFYYCRLLLSILGMNSWDKRRSFHLLKKNEKLLRELRNLDSRQCREXHKIAVFYVAEGQEDKHSILXNXGGSQAYEDFVAGLGWEVNLXNHCGFMGGLQKNKSXGLXXPYFAXSXVEVIFHVSXRMPSDSDDSLXKKLRHLGNDEVHIVWSEHXRDYRRGIIPXEFGDVLIVIYPMKNHMFSIQIMKKPEVPFFGPLFDGAIVNGKVLPIMVRAXAINASRALKSLIPLYQNFYEERARYLQXIVQHHLEPXXFEDFAAQVFSPAPYHHLPSDADH

SEQ ID NO: 22643 - protein, 2049 aa, Homo sapiens
  MOD_RES (14)..(14): Selenocysteine
  MOD_RES (20)..(20): Selenocysteine
  MOD_RES (26)..(26): Selenocysteine
  MOD_RES (64)..(64): Selenocysteine
  MOD_RES (118)..(118): Selenocysteine
  MOD_RES (169)..(169): Selenocysteine
  MOD_RES (183)..(183): Selenocysteine
  MOD_RES (186)..(186): Selenocysteine
  MOD_RES (191)..(191): Selenocysteine
  MOD_RES (207)..(207): Selenocysteine
  MOD_RES (287)..(287): Selenocysteine
  MOD_RES (294)..(294): Selenocysteine
  MOD_RES (320)..(320): Selenocysteine
  MOD_RES (357)..(357): Selenocysteine
  MOD_RES (360)..(361): Selenocysteine
  MOD_RES (370)..(370): Selenocysteine
  MOD_RES (372)..(372): Selenocysteine
  MOD_RES (374)..(374): Selenocysteine
  MOD_RES (392)..(392): Selenocysteine
  MOD_RES (412)..(412): Selenocysteine
  MOD_RES (458)..(458): Selenocysteine
  MOD_RES (469)..(469): Selenocysteine
  MOD_RES (487)..(487): Selenocysteine
  MOD_RES (489)..(489): Selenocysteine
  MOD_RES (516)..(516): Selenocysteine
  MOD_RES (524)..(524): Selenocysteine
  MOD_RES (555)..(555): Selenocysteine
  MOD_RES (578)..(578): Selenocysteine
  MOD_RES (590)..(590): Selenocysteine
  MOD_RES (611)..(611): Selenocysteine
  MOD_RES (623)..(623): Selenocysteine
  MOD_RES (653)..(653): Selenocysteine
  MOD_RES (660)..(660): Selenocysteine
  MOD_RES (665)..(665): Selenocysteine
  MOD_RES (668)..(668): Selenocysteine
  MOD_RES (670)..(670): Selenocysteine
  MOD_RES (736)..(738): Selenocysteine
  MOD_RES (743)..(743): Selenocysteine
  MOD_RES (754)..(754): Selenocysteine
  MOD_RES (767)..(767): Selenocysteine
  MOD_RES (778)..(778): Selenocysteine
  MOD_RES (798)..(798): Selenocysteine
  MOD_RES (806)..(806): Selenocysteine
  MOD_RES (818)..(818): Selenocysteine
  MOD_RES (822)..(822): Selenocysteine
  MOD_RES (867)..(867): Selenocysteine
  MOD_RES (869)..(869): Selenocysteine
  MOD_RES (907)..(907): Selenocysteine
  MOD_RES (944)..(944): Selenocysteine
  MOD_RES (946)..(946): Selenocysteine
  MOD_RES (949)..(949): Selenocysteine
  MOD_RES (973)..(974): Selenocysteine
  MOD_RES (981)..(981): Selenocysteine
  MOD_RES (995)..(995): Selenocysteine
  MOD_RES (997)..(997): Selenocysteine
  MOD_RES (1015)..(1015): Selenocysteine
  MOD_RES (1020)..(1020): Selenocysteine
  MOD_RES (1044)..(1044): Selenocysteine
  MOD_RES (1065)..(1065): Selenocysteine
  MOD_RES (1067)..(1067): Selenocysteine
  MOD_RES (1075)..(1075): Selenocysteine
  MOD_RES (1122)..(1122): Selenocysteine
  MOD_RES (1126)..(1126): Selenocysteine
  MOD_RES (1141)..(1141): Selenocysteine
  MOD_RES (1148)..(1148): Selenocysteine
  MOD_RES (1151)..(1151): Selenocysteine
  MOD_RES (1168)..(1168): Selenocysteine
  MOD_RES (1183)..(1183): Selenocysteine
  MOD_RES (1203)..(1203): Selenocysteine
  MOD_RES (1221)..(1221): Selenocysteine
  MOD_RES (1280)..(1280): Selenocysteine
  MOD_RES (1289)..(1289): Selenocysteine
  MOD_RES (1341)..(1341): Selenocysteine
  MOD_RES (1344)..(1344): Selenocysteine
  MOD_RES (1381)..(1381): Selenocysteine
  MOD_RES (1383)..(1383): Selenocysteine
  MOD_RES (1389)..(1389): Selenocysteine
  MOD_RES (1419)..(1419): Selenocysteine
  MOD_RES (1427)..(1427): Selenocysteine
  MOD_RES (1434)..(1434): Selenocysteine
  MOD_RES (1504)..(1504): Selenocysteine
  MOD_RES (1508)..(1508): Selenocysteine
  MOD_RES (1521)..(1521): Selenocysteine
  MOD_RES (1524)..(1524): Selenocysteine
  MOD_RES (1543)..(1543): Selenocysteine
  MOD_RES (1558)..(1558): Selenocysteine
  MOD_RES (1578)..(1579): Selenocysteine
  MOD_RES (1639)..(1639): Selenocysteine
  MOD_RES (1656)..(1656): Selenocysteine
  MOD_RES (1665)..(1665): Selenocysteine
  MOD_RES (1680)..(1680): Selenocysteine
  MOD_RES (1683)..(1683): Selenocysteine
  MOD_RES (1686)..(1686): Selenocysteine
  MOD_RES (1704)..(1704): Selenocysteine
  MOD_RES (1712)..(1712): Selenocysteine
  MOD_RES (1743)..(1743): Selenocysteine
  MOD_RES (1820)..(1820): Selenocysteine
  MOD_RES (1840)..(1840): Selenocysteine
  MOD_RES (1842)..(1842): Selenocysteine
  MOD_RES (1862)..(1862): Selenocysteine
  MOD_RES (1877)..(1877): Selenocysteine
  MOD_RES (1880)..(1881): Selenocysteine
  MOD_RES (1886)..(1886): Selenocysteine
  MOD_RES (1888)..(1888): Selenocysteine
  MOD_RES (1897)..(1897): Selenocysteine
  MOD_RES (1908)..(1908): Selenocysteine
  MOD_RES (1927)..(1927): Selenocysteine
  MOD_RES (1937)..(1937): Selenocysteine
  MOD_RES (1988)..(1988): Selenocysteine
  MOD_RES (2016)..(2016): Selenocysteine
  MOD_RES (2025)..(2026): Selenocysteine
MFSKKPHGDVKKSXQKVLDXKKDALXRLKHLRIVIENAESIDLKQFFDQHFSHIYYVFFENFVXIEASLKQKGHKSQREELDAILFIFEKILQLLPERIHQRWQFHSIGLILKKLLHXGNSLKIRREGVRLFLLWLQALQNNCSKEQLWMFSCLIPGFSAPQSEHGPRXLDNLINPPLNLQEXQVXIEEIXPLVPPQSGDKGQEDLXSYFLEALLKYIVIQVKSLEWKNKENQERGFSFLFSHFKKYYLPYIFPNICKENSLYHPILDIPQMRPKPHYVVIKKDAEXNEAIYCXKEPFIKARVIVIRWLVSFWLEPKPHXGPHIPGMEGEVLPKNIQRAAASLVSREESKNDNADKXDRXXEPEQSHSNXSXLXEREPSSSSLCSIDEEHLXDIEIVRRVFSSKRSNVNFVXEIFRQAFLLPICEAAAMRKVVKVYQEWIQQEEKPLFMQEPEEIVIXSSDLPCIENVXDHDISMEEGEKREEENGXNXADHVRNSSWAKNGSYQGALHNASEEAXEQNIRAGXQAVLQVFIINSSNIFLLEPANEIKNLLDEHXDMCKRILNIYRYMVVQVSMDKKXWEQMLLVLLRVXESVLKMPSQAFLQFQGKKNMXLAGRLAGPLFQXLIVAWIKANLNVYISRELWDDLLSVLSSLXYWEELAXEWSLXMEXLXKVLARNLYSLDLSDLPLDKLSEQKQKKHKGKGVGHEFQKVSVDKSFSRGWSRDQPGQAPMRQRSAXXXGSPGXEKARSIVRQKXVDIDDAQILPRSXRVRHFSQSEEXGNEVFGALNEEQPLPRSSSXSDILEPFXVERAKEAEQNAXRGSXEGSVQSCNGLFWKESCSDIGGSSANVPDLMDEFIAERLRSGNASXMXRRGSSPGSLEIPKDLPDILNKQNQMRPIDDPGVPSEWXSPASAGSSDLISSDSHSDSFSAFQYDGRKFDNFGFGXDXGVXSSADVDSGSGHHQSAEEQEVASLXXLHIDSEXSSLNQQAFSAEVAXIXGSESASPVHSPLGSRSQXPSPSXLNIDHMEQKDLQLDEKLHHSVLQXPDDLEISEFPSECCSVMAGGXLXGWHADVAXVMWRRMLGILGDVNSIMDPEIHAQVFDYLCELWQNLAKIRDNLGISXDNLXSPSPPVLIPPLRILXPWLFKAXMLXDKYKQGKLHAYKLICNXMKRRQDVSPNRDFLXHFYNIMHCGLLHIDQDIVNXIIKHCSPQFFSLGLPGAXMLIMDFIVAAGRVASSAFLNAPRVEAQVLLGSLVCFPNLYCELPSLHPNIPDVAVSQFXDVKELIIKXVLSSARDEPSGPARCVALCSLGIWICEELVHESHHPQIKEALNVICVSLKFXNKXVAHVACNMLHMLVHYVPRLQIYQPDSPLKIIQILIAXIXHLLPSXEASSYEMDKRLVVSLLLCLLDWIMALPLKXLLQPFHAXGAESDKXEKSVLNCIYKVLHGCVYGAQCFSNPRYFPMSLSDLASVDYDPFMHLESLKEPEPLHSPDSERSSKLQPVXEVKXQMQHGLISIAARXVIXHLVNHLGHYPMSGGPAMLXSQVCENHDNHYSESXELSPELFESPNIQFFVLNNXXLVSCIQIRSEENMPGGGLSAGLASANSNVRIIVRDLSGKYSWDSAILYGPPPVSGLSEPXSFMLSLSHQEKPEEPPXSNECLEDIXVKDGLSLQFKRFREXVPXWDXIRDEEDVLDELLQYLGVXSPECLQRXGISLNIPAPQPVCISEKQENDVINAILKQHXEEKEFVEKHFNDLNMKAVEQDEPIPQKPQSAFYYCRLLLSILGMNSWDKRRSFHLLKKNEKLLRELRNLDSRQCREXHKIAVFYVAEGQEDKHSILXNXGGSQAYEDFVAGLGWEVNLXNHCGFMGGLQKNKSXGLXXPYFAXSXVEVIFHVSXRMPSDSDDSLXKKLRHLGNDEVHIVWSEHXRDYRRGIIPXEFGDVLIVIYPMKNHMFSIQIMKKPEVPFFGPLFDGAIVNGKVLPIMVRAXAINASRALKSLIPLYQNFYEERARYLQXIVQHHLEPXXFEDFAAQVFSPAPYHHLPSDADH

SEQ ID NO: 22644 - protein, 2083 aa, Homo sapiens
  MOD_RES (14)..(14): Selenocysteine
  MOD_RES (20)..(20): Selenocysteine
  MOD_RES (26)..(26): Selenocysteine
  MOD_RES (64)..(64): Selenocysteine
  MOD_RES (118)..(118): Selenocysteine
  MOD_RES (169)..(169): Selenocysteine
  MOD_RES (183)..(183): Selenocysteine
  MOD_RES (186)..(186): Selenocysteine
  MOD_RES (191)..(191): Selenocysteine
  MOD_RES (207)..(207): Selenocysteine
  MOD_RES (287)..(287): Selenocysteine
  MOD_RES (294)..(294): Selenocysteine
  MOD_RES (320)..(320): Selenocysteine
  MOD_RES (357)..(357): Selenocysteine
  MOD_RES (360)..(361): Selenocysteine
  MOD_RES (370)..(370): Selenocysteine
  MOD_RES (372)..(372): Selenocysteine
  MOD_RES (374)..(374): Selenocysteine
  MOD_RES (392)..(392): Selenocysteine
  MOD_RES (412)..(412): Selenocysteine
  MOD_RES (458)..(458): Selenocysteine
  MOD_RES (469)..(469): Selenocysteine
  MOD_RES (487)..(487): Selenocysteine
  MOD_RES (489)..(489): Selenocysteine
  MOD_RES (516)..(516): Selenocysteine
  MOD_RES (524)..(524): Selenocysteine
  MOD_RES (555)..(555): Selenocysteine
  MOD_RES (578)..(578): Selenocysteine
  MOD_RES (590)..(590): Selenocysteine
  MOD_RES (611)..(611): Selenocysteine
  MOD_RES (623)..(623): Selenocysteine
  MOD_RES (653)..(653): Selenocysteine
  MOD_RES (660)..(660): Selenocysteine
  MOD_RES (665)..(665): Selenocysteine
  MOD_RES (668)..(668): Selenocysteine
  MOD_RES (670)..(670): Selenocysteine
  MOD_RES (736)..(738): Selenocysteine
  MOD_RES (743)..(743): Selenocysteine
  MOD_RES (754)..(754): Selenocysteine
  MOD_RES (767)..(767): Selenocysteine
  MOD_RES (778)..(778): Selenocysteine
  MOD_RES (798)..(798): Selenocysteine
  MOD_RES (806)..(806): Selenocysteine
  MOD_RES (854)..(854): Selenocysteine
  MOD_RES (856)..(856): Selenocysteine
  MOD_RES (894)..(894): Selenocysteine
  MOD_RES (931)..(931): Selenocysteine
  MOD_RES (933)..(933): Selenocysteine
  MOD_RES (936)..(936): Selenocysteine
  MOD_RES (960)..(961): Selenocysteine
  MOD_RES (968)..(968): Selenocysteine
  MOD_RES (982)..(982): Selenocysteine
  MOD_RES (984)..(984): Selenocysteine
  MOD_RES (1002)..(1002): Selenocysteine
  MOD_RES (1007)..(1007): Selenocysteine
  MOD_RES (1031)..(1031): Selenocysteine
  MOD_RES (1052)..(1052): Selenocysteine
  MOD_RES (1054)..(1054): Selenocysteine
  MOD_RES (1062)..(1062): Selenocysteine
  MOD_RES (1109)..(1109): Selenocysteine
  MOD_RES (1113)..(1113): Selenocysteine
  MOD_RES (1128)..(1128): Selenocysteine
  MOD_RES (1135)..(1135): Selenocysteine
  MOD_RES (1138)..(1138): Selenocysteine
  MOD_RES (1155)..(1155): Selenocysteine
  MOD_RES (1170)..(1170): Selenocysteine
  MOD_RES (1190)..(1190): Selenocysteine
  MOD_RES (1208)..(1208): Selenocysteine
  MOD_RES (1267)..(1267): Selenocysteine
  MOD_RES (1276)..(1276): Selenocysteine
  MOD_RES (1328)..(1328): Selenocysteine
  MOD_RES (1331)..(1331): Selenocysteine
  MOD_RES (1368)..(1368): Selenocysteine
  MOD_RES (1370)..(1370): Selenocysteine
  MOD_RES (1376)..(1376): Selenocysteine
  MOD_RES (1406)..(1406): Selenocysteine
  MOD_RES (1414)..(1414): Selenocysteine
  MOD_RES (1421)..(1421): Selenocysteine
  MOD_RES (1491)..(1491): Selenocysteine
  MOD_RES (1495)..(1495): Selenocysteine
  MOD_RES (1508)..(1508): Selenocysteine
  MOD_RES (1511)..(1511): Selenocysteine
  MOD_RES (1530)..(1530): Selenocysteine
  MOD_RES (1545)..(1545): Selenocysteine
  MOD_RES (1565)..(1566): Selenocysteine
  MOD_RES (1626)..(1626): Selenocysteine
  MOD_RES (1643)..(1643): Selenocysteine
  MOD_RES (1652)..(1652): Selenocysteine
  MOD_RES (1667)..(1667): Selenocysteine
  MOD_RES (1670)..(1670): Selenocysteine
  MOD_RES (1673)..(1673): Selenocysteine
  MOD_RES (1691)..(1691): Selenocysteine
  MOD_RES (1699)..(1699): Selenocysteine
  MOD_RES (1730)..(1730): Selenocysteine
  MOD_RES (1807)..(1807): Selenocysteine
  MOD_RES (1827)..(1827): Selenocysteine
  MOD_RES (1829)..(1829): Selenocysteine
  MOD_RES (1849)..(1849): Selenocysteine
  MOD_RES (1864)..(1864): Selenocysteine
  MOD_RES (1867)..(1868): Selenocysteine
  MOD_RES (1873)..(1873): Selenocysteine
  MOD_RES (1875)..(1875): Selenocysteine
  MOD_RES (1884)..(1884): Selenocysteine
  MOD_RES (1895)..(1895): Selenocysteine
  MOD_RES (1914)..(1914): Selenocysteine
  MOD_RES (1924)..(1924): Selenocysteine
  MOD_RES (1975)..(1975): Selenocysteine
  MOD_RES (2003)..(2003): Selenocysteine
  MOD_RES (2012)..(2013): Selenocysteine
  MOD_RES (2045)..(2045): Selenocysteine
  MOD_RES (2047)..(2047): Selenocysteine
  MOD_RES (2049)..(2049): Selenocysteine
  MOD_RES (2064)..(2064): Selenocysteine
MFSKKPHGDVKKSXQKVLDXKKDALXRLKHLRIVIENAESIDLKQFFDQHFSHIYYVFFENFVXIEASLKQKGHKSQREELDAILFIFEKILQLLPERIHQRWQFHSIGLILKKLLHXGNSLKIRREGVRLFLLWLQALQNNCSKEQLWMFSCLIPGFSAPQSEHGPRXLDNLINPPLNLQEXQVXIEEIXPLVPPQSGDKGQEDLXSYFLEALLKYIVIQVKSLEWKNKENQERGFSFLFSHFKKYYLPYIFPNICKENSLYHPILDIPQMRPKPHYVVIKKDAEXNEAIYCXKEPFIKARVIVIRWLVSFWLEPKPHXGPHIPGMEGEVLPKNIQRAAASLVSREESKNDNADKXDRXXEPEQSHSNXSXLXEREPSSSSLCSIDEEHLXDIEIVRRVFSSKRSNVNFVXEIFRQAFLLPICEAAAMRKVVKVYQEWIQQEEKPLFMQEPEEIVIXSSDLPCIENVXDHDISMEEGEKREEENGXNXADHVRNSSWAKNGSYQGALHNASEEAXEQNIRAGXQAVLQVFIINSSNIFLLEPANEIKNLLDEHXDMCKRILNIYRYMVVQVSMDKKXWEQMLLVLLRVXESVLKMPSQAFLQFQGKKNMXLAGRLAGPLFQXLIVAWIKANLNVYISRELWDDLLSVLSSLXYWEELAXEWSLXMEXLXKVLARNLYSLDLSDLPLDKLSEQKQKKHKGKGVGHEFQKVSVDKSFSRGWSRDQPGQAPMRQRSAXXXGSPGXEKARSIVRQKXVDIDDAQILPRSXRVRHFSQSEEXGNEVFGALNEEQPLPRSSSXSDILEPFXVERAKVNKEDMSQKLPPLNSDIGGSSANVPDLMDEFIAERLRSGNASXMXRRGSSPGSLEIPKDLPDILNKQNQMRPIDDPGVPSEWXSPASAGSSDLISSDSHSDSFSAFQYDGRKFDNFGFGXDXGVXSSADVDSGSGHHQSAEEQEVASLXXLHIDSEXSSLNQQAFSAEVAXIXGSESASPVHSPLGSRSQXPSPSXLNIDHMEQKDLQLDEKLHHSVLQXPDDLEISEFPSECCSVMAGGXLXGWHADVAXVMWRRMLGILGDVNSIMDPEIHAQVFDYLCELWQNLAKIRDNLGISXDNLXSPSPPVLIPPLRILXPWLFKAXMLXDKYKQGKLHAYKLICNXMKRRQDVSPNRDFLXHFYNIMHCGLLHIDQDIVNXIIKHCSPQFFSLGLPGAXMLIMDFIVAAGRVASSAFLNAPRVEAQVLLGSLVCFPNLYCELPSLHPNIPDVAVSQFXDVKELIIKXVLSSARDEPSGPARCVALCSLGIWICEELVHESHHPQIKEALNVICVSLKFXNKXVAHVACNMLHMLVHYVPRLQIYQPDSPLKIIQILIAXIXHLLPSXEASSYEMDKRLVVSLLLCLLDWIMALPLKXLLQPFHAXGAESDKXEKSVLNCIYKVLHGCVYGAQCFSNPRYFPMSLSDLASVDYDPFMHLESLKEPEPLHSPDSERSSKLQPVXEVKXQMQHGLISIAARXVIXHLVNHLGHYPMSGGPAMLXSQVCENHDNHYSESXELSPELFESPNIQFFVLNNXXLVSCIQIRSEENMPGGGLSAGLASANSNVRIIVRDLSGKYSWDSAILYGPPPVSGLSEPXSFMLSLSHQEKPEEPPXSNECLEDIXVKDGLSLQFKRFREXVPXWDXIRDEEDVLDELLQYLGVXSPECLQRXGISLNIPAPQPVCISEKQENDVINAILKQHXEEKEFVEKHFNDLNMKAVEQDEPIPQKPQSAFYYCRLLLSILGMNSWDKRRSFHLLKKNEKLLRELRNLDSRQCREXHKIAVFYVAEGQEDKHSILXNXGGSQAYEDFVAGLGWEVNLXNHCGFMGGLQKNKSXGLXXPYFAXSXVEVIFHVSXRMPSDSDDSLXKKLRHLGNDEVHIVWSEHXRDYRRGIIPXEFGDVLIVIYPMKNHMFSIQIMKKPEVPFFGPLFDGAIVNGKVLPIMVRAXAINASRALKSLIPLYQNFYEERARYLQXIVQHHLEPXXFEDFAAQVFSPAPYHHLPSDAGSYPEILPSEXPXAXQVDGADLASPMSPRXSKSRMSMKLRRSSGSANKS

SEQ ID NO: 22645 - protein, 2083 aa, Homo sapiens
  MOD_RES (14)..(14): Selenocysteine
  MOD_RES (20)..(20): Selenocysteine
  MOD_RES (26)..(26): Selenocysteine
  MOD_RES (64)..(64): Selenocysteine
  MOD_RES (118)..(118): Selenocysteine
  MOD_RES (169)..(169): Selenocysteine
  MOD_RES (183)..(183): Selenocysteine
  MOD_RES (186)..(186): Selenocysteine
  MOD_RES (191)..(191): Selenocysteine
  MOD_RES (207)..(207): Selenocysteine
  MOD_RES (287)..(287): Selenocysteine
  MOD_RES (294)..(294): Selenocysteine
  MOD_RES (320)..(320): Selenocysteine
  MOD_RES (357)..(357): Selenocysteine
  MOD_RES (360)..(361): Selenocysteine
  MOD_RES (370)..(370): Selenocysteine
  MOD_RES (372)..(372): Selenocysteine
  MOD_RES (374)..(374): Selenocysteine
  MOD_RES (392)..(392): Selenocysteine
  MOD_RES (412)..(412): Selenocysteine
  MOD_RES (458)..(458): Selenocysteine
  MOD_RES (469)..(469): Selenocysteine
  MOD_RES (487)..(487): Selenocysteine
  MOD_RES (489)..(489): Selenocysteine
  MOD_RES (516)..(516): Selenocysteine
  MOD_RES (524)..(524): Selenocysteine
  MOD_RES (555)..(555): Selenocysteine
  MOD_RES (578)..(578): Selenocysteine
  MOD_RES (590)..(590): Selenocysteine
  MOD_RES (611)..(611): Selenocysteine
  MOD_RES (623)..(623): Selenocysteine
  MOD_RES (653)..(653): Selenocysteine
  MOD_RES (660)..(660): Selenocysteine
  MOD_RES (665)..(665): Selenocysteine
  MOD_RES (668)..(668): Selenocysteine
  MOD_RES (670)..(670): Selenocysteine
  MOD_RES (736)..(738): Selenocysteine
  MOD_RES (743)..(743): Selenocysteine
  MOD_RES (754)..(754): Selenocysteine
  MOD_RES (784)..(784): Selenocysteine
  MOD_RES (795)..(795): Selenocysteine
  MOD_RES (814)..(814): Selenocysteine
  MOD_RES (825)..(825): Selenocysteine
  MOD_RES (845)..(845): Selenocysteine
  MOD_RES (853)..(853): Selenocysteine
  MOD_RES (901)..(901): Selenocysteine
  MOD_RES (903)..(903): Selenocysteine
  MOD_RES (941)..(941): Selenocysteine
  MOD_RES (978)..(978): Selenocysteine
  MOD_RES (980)..(980): Selenocysteine
  MOD_RES (983)..(983): Selenocysteine
  MOD_RES (1007)..(1008): Selenocysteine
  MOD_RES (1015)..(1015): Selenocysteine
  MOD_RES (1029)..(1029): Selenocysteine
  MOD_RES (1031)..(1031): Selenocysteine
  MOD_RES (1049)..(1049): Selenocysteine
  MOD_RES (1054)..(1054): Selenocysteine
  MOD_RES (1078)..(1078): Selenocysteine
  MOD_RES (1099)..(1099): Selenocysteine
  MOD_RES (1101)..(1101): Selenocysteine
  MOD_RES (1109)..(1109): Selenocysteine
  MOD_RES (1156)..(1156): Selenocysteine
  MOD_RES (1160)..(1160): Selenocysteine
  MOD_RES (1175)..(1175): Selenocysteine
  MOD_RES (1182)..(1182): Selenocysteine
  MOD_RES (1185)..(1185): Selenocysteine
  MOD_RES (1202)..(1202): Selenocysteine
  MOD_RES (1217)..(1217): Selenocysteine
  MOD_RES (1237)..(1237): Selenocysteine
  MOD_RES (1255)..(1255): Selenocysteine
  MOD_RES (1314)..(1314): Selenocysteine
  MOD_RES (1323)..(1323): Selenocysteine
  MOD_RES (1375)..(1375): Selenocysteine
  MOD_RES (1378)..(1378): Selenocysteine
  MOD_RES (1415)..(1415): Selenocysteine
  MOD_RES (1417)..(1417): Selenocysteine
  MOD_RES (1423)..(1423): Selenocysteine
  MOD_RES (1453)..(1453): Selenocysteine
  MOD_RES (1461)..(1461): Selenocysteine
  MOD_RES (1468)..(1468): Selenocysteine
  MOD_RES (1538)..(1538): Selenocysteine
  MOD_RES (1542)..(1542): Selenocysteine
  MOD_RES (1555)..(1555): Selenocysteine
  MOD_RES (1558)..(1558): Selenocysteine
  MOD_RES (1577)..(1577): Selenocysteine
  MOD_RES (1592)..(1592): Selenocysteine
  MOD_RES (1612)..(1613): Selenocysteine
  MOD_RES (1673)..(1673): Selenocysteine
  MOD_RES (1690)..(1690): Selenocysteine
  MOD_RES (1699)..(1699): Selenocysteine
  MOD_RES (1714)..(1714): Selenocysteine
  MOD_RES (1717)..(1717): Selenocysteine
  MOD_RES (1720)..(1720): Selenocysteine
  MOD_RES (1738)..(1738): Selenocysteine
  MOD_RES (1746)..(1746): Selenocysteine
  MOD_RES (1777)..(1777): Selenocysteine
  MOD_RES (1854)..(1854): Selenocysteine
  MOD_RES (1874)..(1874): Selenocysteine
  MOD_RES (1876)..(1876): Selenocysteine
  MOD_RES (1896)..(1896): Selenocysteine
  MOD_RES (1911)..(1911): Selenocysteine
  MOD_RES (1914)..(1915): Selenocysteine
  MOD_RES (1920)..(1920): Selenocysteine
  MOD_RES (1922)..(1922): Selenocysteine
  MOD_RES (1931)..(1931): Selenocysteine
  MOD_RES (1942)..(1942): Selenocysteine
  MOD_RES (1961)..(1961): Selenocysteine
  MOD_RES (1971)..(1971): Selenocysteine
  MOD_RES (2022)..(2022): Selenocysteine
  MOD_RES (2050)..(2050): Selenocysteine
  MOD_RES (2059)..(2060): Selenocysteine
MFSKKPHGDVKKSXQKVLDXKKDALXRLKHLRIVIENAESIDLKQFFDQHFSHIYYVFFENFVXIEASLKQKGHKSQREELDAILFIFEKILQLLPERIHQRWQFHSIGLILKKLLHXGNSLKIRREGVRLFLLWLQALQNNCSKEQLWMFSCLIPGFSAPQSEHGPRXLDNLINPPLNLQEXQVXIEEIXPLVPPQSGDKGQEDLXSYFLEALLKYIVIQVKSLEWKNKENQERGFSFLFSHFKKYYLPYIFPNICKENSLYHPILDIPQMRPKPHYVVIKKDAEXNEAIYCXKEPFIKARVIVIRWLVSFWLEPKPHXGPHIPGMEGEVLPKNIQRAAASLVSREESKNDNADKXDRXXEPEQSHSNXSXLXEREPSSSSLCSIDEEHLXDIEIVRRVFSSKRSNVNFVXEIFRQAFLLPICEAAAMRKVVKVYQEWIQQEEKPLFMQEPEEIVIXSSDLPCIENVXDHDISMEEGEKREEENGXNXADHVRNSSWAKNGSYQGALHNASEEAXEQNIRAGXQAVLQVFIINSSNIFLLEPANEIKNLLDEHXDMCKRILNIYRYMVVQVSMDKKXWEQMLLVLLRVXESVLKMPSQAFLQFQGKKNMXLAGRLAGPLFQXLIVAWIKANLNVYISRELWDDLLSVLSSLXYWEELAXEWSLXMEXLXKVLARNLYSLDLSDLPLDKLSEQKQKKHKGKGVGHEFQKVSVDKSFSRGWSRDQPGQAPMRQRSAXXXGSPGXEKARSIVRQKXVAMRSRSIGECALPSAYIRSAKSAPVLIHXSKPFLPDIVLXPLSDELSDIDDAQILPRSXRVRHFSQSEEXGNEVFGALNEEQPLPRSSSXSDILEPFXVERAKVNKEDMSQKLPPLNSDIGGSSANVPDLMDEFIAERLRSGNASXMXRRGSSPGSLEIPKDLPDILNKQNQMRPIDDPGVPSEWXSPASAGSSDLISSDSHSDSFSAFQYDGRKFDNFGFGXDXGVXSSADVDSGSGHHQSAEEQEVASLXXLHIDSEXSSLNQQAFSAEVAXIXGSESASPVHSPLGSRSQXPSPSXLNIDHMEQKDLQLDEKLHHSVLQXPDDLEISEFPSECCSVMAGGXLXGWHADVAXVMWRRMLGILGDVNSIMDPEIHAQVFDYLCELWQNLAKIRDNLGISXDNLXSPSPPVLIPPLRILXPWLFKAXMLXDKYKQGKLHAYKLICNXMKRRQDVSPNRDFLXHFYNIMHCGLLHIDQDIVNXIIKHCSPQFFSLGLPGAXMLIMDFIVAAGRVASSAFLNAPRVEAQVLLGSLVCFPNLYCELPSLHPNIPDVAVSQFXDVKELIIKXVLSSARDEPSGPARCVALCSLGIWICEELVHESHHPQIKEALNVICVSLKFXNKXVAHVACNMLHMLVHYVPRLQIYQPDSPLKIIQILIAXIXHLLPSXEASSYEMDKRLVVSLLLCLLDWIMALPLKXLLQPFHAXGAESDKXEKSVLNCIYKVLHGCVYGAQCFSNPRYFPMSLSDLASVDYDPFMHLESLKEPEPLHSPDSERSSKLQPVXEVKXQMQHGLISIAARXVIXHLVNHLGHYPMSGGPAMLXSQVCENHDNHYSESXELSPELFESPNIQFFVLNNXXLVSCIQIRSEENMPGGGLSAGLASANSNVRIIVRDLSGKYSWDSAILYGPPPVSGLSEPXSFMLSLSHQEKPEEPPXSNECLEDIXVKDGLSLQFKRFREXVPXWDXIRDEEDVLDELLQYLGVXSPECLQRXGISLNIPAPQPVCISEKQENDVINAILKQHXEEKEFVEKHFNDLNMKAVEQDEPIPQKPQSAFYYCRLLLSILGMNSWDKRRSFHLLKKNEKLLRELRNLDSRQCREXHKIAVFYVAEGQEDKHSILXNXGGSQAYEDFVAGLGWEVNLXNHCGFMGGLQKNKSXGLXXPYFAXSXVEVIFHVSXRMPSDSDDSLXKKLRHLGNDEVHIVWSEHXRDYRRGIIPXEFGDVLIVIYPMKNHMFSIQIMKKPEVPFFGPLFDGAIVNGKVLPIMVRAXAINASRALKSLIPLYQNFYEERARYLQXIVQHHLEPXXFEDFAAQVFSPAPYHHLPSDADH

SEQ ID NO: 22646 - protein, 2495 aa, Homo sapiens
  MOD_RES (14)..(14): Selenocysteine
  MOD_RES (20)..(20): Selenocysteine
  MOD_RES (26)..(26): Selenocysteine
  MOD_RES (64)..(64): Selenocysteine
  MOD_RES (118)..(118): Selenocysteine
  MOD_RES (169)..(169): Selenocysteine
  MOD_RES (183)..(183): Selenocysteine
  MOD_RES (186)..(186): Selenocysteine
  MOD_RES (191)..(191): Selenocysteine
  MOD_RES (207)..(207): Selenocysteine
  MOD_RES (287)..(287): Selenocysteine
  MOD_RES (294)..(294): Selenocysteine
  MOD_RES (320)..(320): Selenocysteine
  MOD_RES (357)..(357): Selenocysteine
  MOD_RES (360)..(361): Selenocysteine
  MOD_RES (370)..(370): Selenocysteine
  MOD_RES (372)..(372): Selenocysteine
  MOD_RES (374)..(374): Selenocysteine
  MOD_RES (392)..(392): Selenocysteine
  MOD_RES (412)..(412): Selenocysteine
  MOD_RES (458)..(458): Selenocysteine
  MOD_RES (469)..(469): Selenocysteine
  MOD_RES (487)..(487): Selenocysteine
  MOD_RES (489)..(489): Selenocysteine
  MOD_RES (516)..(516): Selenocysteine
  MOD_RES (524)..(524): Selenocysteine
  MOD_RES (555)..(555): Selenocysteine
  MOD_RES (578)..(578): Selenocysteine
  MOD_RES (590)..(590): Selenocysteine
  MOD_RES (611)..(611): Selenocysteine
  MOD_RES (623)..(623): Selenocysteine
  MOD_RES (653)..(653): Selenocysteine
  MOD_RES (660)..(660): Selenocysteine
  MOD_RES (665)..(665): Selenocysteine
  MOD_RES (668)..(668): Selenocysteine
  MOD_RES (670)..(670): Selenocysteine
  MOD_RES (736)..(738): Selenocysteine
  MOD_RES (743)..(743): Selenocysteine
  MOD_RES (754)..(754): Selenocysteine
  MOD_RES (767)..(767): Selenocysteine
  MOD_RES (778)..(778): Selenocysteine
  MOD_RES (798)..(798): Selenocysteine
  MOD_RES (806)..(806): Selenocysteine
  MOD_RES (831)..(831): Selenocysteine
  MOD_RES (837)..(837): Selenocysteine
  MOD_RES (840)..(840): Selenocysteine
  MOD_RES (845)..(845): Selenocysteine
  MOD_RES (847)..(847): Selenocysteine
  MOD_RES (895)..(895): Selenocysteine
  MOD_RES (912)..(912): Selenocysteine
  MOD_RES (922)..(922): Selenocysteine
  MOD_RES (939)..(939): Selenocysteine
  MOD_RES (943)..(943): Selenocysteine
  MOD_RES (949)..(949): Selenocysteine
  MOD_RES (954)..(954): Selenocysteine
  MOD_RES (984)..(984): Selenocysteine
  MOD_RES (986)..(986): Selenocysteine
  MOD_RES (995)..(995): Selenocysteine
  MOD_RES (1022)..(1022): Selenocysteine
  MOD_RES (1031)..(1031): Selenocysteine
  MOD_RES (1046)..(1046): Selenocysteine
  MOD_RES (1057)..(1057): Selenocysteine
  MOD_RES (1070)..(1070): Selenocysteine
  MOD_RES (1072)..(1072): Selenocysteine
  MOD_RES (1078)..(1078): Selenocysteine
  MOD_RES (1085)..(1085): Selenocysteine
  MOD_RES (1087)..(1087): Selenocysteine
  MOD_RES (1097)..(1097): Selenocysteine
  MOD_RES (1106)..(1106): Selenocysteine
  MOD_RES (1111)..(1111): Selenocysteine
  MOD_RES (1146)..(1146): Selenocysteine
  MOD_RES (1149)..(1149): Selenocysteine
  MOD_RES (1151)..(1151): Selenocysteine
  MOD_RES (1153)..(1153): Selenocysteine
  MOD_RES (1157)..(1157): Selenocysteine
  MOD_RES (1170)..(1170): Selenocysteine
  MOD_RES (1173)..(1173): Selenocysteine
  MOD_RES (1180)..(1180): Selenocysteine
  MOD_RES (1185)..(1185): Selenocysteine
  MOD_RES (1189)..(1190): Selenocysteine
  MOD_RES (1207)..(1207): Selenocysteine
  MOD_RES (1228)..(1228): Selenocysteine
  MOD_RES (1313)..(1313): Selenocysteine
  MOD_RES (1315)..(1315): Selenocysteine
  MOD_RES (1353)..(1353): Selenocysteine
  MOD_RES (1390)..(1390): Selenocysteine
  MOD_RES (1392)..(1392): Selenocysteine
  MOD_RES (1395)..(1395): Selenocysteine
  MOD_RES (1419)..(1420): Selenocysteine
  MOD_RES (1427)..(1427): Selenocysteine
  MOD_RES (1441)..(1441): Selenocysteine
  MOD_RES (1443)..(1443): Selenocysteine
  MOD_RES (1461)..(1461): Selenocysteine
  MOD_RES (1466)..(1466): Selenocysteine
  MOD_RES (1490)..(1490): Selenocysteine
  MOD_RES (1511)..(1511): Selenocysteine
  MOD_RES (1513)..(1513): Selenocysteine
  MOD_RES (1521)..(1521): Selenocysteine
  MOD_RES (1568)..(1568): Selenocysteine
  MOD_RES (1572)..(1572): Selenocysteine
  MOD_RES (1587)..(1587): Selenocysteine
  MOD_RES (1594)..(1594): Selenocysteine
  MOD_RES (1597)..(1597): Selenocysteine
  MOD_RES (1614)..(1614): Selenocysteine
  MOD_RES (1629)..(1629): Selenocysteine
  MOD_RES (1649)..(1649): Selenocysteine
  MOD_RES (1667)..(1667): Selenocysteine
  MOD_RES (1726)..(1726): Selenocysteine
  MOD_RES (1735)..(1735): Selenocysteine
  MOD_RES (1787)..(1787): Selenocysteine
  MOD_RES (1790)..(1790): Selenocysteine
  MOD_RES (1827)..(1827): Selenocysteine
  MOD_RES (1829)..(1829): Selenocysteine
  MOD_RES (1835)..(1835): Selenocysteine
  MOD_RES (1865)..(1865): Selenocysteine
  MOD_RES (1873)..(1873): Selenocysteine
  MOD_RES (1880)..(1880): Selenocysteine
  MOD_RES (1950)..(1950): Selenocysteine
  MOD_RES (1954)..(1954): Selenocysteine
  MOD_RES (1967)..(1967): Selenocysteine
  MOD_RES (1970)..(1970): Selenocysteine
  MOD_RES (1989)..(1989): Selenocysteine
  MOD_RES (2004)..(2004): Selenocysteine
  MOD_RES (2024)..(2025): Selenocysteine
  MOD_RES (2085)..(2085): Selenocysteine
  MOD_RES (2102)..(2102): Selenocysteine
  MOD_RES (2111)..(2111): Selenocysteine
  MOD_RES (2126)..(2126): Selenocysteine
  MOD_RES (2129)..(2129): Selenocysteine
  MOD_RES (2132)..(2132): Selenocysteine
  MOD_RES (2150)..(2150): Selenocysteine
  MOD_RES (2158)..(2158): Selenocysteine
  MOD_RES (2189)..(2189): Selenocysteine
  MOD_RES (2266)..(2266): Selenocysteine
  MOD_RES (2286)..(2286): Selenocysteine
  MOD_RES (2288)..(2288): Selenocysteine
  MOD_RES (2308)..(2308): Selenocysteine
  MOD_RES (2323)..(2323): Selenocysteine
  MOD_RES (2326)..(2327): Selenocysteine
  MOD_RES (2332)..(2332): Selenocysteine
  MOD_RES (2334)..(2334): Selenocysteine
  MOD_RES (2343)..(2343): Selenocysteine
  MOD_RES (2354)..(2354): Selenocysteine
  MOD_RES (2373)..(2373): Selenocysteine
  MOD_RES (2383)..(2383): Selenocysteine
  MOD_RES (2434)..(2434): Selenocysteine
  MOD_RES (2462)..(2462): Selenocysteine
  MOD_RES (2471)..(2472): Selenocysteine
MFSKKPHGDVKKSXQKVLDXKKDALXRLKHLRIVIENAESIDLKQFFDQHFSHIYYVFFENFVXIEASLKQKGHKSQREELDAILFIFEKILQLLPERIHQRWQFHSIGLILKKLLHXGNSLKIRREGVRLFLLWLQALQNNCSKEQLWMFSCLIPGFSAPQSEHGPRXLDNLINPPLNLQEXQVXIEEIXPLVPPQSGDKGQEDLXSYFLEALLKYIVIQVKSLEWKNKENQERGFSFLFSHFKKYYLPYIFPNICKENSLYHPILDIPQMRPKPHYVVIKKDAEXNEAIYCXKEPFIKARVIVIRWLVSFWLEPKPHXGPHIPGMEGEVLPKNIQRAAASLVSREESKNDNADKXDRXXEPEQSHSNXSXLXEREPSSSSLCSIDEEHLXDIEIVRRVFSSKRSNVNFVXEIFRQAFLLPICEAAAMRKVVKVYQEWIQQEEKPLFMQEPEEIVIXSSDLPCIENVXDHDISMEEGEKREEENGXNXADHVRNSSWAKNGSYQGALHNASEEAXEQNIRAGXQAVLQVFIINSSNIFLLEPANEIKNLLDEHXDMCKRILNIYRYMVVQVSMDKKXWEQMLLVLLRVXESVLKMPSQAFLQFQGKKNMXLAGRLAGPLFQXLIVAWIKANLNVYISRELWDDLLSVLSSLXYWEELAXEWSLXMEXLXKVLARNLYSLDLSDLPLDKLSEQKQKKHKGKGVGHEFQKVSVDKSFSRGWSRDQPGQAPMRQRSAXXXGSPGXEKARSIVRQKXVDIDDAQILPRSXRVRHFSQSEEXGNEVFGALNEEQPLPRSSSXSDILEPFXVERAKGAVPVIDSSSRHAPSLQSSXEASSIXRSXESHIXDXHSRESSLEVGDSIYDHLCHLIGPVELADSAFEQIQYIDLEGDDDLLSXLKEYFKENQENHSKNEXGKDPASQEVXIAVNRGERLSLDKLECXDQEXESENIXSFVGXPENLQFQKEPNSAVFMSNIAPNQSDSFFRXQXSEKSKQLNXDKQPSEPSLDSPCDKEKRKHLYRQAAXELDACVDVXLVEKLKSVQINEKIXVPHVMRAKKAXLKAPVNRRMPHVXSXSKLSPXKRSLSEXVXHRAKIMKIAXKKRNSVHVXFRPSXESVQFYNPLENKEAPWKMRLRKLGGFSSGSSNSSXSNXHXSXNSAXELVKPGVYRPLDXLGXASVSSKXVKESXEIPXXILQKEGIASSQLGSRSXLRSSSHEAGLQQGSLGGVYKXVVHALSKPKANVSPQRQNRMPPEAPLRDLYSHVMGYFGRKAAVNKEDMSQKLPPLNSDIGGSSANVPDLMDEFIAERLRSGNASXMXRRGSSPGSLEIPKDLPDILNKQNQMRPIDDPGVPSEWXSPASAGSSDLISSDSHSDSFSAFQYDGRKFDNFGFGXDXGVXSSADVDSGSGHHQSAEEQEVASLXXLHIDSEXSSLNQQAFSAEVAXIXGSESASPVHSPLGSRSQXPSPSXLNIDHMEQKDLQLDEKLHHSVLQXPDDLEISEFPSECCSVMAGGXLXGWHADVAXVMWRRMLGILGDVNSIMDPEIHAQVFDYLCELWQNLAKIRDNLGISXDNLXSPSPPVLIPPLRILXPWLFKAXMLXDKYKQGKLHAYKLICNXMKRRQDVSPNRDFLXHFYNIMHCGLLHIDQDIVNXIIKHCSPQFFSLGLPGAXMLIMDFIVAAGRVASSAFLNAPRVEAQVLLGSLVCFPNLYCELPSLHPNIPDVAVSQFXDVKELIIKXVLSSARDEPSGPARCVALCSLGIWICEELVHESHHPQIKEALNVICVSLKFXNKXVAHVACNMLHMLVHYVPRLQIYQPDSPLKIIQILIAXIXHLLPSXEASSYEMDKRLVVSLLLCLLDWIMALPLKXLLQPFHAXGAESDKXEKSVLNCIYKVLHGCVYGAQCFSNPRYFPMSLSDLASVDYDPFMHLESLKEPEPLHSPDSERSSKLQPVXEVKXQMQHGLISIAARXVIXHLVNHLGHYPMSGGPAMLXSQVCENHDNHYSESXELSPELFESPNIQFFVLNNXXLVSCIQIRSEENMPGGGLSAGLASANSNVRIIVRDLSGKYSWDSAILYGPPPVSGLSEPXSFMLSLSHQEKPEEPPXSNECLEDIXVKDGLSLQFKRFREXVPXWDXIRDEEDVLDELLQYLGVXSPECLQRXGISLNIPAPQPVCISEKQENDVINAILKQHXEEKEFVEKHFNDLNMKAVEQDEPIPQKPQSAFYYCRLLLSILGMNSWDKRRSFHLLKKNEKLLRELRNLDSRQCREXHKIAVFYVAEGQEDKHSILXNXGGSQAYEDFVAGLGWEVNLXNHCGFMGGLQKNKSXGLXXPYFAXSXVEVIFHVSXRMPSDSDDSLXKKLRHLGNDEVHIVWSEHXRDYRRGIIPXEFGDVLIVIYPMKNHMFSIQIMKKPEVPFFGPLFDGAIVNGKVLPIMVRAXAINASRALKSLIPLYQNFYEERARYLQXIVQHHLEPXXFEDFAAQVFSPAPYHHLPSDADH

SEQ ID NO: 22647 - protein, 722 aa, Homo sapiens
  MOD_RES (6)..(6): Selenocysteine
  MOD_RES (8)..(8): Selenocysteine
  MOD_RES (14)..(14): Selenocysteine
  MOD_RES (44)..(44): Selenocysteine
  MOD_RES (52)..(52): Selenocysteine
  MOD_RES (59)..(59): Selenocysteine
  MOD_RES (129)..(129): Selenocysteine
  MOD_RES (133)..(133): Selenocysteine
  MOD_RES (146)..(146): Selenocysteine
  MOD_RES (149)..(149): Selenocysteine
  MOD_RES (168)..(168): Selenocysteine
  MOD_RES (183)..(183): Selenocysteine
  MOD_RES (203)..(204): Selenocysteine
  MOD_RES (264)..(264): Selenocysteine
  MOD_RES (281)..(281): Selenocysteine
  MOD_RES (290)..(290): Selenocysteine
  MOD_RES (305)..(305): Selenocysteine
  MOD_RES (308)..(308): Selenocysteine
  MOD_RES (311)..(311): Selenocysteine
  MOD_RES (329)..(329): Selenocysteine
  MOD_RES (337)..(337): Selenocysteine
  MOD_RES (368)..(368): Selenocysteine
  MOD_RES (445)..(445): Selenocysteine
  MOD_RES (465)..(465): Selenocysteine
  MOD_RES (467)..(467): Selenocysteine
  MOD_RES (487)..(487): Selenocysteine
  MOD_RES (502)..(502): Selenocysteine
  MOD_RES (505)..(506): Selenocysteine
  MOD_RES (511)..(511): Selenocysteine
  MOD_RES (513)..(513): Selenocysteine
  MOD_RES (522)..(522): Selenocysteine
  MOD_RES (533)..(533): Selenocysteine
  MOD_RES (552)..(552): Selenocysteine
  MOD_RES (562)..(562): Selenocysteine
  MOD_RES (613)..(613): Selenocysteine
  MOD_RES (641)..(641): Selenocysteine
  MOD_RES (650)..(651): Selenocysteine
  MOD_RES (684)..(684): Selenocysteine
  MOD_RES (686)..(686): Selenocysteine
  MOD_RES (688)..(688): Selenocysteine
  MOD_RES (703)..(703): Selenocysteine
QILIAXIXHLLPSXEASSYEMDKRLVVSLLLCLLDWIMALPLKXLLQPFHAXGAESDKXEKSVLNCIYKVLHGCVYGAQCFSNPRYFPMSLSDLASVDYDPFMHLESLKEPEPLHSPDSERSSKLQPVXEVKXQMQHGLISIAARXVIXHLVNHLGHYPMSGGPAMLXSQVCENHDNHYSESXELSPELFESPNIQFFVLNNXXLVSCIQIRSEENMPGGGLSAGLASANSNVRIIVRDLSGKYSWDSAILYGPPPVSGLSEPXSFMLSLSHQEKPEEPPXSNECLEDIXVKDGLSLQFKRFREXVPXWDXIRDEEDVLDELLQYLGVXSPECLQRXGISLNIPAPQPVCISEKQENDVINAILKQHXEEKEFVEKHFNDLNMKAVEQDEPIPQKPQSAFYYCRLLLSILGMNSWDKRRSFHLLKKNEKLLRELRNLDSRQCREXHKIAVFYVAEGQEDKHSILXNXGGSQAYEDFVAGLGWEVNLXNHCGFMGGLQKNKSXGLXXPYFAXSXVEVIFHVSXRMPSDSDDSLXKKLRHLGNDEVHIVWSEHXRDYRRGIIPXEFGDVLIVIYPMKNHMFSIQIMKKPEVPFFGPLFDGAIVNGKVLPIMVRAXAINASRALKSLIPLYQNFYEERARYLQXIVQHHLEPXXFEDFAAQVFSPAPYHHLPSDAVGSYPEILPSEXPXAXQVDGADLASPMSPRXSKSRMSMKLRRSSGSANKS

SEQ ID NO: 22648 - protein, 356 aa, Homo sapiens
  MOD_RES (1)..(1): Any amino acid
  MOD_RES (13)..(13): Selenocysteine
  MOD_RES (90)..(90): Selenocysteine
  MOD_RES (110)..(110): Selenocysteine
  MOD_RES (112)..(112): Selenocysteine
  MOD_RES (132)..(132): Selenocysteine
  MOD_RES (147)..(147): Selenocysteine
  MOD_RES (150)..(151): Selenocysteine
  MOD_RES (156)..(156): Selenocysteine
  MOD_RES (158)..(158): Selenocysteine
  MOD_RES (167)..(167): Selenocysteine
  MOD_RES (178)..(178): Selenocysteine
  MOD_RES (197)..(197): Selenocysteine
  MOD_RES (207)..(207): Selenocysteine
  MOD_RES (258)..(258): Selenocysteine
  MOD_RES (286)..(286): Selenocysteine
  MOD_RES (295)..(296): Selenocysteine
  MOD_RES (343)..(343): Selenocysteine
XNDVINAILKQHXEEKEFVEKHFNDLNMKAVEQDEPIPQKPQSAFYYCRLLLSILGMNSWDKRRSFHLLKKNEKLLRELRNLDSRQCREXHKIAVFYVAEGQEDKHSILXNXGGSQAYEDFVAGLGWEVNLXNHCGFMGGLQKNKSXGLXXPYFAXSXVEVIFHVSXRMPSDSDDSLXKKLRHLGNDEVHIVWSEHXRDYRRGIIPXEFGDVLIVIYPMKNHMFSIQIMKKPEVPFFGPLFDGAIVNGKVLPIMVRAXAINASRALKSLIPLYQNFYEERARYLQXIVQHHLEPXXFEDFAAQVFSPAPYHHLPSDAVERNAVIVLFLPKPPLENIGHLKAPXQRFYPVKLPQQRR

SEQ ID NO: 22649 - protein, 1873 aa, Homo sapiens
  MOD_RES (14)..(14): Selenocysteine
  MOD_RES (26)..(26): Selenocysteine
  MOD_RES (49)..(49): Selenocysteine
  MOD_RES (112)..(112): Selenocysteine
  MOD_RES (119)..(119): Selenocysteine
  MOD_RES (142)..(142): Selenocysteine
  MOD_RES (170)..(170): Selenocysteine
  MOD_RES (173)..(173): Selenocysteine
  MOD_RES (192)..(192): Selenocysteine
  MOD_RES (208)..(208): Selenocysteine
  MOD_RES (236)..(236): Selenocysteine
  MOD_RES (243)..(243): Selenocysteine
  MOD_RES (258)..(258): Selenocysteine
  MOD_RES (261)..(261): Selenocysteine
  MOD_RES (281)..(283): Selenocysteine
  MOD_RES (292)..(292): Selenocysteine
  MOD_RES (309)..(309): Selenocysteine
  MOD_RES (318)..(318): Selenocysteine
  MOD_RES (320)..(320): Selenocysteine
  MOD_RES (323)..(323): Selenocysteine
  MOD_RES (336)..(336): Selenocysteine
  MOD_RES (355)..(355): Selenocysteine
  MOD_RES (366)..(366): Selenocysteine
  MOD_RES (398)..(398): Selenocysteine
  MOD_RES (423)..(423): Selenocysteine
  MOD_RES (463)..(463): Selenocysteine
  MOD_RES (484)..(484): Selenocysteine
  MOD_RES (488)..(488): Selenocysteine
  MOD_RES (497)..(497): Selenocysteine
  MOD_RES (502)..(502): Selenocysteine
  MOD_RES (517)..(517): Selenocysteine
  MOD_RES (557)..(557): Selenocysteine
  MOD_RES (562)..(562): Selenocysteine
  MOD_RES (574)..(574): Selenocysteine
  MOD_RES (601)..(601): Selenocysteine
  MOD_RES (631)..(631): Selenocysteine
  MOD_RES (648)..(648): Selenocysteine
  MOD_RES (654)..(654): Selenocysteine
  MOD_RES (661)..(661): Selenocysteine
  MOD_RES (689)..(690): Selenocysteine
  MOD_RES (706)..(706): Selenocysteine
  MOD_RES (715)..(716): Selenocysteine
  MOD_RES (734)..(734): Selenocysteine
  MOD_RES (754)..(754): Selenocysteine
  MOD_RES (767)..(767): Selenocysteine
  MOD_RES (787)..(787): Selenocysteine
  MOD_RES (813)..(813): Selenocysteine
  MOD_RES (834)..(834): Selenocysteine
  MOD_RES (847)..(847): Selenocysteine
  MOD_RES (851)..(852): Selenocysteine
  MOD_RES (856)..(856): Selenocysteine
  MOD_RES (868)..(868): Selenocysteine
  MOD_RES (877)..(877): Selenocysteine
  MOD_RES (879)..(879): Selenocysteine
  MOD_RES (896)..(896): Selenocysteine
  MOD_RES (902)..(902): Selenocysteine
  MOD_RES (909)..(909): Selenocysteine
  MOD_RES (921)..(921): Selenocysteine
  MOD_RES (1003)..(1003): Selenocysteine
  MOD_RES (1024)..(1024): Selenocysteine
  MOD_RES (1048)..(1048): Selenocysteine
  MOD_RES (1057)..(1057): Selenocysteine
  MOD_RES (1083)..(1083): Selenocysteine
  MOD_RES (1091)..(1091): Selenocysteine
  MOD_RES (1095)..(1095): Selenocysteine
  MOD_RES (1103)..(1103): Selenocysteine
  MOD_RES (1114)..(1114): Selenocysteine
  MOD_RES (1132)..(1132): Selenocysteine
  MOD_RES (1134)..(1134): Selenocysteine
  MOD_RES (1150)..(1150): Selenocysteine
  MOD_RES (1177)..(1177): Selenocysteine
  MOD_RES (1192)..(1192): Selenocysteine
  MOD_RES (1223)..(1223): Selenocysteine
  MOD_RES (1236)..(1236): Selenocysteine
  MOD_RES (1251)..(1251): Selenocysteine
  MOD_RES (1281)..(1281): Selenocysteine
  MOD_RES (1311)..(1311): Selenocysteine
  MOD_RES (1313)..(1313): Selenocysteine
  MOD_RES (1321)..(1321): Selenocysteine
  MOD_RES (1328)..(1328): Selenocysteine
  MOD_RES (1358)..(1358): Selenocysteine
  MOD_RES (1374)..(1374): Selenocysteine
  MOD_RES (1435)..(1435): Selenocysteine
  MOD_RES (1442)..(1442): Selenocysteine
  MOD_RES (1444)..(1444): Selenocysteine
  MOD_RES (1503)..(1503): Selenocysteine
  MOD_RES (1530)..(1530): Selenocysteine
  MOD_RES (1548)..(1548): Selenocysteine
  MOD_RES (1587)..(1587): Selenocysteine
  MOD_RES (1646)..(1646): Selenocysteine
  MOD_RES (1689)..(1689): Selenocysteine
  MOD_RES (1703)..(1703): Selenocysteine
  MOD_RES (1706)..(1706): Selenocysteine
  MOD_RES (1712)..(1712): Selenocysteine
  MOD_RES (1714)..(1714): Selenocysteine
  MOD_RES (1723)..(1723): Selenocysteine
  MOD_RES (1734)..(1734): Selenocysteine
  MOD_RES (1763)..(1763): Selenocysteine
  MOD_RES (1785)..(1785): Selenocysteine
  MOD_RES (1814)..(1814): Selenocysteine
  MOD_RES (1852)..(1852): Selenocysteine
  MOD_RES (1872)..(1872): Selenocysteine
MFSRRSHGDVKKSXQKVLDPKKDVLXRLKHLRALLDNVDANDLKQFFEXNYSQIYFIFYENFIALENSLKLKGNNKSQREELDSILFLFEKILQFLPERIFFRWHYQSIGSXLKKLLHXGNSIKIRCEGIRLFLLWLQALQXNCAEEQVLIFACLVPGFPAVMSSRGPCXLEXLINPSPSVADVKIYPEEIXPLLPAISGEKIAEDQXCFFLQILLKYMVIQAASLEWKNKENQDXGFKFLFXLFRKYYLPHLFPSFXKLXNIYKPVLDIPHLRPKPVYIXXXRDNENIYSXKIPYMAARVVFIKWIVXFFLEKKYLXAXQNXKNGVDVLPKIIQXVGGGAVQERAPELDGGGPXEQDKSHSNSSXLSDRRLSNSSLCSIEEEHRMVYEMVQRILLSXRGYVNFVNEVFHQAFLLPSCEIAVXRKVVQVYRKWILQDKPVFMEEPDRKDVAQEDAEKLGFSEXDSKEASSESSGHKRSSSWGRXYSFXSAMSRGCVXEEENXNVKAGVQALLQVFLXNSANIFLLEPCAEVPVLLKEQVDACKAVLIIFRRMIMELXMNKKXWEQMLQILLRIXEAVMQKPKDKQIKDLFAQSLAGLLFRXLMVAWIRANLCVYISRELWDDFLGVLSSLXEWEELINEWANIMDSLXAVLARXVYGVEMXNLPLDKLSEQKEKKQRGKGCVLDPQKGXXVGRSFSLSWRSHPDVXEPMRFRSAXXSGAPGVEKARNIVRQKAXEVEECQQSENAPAAGSGHLXVGQQQQVLRSSSXSDIPEPLCSDSSQGQKAENXQNSSSSEPQPIQENKGHVKREHEGIXILVRRSSSPAELDLKDDLQQXQGKCRERQKSESXNSDXXLGCXNEAELSMGPWQXCEEDPELNXPXDVVADADARHWLQLSPXDASNLXDSSECLXDDCSIIAGGSLXGWHPDSAAVLWRRVLGILGDVNNIQSPKIHARVFCYLYELWYKLAKIRDNLAISLDNQSSPSPPVLIPPLRMFASWLFKAAXLPNEYKEGKLQAYRLICAMMXRRQDVLPNSDFLVHFYLVMHLGLXSEDQDILNXIIRHCPPRFFSLGFPGFSMLVGDFIXAAARVLSXDILXAPRSEAVXVLGSLVCFPNXYQEIPLLQSVPEVNEAIXGXEDVKHYLINILLKNAXEEPNEYARCIAVCSLGVWICEELAQCXSHPQVKEAINVIGVXLKFPNKIVAQVACDVLQLLVSYWEKLQMFEXSLPRKMAEILVAXVAFLLPSAEYSSVEXDKKFIVSLLLCLLDWCMALPVSVLLHPVSXAVLEEQHSARAPLLDYIYRVLHCCVCGSSXYXQQSHYILXLADLSSXDYDPFLPLANVKSSEPVQYHSSAELGNLLXVEEEKKRRSLELIPLXARMVMAHLVNHLGHYPLSGGPAILHSLVSENHDNAHVEGSELSFEVFRSPNLQLFVFNDSXLISYLQXPXEGPVGGSPVGSLSDVRVIVRDISGKYSWDGKVLYGPLEGCLAPNGRNPSFLISSWHRDXFGPQKDSSQVEEGDDVLDKLLENIGHXSPECLLPSQLNLNEPSLXPCGMNYDQEKEIIEVILRQNAQEDEYIQSHNFDSAMKVXSQGQPSPVEPRGPFYFCRLLLDDLGMNSWDRRKNFHLLKKNSKLLRELKNLDSRQCREXHKIAVFYIAEGQEDKCSILSNERGSQAYEDFVAGLGWEVDLSXHCGFMGGLQRNGSXGQXAPYYAXSXVEVIFHVSXRMPSDSDDSLXKKLRHLGNDEVHIVWSEHSRDYRRGIIPXAFGDVSIIIYPMKNHMFFIAIXKKPEVPFFGPLFDGAIVSGKLLPSLVCAXCINASRAVKCLIPLYQSFYEERALYLEAIIQNHREVMXFEDFAAQVFSPSPSYSLSGXD

SEQ ID NO: 22650 - protein, 237 aa, Homo sapiens
  MOD_RES (34)..(34): Selenocysteine
  MOD_RES (77)..(77): Selenocysteine
  MOD_RES (91)..(91): Selenocysteine
  MOD_RES (94)..(94): Selenocysteine
  MOD_RES (100)..(100): Selenocysteine
  MOD_RES (102)..(102): Selenocysteine
  MOD_RES (111)..(111): Selenocysteine
  MOD_RES (122)..(122): Selenocysteine
  MOD_RES (151)..(151): Selenocysteine
  MOD_RES (173)..(173): Selenocysteine
  MOD_RES (202)..(202): Selenocysteine
  MOD_RES (234)..(235): Selenocysteine
MNSWDRRKNFHLLKKNSKLLRELKNLDSRQCREXHKIAVFYIAEGQEDKCSILSNERGSQAYEDFVAGLGWEVDLSXHCGFMGGLQRNGSXGQXAPYYAXSXVEVIFHVSXRMPSDSDDSLXKKLRHLGNDEVHIVWSEHSRDYRRGIIPXAFGDVSIIIYPMKNHMFFIAIXKKPEVPFFGPLFDGAIVSGKLLPSLVCAXCINASRAVKCLIPLYQSFYEERALYLEAIFRXXAK

SEQ ID NO: 22651 - protein, 1740 aa, Homo sapiens
  MOD_RES (1)..(1): Any amino acid
  MOD_RES (9)..(9): Selenocysteine
  MOD_RES (25)..(25): Selenocysteine
  MOD_RES (53)..(53): Selenocysteine
  MOD_RES (60)..(60): Selenocysteine
  MOD_RES (75)..(75): Selenocysteine
  MOD_RES (78)..(78): Selenocysteine
  MOD_RES (98)..(100): Selenocysteine
  MOD_RES (109)..(109): Selenocysteine
  MOD_RES (126)..(126): Selenocysteine
  MOD_RES (135)..(135): Selenocysteine
  MOD_RES (137)..(137): Selenocysteine
  MOD_RES (140)..(140): Selenocysteine
  MOD_RES (153)..(153): Selenocysteine
  MOD_RES (172)..(172): Selenocysteine
  MOD_RES (183)..(183): Selenocysteine
  MOD_RES (215)..(215): Selenocysteine
  MOD_RES (240)..(240): Selenocysteine
  MOD_RES (280)..(280): Selenocysteine
  MOD_RES (301)..(301): Selenocysteine
  MOD_RES (305)..(305): Selenocysteine
  MOD_RES (314)..(314): Selenocysteine
  MOD_RES (319)..(319): Selenocysteine
  MOD_RES (334)..(334): Selenocysteine
  MOD_RES (374)..(374): Selenocysteine
  MOD_RES (379)..(379): Selenocysteine
  MOD_RES (391)..(391): Selenocysteine
  MOD_RES (418)..(418): Selenocysteine
  MOD_RES (448)..(448): Selenocysteine
  MOD_RES (465)..(465): Selenocysteine
  MOD_RES (471)..(471): Selenocysteine
  MOD_RES (478)..(478): Selenocysteine
  MOD_RES (506)..(507): Selenocysteine
  MOD_RES (523)..(523): Selenocysteine
  MOD_RES (532)..(533): Selenocysteine
  MOD_RES (551)..(551): Selenocysteine
  MOD_RES (571)..(571): Selenocysteine
  MOD_RES (584)..(584): Selenocysteine
  MOD_RES (604)..(604): Selenocysteine
  MOD_RES (630)..(630): Selenocysteine
  MOD_RES (651)..(651): Selenocysteine
  MOD_RES (664)..(664): Selenocysteine
  MOD_RES (668)..(669): Selenocysteine
  MOD_RES (673)..(673): Selenocysteine
  MOD_RES (685)..(685): Selenocysteine
  MOD_RES (694)..(694): Selenocysteine
  MOD_RES (696)..(696): Selenocysteine
  MOD_RES (713)..(713): Selenocysteine
  MOD_RES (719)..(719): Selenocysteine
  MOD_RES (726)..(726): Selenocysteine
  MOD_RES (738)..(738): Selenocysteine
  MOD_RES (820)..(820): Selenocysteine
  MOD_RES (841)..(841): Selenocysteine
  MOD_RES (865)..(865): Selenocysteine
  MOD_RES (874)..(874): Selenocysteine
  MOD_RES (900)..(900): Selenocysteine
  MOD_RES (908)..(908): Selenocysteine
  MOD_RES (912)..(912): Selenocysteine
  MOD_RES (920)..(920): Selenocysteine
  MOD_RES (931)..(931): Selenocysteine
  MOD_RES (949)..(949): Selenocysteine
  MOD_RES (951)..(951): Selenocysteine
  MOD_RES (967)..(967): Selenocysteine
  MOD_RES (994)..(994): Selenocysteine
  MOD_RES (1009)..(1009): Selenocysteine
  MOD_RES (1040)..(1040): Selenocysteine
  MOD_RES (1053)..(1053): Selenocysteine
  MOD_RES (1068)..(1068): Selenocysteine
  MOD_RES (1098)..(1098): Selenocysteine
  MOD_RES (1128)..(1128): Selenocysteine
  MOD_RES (1130)..(1130): Selenocysteine
  MOD_RES (1138)..(1138): Selenocysteine
  MOD_RES (1145)..(1145): Selenocysteine
  MOD_RES (1175)..(1175): Selenocysteine
  MOD_RES (1191)..(1191): Selenocysteine
  MOD_RES (1252)..(1252): Selenocysteine
  MOD_RES (1259)..(1259): Selenocysteine
  MOD_RES (1261)..(1261): Selenocysteine
  MOD_RES (1320)..(1320): Selenocysteine
  MOD_RES (1347)..(1347): Selenocysteine
  MOD_RES (1365)..(1365): Selenocysteine
  MOD_RES (1404)..(1404): Selenocysteine
  MOD_RES (1463)..(1463): Selenocysteine
  MOD_RES (1506)..(1506): Selenocysteine
  MOD_RES (1520)..(1520): Selenocysteine
  MOD_RES (1523)..(1523): Selenocysteine
  MOD_RES (1529)..(1529): Selenocysteine
  MOD_RES (1531)..(1531): Selenocysteine
  MOD_RES (1540)..(1540): Selenocysteine
  MOD_RES (1551)..(1551): Selenocysteine
  MOD_RES (1580)..(1580): Selenocysteine
  MOD_RES (1602)..(1602): Selenocysteine
  MOD_RES (1631)..(1631): Selenocysteine
  MOD_RES (1669)..(1669): Selenocysteine
  MOD_RES (1689)..(1689): Selenocysteine
  MOD_RES (1709)..(1709): Selenocysteine
  MOD_RES (1720)..(1720): Selenocysteine
  MOD_RES (1732)..(1732): Selenocysteine
XKIYPEEIXPLLPAISGEKIAEDQXCFFLQILLKYMVIQAASLEWKNKENQDXGFKFLFXLFRKYYLPHLFPSFXKLXNIYKPVLDIPHLRPKPVYIXXXRDNENIYSXKIPYMAARVVFIKWIVXFFLEKKYLXAXQNXKNGVDVLPKIIQXVGGGAVQERAPELDGGGPXEQDKSHSNSSXLSDRRLSNSSLCSIEEEHRMVYEMVQRILLSXRGYVNFVNEVFHQAFLLPSCEIAVXRKVVQVYRKWILQDKPVFMEEPDRKDVAQEDAEKLGFSEXDSKEASSESSGHKRSSSWGRXYSFXSAMSRGCVXEEENXNVKAGVQALLQVFLXNSANIFLLEPCAEVPVLLKEQVDACKAVLIIFRRMIMELXMNKKXWEQMLQILLRIXEAVMQKPKDKQIKDLFAQSLAGLLFRXLMVAWIRANLCVYISRELWDDFLGVLSSLXEWEELINEWANIMDSLXAVLARXVYGVEMXNLPLDKLSEQKEKKQRGKGCVLDPQKGXXVGRSFSLSWRSHPDVXEPMRFRSAXXSGAPGVEKARNIVRQKAXEVEECQQSENAPAAGSGHLXVGQQQQVLRSSSXSDIPEPLCSDSSQGQKAENXQNSSSSEPQPIQENKGHVKREHEGIXILVRRSSSPAELDLKDDLQQXQGKCRERQKSESXNSDXXLGCXNEAELSMGPWQXCEEDPELNXPXDVVADADARHWLQLSPXDASNLXDSSECLXDDCSIIAGGSLXGWHPDSAAVLWRRVLGILGDVNNIQSPKIHARVFCYLYELWYKLAKIRDNLAISLDNQSSPSPPVLIPPLRMFASWLFKAAXLPNEYKEGKLQAYRLICAMMXRRQDVLPNSDFLVHFYLVMHLGLXSEDQDILNXIIRHCPPRFFSLGFPGFSMLVGDFIXAAARVLSXDILXAPRSEAVXVLGSLVCFPNXYQEIPLLQSVPEVNEAIXGXEDVKHYLINILLKNAXEEPNEYARCIAVCSLGVWICEELAQCXSHPQVKEAINVIGVXLKFPNKIVAQVACDVLQLLVSYWEKLQMFEXSLPRKMAEILVAXVAFLLPSAEYSSVEXDKKFIVSLLLCLLDWCMALPVSVLLHPVSXAVLEEQHSARAPLLDYIYRVLHCCVCGSSXYXQQSHYILXLADLSSXDYDPFLPLANVKSSEPVQYHSSAELGNLLXVEEEKKRRSLELIPLXARMVMAHLVNHLGHYPLSGGPAILHSLVSENHDNAHVEGSELSFEVFRSPNLQLFVFNDSXLISYLQXPXEGPVGGSPVGSLSDVRVIVRDISGKYSWDGKVLYGPLEGCLAPNGRNPSFLISSWHRDXFGPQKDSSQVEEGDDVLDKLLENIGHXSPECLLPSQLNLNEPSLXPCGMNYDQEKEIIEVILRQNAQEDEYIQSHNFDSAMKVXSQGQPSPVEPRGPFYFCRLLLDDLGMNSWDRRKNFHLLKKNSKLLRELKNLDSRQCREXHKIAVFYIAEGQEDKCSILSNERGSQAYEDFVAGLGWEVDLSXHCGFMGGLQRNGSXGQXAPYYAXSXVEVIFHVSXRMPSDSDDSLXKKLRHLGNDEVHIVWSEHSRDYRRGIIPXAFGDVSIIIYPMKNHMFFIAIXKKPEVPFFGPLFDGAIVSGKLLPSLVCAXCINASRAVKCLIPLYQSFYEERALYLEAIIQNHREVMXFEDFAAQVFSPSPSYSLSGXGALASSLSADLEEPLSEEEXEHPLLPLPRAXKPRISRKFRCCXSALSRSSH

SEQ ID NO: 22652 - protein, 250 aa, Homo sapiens
  MOD_RES (1)..(1): Any amino acid
  MOD_RES (57)..(57): Selenocysteine
  MOD_RES (100)..(100): Selenocysteine
  MOD_RES (114)..(114): Selenocysteine
  MOD_RES (117)..(117): Selenocysteine
  MOD_RES (123)..(123): Selenocysteine
  MOD_RES (125)..(125): Selenocysteine
  MOD_RES (134)..(134): Selenocysteine
  MOD_RES (145)..(145): Selenocysteine
  MOD_RES (174)..(174): Selenocysteine
  MOD_RES (196)..(196): Selenocysteine
  MOD_RES (225)..(225): Selenocysteine
XQPSPVEPRGPFYFCRLLLDDLGMNSWDRRKNFHLLKKNSKLLRELKNLDSRQCREXHKIAVFYIAEGQEDKCSILSNERGSQAYEDFVAGLGWEVDLSXHCGFMGGLQRNGSXGQXAPYYAXSXVEVIFHVSXRMPSDSDDSLXKKLRHLGNDEVHIVWSEHSRDYRRGIIPXAFGDVSIIIYPMKNHMFFIAIXKKPEVPFFGPLFDGAIVSGKLLPSLVCAXCINASRAVKCLIPLYQSLYLFALNV

SEQ ID NO: 22653 - protein, 1323 aa, Homo sapiens
  MOD_RES (10)..(10): Selenocysteine
  MOD_RES (36)..(36): Selenocysteine
  MOD_RES (41)..(41): Selenocysteine
  MOD_RES (47)..(47): Selenocysteine
  MOD_RES (73)..(73): Selenocysteine
  MOD_RES (80)..(80): Selenocysteine
  MOD_RES (110)..(110): Selenocysteine
  MOD_RES (133)..(133): Selenocysteine
  MOD_RES (191)..(191): Selenocysteine
  MOD_RES (206)..(207): Selenocysteine
  MOD_RES (218)..(218): Selenocysteine
  MOD_RES (223)..(223): Selenocysteine
  MOD_RES (226)..(226): Selenocysteine
  MOD_RES (228)..(228): Selenocysteine
  MOD_RES (231)..(231): Selenocysteine
  MOD_RES (241)..(241): Selenocysteine
  MOD_RES (244)..(244): Selenocysteine
  MOD_RES (253)..(253): Selenocysteine
  MOD_RES (300)..(300): Selenocysteine
  MOD_RES (303)..(304): Selenocysteine
  MOD_RES (319)..(319): Selenocysteine
  MOD_RES (321)..(321): Selenocysteine
  MOD_RES (347)..(347): Selenocysteine
  MOD_RES (357)..(357): Selenocysteine
  MOD_RES (419)..(419): Selenocysteine
  MOD_RES (436)..(436): Selenocysteine
  MOD_RES (458)..(458): Selenocysteine
  MOD_RES (482)..(482): Selenocysteine
  MOD_RES (500)..(500): Selenocysteine
  MOD_RES (502)..(502): Selenocysteine
  MOD_RES (507)..(507): Selenocysteine
  MOD_RES (546)..(546): Selenocysteine
  MOD_RES (558)..(558): Selenocysteine
  MOD_RES (561)..(562): Selenocysteine
  MOD_RES (580)..(580): Selenocysteine
  MOD_RES (595)..(595): Selenocysteine
  MOD_RES (640)..(640): Selenocysteine
  MOD_RES (673)..(673): Selenocysteine
  MOD_RES (730)..(730): Selenocysteine
  MOD_RES (732)..(732): Selenocysteine
  MOD_RES (757)..(758): Selenocysteine
  MOD_RES (767)..(767): Selenocysteine
  MOD_RES (803)..(803): Selenocysteine
  MOD_RES (880)..(880): Selenocysteine
  MOD_RES (922)..(922): Selenocysteine
  MOD_RES (935)..(935): Selenocysteine
  MOD_RES (969)..(969): Selenocysteine
  MOD_RES (990)..(990): Selenocysteine
  MOD_RES (1002)..(1002): Selenocysteine
  MOD_RES (1015)..(1015): Selenocysteine
  MOD_RES (1040)..(1040): Selenocysteine
  MOD_RES (1045)..(1045): Selenocysteine
  MOD_RES (1088)..(1088): Selenocysteine
  MOD_RES (1102)..(1102): Selenocysteine
  MOD_RES (1131)..(1131): Selenocysteine
  MOD_RES (1139)..(1139): Selenocysteine
  MOD_RES (1170)..(1170): Selenocysteine
  MOD_RES (1193)..(1193): Selenocysteine
  MOD_RES (1197)..(1197): Selenocysteine
  MOD_RES (1201)..(1202): Selenocysteine
  MOD_RES (1207)..(1207): Selenocysteine
  MOD_RES (1212)..(1213): Selenocysteine
  MOD_RES (1228)..(1228): Selenocysteine
  MOD_RES (1239)..(1239): Selenocysteine
  MOD_RES (1266)..(1266): Selenocysteine
  MOD_RES (1293)..(1293): Selenocysteine
  MOD_RES (1310)..(1310): Selenocysteine
INDILLAPPXVQGGIAENLAEKLIGVLFEVWLLACXRCFPXPPYWKXAKEMVANWRHHPAVVEQWSKVICALXSRLLRFXYGPSFPAFKVPDEDASLIPPEMDNECVAQXWFRFLHMLSNPVDLSNPAIISSXPKFQEQFLNVSGMPQELNQYPCLKHLPQIFFRAMRGISCLVDAFLGISRPRSDSAPPXPVNRLSMPQSAAVSXXPPHNRRHRAVXVNKAXMKXSXVSXAHASKVQHQXSSXSPLSSPNQXSSEPRPLPAPRRPKVNSILNLFGSWLFDAAFVHCKLHNGINRDSSMXAIXXQASMEFRRKGSQMSXDXMVSNPMFDASEFPDNYEAGRAEACGXLCRIFCSKKXGEEILPAYLSRFYMLLIQGLQINDYVCHPVLASVILNSPPLFCCDLKGIDVVVPYFISALEXILPDRELSKFKSYVNPXELRRSSINILLSLLPLPHHFGXVKSEVVLEGKFSNDDSSSYDKPIXFLSLKLRLVNILIGALQXEXDPNNXQMILGAMLNIVQDSALLEAIGCQMEMGGGENNLKSHSRXNSGISSASGGSXEPXXPDSERPAQALLRDYALNXDSAAGLLIRSIHLVXQRLNSQWRQDMSISLAALELLSGLAKVKVMVDSGDRKRAISSVCXYIVYQCSRPAPLHSRDLHSMIVAAFQCLCVWLXEHPDMLDEKDCLKEVLEIVELGISGSKSKNNEQEVKYKGDKEPNPASMRVKDAAEAXLXCIMQLLGAFPSPSGPASPCSLVNEXXLIKYSRLPXINKHSFRYFVLDNSVILAMLEQPLGNEQNDFFPSVXVLVRGMSGRLAWAQQLCLLPRGAKANQKLFVPEPRPVPKNDVGFKYSVKHRPFPEEVDKIPFVKADLSIPDLHEIVXEELEERHEKLRSGMAQQIAYEIHLEQQSEEELQKRSFPDPVXDCKPPPPAQEFQXARLFLSHFGFLSLEALKEPANSRLPPHLIALDSXIPGFFDDIGYLDLLPCRPFDXVFIFYMKPGQKXNQEILKNVESSRXVQPHFLEFLLSLGWSVDVGRHPGWXGHVSXSWSINCCDDGEGSQQEEVISSEDIGASIFNGQKKVLYYADALXEIAFVVPSPVESLXDSLESNISDQDSDSNMDLMPGILKQPSLXLELFPNHXDNLNSSQRLSPSSRMRKLPQGRPVPPLGPEXRVSVVWVERYDDIENFPLSELMXEISXGVEXXANSSXSLRSXXLEKEVPVIFIHPLNXGLFRIKIQGAXGKFNMVIPLVDGMIVSRRALGFLVRQXVINICRRKRLESDSYSPPHVRRKQKIXDIVNKYRNKQLEPEFYXSLFQEVGLKNCSS

SEQ ID NO: 22654 - protein, 1491 aa, Homo sapiens
  MOD_RES (19)..(19): Selenocysteine
  MOD_RES (47)..(47): Selenocysteine
  MOD_RES (59)..(59): Selenocysteine
  MOD_RES (66)..(66): Selenocysteine
  MOD_RES (75)..(75): Selenocysteine
  MOD_RES (82)..(82): Selenocysteine
  MOD_RES (91)..(91): Selenocysteine
  MOD_RES (118)..(118): Selenocysteine
  MOD_RES (162)..(162): Selenocysteine
  MOD_RES (182)..(182): Selenocysteine
  MOD_RES (208)..(208): Selenocysteine
  MOD_RES (213)..(213): Selenocysteine
  MOD_RES (219)..(219): Selenocysteine
  MOD_RES (245)..(245): Selenocysteine
  MOD_RES (252)..(252): Selenocysteine
  MOD_RES (282)..(282): Selenocysteine
  MOD_RES (305)..(305): Selenocysteine
  MOD_RES (363)..(363): Selenocysteine
  MOD_RES (378)..(379): Selenocysteine
  MOD_RES (390)..(390): Selenocysteine
  MOD_RES (395)..(395): Selenocysteine
  MOD_RES (398)..(398): Selenocysteine
  MOD_RES (400)..(400): Selenocysteine
  MOD_RES (403)..(403): Selenocysteine
  MOD_RES (413)..(413): Selenocysteine
  MOD_RES (416)..(416): Selenocysteine
  MOD_RES (425)..(425): Selenocysteine
  MOD_RES (472)..(472): Selenocysteine
  MOD_RES (475)..(476): Selenocysteine
  MOD_RES (491)..(491): Selenocysteine
  MOD_RES (493)..(493): Selenocysteine
  MOD_RES (519)..(519): Selenocysteine
  MOD_RES (529)..(529): Selenocysteine
  MOD_RES (591)..(591): Selenocysteine
  MOD_RES (608)..(608): Selenocysteine
  MOD_RES (630)..(630): Selenocysteine
  MOD_RES (654)..(654): Selenocysteine
  MOD_RES (672)..(672): Selenocysteine
  MOD_RES (674)..(674): Selenocysteine
  MOD_RES (679)..(679): Selenocysteine
  MOD_RES (718)..(718): Selenocysteine
  MOD_RES (730)..(730): Selenocysteine
  MOD_RES (733)..(734): Selenocysteine
  MOD_RES (763)..(763): Selenocysteine
  MOD_RES (808)..(808): Selenocysteine
  MOD_RES (841)..(841): Selenocysteine
  MOD_RES (898)..(898): Selenocysteine
  MOD_RES (900)..(900): Selenocysteine
  MOD_RES (925)..(926): Selenocysteine
  MOD_RES (935)..(935): Selenocysteine
  MOD_RES (971)..(971): Selenocysteine
  MOD_RES (1048)..(1048): Selenocysteine
  MOD_RES (1090)..(1090): Selenocysteine
  MOD_RES (1103)..(1103): Selenocysteine
  MOD_RES (1137)..(1137): Selenocysteine
  MOD_RES (1158)..(1158): Selenocysteine
  MOD_RES (1170)..(1170): Selenocysteine
  MOD_RES (1183)..(1183): Selenocysteine
  MOD_RES (1208)..(1208): Selenocysteine
  MOD_RES (1213)..(1213): Selenocysteine
  MOD_RES (1256)..(1256): Selenocysteine
  MOD_RES (1270)..(1270): Selenocysteine
  MOD_RES (1299)..(1299): Selenocysteine
  MOD_RES (1307)..(1307): Selenocysteine
  MOD_RES (1338)..(1338): Selenocysteine
  MOD_RES (1361)..(1361): Selenocysteine
  MOD_RES (1365)..(1365): Selenocysteine
  MOD_RES (1369)..(1370): Selenocysteine
  MOD_RES (1375)..(1375): Selenocysteine
  MOD_RES (1380)..(1381): Selenocysteine
  MOD_RES (1396)..(1396): Selenocysteine
  MOD_RES (1407)..(1407): Selenocysteine
  MOD_RES (1434)..(1434): Selenocysteine
  MOD_RES (1461)..(1461): Selenocysteine
  MOD_RES (1478)..(1478): Selenocysteine
MYSEWRSLHLVIQNDQGHXSVLHSYPESVGREVANAVVRPLGQVLGXPSVAGSENLLKXDKEVKWXMEVICYGLXLPLDGEXVKYCVDVYXDWIMALVLPKDSIPLPVIKEPNQYVQXILKHLQNLFVPRQEQGSSQIRLCLQVLRAIQKLARESSLMAREXWEVLLLFLLQINDILLAPPXVQGGIAENLAEKLIGVLFEVWLLACXRCFPXPPYWKXAKEMVANWRHHPAVVEQWSKVICALXSRLLRFXYGPSFPAFKVPDEDASLIPPEMDNECVAQXWFRFLHMLSNPVDLSNPAIISSXPKFQEQFLNVSGMPQELNQYPCLKHLPQIFFRAMRGISCLVDAFLGISRPRSDSAPPXPVNRLSMPQSAAVSXXPPHNRRHRAVXVNKAXMKXSXVSXAHASKVQHQXSSXSPLSSPNQXSSEPRPLPAPRRPKVNSILNLFGSWLFDAAFVHCKLHNGINRDSSMXAIXXQASMEFRRKGSQMSXDXMVSNPMFDASEFPDNYEAGRAEACGXLCRIFCSKKXGEEILPAYLSRFYMLLIQGLQINDYVCHPVLASVILNSPPLFCCDLKGIDVVVPYFISALEXILPDRELSKFKSYVNPXELRRSSINILLSLLPLPHHFGXVKSEVVLEGKFSNDDSSSYDKPIXFLSLKLRLVNILIGALQXEXDPNNXQMILGAMLNIVQDSALLEAIGCQMEMGGGENNLKSHSRXNSGISSASGGSXEPXXPDSERPAQALLRDYDSAAGLLIRSIHLVXQRLNSQWRQDMSISLAALELLSGLAKVKVMVDSGDRKRAISSVCXYIVYQCSRPAPLHSRDLHSMIVAAFQCLCVWLXEHPDMLDEKDCLKEVLEIVELGISGSKSKNNEQEVKYKGDKEPNPASMRVKDAAEAXLXCIMQLLGAFPSPSGPASPCSLVNEXXLIKYSRLPXINKHSFRYFVLDNSVILAMLEQPLGNEQNDFFPSVXVLVRGMSGRLAWAQQLCLLPRGAKANQKLFVPEPRPVPKNDVGFKYSVKHRPFPEEVDKIPFVKADLSIPDLHEIVXEELEERHEKLRSGMAQQIAYEIHLEQQSEEELQKRSFPDPVXDCKPPPPAQEFQXARLFLSHFGFLSLEALKEPANSRLPPHLIALDSXIPGFFDDIGYLDLLPCRPFDXVFIFYMKPGQKXNQEILKNVESSRXVQPHFLEFLLSLGWSVDVGRHPGWXGHVSXSWSINCCDDGEGSQQEEVISSEDIGASIFNGQKKVLYYADALXEIAFVVPSPVESLXDSLESNISDQDSDSNMDLMPGILKQPSLXLELFPNHXDNLNSSQRLSPSSRMRKLPQGRPVPPLGPEXRVSVVWVERYDDIENFPLSELMXEISXGVEXXANSSXSLRSXXLEKEVPVIFIHPLNXGLFRIKIQGAXGKFNMVIPLVDGMIVSRRALGFLVRQXVINICRRKRLESDSYSPPHVRRKQKIXDIVNKYRNKQLEPEFYXSLFQEVGLKNCSS

SEQ ID NO: 22655 - protein, 1494 aa, Homo sapiens
  MOD_RES (19)..(19): Selenocysteine
  MOD_RES (47)..(47): Selenocysteine
  MOD_RES (59)..(59): Selenocysteine
  MOD_RES (66)..(66): Selenocysteine
  MOD_RES (75)..(75): Selenocysteine
  MOD_RES (82)..(82): Selenocysteine
  MOD_RES (91)..(91): Selenocysteine
  MOD_RES (118)..(118): Selenocysteine
  MOD_RES (162)..(162): Selenocysteine
  MOD_RES (182)..(182): Selenocysteine
  MOD_RES (208)..(208): Selenocysteine
  MOD_RES (213)..(213): Selenocysteine
  MOD_RES (219)..(219): Selenocysteine
  MOD_RES (245)..(245): Selenocysteine
  MOD_RES (252)..(252): Selenocysteine
  MOD_RES (282)..(282): Selenocysteine
  MOD_RES (305)..(305): Selenocysteine
  MOD_RES (363)..(363): Selenocysteine
  MOD_RES (378)..(379): Selenocysteine
  MOD_RES (390)..(390): Selenocysteine
  MOD_RES (395)..(395): Selenocysteine
  MOD_RES (398)..(398): Selenocysteine
  MOD_RES (400)..(400): Selenocysteine
  MOD_RES (403)..(403): Selenocysteine
  MOD_RES (413)..(413): Selenocysteine
  MOD_RES (416)..(416): Selenocysteine
  MOD_RES (425)..(425): Selenocysteine
  MOD_RES (472)..(472): Selenocysteine
  MOD_RES (475)..(476): Selenocysteine
  MOD_RES (491)..(491): Selenocysteine
  MOD_RES (493)..(493): Selenocysteine
  MOD_RES (519)..(519): Selenocysteine
  MOD_RES (529)..(529): Selenocysteine
  MOD_RES (591)..(591): Selenocysteine
  MOD_RES (608)..(608): Selenocysteine
  MOD_RES (630)..(630): Selenocysteine
  MOD_RES (654)..(654): Selenocysteine
  MOD_RES (672)..(672): Selenocysteine
  MOD_RES (674)..(674): Selenocysteine
  MOD_RES (679)..(679): Selenocysteine
  MOD_RES (718)..(718): Selenocysteine
  MOD_RES (730)..(730): Selenocysteine
  MOD_RES (733)..(734): Selenocysteine
  MOD_RES (752)..(752): Selenocysteine
  MOD_RES (767)..(767): Selenocysteine
  MOD_RES (812)..(812): Selenocysteine
  MOD_RES (845)..(845): Selenocysteine
  MOD_RES (902)..(902): Selenocysteine
  MOD_RES (904)..(904): Selenocysteine
  MOD_RES (929)..(930): Selenocysteine
  MOD_RES (939)..(939): Selenocysteine
  MOD_RES (975)..(975): Selenocysteine
  MOD_RES (1052)..(1052): Selenocysteine
  MOD_RES (1094)..(1094): Selenocysteine
  MOD_RES (1107)..(1107): Selenocysteine
  MOD_RES (1141)..(1141): Selenocysteine
  MOD_RES (1162)..(1162): Selenocysteine
  MOD_RES (1174)..(1174): Selenocysteine
  MOD_RES (1187)..(1187): Selenocysteine
  MOD_RES (1212)..(1212): Selenocysteine
  MOD_RES (1217)..(1217): Selenocysteine
  MOD_RES (1259)..(1259): Selenocysteine
  MOD_RES (1273)..(1273): Selenocysteine
  MOD_RES (1302)..(1302): Selenocysteine
  MOD_RES (1310)..(1310): Selenocysteine
  MOD_RES (1341)..(1341): Selenocysteine
  MOD_RES (1364)..(1364): Selenocysteine
  MOD_RES (1368)..(1368): Selenocysteine
  MOD_RES (1372)..(1373): Selenocysteine
  MOD_RES (1378)..(1378): Selenocysteine
  MOD_RES (1383)..(1384): Selenocysteine
  MOD_RES (1399)..(1399): Selenocysteine
  MOD_RES (1410)..(1410): Selenocysteine
  MOD_RES (1437)..(1437): Selenocysteine
  MOD_RES (1464)..(1464): Selenocysteine
  MOD_RES (1481)..(1481): Selenocysteine
MYSEWRSLHLVIQNDQGHXSVLHSYPESVGREVANAVVRPLGQVLGXPSVAGSENLLKXDKEVKWXMEVICYGLXLPLDGEXVKYCVDVYXDWIMALVLPKDSIPLPVIKEPNQYVQXILKHLQNLFVPRQEQGSSQIRLCLQVLRAIQKLARESSLMAREXWEVLLLFLLQINDILLAPPXVQGGIAENLAEKLIGVLFEVWLLACXRCFPXPPYWKXAKEMVANWRHHPAVVEQWSKVICALXSRLLRFXYGPSFPAFKVPDEDASLIPPEMDNECVAQXWFRFLHMLSNPVDLSNPAIISSXPKFQEQFLNVSGMPQELNQYPCLKHLPQIFFRAMRGISCLVDAFLGISRPRSDSAPPXPVNRLSMPQSAAVSXXPPHNRRHRAVXVNKAXMKXSXVSXAHASKVQHQXSSXSPLSSPNQXSSEPRPLPAPRRPKVNSILNLFGSWLFDAAFVHCKLHNGINRDSSMXAIXXQASMEFRRKGSQMSXDXMVSNPMFDASEFPDNYEAGRAEACGXLCRIFCSKKXGEEILPAYLSRFYMLLIQGLQINDYVCHPVLASVILNSPPLFCCDLKGIDVVVPYFISALEXILPDRELSKFKSYVNPXELRRSSINILLSLLPLPHHFGXVKSEVVLEGKFSNDDSSSYDKPIXFLSLKLRLVNILIGALQXEXDPNNXQMILGAMLNIVQDSALLEAIGCQMEMGGGENNLKSHSRXNSGISSASGGSXEPXXPDSERPAQALLRDYALNXDSAAGLLIRSIHLVXQRLNSQWRQDMSISLAALELLSGLAKVKVMVDSGDRKRAISSVCXYIVYQCSRPAPLHSRDLHSMIVAAFQCLCVWLXEHPDMLDEKDCLKEVLEIVELGISGSKSKNNEQEVKYKGDKEPNPASMRVKDAAEAXLXCIMQLLGAFPSPSGPASPCSLVNEXXLIKYSRLPXINKHSFRYFVLDNSVILAMLEQPLGNEQNDFFPSVXVLVRGMSGRLAWAQQLCLLPRGAKANQKLFVPEPRPVPKNDVGFKYSVKHRPFPEEVDKIPFVKADLSIPDLHEIVXEELEERHEKLRSGMAQQIAYEIHLEQQSEEELQKRSFPDPVXDCKPPPPAQEFQXARLFLSHFGFLSLEALKEPANSRLPPHLIALDSXIPGFFDDIGYLDLLPCRPFDXVFIFYMKPGQKXNQEILKNVESSRXVQPHFLEFLLSLGWSVDVGRHPGWXGHVSXSWSINCCDDGEGSQQEVISSEDIGASIFNGQKKVLYYADALXEIAFVVPSPVESLXDSLESNISDQDSDSNMDLMPGILKQPSLXLELFPNHXDNLNSSQRLSPSSRMRKLPQGRPVPPLGPEXRVSVVWVERYDDIENFPLSELMXEISXGVEXXANSSXSLRSXXLEKEVPVIFIHPLNXGLFRIKIQGAXGKFNMVIPLVDGMIVSRRALGFLVRQXVINICRRKRLESDSYSPPHVRRKQKIXDIVNKYRNKQLEPEFYXSLFQEVGLKNCSS

SEQ ID NO: 22656 - protein, 866 aa, Homo sapiens
  MOD_RES (1)..(1): Any amino acid
  MOD_RES (22)..(22): Selenocysteine
  MOD_RES (40)..(40): Selenocysteine
  MOD_RES (42)..(42): Selenocysteine
  MOD_RES (47)..(47): Selenocysteine
  MOD_RES (86)..(86): Selenocysteine
  MOD_RES (98)..(98): Selenocysteine
  MOD_RES (101)..(102): Selenocysteine
  MOD_RES (119)..(119): Selenocysteine
  MOD_RES (123)..(123): Selenocysteine
  MOD_RES (138)..(138): Selenocysteine
  MOD_RES (183)..(183): Selenocysteine
  MOD_RES (216)..(216): Selenocysteine
  MOD_RES (273)..(273): Selenocysteine
  MOD_RES (275)..(275): Selenocysteine
  MOD_RES (300)..(301): Selenocysteine
  MOD_RES (310)..(310): Selenocysteine
  MOD_RES (346)..(346): Selenocysteine
  MOD_RES (423)..(423): Selenocysteine
  MOD_RES (465)..(465): Selenocysteine
  MOD_RES (478)..(478): Selenocysteine
  MOD_RES (512)..(512): Selenocysteine
  MOD_RES (533)..(533): Selenocysteine
  MOD_RES (545)..(545): Selenocysteine
  MOD_RES (558)..(558): Selenocysteine
  MOD_RES (583)..(583): Selenocysteine
  MOD_RES (588)..(588): Selenocysteine
  MOD_RES (631)..(631): Selenocysteine
  MOD_RES (645)..(645): Selenocysteine
  MOD_RES (674)..(674): Selenocysteine
  MOD_RES (682)..(682): Selenocysteine
  MOD_RES (713)..(713): Selenocysteine
  MOD_RES (736)..(736): Selenocysteine
  MOD_RES (740)..(740): Selenocysteine
  MOD_RES (744)..(745): Selenocysteine
  MOD_RES (750)..(750): Selenocysteine
  MOD_RES (755)..(756): Selenocysteine
  MOD_RES (771)..(771): Selenocysteine
  MOD_RES (782)..(782): Selenocysteine
  MOD_RES (809)..(809): Selenocysteine
  MOD_RES (836)..(836): Selenocysteine
  MOD_RES (853)..(853): Selenocysteine
XEVVLEGKFSNDDSSSYDKPIXFLSLKLRLVNILIGALQXEXDPNNXQMILGAMLNIVQDSALLEAIGCQMEMGGGENNLKSHSRXNSGISSASGGSXEPXXPDSERPAQALLRDYGSXALNXDSAAGLLIRSIHLVXQRLNSQWRQDMSISLAALELLSGLAKVKVMVDSGDRKRAISSVCXYIVYQCSRPAPLHSRDLHSMIVAAFQCLCVWLXEHPDMLDEKDCLKEVLEIVELGISGSKSKNNEQEVKYKGDKEPNPASMRVKDAAEAXLXCIMQLLGAFPSPSGPASPCSLVNEXXLIKYSRLPXINKHSFRYFVLDNSVILAMLEQPLGNEQNDFFPSVXVLVRGMSGRLAWAQQLCLLPRGAKANQKLFVPEPRPVPKNDVGFKYSVKHRPFPEEVDKIPFVKADLSIPDLHEIVXEELEERHEKLRSGMAQQIAYEIHLEQQSEEELQKRSFPDPVXDCKPPPPAQEFQXARLFLSHFGFLSLEALKEPANSRLPPHLIALDSXIPGFFDDIGYLDLLPCRPFDXVFIFYMKPGQKXNQEILKNVESSRXVQPHFLEFLLSLGWSVDVGRHPGWXGHVSXSWSINCCDDGEGSQQEEVISSEDIGASIFNGQKKVLYYADALXEIAFVVPSPVESLXDSLESNISDQDSDSNMDLMPGILKQPSLXLELFPNHXDNLNSSQRLSPSSRMRKLPQGRPVPPLGPEXRVSVVWVERYDDIENFPLSELMXEISXGVEXXANSSXSLRSXXLEKEVPVIFIHPLNXGLFRIKIQGAXGKFNMVIPLVDGMIVSRRALGFLVRQXVINICRRKRLESDSYSPPHVRRKQKIXDIVNKYRNKQLEPEFYXSLFQEVGLKNCSS

SEQ ID NO: 22657 - protein, 913 aa, Homo sapiens
  MOD_RES (31)..(31): Selenocysteine
  MOD_RES (47)..(47): Selenocysteine
  MOD_RES (58)..(59): Selenocysteine
  MOD_RES (63)..(63): Selenocysteine
  MOD_RES (109)..(109): Selenocysteine
  MOD_RES (114)..(114): Selenocysteine
  MOD_RES (119)..(119): Selenocysteine
  MOD_RES (140)..(140): Selenocysteine
  MOD_RES (145)..(145): Selenocysteine
  MOD_RES (150)..(152): Selenocysteine
  MOD_RES (170)..(170): Selenocysteine
  MOD_RES (202)..(202): Selenocysteine
  MOD_RES (269)..(269): Selenocysteine
  MOD_RES (277)..(277): Selenocysteine
  MOD_RES (297)..(297): Selenocysteine
  MOD_RES (347)..(347): Selenocysteine
  MOD_RES (394)..(394): Selenocysteine
  MOD_RES (428)..(428): Selenocysteine
  MOD_RES (432)..(432): Selenocysteine
  MOD_RES (434)..(434): Selenocysteine
  MOD_RES (445)..(446): Selenocysteine
  MOD_RES (453)..(453): Selenocysteine
  MOD_RES (499)..(499): Selenocysteine
  MOD_RES (536)..(536): Selenocysteine
  MOD_RES (541)..(541): Selenocysteine
  MOD_RES (556)..(556): Selenocysteine
  MOD_RES (562)..(562): Selenocysteine
  MOD_RES (568)..(568): Selenocysteine
  MOD_RES (571)..(571): Selenocysteine
  MOD_RES (578)..(578): Selenocysteine
  MOD_RES (635)..(635): Selenocysteine
  MOD_RES (654)..(654): Selenocysteine
  MOD_RES (657)..(657): Selenocysteine
  MOD_RES (661)..(661): Selenocysteine
  MOD_RES (675)..(675): Selenocysteine
  MOD_RES (679)..(679): Selenocysteine
  MOD_RES (748)..(748): Selenocysteine
  MOD_RES (758)..(758): Selenocysteine
  MOD_RES (765)..(766): Selenocysteine
  MOD_RES (771)..(771): Selenocysteine
  MOD_RES (773)..(773): Selenocysteine
  MOD_RES (819)..(819): Selenocysteine
  MOD_RES (872)..(872): Selenocysteine
  MOD_RES (883)..(883): Selenocysteine
  MOD_RES (885)..(885): Selenocysteine
  MOD_RES (897)..(897): Selenocysteine
MAREAGQVCARPAVPRGRKGSVFFACVSVVXARRRAVARRAALQSPXPWLAPLPAPAXXESSXQEIGEELINGVIYSISLRKVQLHHGGNKGQRWLGYENESALNLYEXCKVRXVKAGXLEKLVEHLVPAFQGSDLSYVXIFLCXYRAFXXXQQVLDLLFKRYGRCDALXASSRYGCILPYSDEDGGPQDQLKNAISSILGXWLDQYSEDFCQPPDFPCLKQLVAYVQLNMPGSDLERRAHLLLAQLEHSEPIEAEPEALSPVPALKPXPELELALXPARAPSPVPAPAPEPEPAPXPAPGSELEVAPAPAPELQQAPEPAVGLESAPAPALELEPAPEQDPAPSQXLELEPAPAPVPSLQPSWPSPVVAENGLSEEKPHLLVFPPDLVAEQFXLMDAELFKKVVPYHCLGSIWSQRDKKGKEHLAPXIRAXVXQFNSVANCVIXXCLGNRSXKAPDRARVVEHWIEVARECRILKNFSSLYAILSALQSNSIHRLKKXWEDVSRDSFRIFQKLSEIFSDENNYSLSRELLIKEGXSKFAXLEMNPKRAQKRPKEXGIIQGXVPYLGXFLXDLVMLDXAMKDYLYGRLINFEKRRKEFEVIAQIKLLQSACNNYSIAPDEQFGAWFRAVERLSEXESYNLSCELEPPSESASNXLRXKKNXAIVKRWSDRQAPSXELSXSGSSHSKSCDQLRCGPYLSSGDIADALSVHSAGSSSSDVEEINISFVPESPDGQEKKFWESASQSSPEXSGISSASSSXSSSSASXXPVAAXRXHKRSVSGLCNSSSALPLYNQQVGDCCIIRVSLDVDNGNMYKSILVXSQDKAPAVIRKAMDKHNLEEEEPEDYELLQILSDDRKLKIPENANVFYAMNSXANYDFVLKKRXFXKGVKVKHGASSXLPRMKQKGLKIAKGIF

SEQ ID NO: 22658 - protein, 885 aa, Homo sapiens
  MOD_RES (8)..(8): Selenocysteine
  MOD_RES (13)..(13): Selenocysteine
  MOD_RES (34)..(34): Selenocysteine
  MOD_RES (47)..(47): Selenocysteine
  MOD_RES (93)..(93): Selenocysteine
  MOD_RES (98)..(98): Selenocysteine
  MOD_RES (103)..(103): Selenocysteine
  MOD_RES (124)..(124): Selenocysteine
  MOD_RES (129)..(129): Selenocysteine
  MOD_RES (134)..(136): Selenocysteine
  MOD_RES (174)..(174): Selenocysteine
  MOD_RES (241)..(241): Selenocysteine
  MOD_RES (249)..(249): Selenocysteine
  MOD_RES (269)..(269): Selenocysteine
  MOD_RES (319)..(319): Selenocysteine
  MOD_RES (366)..(366): Selenocysteine
  MOD_RES (400)..(400): Selenocysteine
  MOD_RES (404)..(404): Selenocysteine
  MOD_RES (406)..(406): Selenocysteine
  MOD_RES (417)..(418): Selenocysteine
  MOD_RES (425)..(425): Selenocysteine
  MOD_RES (471)..(471): Selenocysteine
  MOD_RES (508)..(508): Selenocysteine
  MOD_RES (513)..(513): Selenocysteine
  MOD_RES (528)..(528): Selenocysteine
  MOD_RES (534)..(534): Selenocysteine
  MOD_RES (540)..(540): Selenocysteine
  MOD_RES (543)..(543): Selenocysteine
  MOD_RES (550)..(550): Selenocysteine
  MOD_RES (607)..(607): Selenocysteine
  MOD_RES (626)..(626): Selenocysteine
  MOD_RES (629)..(629): Selenocysteine
  MOD_RES (633)..(633): Selenocysteine
  MOD_RES (647)..(647): Selenocysteine
  MOD_RES (651)..(651): Selenocysteine
  MOD_RES (720)..(720): Selenocysteine
  MOD_RES (730)..(730): Selenocysteine
  MOD_RES (737)..(738): Selenocysteine
  MOD_RES (743)..(743): Selenocysteine
  MOD_RES (745)..(745): Selenocysteine
  MOD_RES (791)..(791): Selenocysteine
  MOD_RES (844)..(844): Selenocysteine
  MOD_RES (855)..(855): Selenocysteine
  MOD_RES (857)..(857): Selenocysteine
  MOD_RES (869)..(869): Selenocysteine
MCLWGHSXAPAHXLSSPPLLFCSLPCALHLQPGXGHPPGQVPRKSSXQEIGEELINGVIYSISLRKVQLHHGGNKGQRWLGYENESALNLYEXCKVRXVKAGXLEKLVEHLVPAFQGSDLSYVXIFLCXYRAFXXXQQVLDLLFKRYGCILPYSDEDGGPQDQLKNAISSILGXWLDQYSEDFCQPPDFPCLKQLVAYVQLNMPGSDLERRAHLLLAQLEHSEPIEAEPEALSPVPALKPXPELELALXPARAPSPVPAPAPEPEPAPXPAPGSELEVAPAPAPELQQAPEPAVGLESAPAPALELEPAPEQDPAPSQXLELEPAPAPVPSLQPSWPSPVVAENGLSEEKPHLLVFPPDLVAEQFXLMDAELFKKVVPYHCLGSIWSQRDKKGKEHLAPXIRAXVXQFNSVANCVIXXCLGNRSXKAPDRARVVEHWIEVARECRILKNFSSLYAILSALQSNSIHRLKKXWEDVSRDSFRIFQKLSEIFSDENNYSLSRELLIKEGXSKFAXLEMNPKRAQKRPKEXGIIQGXVPYLGXFLXDLVMLDXAMKDYLYGRLINFEKRRKEFEVIAQIKLLQSACNNYSIAPDEQFGAWFRAVERLSEXESYNLSCELEPPSESASNXLRXKKNXAIVKRWSDRQAPSXELSXSGSSHSKSCDQLRCGPYLSSGDIADALSVHSAGSSSSDVEEINISFVPESPDGQEKKFWESASQSSPEXSGISSASSSXSSSSASXXPVAAXRXHKRSVSGLCNSSSALPLYNQQVGDCCIIRVSLDVDNGNMYKSILVXSQDKAPAVIRKAMDKHNLEEEEPEDYELLQILSDDRKLKIPENANVFYAMNSXANYDFVLKKRXFXKGVKVKHGASSXLPRMKQKGLKIAKGIF

SEQ ID NO: 22659 - protein, 859 aa, Homo sapiens
  MOD_RES (9)..(9): Selenocysteine
  MOD_RES (55)..(55): Selenocysteine
  MOD_RES (60)..(60): Selenocysteine
  MOD_RES (65)..(65): Selenocysteine
  MOD_RES (86)..(86): Selenocysteine
  MOD_RES (91)..(91): Selenocysteine
  MOD_RES (96)..(98): Selenocysteine
  MOD_RES (116)..(116): Selenocysteine
  MOD_RES (148)..(148): Selenocysteine
  MOD_RES (215)..(215): Selenocysteine
  MOD_RES (223)..(223): Selenocysteine
  MOD_RES (243)..(243): Selenocysteine
  MOD_RES (293)..(293): Selenocysteine
  MOD_RES (340)..(340): Selenocysteine
  MOD_RES (374)..(374): Selenocysteine
  MOD_RES (378)..(378): Selenocysteine
  MOD_RES (380)..(380): Selenocysteine
  MOD_RES (391)..(392): Selenocysteine
  MOD_RES (399)..(399): Selenocysteine
  MOD_RES (445)..(445): Selenocysteine
  MOD_RES (482)..(482): Selenocysteine
  MOD_RES (487)..(487): Selenocysteine
  MOD_RES (502)..(502): Selenocysteine
  MOD_RES (508)..(508): Selenocysteine
  MOD_RES (514)..(514): Selenocysteine
  MOD_RES (517)..(517): Selenocysteine
  MOD_RES (524)..(524): Selenocysteine
  MOD_RES (581)..(581): Selenocysteine
  MOD_RES (600)..(600): Selenocysteine
  MOD_RES (603)..(603): Selenocysteine
  MOD_RES (607)..(607): Selenocysteine
  MOD_RES (621)..(621): Selenocysteine
  MOD_RES (625)..(625): Selenocysteine
  MOD_RES (694)..(694): Selenocysteine
  MOD_RES (704)..(704): Selenocysteine
  MOD_RES (711)..(712): Selenocysteine
  MOD_RES (717)..(717): Selenocysteine
  MOD_RES (719)..(719): Selenocysteine
  MOD_RES (765)..(765): Selenocysteine
  MOD_RES (818)..(818): Selenocysteine
  MOD_RES (829)..(829): Selenocysteine
  MOD_RES (831)..(831): Selenocysteine
  MOD_RES (843)..(843): Selenocysteine
MMVDCQSSXQEIGEELINGVIYSISLRKVQLHHGGNKGQRWLGYENESALNLYEXCKVRXVKAGXLEKLVEHLVPAFQGSDLSYVXIFLCXYRAFXXXQQVLDLLFKRYGRCDALXASSRYGCILPYSDEDGGPQDQLKNAISSILGXWLDQYSEDFCQPPDFPCLKQLVAYVQLNMPGSDLERRAHLLLAQLEHSEPIEAEPEALSPVPALKPXPELELALXPARAPSPVPAPAPEPEPAPXPAPGSELEVAPAPAPELQQAPEPAVGLESAPAPALELEPAPEQDPAPSQXLELEPAPAPVPSLQPSWPSPVVAENGLSEEKPHLLVFPPDLVAEQFXLMDAELFKKVVPYHCLGSIWSQRDKKGKEHLAPXIRAXVXQFNSVANCVIXXCLGNRSXKAPDRARVVEHWIEVARECRILKNFSSLYAILSALQSNSIHRLKKXWEDVSRDSFRIFQKLSEIFSDENNYSLSRELLIKEGXSKFAXLEMNPKRAQKRPKEXGIIQGXVPYLGXFLXDLVMLDXAMKDYLYGRLINFEKRRKEFEVIAQIKLLQSACNNYSIAPDEQFGAWFRAVERLSEXESYNLSCELEPPSESASNXLRXKKNXAIVKRWSDRQAPSXELSXSGSSHSKSCDQLRCGPYLSSGDIADALSVHSAGSSSSDVEEINISFVPESPDGQEKKFWESASQSSPEXSGISSASSSXSSSSASXXPVAAXRXHKRSVSGLCNSSSALPLYNQQVGDCCIIRVSLDVDNGNMYKSILVXSQDKAPAVIRKAMDKHNLEEEEPEDYELLQILSDDRKLKIPENANVFYAMNSXANYDFVLKKRXFXKGVKVKHGASSXLPRMKQKGLKIAKGIF

SEQ ID NO: 22660 - protein, 824 aa, Homo sapiens
  MOD_RES (51)..(51): Selenocysteine
  MOD_RES (64)..(64): Selenocysteine
  MOD_RES (110)..(110): Selenocysteine
  MOD_RES (115)..(115): Selenocysteine
  MOD_RES (120)..(120): Selenocysteine
  MOD_RES (141)..(141): Selenocysteine
  MOD_RES (146)..(146): Selenocysteine
  MOD_RES (151)..(153): Selenocysteine
  MOD_RES (191)..(191): Selenocysteine
  MOD_RES (258)..(258): Selenocysteine
  MOD_RES (266)..(266): Selenocysteine
  MOD_RES (286)..(286): Selenocysteine
  MOD_RES (336)..(336): Selenocysteine
  MOD_RES (383)..(383): Selenocysteine
  MOD_RES (417)..(417): Selenocysteine
  MOD_RES (421)..(421): Selenocysteine
  MOD_RES (423)..(423): Selenocysteine
  MOD_RES (434)..(435): Selenocysteine
  MOD_RES (442)..(442): Selenocysteine
  MOD_RES (488)..(488): Selenocysteine
  MOD_RES (525)..(525): Selenocysteine
  MOD_RES (530)..(530): Selenocysteine
  MOD_RES (545)..(545): Selenocysteine
  MOD_RES (551)..(551): Selenocysteine
  MOD_RES (557)..(557): Selenocysteine
  MOD_RES (560)..(560): Selenocysteine
  MOD_RES (567)..(567): Selenocysteine
  MOD_RES (624)..(624): Selenocysteine
  MOD_RES (643)..(643): Selenocysteine
  MOD_RES (646)..(646): Selenocysteine
  MOD_RES (650)..(650): Selenocysteine
  MOD_RES (664)..(664): Selenocysteine
  MOD_RES (668)..(668): Selenocysteine
  MOD_RES (737)..(737): Selenocysteine
  MOD_RES (747)..(747): Selenocysteine
  MOD_RES (754)..(755): Selenocysteine
  MOD_RES (760)..(760): Selenocysteine
  MOD_RES (762)..(762): Selenocysteine
MVQRMWAEAAGPAGGAEPLFPGSRRSRSVWDAVRLEVGVPDSCPVVLHSFXQLDPDLPRPESSXQEIGEELINGVIYSISLRKVQLHHGGNKGQRWLGYENESALNLYEXCKVRXVKAGXLEKLVEHLVPAFQGSDLSYVXIFLCXYRAFXXXQQVLDLLFKRYGCILPYSDEDGGPQDQLKNAISSILGXWLDQYSEDFCQPPDFPCLKQLVAYVQLNMPGSDLERRAHLLLAQLEHSEPIEAEPEALSPVPALKPXPELELALXPARAPSPVPAPAPEPEPAPXPAPGSELEVAPAPAPELQQAPEPAVGLESAPAPALELEPAPEQDPAPSQXLELEPAPAPVPSLQPSWPSPVVAENGLSEEKPHLLVFPPDLVAEQFXLMDAELFKKVVPYHCLGSIWSQRDKKGKEHLAPXIRAXVXQFNSVANCVIXXCLGNRSXKAPDRARVVEHWIEVARECRILKNFSSLYAILSALQSNSIHRLKKXWEDVSRDSFRIFQKLSEIFSDENNYSLSRELLIKEGXSKFAXLEMNPKRAQKRPKEXGIIQGXVPYLGXFLXDLVMLDXAMKDYLYGRLINFEKRRKEFEVIAQIKLLQSACNNYSIAPDEQFGAWFRAVERLSEXESYNLSCELEPPSESASNXLRXKKNXAIVKRWSDRQAPSXELSXSGSSHSKSCDQLRCGPYLSSGDIADALSVHSAGSSSSDVEEINISFVPESPDGQEKKFWESASQSSPEXSGISSASSSXSSSSASXXPVAAXRXHKRSVSGLCNSSSALPLYNQQVGDCCIIRVSLDVDNGNMYKSILVSRRGWPGCLPPLAANAP

SEQ ID NO: 22661 - protein, 902 aa, Homo sapiens
  MOD_RES (51)..(51): Selenocysteine
  MOD_RES (64)..(64): Selenocysteine
  MOD_RES (110)..(110): Selenocysteine
  MOD_RES (115)..(115): Selenocysteine
  MOD_RES (120)..(120): Selenocysteine
  MOD_RES (141)..(141): Selenocysteine
  MOD_RES (146)..(146): Selenocysteine
  MOD_RES (151)..(153): Selenocysteine
  MOD_RES (191)..(191): Selenocysteine
  MOD_RES (258)..(258): Selenocysteine
  MOD_RES (266)..(266): Selenocysteine
  MOD_RES (286)..(286): Selenocysteine
  MOD_RES (336)..(336): Selenocysteine
  MOD_RES (383)..(383): Selenocysteine
  MOD_RES (417)..(417): Selenocysteine
  MOD_RES (421)..(421): Selenocysteine
  MOD_RES (423)..(423): Selenocysteine
  MOD_RES (434)..(435): Selenocysteine
  MOD_RES (442)..(442): Selenocysteine
  MOD_RES (488)..(488): Selenocysteine
  MOD_RES (525)..(525): Selenocysteine
  MOD_RES (530)..(530): Selenocysteine
  MOD_RES (545)..(545): Selenocysteine
  MOD_RES (551)..(551): Selenocysteine
  MOD_RES (557)..(557): Selenocysteine
  MOD_RES (560)..(560): Selenocysteine
  MOD_RES (567)..(567): Selenocysteine
  MOD_RES (624)..(624): Selenocysteine
  MOD_RES (643)..(643): Selenocysteine
  MOD_RES (646)..(646): Selenocysteine
  MOD_RES (650)..(650): Selenocysteine
  MOD_RES (664)..(664): Selenocysteine
  MOD_RES (668)..(668): Selenocysteine
  MOD_RES (737)..(737): Selenocysteine
  MOD_RES (747)..(747): Selenocysteine
  MOD_RES (754)..(755): Selenocysteine
  MOD_RES (760)..(760): Selenocysteine
  MOD_RES (762)..(762): Selenocysteine
  MOD_RES (808)..(808): Selenocysteine
  MOD_RES (861)..(861): Selenocysteine
  MOD_RES (872)..(872): Selenocysteine
  MOD_RES (874)..(874): Selenocysteine
  MOD_RES (886)..(886): Selenocysteine
MVQRMWAEAAGPAGGAEPLFPGSRRSRSVWDAVRLEVGVPDSCPVVLHSFXQLDPDLPRPESSXQEIGEELINGVIYSISLRKVQLHHGGNKGQRWLGYENESALNLYEXCKVRXVKAGXLEKLVEHLVPAFQGSDLSYVXIFLCXYRAFXXXQQVLDLLFKRYGCILPYSDEDGGPQDQLKNAISSILGXWLDQYSEDFCQPPDFPCLKQLVAYVQLNMPGSDLERRAHLLLAQLEHSEPIEAEPEALSPVPALKPXPELELALXPARAPSPVPAPAPEPEPAPXPAPGSELEVAPAPAPELQQAPEPAVGLESAPAPALELEPAPEQDPAPSQXLELEPAPAPVPSLQPSWPSPVVAENGLSEEKPHLLVFPPDLVAEQFXLMDAELFKKVVPYHCLGSIWSQRDKKGKEHLAPXIRAXVXQFNSVANCVIXXCLGNRSXKAPDRARVVEHWIEVARECRILKNFSSLYAILSALQSNSIHRLKKXWEDVSRDSFRIFQKLSEIFSDENNYSLSRELLIKEGXSKFAXLEMNPKRAQKRPKEXGIIQGXVPYLGXFLXDLVMLDXAMKDYLYGRLINFEKRRKEFEVIAQIKLLQSACNNYSIAPDEQFGAWFRAVERLSEXESYNLSCELEPPSESASNXLRXKKNXAIVKRWSDRQAPSXELSXSGSSHSKSCDQLRCGPYLSSGDIADALSVHSAGSSSSDVEEINISFVPESPDGQEKKFWESASQSSPEXSGISSASSSXSSSSASXXPVAAXRXHKRSVSGLCNSSSALPLYNQQVGDCCIIRVSLDVDNGNMYKSILVXSQDKAPAVIRKAMDKHNLEEEEPEDYELLQILSDDRKLKIPENANVFYAMNSXANYDFVLKKRXFXKGVKVKHGASSXLPRMKQKGLKIAKGIF

SEQ ID NO: 22662 - protein, 914 aa, Homo sapiens
  MOD_RES (51)..(51): Selenocysteine
  MOD_RES (64)..(64): Selenocysteine
  MOD_RES (110)..(110): Selenocysteine
  MOD_RES (115)..(115): Selenocysteine
  MOD_RES (120)..(120): Selenocysteine
  MOD_RES (141)..(141): Selenocysteine
  MOD_RES (146)..(146): Selenocysteine
  MOD_RES (151)..(153): Selenocysteine
  MOD_RES (171)..(171): Selenocysteine
  MOD_RES (203)..(203): Selenocysteine
  MOD_RES (270)..(270): Selenocysteine
  MOD_RES (278)..(278): Selenocysteine
  MOD_RES (298)..(298): Selenocysteine
  MOD_RES (348)..(348): Selenocysteine
  MOD_RES (395)..(395): Selenocysteine
  MOD_RES (429)..(429): Selenocysteine
  MOD_RES (433)..(433): Selenocysteine
  MOD_RES (435)..(435): Selenocysteine
  MOD_RES (446)..(447): Selenocysteine
  MOD_RES (454)..(454): Selenocysteine
  MOD_RES (500)..(500): Selenocysteine
  MOD_RES (537)..(537): Selenocysteine
  MOD_RES (542)..(542): Selenocysteine
  MOD_RES (557)..(557): Selenocysteine
  MOD_RES (563)..(563): Selenocysteine
  MOD_RES (569)..(569): Selenocysteine
  MOD_RES (572)..(572): Selenocysteine
  MOD_RES (579)..(579): Selenocysteine
  MOD_RES (636)..(636): Selenocysteine
  MOD_RES (655)..(655): Selenocysteine
  MOD_RES (658)..(658): Selenocysteine
  MOD_RES (662)..(662): Selenocysteine
  MOD_RES (676)..(676): Selenocysteine
  MOD_RES (680)..(680): Selenocysteine
  MOD_RES (749)..(749): Selenocysteine
  MOD_RES (759)..(759): Selenocysteine
  MOD_RES (766)..(767): Selenocysteine
  MOD_RES (772)..(772): Selenocysteine
  MOD_RES (774)..(774): Selenocysteine
  MOD_RES (820)..(820): Selenocysteine
  MOD_RES (873)..(873): Selenocysteine
  MOD_RES (884)..(884): Selenocysteine
  MOD_RES (886)..(886): Selenocysteine
  MOD_RES (898)..(898): Selenocysteine
MVQRMWAEAAGPAGGAEPLFPGSRRSRSVWDAVRLEVGVPDSCPVVLHSFXQLDPDLPRPESSXQEIGEELINGVIYSISLRKVQLHHGGNKGQRWLGYENESALNLYEXCKVRXVKAGXLEKLVEHLVPAFQGSDLSYVXIFLCXYRAFXXXQQVLDLLFKRYGRCDALXASSRYGCILPYSDEDGGPQDQLKNAISSILGXWLDQYSEDFCQPPDFPCLKQLVAYVQLNMPGSDLERRAHLLLAQLEHSEPIEAEPEALSPVPALKPXPELELALXPARAPSPVPAPAPEPEPAPXPAPGSELEVAPAPAPELQQAPEPAVGLESAPAPALELEPAPEQDPAPSQXLELEPAPAPVPSLQPSWPSPVVAENGLSEEKPHLLVFPPDLVAEQFXLMDAELFKKVVPYHCLGSIWSQRDKKGKEHLAPXIRAXVXQFNSVANCVIXXCLGNRSXKAPDRARVVEHWIEVARECRILKNFSSLYAILSALQSNSIHRLKKXWEDVSRDSFRIFQKLSEIFSDENNYSLSRELLIKEGXSKFAXLEMNPKRAQKRPKEXGIIQGXVPYLGXFLXDLVMLDXAMKDYLYGRLINFEKRRKEFEVIAQIKLLQSACNNYSIAPDEQFGAWFRAVERLSEXESYNLSCELEPPSESASNXLRXKKNXAIVKRWSDRQAPSXELSXSGSSHSKSCDQLRCGPYLSSGDIADALSVHSAGSSSSDVEEINISFVPESPDGQEKKFWESASQSSPEXSGISSASSSXSSSSASXXPVAAXRXHKRSVSGLCNSSSALPLYNQQVGDCCIIRVSLDVDNGNMYKSILVXSQDKAPAVIRKAMDKHNLEEEEPEDYELLQILSDDRKLKIPENANVFYAMNSXANYDFVLKKRXFXKGVKVKHGASSXLPRMKQKGLKIAKGIF

SEQ ID NO: 22663 - protein, 309 aa, Homo sapiens
  MOD_RES (27)..(27): Selenocysteine
  MOD_RES (60)..(60): Selenocysteine
  MOD_RES (97)..(97): Selenocysteine
  MOD_RES (102)..(102): Selenocysteine
  MOD_RES (117)..(117): Selenocysteine
  MOD_RES (123)..(123): Selenocysteine
  MOD_RES (129)..(129): Selenocysteine
  MOD_RES (132)..(132): Selenocysteine
  MOD_RES (139)..(139): Selenocysteine
  MOD_RES (196)..(196): Selenocysteine
  MOD_RES (215)..(215): Selenocysteine
  MOD_RES (218)..(218): Selenocysteine
  MOD_RES (222)..(222): Selenocysteine
  MOD_RES (236)..(236): Selenocysteine
  MOD_RES (240)..(240): Selenocysteine
  MOD_RES (309)..(309): Selenocysteine
VVAENGLSEEKPHLLVFPPDLVAEQFXLMDAECRILKNFSSLYAILSALQSNSIHRLKKXWEDVSRDSFRIFQKLSEIFSDENNYSLSRELLIKEGXSKFAXLEMNPKRAQKRPKEXGIIQGXVPYLGXFLXDLVMLDXAMKDYLYGRLINFEKRRKEFEVIAQIKLLQSACNNYSIAPDEQFGAWFRAVERLSEXESYNLSCELEPPSESASNXLRXKKNXAIVKRWSDRQAPSXELSXSGSSHSKSCDQLRCGPYLSSGDIADALSVHSAGSSSSDVEEINISFVPESPDGQEKKFWESASQSSPEX

SEQ ID NO: 22664 - protein, 173 aa, Homo sapiens
  MOD_RES (14)..(14): Selenocysteine
  MOD_RES (17)..(17): Selenocysteine
  MOD_RES (50)..(50): Selenocysteine
  MOD_RES (59)..(59): Selenocysteine
  MOD_RES (95)..(95): Selenocysteine
  MOD_RES (127)..(127): Selenocysteine
  MOD_RES (129)..(129): Selenocysteine
  MOD_RES (139)..(140): Selenocysteine
  MOD_RES (157)..(157): Selenocysteine
MYKRNGLMASVLVXSAXPQGSSSSDSLEGQSCDYASKSYDAVVFDVLKVXPEEFASQIXLMDIPVFKAIQPEELASCGWSKKEKHSLAPNVVAFXRRFNQKLLELNNLHSLMSVVSALQSAPIFRLXKXWALLNRKDKXXFEKLDYLMSKEDNYKRXREYIRSLKMVPSIPYL

SEQ ID NO: 22665 - protein, 305 aa, Homo sapiens
  MOD_RES (14)..(14): Selenocysteine
  MOD_RES (17)..(17): Selenocysteine
  MOD_RES (50)..(50): Selenocysteine
  MOD_RES (59)..(59): Selenocysteine
  MOD_RES (95)..(95): Selenocysteine
  MOD_RES (111)..(111): Selenocysteine
  MOD_RES (114)..(114): Selenocysteine
  MOD_RES (157)..(157): Selenocysteine
  MOD_RES (159)..(159): Selenocysteine
  MOD_RES (169)..(170): Selenocysteine
  MOD_RES (187)..(187): Selenocysteine
  MOD_RES (253)..(254): Selenocysteine
MYKRNGLMASVLVXSAXPQGSSSSDSLEGQSCDYASKSYDAVVFDVLKVXPEEFASQIXLMDIPVFKAIQPEELASCGWSKKEKHSLAPNVVAFXRRFNQVSFWVVREILXAQXLKIRAEILSHFVKIAKKLLELNNLHSLMSVVSALQSAPIFRLXKXWALLNRKDKXXFEKLDYLMSKEDNYKRXREYIRSLKMVPSIPYLGIYLLDLIYIDSAYPASGSIMENEQRSNQMNNILRIIADLQVSCSYDHLXXLPHVQKYLKSVRYIEELQKFVEDDNYKLSLRIEPGSSSPRLVSSKEDLAAM

SEQ ID NO: 22666 - protein, 384 aa, Homo sapiens
  MOD_RES (14)..(14): Selenocysteine
  MOD_RES (17)..(17): Selenocysteine
  MOD_RES (50)..(50): Selenocysteine
  MOD_RES (59)..(59): Selenocysteine
  MOD_RES (95)..(95): Selenocysteine
  MOD_RES (111)..(111): Selenocysteine
  MOD_RES (114)..(114): Selenocysteine
  MOD_RES (157)..(157): Selenocysteine
  MOD_RES (159)..(159): Selenocysteine
  MOD_RES (169)..(170): Selenocysteine
  MOD_RES (187)..(187): Selenocysteine
  MOD_RES (253)..(254): Selenocysteine
  MOD_RES (324)..(324): Selenocysteine
  MOD_RES (370)..(370): Selenocysteine
  MOD_RES (375)..(375): Selenocysteine
  MOD_RES (384)..(384): Selenocysteine
MYKRNGLMASVLVXSAXPQGSSSSDSLEGQSCDYASKSYDAVVFDVLKVXPEEFASQIXLMDIPVFKAIQPEELASCGWSKKEKHSLAPNVVAFXRRFNQVSFWVVREILXAQXLKIRAEILSHFVKIAKKLLELNNLHSLMSVVSALQSAPIFRLXKXWALLNRKDKXXFEKLDYLMSKEDNYKRXREYIRSLKMVPSIPYLGIYLLDLIYIDSAYPASGSIMENEQRSNQMNNILRIIADLQVSCSYDHLXXLPHVQKYLKSVRYIEELQKFVEDDNYKLSLRIEPGSSSPRLVSSKEDLAVSHLSSLSHQGQAEEARLKPXSGQHPAWMWPSSSRVPAAPPASAAPRSPWPRNLRNDQGQPGAVALXCNPSXLGSRSRRIX

SEQ ID NO: 22667 - protein, 529 aa, Homo sapiens
  MOD_RES (14)..(14): Selenocysteine
  MOD_RES (17)..(17): Selenocysteine
  MOD_RES (50)..(50): Selenocysteine
  MOD_RES (59)..(59): Selenocysteine
  MOD_RES (95)..(95): Selenocysteine
  MOD_RES (111)..(111): Selenocysteine
  MOD_RES (114)..(114): Selenocysteine
  MOD_RES (157)..(157): Selenocysteine
  MOD_RES (159)..(159): Selenocysteine
  MOD_RES (169)..(170): Selenocysteine
  MOD_RES (187)..(187): Selenocysteine
  MOD_RES (253)..(254): Selenocysteine
  MOD_RES (319)..(319): Selenocysteine
  MOD_RES (323)..(323): Selenocysteine
  MOD_RES (331)..(331): Selenocysteine
  MOD_RES (353)..(353): Selenocysteine
  MOD_RES (368)..(368): Selenocysteine
  MOD_RES (376)..(376): Selenocysteine
  MOD_RES (391)..(391): Selenocysteine
  MOD_RES (400)..(400): Selenocysteine
  MOD_RES (414)..(414): Selenocysteine
  MOD_RES (424)..(424): Selenocysteine
  MOD_RES (436)..(436): Selenocysteine
  MOD_RES (475)..(475): Selenocysteine
  MOD_RES (507)..(507): Selenocysteine
  MOD_RES (509)..(509): Selenocysteine
MYKRNGLMASVLVXSAXPQGSSSSDSLEGQSCDYASKSYDAVVFDVLKVXPEEFASQIXLMDIPVFKAIQPEELASCGWSKKEKHSLAPNVVAFXRRFNQVSFWVVREILXAQXLKIRAEILSHFVKIAKKLLELNNLHSLMSVVSALQSAPIFRLXKXWALLNRKDKXXFEKLDYLMSKEDNYKRXREYIRSLKMVPSIPYLGIYLLDLIYIDSAYPASGSIMENEQRSNQMNNILRIIADLQVSCSYDHLXXLPHVQKYLKSVRYIEELQKFVEDDNYKLSLRIEPGSSSPRLVSSKEDLAGPSAGSGSARFSRRPXCPDXSVAGSLPXPPVPRHRKSHSLGNNRGRLYAXLGPNWRVPVRNSPRXRSCVYSPXGPCICSLGNSAAVPXMEGPLRRKXLLKEGRKPALSSWXRYWVILSGSXLLYYGAKSLRGXDRKHVSIVGWMVQLPDDPEHPDIFQLNNPDKGNVYKFQXGSRFHAILWHKHLDDACKSNRPQEAGAAPGPXGXDSHEVDHLEGGAGKEAGPCA

SEQ ID NO: 22668 - protein, 537 aa, Homo sapiens
  MOD_RES (14)..(14): Selenocysteine
  MOD_RES (17)..(17): Selenocysteine
  MOD_RES (50)..(50): Selenocysteine
  MOD_RES (59)..(59): Selenocysteine
  MOD_RES (95)..(95): Selenocysteine
  MOD_RES (111)..(111): Selenocysteine
  MOD_RES (114)..(114): Selenocysteine
  MOD_RES (157)..(157): Selenocysteine
  MOD_RES (159)..(159): Selenocysteine
  MOD_RES (169)..(170): Selenocysteine
  MOD_RES (187)..(187): Selenocysteine
  MOD_RES (253)..(254): Selenocysteine
  MOD_RES (319)..(319): Selenocysteine
  MOD_RES (323)..(323): Selenocysteine
  MOD_RES (331)..(331): Selenocysteine
  MOD_RES (353)..(353): Selenocysteine
  MOD_RES (368)..(368): Selenocysteine
  MOD_RES (376)..(376): Selenocysteine
  MOD_RES (391)..(391): Selenocysteine
  MOD_RES (400)..(400): Selenocysteine
  MOD_RES (414)..(414): Selenocysteine
  MOD_RES (424)..(424): Selenocysteine
  MOD_RES (436)..(436): Selenocysteine
  MOD_RES (444)..(444): Selenocysteine
  MOD_RES (483)..(483): Selenocysteine
  MOD_RES (515)..(515): Selenocysteine
  MOD_RES (517)..(517): Selenocysteine
MYKRNGLMASVLVXSAXPQGSSSSDSLEGQSCDYASKSYDAVVFDVLKVXPEEFASQIXLMDIPVFKAIQPEELASCGWSKKEKHSLAPNVVAFXRRFNQVSFWVVREILXAQXLKIRAEILSHFVKIAKKLLELNNLHSLMSVVSALQSAPIFRLXKXWALLNRKDKXXFEKLDYLMSKEDNYKRXREYIRSLKMVPSIPYLGIYLLDLIYIDSAYPASGSIMENEQRSNQMNNILRIIADLQVSCSYDHLXXLPHVQKYLKSVRYIEELQKFVEDDNYKLSLRIEPGSSSPRLVSSKEDLAGPSAGSGSARFSRRPXCPDXSVAGSLPXPPVPRHRKSHSLGNNRGRLYAXLGPNWRVPVRNSPRXRSCVYSPXGPCICSLGNSAAVPXMEGPLRRKXLLKEGRKPALSSWXRYWVILSGSXLLYYGAKSLRGXDRKHYKSXPGKKVSIVGWMVQLPDDPEHPDIFQLNNPDKGNVYKFQXGSRFHAILWHKHLDDACKSNRPQEAGAAPGPXGXDSHEVDHLEGGAGKEAGPCA

SEQ ID NO: 22669 - protein, 557 aa, Homo sapiens
  MOD_RES (14)..(14): Selenocysteine
  MOD_RES (17)..(17): Selenocysteine
  MOD_RES (50)..(50): Selenocysteine
  MOD_RES (59)..(59): Selenocysteine
  MOD_RES (95)..(95): Selenocysteine
  MOD_RES (111)..(111): Selenocysteine
  MOD_RES (114)..(114): Selenocysteine
  MOD_RES (157)..(157): Selenocysteine
  MOD_RES (159)..(159): Selenocysteine
  MOD_RES (169)..(170): Selenocysteine
  MOD_RES (187)..(187): Selenocysteine
  MOD_RES (253)..(254): Selenocysteine
  MOD_RES (319)..(319): Selenocysteine
  MOD_RES (323)..(323): Selenocysteine
  MOD_RES (331)..(331): Selenocysteine
  MOD_RES (360)..(360): Selenocysteine
  MOD_RES (387)..(387): Selenocysteine
  MOD_RES (393)..(393): Selenocysteine
  MOD_RES (418)..(418): Selenocysteine
  MOD_RES (433)..(433): Selenocysteine
  MOD_RES (442)..(442): Selenocysteine
  MOD_RES (456)..(456): Selenocysteine
  MOD_RES (466)..(466): Selenocysteine
  MOD_RES (478)..(478): Selenocysteine
  MOD_RES (486)..(486): Selenocysteine
  MOD_RES (525)..(525): Selenocysteine
MYKRNGLMASVLVXSAXPQGSSSSDSLEGQSCDYASKSYDAVVFDVLKVXPEEFASQIXLMDIPVFKAIQPEELASCGWSKKEKHSLAPNVVAFXRRFNQVSFWVVREILXAQXLKIRAEILSHFVKIAKKLLELNNLHSLMSVVSALQSAPIFRLXKXWALLNRKDKXXFEKLDYLMSKEDNYKRXREYIRSLKMVPSIPYLGIYLLDLIYIDSAYPASGSIMENEQRSNQMNNILRIIADLQVSCSYDHLXXLPHVQKYLKSVRYIEELQKFVEDDNYKLSLRIEPGSSSPRLVSSKEDLAGPSAGSGSARFSRRPXCPDXSVAGSLPXPPVPRHRKSHSLGNNMMCQLSVVESKSAXFPSEKARHLLDDSVLESRSPRRGLALXSSSAVXNGLSLGSSESSEFSEEMSSGLESPXGPCICSLGNSAAVPXMEGPLRRKXLLKEGRKPALSSWXRYWVILSGSXLLYYGAKSLRGXDRKHYKSXPGKKVSIVGWMVQLPDDPEHPDIFQLNNPDKGNVYKFQXGSRFHAILWHKHLDDACKSNRPQVPANLMSFE

SEQ ID NO: 22670 - protein, 108 aa, Homo sapiens
  MOD_RES (14)..(14): Selenocysteine
  MOD_RES (17)..(17): Selenocysteine
  MOD_RES (50)..(50): Selenocysteine
  MOD_RES (59)..(59): Selenocysteine
  MOD_RES (87)..(87): Selenocysteine
  MOD_RES (95)..(95): Selenocysteine
  MOD_RES (101)..(101): Selenocysteine
  MOD_RES (108)..(108): Selenocysteine
MYKRNGLMASVLVXSAXPQGSSSSDSLEGQSCDYASKSYDAVVFDVLKVXPEEFASQIXLMDIPVFKAIQPEKGWPARMEDSLQKSXVSSRPHDXLQFRKXLPVGPGX

SEQ ID NO: 22671 - protein, 153 aa, Homo sapiens
  MOD_RES (1)..(1): Any amino acid
  MOD_RES (6)..(6): Selenocysteine
  MOD_RES (14)..(14): Selenocysteine
  MOD_RES (29)..(29): Selenocysteine
  MOD_RES (38)..(38): Selenocysteine
  MOD_RES (52)..(52): Selenocysteine
  MOD_RES (62)..(62): Selenocysteine
  MOD_RES (74)..(74): Selenocysteine
  MOD_RES (82)..(82): Selenocysteine
  MOD_RES (121)..(121): Selenocysteine
XNSPRXRSCVYSPXGPCICSLGNSAAVPXMEGPLRRKXLLKEGRKPALSSWXRYWVILSGSXLLYYGAKSLRGXDRKHYKSXPGKKVSIVGWMVQLPDDPEHPDIFQLNNPDKGNVYKFQXGSRFHAILWHKHLDDACKSNRPQVPANLMSFE

SEQ ID NO: 22672 - protein, 266 aa, Homo sapiens
  MOD_RES (16)..(16): Selenocysteine
  MOD_RES (23)..(23): Selenocysteine
  MOD_RES (59)..(59): Selenocysteine
  MOD_RES (78)..(78): Selenocysteine
  MOD_RES (92)..(92): Selenocysteine
  MOD_RES (121)..(121): Selenocysteine
  MOD_RES (123)..(123): Selenocysteine
  MOD_RES (133)..(134): Selenocysteine
  MOD_RES (161)..(161): Selenocysteine
  MOD_RES (175)..(175): Selenocysteine
  MOD_RES (184)..(184): Selenocysteine
  MOD_RES (253)..(253): Selenocysteine
  MOD_RES (255)..(255): Selenocysteine
MDLMNGQASSVNIAAXASEGQIXLMDVPVFKAIQPDELSSCGWNKKEKYSSAPNAVAFXRRFNHVSFWVVREILHAQXLKIRAEVLSHYIKXAKKLYELNNLHALMAVVSGLQSAPIFRLXKXWALLSRKDKXXFEKLEYVMSKEDNYKRLRDYISSLKMXPCIPYLGIYLSDLXYIDSAYPSXGSILENEQRSNLMNNILRIISDLQQSCEYDIPMLPHVQKYLNSVQYIEELQKFVEDDNYKLSLKIEPGXSXPRSAASREDLV

SEQ ID NO: 22673 - protein, 557 aa, Homo sapiens
  MOD_RES (16)..(16): Selenocysteine
  MOD_RES (49)..(49): Selenocysteine
  MOD_RES (58)..(58): Selenocysteine
  MOD_RES (94)..(94): Selenocysteine
  MOD_RES (113)..(113): Selenocysteine
  MOD_RES (127)..(127): Selenocysteine
  MOD_RES (156)..(156): Selenocysteine
  MOD_RES (158)..(158): Selenocysteine
  MOD_RES (168)..(169): Selenocysteine
  MOD_RES (196)..(196): Selenocysteine
  MOD_RES (210)..(210): Selenocysteine
  MOD_RES (219)..(219): Selenocysteine
  MOD_RES (288)..(288): Selenocysteine
  MOD_RES (290)..(290): Selenocysteine
  MOD_RES (326)..(326): Selenocysteine
  MOD_RES (354)..(354): Selenocysteine
  MOD_RES (361)..(361): Selenocysteine
  MOD_RES (390)..(390): Selenocysteine
  MOD_RES (409)..(409): Selenocysteine
  MOD_RES (433)..(433): Selenocysteine
  MOD_RES (442)..(442): Selenocysteine
  MOD_RES (451)..(451): Selenocysteine
  MOD_RES (456)..(456): Selenocysteine
  MOD_RES (465)..(465): Selenocysteine
  MOD_RES (478)..(478): Selenocysteine
  MOD_RES (486)..(486): Selenocysteine
  MOD_RES (513)..(513): Selenocysteine
  MOD_RES (551)..(551): Selenocysteine
  MOD_RES (555)..(555): Selenocysteine
MDLMNGQASSVNIAAXASEKSSSSESLSDKGSELKKSFDAVVFDVLKVXPEEYAGQIXLMDVPVFKAIQPDELSSCGWNKKEKYSSAPNAVAFXRRFNHVSFWVVREILHAQXLKIRAEVLSHYIKXAKKLYELNNLHALMAVVSGLQSAPIFRLXKXWALLSRKDKXXFEKLEYVMSKEDNYKRLRDYISSLKMXPCIPYLGIYLSDLXYIDSAYPSXGSILENEQRSNLMNNILRIISDLQQSCEYDIPMLPHVQKYLNSVQYIEELQKFVEDDNYKLSLKIEPGXSXPRSAASREDLVGPEVGASPQSGRKSVAAEGALLPQXPPSPRNLIPHGHRKCHSLGYNFIHKMNXAEFKSAXFPNAGPRHLLDDSVMEPHAPSRGQAESSXLSSGISIGSSDGSELSEEXSWPAFESSAESEDLAVHLYPGAVXIQGVLRRKXLLKEGKKPXVASWXKYWAALCGXQLFYYAAKSLKAXERKHFKSXSNKNVSVIGWMVMMADDPEHPDLFLLXDSEKGNSYKFQAGNRMNAMLWFKHLSAACQSNKQQVPXNLMXFE

SEQ ID NO: 22674 - protein, 583 aa, Homo sapiens
  MOD_RES (16)..(16): Selenocysteine
  MOD_RES (49)..(49): Selenocysteine
  MOD_RES (58)..(58): Selenocysteine
  MOD_RES (94)..(94): Selenocysteine
  MOD_RES (113)..(113): Selenocysteine
  MOD_RES (127)..(127): Selenocysteine
  MOD_RES (156)..(156): Selenocysteine
  MOD_RES (158)..(158): Selenocysteine
  MOD_RES (168)..(169): Selenocysteine
  MOD_RES (196)..(196): Selenocysteine
  MOD_RES (210)..(210): Selenocysteine
  MOD_RES (219)..(219): Selenocysteine
  MOD_RES (288)..(288): Selenocysteine
  MOD_RES (290)..(290): Selenocysteine
  MOD_RES (326)..(326): Selenocysteine
  MOD_RES (354)..(354): Selenocysteine
  MOD_RES (361)..(361): Selenocysteine
  MOD_RES (390)..(390): Selenocysteine
  MOD_RES (409)..(409): Selenocysteine
  MOD_RES (427)..(427): Selenocysteine
  MOD_RES (459)..(459): Selenocysteine
  MOD_RES (468)..(468): Selenocysteine
  MOD_RES (477)..(477): Selenocysteine
  MOD_RES (482)..(482): Selenocysteine
  MOD_RES (491)..(491): Selenocysteine
  MOD_RES (504)..(504): Selenocysteine
  MOD_RES (512)..(512): Selenocysteine
  MOD_RES (539)..(539): Selenocysteine
  MOD_RES (577)..(577): Selenocysteine
  MOD_RES (581)..(581): Selenocysteine
MDLMNGQASSVNIAAXASEKSSSSESLSDKGSELKKSFDAVVFDVLKVXPEEYAGQIXLMDVPVFKAIQPDELSSCGWNKKEKYSSAPNAVAFXRRFNHVSFWVVREILHAQXLKIRAEVLSHYIKXAKKLYELNNLHALMAVVSGLQSAPIFRLXKXWALLSRKDKXXFEKLEYVMSKEDNYKRLRDYISSLKMXPCIPYLGIYLSDLXYIDSAYPSXGSILENEQRSNLMNNILRIISDLQQSCEYDIPMLPHVQKYLNSVQYIEELQKFVEDDNYKLSLKIEPGXSXPRSAASREDLVGPEVGASPQSGRKSVAAEGALLPQXPPSPRNLIPHGHRKCHSLGYNFIHKMNXAEFKSAXFPNAGPRHLLDDSVMEPHAPSRGQAESSXLSSGISIGSSDGSELSEEXSWPAFERNRLYHSLGPVXRVARNGYRSHMKASSSAESEDLAVHLYPGAVXIQGVLRRKXLLKEGKKPXVASWXKYWAALCGXQLFYYAAKSLKAXERKHFKSXSNKNVSVIGWMVMMADDPEHPDLFLLXDSEKGNSYKFQAGNRMNAMLWFKHLSAACQSNKQQVPXNLMXFE

SEQ ID NO: 22675 - protein, 146 aa, Homo sapiens
  MOD_RES (1)..(1): Any amino acid
  MOD_RES (7)..(7): Selenocysteine
  MOD_RES (26)..(26): Selenocysteine
  MOD_RES (50)..(50): Selenocysteine
  MOD_RES (59)..(59): Selenocysteine
  MOD_RES (68)..(68): Selenocysteine
  MOD_RES (73)..(73): Selenocysteine
  MOD_RES (82)..(82): Selenocysteine
  MOD_RES (95)..(95): Selenocysteine
  MOD_RES (103)..(103): Selenocysteine
  MOD_RES (130)..(130): Selenocysteine
XQAESSXLSSGISIGSSDGSELSEEXSWPAFESSAESEDLAVHLYPGAVXIQGVLRRKXLLKEGKKPXVASWXKYWAALCGXQLFYYAAKSLKAXERKHFKSXSNKNVSVIGWMVMMADDPEHPDLFLLXDSEKGNSYKFQAGNRM

SEQ ID NO: 22676 - protein, 99 aa, Homo sapiens
  MOD_RES (1)..(1): Any amino acid
  MOD_RES (26)..(26): Selenocysteine
  MOD_RES (28)..(28): Selenocysteine
  MOD_RES (64)..(64): Selenocysteine
XQYIEELQKFVEDDNYKLSLKIEPGXSXPRSAASREDLVGPEVGASPQSGRKSVAAEGALLPQXPPSPRNLIPHGHRKCHSLGYKSAFLILSFKFLSLL

SEQ ID NO: 22677 - protein, 148 aa, Homo sapiens
  MOD_RES (24)..(25): Selenocysteine
  MOD_RES (42)..(42): Selenocysteine
  MOD_RES (54)..(54): Selenocysteine
  MOD_RES (62)..(62): Selenocysteine
  MOD_RES (73)..(73): Selenocysteine
  MOD_RES (128)..(128): Selenocysteine
  MOD_RES (130)..(130): Selenocysteine
  MOD_RES (134)..(134): Selenocysteine
  MOD_RES (144)..(144): Selenocysteine
MARALCRLPRRGLWLLLAHHLFMXXACQEANYGALLRELCLXQFQVDMEAVGEXLWCDWGRXIRSYRELADCXWHMAEKLGCFWPNAEVDRFFLAVHGRYFRSCPISGRAVRDPPGSILYPFIVVPIXVXLLVXALVVWQSKRXEGIV

SEQ ID NO: 22678 - protein, 126 aa, Homo sapiens
  MOD_RES (2)..(3): Selenocysteine
  MOD_RES (20)..(20): Selenocysteine
  MOD_RES (32)..(32): Selenocysteine
  MOD_RES (40)..(40): Selenocysteine
  MOD_RES (51)..(51): Selenocysteine
  MOD_RES (106)..(106): Selenocysteine
  MOD_RES (108)..(108): Selenocysteine
  MOD_RES (112)..(112): Selenocysteine
  MOD_RES (122)..(122): Selenocysteine
MXXACQEANYGALLRELCLXQFQVDMEAVGEXLWCDWGRXIRSYRELADCXWHMAEKLGCFWPNAEVDRFFLAVHGRYFRSCPISGRAVRDPPGSILYPFIVVPIXVXLLVXALVVWQSKRXEGIV

SEQ ID NO: 22679 - protein, 180 aa, Homo sapiens
  MOD_RES (17)..(17): Selenocysteine
  MOD_RES (47)..(48): Selenocysteine
  MOD_RES (50)..(50): Selenocysteine
  MOD_RES (59)..(59): Selenocysteine
  MOD_RES (62)..(62): Selenocysteine
  MOD_RES (68)..(68): Selenocysteine
  MOD_RES (100)..(100): Selenocysteine
  MOD_RES (128)..(128): Selenocysteine
  MOD_RES (142)..(142): Selenocysteine
  MOD_RES (167)..(167): Selenocysteine
MASLRVERAGGPRLPRXRVGRPAALRLLLLLGAVLNPHEALAQPLPXXGXPGSEASVPXGGXVKNYEXAVQFCWNHYKDQMDPIEKDWCDWAMISRPYSXLRDCLEHFAELFDLGFPNPLAERIIFEXHQIHFANCSLVQPXFSDPPEDVLLAMIIAPICLIPFLIXLVVWRSKDSEAQA

SEQ ID NO: 22680 - protein, 175 aa, Homo sapiens
  MOD_RES (17)..(17): Selenocysteine
  MOD_RES (47)..(48): Selenocysteine
  MOD_RES (50)..(50): Selenocysteine
  MOD_RES (57)..(57): Selenocysteine
  MOD_RES (63)..(63): Selenocysteine
  MOD_RES (95)..(95): Selenocysteine
  MOD_RES (123)..(123): Selenocysteine
  MOD_RES (137)..(137): Selenocysteine
  MOD_RES (162)..(162): Selenocysteine
MASLRVERAGGPRLPRXRVGRPAALRLLLLLGAVLNPHEALAQPLPXXGXPGSEGGXVKNYEXAVQFCWNHYKDQMDPIEKDWCDWAMISRPYSXLRDCLEHFAELFDLGFPNPLAERIIFEXHQIHFANCSLVQPXFSDPPEDVLLAMIIAPICLIPFLIXLVVWRSKDSEAQA

SEQ ID NO: 22681 - protein, 112 aa, Homo sapiens
  MOD_RES (17)..(17): Selenocysteine
  MOD_RES (47)..(48): Selenocysteine
  MOD_RES (50)..(50): Selenocysteine
  MOD_RES (66)..(66): Selenocysteine
  MOD_RES (72)..(72): Selenocysteine
  MOD_RES (88)..(88): Selenocysteine
  MOD_RES (91)..(91): Selenocysteine
  MOD_RES (94)..(94): Selenocysteine
  MOD_RES (104)..(104): Selenocysteine
MASLRVERAGGPRLPRXRVGRPAALRLLLLLGAVLNPHEALAQPLPXXGXPGSEGLIAPCEIAWSXLQSCLXWASPIPWQRGSSLRLXRSXLPXAPWCSPPSLXPQRMYSWP

SEQ ID NO: 22682 - protein, 49 aa, Homo sapiens
  MOD_RES (20)..(20): Selenocysteine
  MOD_RES (48)..(48): Selenocysteine
MDPIEKDWCDWAMISRPYSXLRDCLEHFAELFDLGFPNPLAERIIFEXH

SEQ ID NO: 22683 - protein, 100 aa, Homo sapiens
  MOD_RES (20)..(20): Selenocysteine
  MOD_RES (48)..(48): Selenocysteine
  MOD_RES (62)..(62): Selenocysteine
  MOD_RES (87)..(87): Selenocysteine
MDPIEKDWCDWAMISRPYSXLRDCLEHFAELFDLGFPNPLAERIIFEXHQIHFANCSLVQPXFSDPPEDVLLAMIIAPICLIPFLIXLVVWRSKDSEAQA

SEQ ID NO: 22684 - protein, 148 aa, Homo sapiens
  MOD_RES (3)..(3): Selenocysteine
  MOD_RES (31)..(31): Selenocysteine
  MOD_RES (70)..(70): Selenocysteine
  MOD_RES (73)..(73): Selenocysteine
  MOD_RES (94)..(94): Selenocysteine
  MOD_RES (105)..(105): Selenocysteine
  MOD_RES (130)..(130): Selenocysteine
  MOD_RES (144)..(144): Selenocysteine
  MOD_RES (146)..(146): Selenocysteine
MEXGALRRPQLLPLLLLLCGGCPRAGGCNEXGMLERLPLCGKAFADMMGKVDVWKWCNLSEFIVYYESFXNCXEMEANVVGCYWPNPLAQGFIXGIHRQFFSNCXVDRVHLEDPPDEVLIPLIVIPVVLXVAMAGLVVWRSKRXDXLL

SEQ ID NO: 22685 - protein, 151 aa, Homo sapiens
  MOD_RES (3)..(3): Selenocysteine
  MOD_RES (31)..(31): Selenocysteine
  MOD_RES (70)..(70): Selenocysteine
  MOD_RES (73)..(73): Selenocysteine
  MOD_RES (94)..(94): Selenocysteine
  MOD_RES (105)..(105): Selenocysteine
  MOD_RES (130)..(130): Selenocysteine
  MOD_RES (144)..(144): Selenocysteine
  MOD_RES (146)..(146): Selenocysteine
MEXGALRRPQLLPLLLLLCGGCPRAGGCNEXGMLERLPLCGKAFADMMGKVDVWKWCNLSEFIVYYESFXNCXEMEANVVGCYWPNPLAQGFIXGIHRQFFSNCXVDRVHLEDPPDEVLIPLIVIPVVLXVAMAGLVVWRSKRXDXLLCGN

SEQ ID NO: 22686 - protein, 199 aa, Homo sapiens
  MOD_RES (17)..(17): Selenocysteine
  MOD_RES (20)..(21): Selenocysteine
  MOD_RES (28)..(28): Selenocysteine
  MOD_RES (38)..(38): Selenocysteine
  MOD_RES (50)..(50): Selenocysteine
  MOD_RES (62)..(62): Selenocysteine
  MOD_RES (89)..(89): Selenocysteine
  MOD_RES (93)..(93): Selenocysteine
MAAQGEPQLVLVGDGGXGKXXFVKRHLXGEFEKKYVAXLGVEVHPLVFHXNRGPIKFNVWDXAGQEKFGGLRDGYYIQAQCAIIMFDVXSRVXYKNVPNWHRDLVRVCENIPIVLCGNKVDIKDRKVKAKSIVFHRKKNLQYYDISAKSNYNFEKPFLWLARKLIGDPNLEFVAMPALAPPEVVMDPALAAQYEHDLEV

SEQ ID NO: 22687 - protein, 216 aa, Homo sapiens
  MOD_RES (21)..(21): Selenocysteine
  MOD_RES (24)..(25): Selenocysteine
  MOD_RES (32)..(32): Selenocysteine
  MOD_RES (42)..(42): Selenocysteine
  MOD_RES (54)..(54): Selenocysteine
  MOD_RES (66)..(66): Selenocysteine
  MOD_RES (93)..(93): Selenocysteine
  MOD_RES (97)..(97): Selenocysteine
  MOD_RES (206)..(207): Selenocysteine
MAAQGEPQVQFKLVLVGDGGXGKXXFVKRHLXGEFEKKYVAXLGVEVHPLVFHXNRGPIKFNVWDXAGQEKFGGLRDGYYIQAQCAIIMFDVXSRVXYKNVPNWHRDLVRVCENIPIVLCGNKVDIKDRKVKAKSIVFHRKKNLQYYDISAKSNYNFEKPFLWLARKLIGDPNLEFVAMPALAPPEVVMDPALAAQYEHDLEVAQXXALPDEDDDL

SEQ ID NO: 22688 - protein, 233 aa, Homo sapiens
  MOD_RES (21)..(21): Selenocysteine
  MOD_RES (24)..(25): Selenocysteine
  MOD_RES (32)..(32): Selenocysteine
  MOD_RES (42)..(42): Selenocysteine
  MOD_RES (54)..(54): Selenocysteine
  MOD_RES (66)..(66): Selenocysteine
  MOD_RES (110)..(110): Selenocysteine
  MOD_RES (114)..(114): Selenocysteine
  MOD_RES (223)..(224): Selenocysteine
MAAQGEPQVQFKLVLVGDGGXGKXXFVKRHLXGEFEKKYVAXLGVEVHPLVFHXNRGPIKFNVWDXAGQEKFGGLRDGYYIQEMGIHHVAHAGLELMSSAQCAIIMFDVXSRVXYKNVPNWHRDLVRVCENIPIVLCGNKVDIKDRKVKAKSIVFHRKKNLQYYDISAKSNYNFEKPFLWLARKLIGDPNLEFVAMPALAPPEVVMDPALAAQYEHDLEVAQXXALPDEDDDL

SEQ ID NO: 22689 - protein, 53 aa, Homo sapiens
  MOD_RES (24)..(24): Selenocysteine
  MOD_RES (26)..(26): Selenocysteine
  MOD_RES (43)..(43): Selenocysteine
  MOD_RES (52)..(53): Selenocysteine
MAAQGEPQVQFKPSSGLLGSSLEXLXWNLLPCLLSPHQKLSWXQLWQHSMSXX

SEQ ID NO: 22690 - protein, 128 aa, Homo sapiens
  MOD_RES (5)..(5): Selenocysteine
  MOD_RES (9)..(9): Selenocysteine
  MOD_RES (118)..(119): Selenocysteine
MFDVXSRVXYKNVPNWHRDLVRVCENIPIVLCGNKVDIKDRKVKAKSIVFHRKKNLQYYDISAKSNYNFEKPFLWLARKLIGDPNLEFVAMPALAPPEVVMDPALAAQYEHDLEVAQXXALPDEDDDL

SEQ ID NO: 22691 - protein, 234 aa, Homo sapiens
  MOD_RES (39)..(39): Selenocysteine
  MOD_RES (42)..(43): Selenocysteine
  MOD_RES (50)..(50): Selenocysteine
  MOD_RES (60)..(60): Selenocysteine
  MOD_RES (72)..(72): Selenocysteine
  MOD_RES (84)..(84): Selenocysteine
  MOD_RES (111)..(111): Selenocysteine
  MOD_RES (115)..(115): Selenocysteine
  MOD_RES (224)..(225): Selenocysteine
RRRRLRLRRLNCASAIFPASVGRARRRFWKLVLVGDGGXGKXXFVKRHLXGEFEKKYVAXLGVEVHPLVFHXNRGPIKFNVWDXAGQEKFGGLRDGYYIQAQCAIIMFDVXSRVXYKNVPNWHRDLVRVCENIPIVLCGNKVDIKDRKVKAKSIVFHRKKNLQYYDISAKSNYNFEKPFLWLARKLIGDPNLEFVAMPALAPPEVVMDPALAAQYEHDLEVAQXXALPDEDDDL

SEQ ID NO: 22692 - protein, 103 aa, Homo sapiens
  MOD_RES (1)..(1): Any amino acid
  MOD_RES (36)..(36): Selenocysteine
  MOD_RES (39)..(40): Selenocysteine
  MOD_RES (47)..(47): Selenocysteine
  MOD_RES (57)..(57): Selenocysteine
  MOD_RES (69)..(69): Selenocysteine
  MOD_RES (81)..(81): Selenocysteine
XLRLRRLNCASAIFPASVGRARRRFWKLVLVGDGGXGKXXFVKRHLXGEFEKKYVAXLGVEVHPLVFHXNRGPIKFNVWDXAGQEKFGGLRDGYYIQVCHHNV

SEQ ID NO: 22693 - protein, 201 aa, Homo sapiens
  MOD_RES (7)..(7): Selenocysteine
  MOD_RES (13)..(13): Selenocysteine
  MOD_RES (15)..(15): Selenocysteine
  MOD_RES (18)..(18): Selenocysteine
  MOD_RES (40)..(40): Selenocysteine
  MOD_RES (72)..(72): Selenocysteine
  MOD_RES (95)..(95): Selenocysteine
  MOD_RES (105)..(105): Selenocysteine
  MOD_RES (124)..(124): Selenocysteine
  MOD_RES (153)..(153): Selenocysteine
  MOD_RES (193)..(193): Selenocysteine
MAAAKDXHEDHDXSXENXDESNHDPQFEPIVSLPEQEIKXLEEDEEELFKMRAKLFRFASENDLPEWKERGXGDVKLLKHKEKGAIRLLMRRDKXLKICANHYIXPMMELKPNAGSDRAWVWNXHADFADECPKPELLAIRFLNAENAQKFKXKFEECRKEIEEREKKAGSGKNDHAEKVAEKLEALSVKEEXKEDAEEKQ

SEQ ID NO: 22694 - protein, 200 aa, Homo sapiens
  MOD_RES (7)..(7): Selenocysteine
  MOD_RES (13)..(13): Selenocysteine
  MOD_RES (15)..(15): Selenocysteine
  MOD_RES (18)..(18): Selenocysteine
  MOD_RES (40)..(40): Selenocysteine
  MOD_RES (72)..(72): Selenocysteine
  MOD_RES (95)..(95): Selenocysteine
  MOD_RES (105)..(105): Selenocysteine
  MOD_RES (124)..(124): Selenocysteine
  MOD_RES (153)..(153): Selenocysteine
  MOD_RES (192)..(192): Selenocysteine
MAAAKDXHEDHDXSXENXDESNHDPQFEPIVSLPEQEIKXLEEDEEELFKMRAKLFRFASENDLPEWKERGXGDVKLLKHKEKGAIRLLMRRDKXLKICANHYIXPMMELKPNAGSDRAWVWNXHADFADECPKPELLAIRFLNAENAQKFKXKFEECRKEIEEREKKGSGKNDHAEKVAEKLEALSVKEEXKEDAEEKQ

SEQ ID NO: 22695 - protein, 163 aa, Homo sapiens
  MOD_RES (7)..(7): Selenocysteine
  MOD_RES (13)..(13): Selenocysteine
  MOD_RES (15)..(15): Selenocysteine
  MOD_RES (18)..(18): Selenocysteine
  MOD_RES (40)..(40): Selenocysteine
  MOD_RES (72)..(72): Selenocysteine
  MOD_RES (95)..(95): Selenocysteine
  MOD_RES (105)..(105): Selenocysteine
  MOD_RES (124)..(124): Selenocysteine
  MOD_RES (154)..(154): Selenocysteine
  MOD_RES (157)..(157): Selenocysteine
MAAAKDXHEDHDXSXENXDESNHDPQFEPIVSLPEQEIKXLEEDEEELFKMRAKLFRFASENDLPEWKERGXGDVKLLKHKEKGAIRLLMRRDKXLKICANHYIXPMMELKPNAGSDRAWVWNXHADFADECPKPELLAIRFLNAESEPRALGXCLXWGSPAW

SEQ ID NO: 22696 - protein, 73 aa, Homo sapiens
  MOD_RES (11)..(11): Selenocysteine
  MOD_RES (24)..(24): Selenocysteine
  MOD_RES (38)..(38): Selenocysteine
  MOD_RES (63)..(63): Selenocysteine
MGSALGRARRXLSGRPFQRAPCKXRRALSLSAALRNVXKAQGGCPKSLVLWGCRPKRPRKRRXSLKLAWRGHS

SEQ ID NO: 22697 - protein, 166 aa, Homo sapiens
  MOD_RES (11)..(11): Selenocysteine
  MOD_RES (24)..(24): Selenocysteine
  MOD_RES (38)..(38): Selenocysteine
  MOD_RES (63)..(63): Selenocysteine
  MOD_RES (72)..(72): Selenocysteine
  MOD_RES (84)..(84): Selenocysteine
  MOD_RES (90)..(90): Selenocysteine
  MOD_RES (92)..(92): Selenocysteine
  MOD_RES (95)..(95): Selenocysteine
  MOD_RES (117)..(117): Selenocysteine
  MOD_RES (149)..(149): Selenocysteine
MGSALGRARRXLSGRPFQRAPCKXRRALSLSAALRNVXKAQGGCPKSLVLWGCRPKRPRKRRXSLKLAWRGXFCSSSLKISEDXHEDHDXSXENXDESNHDPQFEPIVSLPEQEIKXLEEDEEELFKMRAKLFRFASENDLPEWKERGXGDVKLLKHKEKGAIRLL

SEQ ID NO: 22698 - protein, 278 aa, Homo sapiens
  MOD_RES (11)..(11): Selenocysteine
  MOD_RES (24)..(24): Selenocysteine
  MOD_RES (38)..(38): Selenocysteine
  MOD_RES (63)..(63): Selenocysteine
  MOD_RES (72)..(72): Selenocysteine
  MOD_RES (84)..(84): Selenocysteine
  MOD_RES (90)..(90): Selenocysteine
  MOD_RES (92)..(92): Selenocysteine
  MOD_RES (95)..(95): Selenocysteine
  MOD_RES (117)..(117): Selenocysteine
  MOD_RES (149)..(149): Selenocysteine
  MOD_RES (172)..(172): Selenocysteine
  MOD_RES (182)..(182): Selenocysteine
  MOD_RES (201)..(201): Selenocysteine
  MOD_RES (230)..(230): Selenocysteine
  MOD_RES (270)..(270): Selenocysteine
MGSALGRARRXLSGRPFQRAPCKXRRALSLSAALRNVXKAQGGCPKSLVLWGCRPKRPRKRRXSLKLAWRGXFCSSSLKISEDXHEDHDXSXENXDESNHDPQFEPIVSLPEQEIKXLEEDEEELFKMRAKLFRFASENDLPEWKERGXGDVKLLKHKEKGAIRLLMRRDKXLKICANHYIXPMMELKPNAGSDRAWVWNXHADFADECPKPELLAIRFLNAENAQKFKXKFEECRKEIEEREKKAGSGKNDHAEKVAEKLEALSVKEEXKEDAEEKQ

SEQ ID NO: 22699 - protein, 53 aa, Homo sapiens
  MOD_RES (22)..(22): Selenocysteine
  MOD_RES (45)..(45): Selenocysteine
MRAKLFRFASENDLPEWKERGXGDVKLLKHKEKGAIRLLMRRDKXLKICANHY

SEQ ID NO: 22700 - protein, 205 aa, Homo sapiens
  MOD_RES (22)..(22): Selenocysteine
  MOD_RES (45)..(45): Selenocysteine
  MOD_RES (55)..(55): Selenocysteine
  MOD_RES (74)..(74): Selenocysteine
  MOD_RES (103)..(103): Selenocysteine
  MOD_RES (133)..(133): Selenocysteine
  MOD_RES (137)..(137): Selenocysteine
  MOD_RES (170)..(170): Selenocysteine
  MOD_RES (179)..(179): Selenocysteine
MRAKLFRFASENDLPEWKERGXGDVKLLKHKEKGAIRLLMRRDKXLKICANHYIXPMMELKPNAGSDRAWVWNXHADFADECPKPELLAIRFLNAENAQKFKXKFEECRKEIEEREKKGDVVPWVGGLLCRLXLHLXILPGGCFFCLPDKHSRVLWPPHVSRVMQLPGDXGASWGALSXCQCCWPQSNWAGIGVRALPGAHQKVL

SEQ ID NO: 22701 - protein, 145 aa, Homo sapiens
  MOD_RES (22)..(22): Selenocysteine
  MOD_RES (45)..(45): Selenocysteine
  MOD_RES (55)..(55): Selenocysteine
  MOD_RES (74)..(74): Selenocysteine
  MOD_RES (103)..(103): Selenocysteine
  MOD_RES (142)..(142): Selenocysteine
MRAKLFRFASENDLPEWKERGXGDVKLLKHKEKGAIRLLMRRDKXLKICANHYIXPMMELKPNAGSDRAWVWNXHADFADECPKPELLAIRFLNAENAQKFKXKFEECRKEIEEREKKGSGKNDHAEKVAEKLEALSVKEEXKED

SEQ ID NO: 22702 - protein, 576 aa, Homo sapiens
  MOD_RES (16)..(16): Selenocysteine
  MOD_RES (22)..(22): Selenocysteine
  MOD_RES (25)..(25): Selenocysteine
  MOD_RES (55)..(56): Selenocysteine
  MOD_RES (65)..(65): Selenocysteine
  MOD_RES (115)..(115): Selenocysteine
  MOD_RES (143)..(143): Selenocysteine
  MOD_RES (158)..(158): Selenocysteine
  MOD_RES (178)..(178): Selenocysteine
  MOD_RES (183)..(183): Selenocysteine
  MOD_RES (244)..(244): Selenocysteine
  MOD_RES (249)..(250): Selenocysteine
  MOD_RES (253)..(253): Selenocysteine
  MOD_RES (260)..(260): Selenocysteine
  MOD_RES (289)..(289): Selenocysteine
  MOD_RES (338)..(338): Selenocysteine
  MOD_RES (362)..(362): Selenocysteine
  MOD_RES (364)..(364): Selenocysteine
  MOD_RES (381)..(381): Selenocysteine
  MOD_RES (396)..(396): Selenocysteine
  MOD_RES (403)..(403): Selenocysteine
  MOD_RES (409)..(409): Selenocysteine
  MOD_RES (414)..(414): Selenocysteine
  MOD_RES (435)..(435): Selenocysteine
  MOD_RES (437)..(437): Selenocysteine
  MOD_RES (447)..(447): Selenocysteine
  MOD_RES (456)..(456): Selenocysteine
  MOD_RES (482)..(482): Selenocysteine
  MOD_RES (486)..(486): Selenocysteine
  MOD_RES (501)..(501): Selenocysteine
  MOD_RES (508)..(508): Selenocysteine
  MOD_RES (510)..(510): Selenocysteine
  MOD_RES (512)..(512): Selenocysteine
  MOD_RES (535)..(535): Selenocysteine
  MOD_RES (559)..(559): Selenocysteine
  MOD_RES (568)..(568): Selenocysteine
  MOD_RES (572)..(572): Selenocysteine
MALHFQSLAELEVLCXHLYIGXDLXQRIEAEKALLELIDSPECLSKCQLLLEQGXXSYAQLLAAXCLSKLVSRVSPLPVEQRMDIRNYILNYVASQPKLAPFVIQALIQVIAKIXKLGWFEVQKDQFVFREIIADVKKFLQGXVEHCIIGVIILSELXQEMNLVDYSRPSAKHRKIAXSFRDXSLKDVLVLACSLLKEVFAKPLNLQDQCQQNLVMQVLKLVLNCLNFDFIGSSADESADDLCXVQIPXXWRXIFLEPEXLDLFFNLYHSLPPLLSQLALSCLVQFASXRRSLFNSPERAKYLGNLIKGVKRILENPQGLSDPGNYHEFCRFLARLKXNYQLGELVMVKEYPEVIRLIANFXIXSLQHWEFAPNSVHYLLXLWQRMVASVPFVKSXEPHLLDXYAPEIXKAFIXSRLDSVAIVVRDHLDDPLDDXAXVFQQLEQLCXVSRCEYEKXCALLVQLFDQNAQNYQKLLHPYSGVXVDIXIQEGRLAWLVYLVGXVVGGRLXYXSXDEHDAMDGELSCRVFQLISLMDXGLPRCCNEKIELAILWFLDQFRKXYVGDQLQRXSKKXDIFL

SEQ ID NO: 22703 - protein, 580 aa, Homo sapiens
  MOD_RES (16)..(16): Selenocysteine
  MOD_RES (22)..(22): Selenocysteine
  MOD_RES (25)..(25): Selenocysteine
  MOD_RES (55)..(56): Selenocysteine
  MOD_RES (65)..(65): Selenocysteine
  MOD_RES (115)..(115): Selenocysteine
  MOD_RES (143)..(143): Selenocysteine
  MOD_RES (158)..(158): Selenocysteine
  MOD_RES (178)..(178): Selenocysteine
  MOD_RES (183)..(183): Selenocysteine
  MOD_RES (244)..(244): Selenocysteine
  MOD_RES (249)..(250): Selenocysteine
  MOD_RES (253)..(253): Selenocysteine
  MOD_RES (260)..(260): Selenocysteine
  MOD_RES (289)..(289): Selenocysteine
  MOD_RES (338)..(338): Selenocysteine
  MOD_RES (362)..(362): Selenocysteine
  MOD_RES (364)..(364): Selenocysteine
  MOD_RES (381)..(381): Selenocysteine
  MOD_RES (396)..(396): Selenocysteine
  MOD_RES (403)..(403): Selenocysteine
  MOD_RES (409)..(409): Selenocysteine
  MOD_RES (414)..(414): Selenocysteine
  MOD_RES (435)..(435): Selenocysteine
  MOD_RES (437)..(437): Selenocysteine
  MOD_RES (447)..(447): Selenocysteine
  MOD_RES (456)..(456): Selenocysteine
  MOD_RES (482)..(482): Selenocysteine
  MOD_RES (486)..(486): Selenocysteine
  MOD_RES (501)..(501): Selenocysteine
  MOD_RES (508)..(508): Selenocysteine
  MOD_RES (510)..(510): Selenocysteine
  MOD_RES (512)..(512): Selenocysteine
  MOD_RES (535)..(535): Selenocysteine
  MOD_RES (559)..(559): Selenocysteine
  MOD_RES (568)..(568): Selenocysteine
MALHFQSLAELEVLCXHLYIGXDLXQRIEAEKALLELIDSPECLSKCQLLLEQGXXSYAQLLAAXCLSKLVSRVSPLPVEQRMDIRNYILNYVASQPKLAPFVIQALIQVIAKIXKLGWFEVQKDQFVFREIIADVKKFLQGXVEHCIIGVIILSELXQEMNLVDYSRPSAKHRKIAXSFRDXSLKDVLVLACSLLKEVFAKPLNLQDQCQQNLVMQVLKLVLNCLNFDFIGSSADESADDLCXVQIPXXWRXIFLEPEXLDLFFNLYHSLPPLLSQLALSCLVQFASXRRSLFNSPERAKYLGNLIKGVKRILENPQGLSDPGNYHEFCRFLARLKXNYQLGELVMVKEYPEVIRLIANFXIXSLQHWEFAPNSVHYLLXLWQRMVASVPFVKSXEPHLLDXYAPEIXKAFIXSRLDSVAIVVRDHLDDPLDDXAXVFQQLEQLCXVSRCEYEKXCALLVQLFDQNAQNYQKLLHPYSGVXVDIXIQEGRLAWLVYLVGXVVGGRLXYXSXDEHDAMDGELSCRVFQLISLMDXGLPRCCNEKIELAILWFLDQFRKXYVGDQLQRXSKEVAGDCILLN

SEQ ID NO: 22704 - protein, 1088 aa, Homo sapiens
  MOD_RES (16)..(16): Selenocysteine
  MOD_RES (22)..(22): Selenocysteine
  MOD_RES (25)..(25): Selenocysteine
  MOD_RES (55)..(56): Selenocysteine
  MOD_RES (65)..(65): Selenocysteine
  MOD_RES (115)..(115): Selenocysteine
  MOD_RES (143)..(143): Selenocysteine
  MOD_RES (158)..(158): Selenocysteine
  MOD_RES (178)..(178): Selenocysteine
  MOD_RES (183)..(183): Selenocysteine
  MOD_RES (244)..(244): Selenocysteine
  MOD_RES (249)..(250): Selenocysteine
  MOD_RES (253)..(253): Selenocysteine
  MOD_RES (260)..(260): Selenocysteine
  MOD_RES (289)..(289): Selenocysteine
  MOD_RES (338)..(338): Selenocysteine
  MOD_RES (362)..(362): Selenocysteine
  MOD_RES (364)..(364): Selenocysteine
  MOD_RES (381)..(381): Selenocysteine
  MOD_RES (396)..(396): Selenocysteine
  MOD_RES (403)..(403): Selenocysteine
  MOD_RES (409)..(409): Selenocysteine
  MOD_RES (414)..(414): Selenocysteine
  MOD_RES (435)..(435): Selenocysteine
  MOD_RES (437)..(437): Selenocysteine
  MOD_RES (447)..(447): Selenocysteine
  MOD_RES (456)..(456): Selenocysteine
  MOD_RES (482)..(482): Selenocysteine
  MOD_RES (486)..(486): Selenocysteine
  MOD_RES (501)..(501): Selenocysteine
  MOD_RES (508)..(508): Selenocysteine
  MOD_RES (510)..(510): Selenocysteine
  MOD_RES (512)..(512): Selenocysteine
  MOD_RES (535)..(535): Selenocysteine
  MOD_RES (559)..(559): Selenocysteine
  MOD_RES (568)..(568): Selenocysteine
  MOD_RES (582)..(582): Selenocysteine
  MOD_RES (590)..(590): Selenocysteine
  MOD_RES (593)..(593): Selenocysteine
  MOD_RES (597)..(597): Selenocysteine
  MOD_RES (612)..(612): Selenocysteine
  MOD_RES (643)..(643): Selenocysteine
  MOD_RES (665)..(666): Selenocysteine
  MOD_RES (669)..(669): Selenocysteine
  MOD_RES (672)..(672): Selenocysteine
  MOD_RES (694)..(694): Selenocysteine
  MOD_RES (699)..(699): Selenocysteine
  MOD_RES (733)..(733): Selenocysteine
  MOD_RES (735)..(735): Selenocysteine
  MOD_RES (738)..(738): Selenocysteine
  MOD_RES (747)..(747): Selenocysteine
  MOD_RES (764)..(764): Selenocysteine
  MOD_RES (766)..(767): Selenocysteine
  MOD_RES (806)..(806): Selenocysteine
  MOD_RES (896)..(896): Selenocysteine
  MOD_RES (916)..(916): Selenocysteine
  MOD_RES (923)..(924): Selenocysteine
  MOD_RES (927)..(927): Selenocysteine
  MOD_RES (935)..(935): Selenocysteine
  MOD_RES (942)..(942): Selenocysteine
  MOD_RES (962)..(962): Selenocysteine
  MOD_RES (989)..(989): Selenocysteine
  MOD_RES (1059)..(1059): Selenocysteine
  MOD_RES (1079)..(1079): Selenocysteine
MALHFQSLAELEVLCXHLYIGXDLXQRIEAEKALLELIDSPECLSKCQLLLEQGXXSYAQLLAAXCLSKLVSRVSPLPVEQRMDIRNYILNYVASQPKLAPFVIQALIQVIAKIXKLGWFEVQKDQFVFREIIADVKKFLQGXVEHCIIGVIILSELXQEMNLVDYSRPSAKHRKIAXSFRDXSLKDVLVLACSLLKEVFAKPLNLQDQCQQNLVMQVLKLVLNCLNFDFIGSSADESADDLCXVQIPXXWRXIFLEPEXLDLFFNLYHSLPPLLSQLALSCLVQFASXRRSLFNSPERAKYLGNLIKGVKRILENPQGLSDPGNYHEFCRFLARLKXNYQLGELVMVKEYPEVIRLIANFXIXSLQHWEFAPNSVHYLLXLWQRMVASVPFVKSXEPHLLDXYAPEIXKAFIXSRLDSVAIVVRDHLDDPLDDXAXVFQQLEQLCXVSRCEYEKXCALLVQLFDQNAQNYQKLLHPYSGVXVDIXIQEGRLAWLVYLVGXVVGGRLXYXSXDEHDAMDGELSCRVFQLISLMDXGLPRCCNEKIELAILWFLDQFRKXYVGDQLQRXSKVYARMSEVLGIXDDNHVLEXFMXKIVXNLKYWGRYEPVISRXLQFLNDLSVGYILLKKLVKIDAVKFMLKNHXSEHFPFLGISDNHSLSDFRCRXXFYXALXRLLMVDLGEDEDEFENFMLPLXVAFEXVLQIFNNNFKQEDVKRMLIGLARDLRGIAFALNXKXSYXMLFDWMYPXYLPLLQNAVERWYGEPXCXXPILKLMAELMQNRSQRLNFDVSSPNGILLFREASKMVCXYGNQILSLGSLSKDQIYPMKLKGISICYSALKSALCGNYVSFGVFKLYGDNHFDNVLQAFVKMLLSVSHSDLLQYRKLSQSYYPLLECLXQDHMSFIINLEPPVLMYVLXSISEGLXXLDXVVSSSCCXSLDYIVXYLFKHIAKEGKKPLRCREAXQAGQRLLHFMQQNPDVLQQMMSVLMNXIVFEDCRNQWSVSRPLLGLILLNEKYFSELRASLINSQPLPKQEVLAQCFRNLMEGVEQNLSVKNRDRFXQNLSVFRRDVAEALRSDGNXEPCSLDMMS

SEQ ID NO: 22705 - protein, 38 aa, Homo sapiens
  MOD_RES (33)..(33): Selenocysteine
MDIRNYILNYVASQPKLAPFVIQALIQVIAKIXKLGWF

SEQ ID NO: 22706 - protein, 518 aa, Homo sapiens
  MOD_RES (12)..(12): Selenocysteine
  MOD_RES (20)..(20): Selenocysteine
  MOD_RES (23)..(23): Selenocysteine
  MOD_RES (27)..(27): Selenocysteine
  MOD_RES (42)..(42): Selenocysteine
  MOD_RES (73)..(73): Selenocysteine
  MOD_RES (95)..(96): Selenocysteine
  MOD_RES (99)..(99): Selenocysteine
  MOD_RES (102)..(102): Selenocysteine
  MOD_RES (124)..(124): Selenocysteine
  MOD_RES (129)..(129): Selenocysteine
  MOD_RES (163)..(163): Selenocysteine
  MOD_RES (165)..(165): Selenocysteine
  MOD_RES (168)..(168): Selenocysteine
  MOD_RES (177)..(177): Selenocysteine
  MOD_RES (194)..(194): Selenocysteine
  MOD_RES (196)..(197): Selenocysteine
  MOD_RES (236)..(236): Selenocysteine
  MOD_RES (326)..(326): Selenocysteine
  MOD_RES (346)..(346): Selenocysteine
  MOD_RES (353)..(354): Selenocysteine
  MOD_RES (357)..(357): Selenocysteine
  MOD_RES (365)..(365): Selenocysteine
  MOD_RES (372)..(372): Selenocysteine
  MOD_RES (392)..(392): Selenocysteine
  MOD_RES (419)..(419): Selenocysteine
  MOD_RES (489)..(489): Selenocysteine
  MOD_RES (509)..(509): Selenocysteine
VYARMSEVLGIXDDNHVLEXFMXKIVXNLKYWGRYEPVISRXLQFLNDLSVGYPFHSRCVQIDAVKFMLKNHXSEHFPFLGISDNHSLSDFRCRXXFYXALXRLLMVDLGEDEDEFENFMLPLXVAFEXVLQIFNNNFKQEDVKRMLIGLARDLRGIAFALNXKXSYXMLFDWMYPXYLPLLQNAVERWYGEPXCXXPILKLMAELMQNRSQRLNFDVSSPNGILLFREASKMVCXYGNQILSLGSLSKDQIYPMKLKGISICYSALKSALCGNYVSFGVFKLYGDNHFDNVLQAFVKMLLSVSHSDLLQYRKLSQSYYPLLECLXQDHMSFIINLEPPVLMYVLXSISEGLXXLDXVVSSSCCXSLDYIVXYLFKHIAKEGKKPLRCREAXQAGQRLLHFMQQNPDVLQQMMSVLMNXIVFEDCRNQWSVSRPLLGLILLNEKYFSELRASLINSQPLPKQEVLAQCFRNLMEGVEQNLSVKNRDRFXQNLSVFRRDVAEALRSDGNXEPCSLDMMS

SEQ ID NO: 22707 - protein, 554 aa, Homo sapiens
  MOD_RES (1)..(1): Any amino acid
  MOD_RES (16)..(16): Selenocysteine
  MOD_RES (22)..(22): Selenocysteine
  MOD_RES (25)..(25): Selenocysteine
  MOD_RES (55)..(56): Selenocysteine
  MOD_RES (65)..(65): Selenocysteine
  MOD_RES (115)..(115): Selenocysteine
  MOD_RES (156)..(156): Selenocysteine
  MOD_RES (161)..(161): Selenocysteine
  MOD_RES (222)..(222): Selenocysteine
  MOD_RES (227)..(228): Selenocysteine
  MOD_RES (231)..(231): Selenocysteine
  MOD_RES (238)..(238): Selenocysteine
  MOD_RES (267)..(267): Selenocysteine
  MOD_RES (316)..(316): Selenocysteine
  MOD_RES (340)..(340): Selenocysteine
  MOD_RES (342)..(342): Selenocysteine
  MOD_RES (359)..(359): Selenocysteine
  MOD_RES (374)..(374): Selenocysteine
  MOD_RES (381)..(381): Selenocysteine
  MOD_RES (387)..(387): Selenocysteine
  MOD_RES (392)..(392): Selenocysteine
  MOD_RES (413)..(413): Selenocysteine
  MOD_RES (415)..(415): Selenocysteine
  MOD_RES (425)..(425): Selenocysteine
  MOD_RES (434)..(434): Selenocysteine
  MOD_RES (460)..(460): Selenocysteine
  MOD_RES (464)..(464): Selenocysteine
  MOD_RES (479)..(479): Selenocysteine
  MOD_RES (486)..(486): Selenocysteine
  MOD_RES (488)..(488): Selenocysteine
  MOD_RES (490)..(490): Selenocysteine
  MOD_RES (513)..(513): Selenocysteine
  MOD_RES (537)..(537): Selenocysteine
  MOD_RES (546)..(546): Selenocysteine
  MOD_RES (550)..(550): Selenocysteine
XALHFQSLAELEVLCXHLYIGXDLXQRIEAEKALLELIDSPECLSKCQLLLEQGXXSYAQLLAAXCLSKLVSRVSPLPVEQRMDIRNYILNYVASQPKLAPFVIQALIQVIAKIXKLGWFEVQKDQFVFREIIADVKKFLQVDYSRPSAKHRKIAXSFRDXSLKDVLVLACSLLKEVFAKPLNLQDQCQQNLVMQVLKLVLNCLNFDFIGSSADESADDLCXVQIPXXWRXIFLEPEXLDLFFNLYHSLPPLLSQLALSCLVQFASXRRSLFNSPERAKYLGNLIKGVKRILENPQGLSDPGNYHEFCRFLARLKXNYQLGELVMVKEYPEVIRLIANFXIXSLQHWEFAPNSVHYLLXLWQRMVASVPFVKSXEPHLLDXYAPEIXKAFIXSRLDSVAIVVRDHLDDPLDDXAXVFQQLEQLCXVSRCEYEKXCALLVQLFDQNAQNYQKLLHPYSGVXVDIXIQEGRLAWLVYLVGXVVGGRLXYXSXDEHDAMDGELSCRVFQLISLMDXGLPRCCNEKIELAILWFLDQFRKXYVGDQLQRXSKKXDIFL

SEQ ID NO: 22708 - protein, 175 aa, Homo sapiens
  MOD_RES (1)..(1): Any amino acid
  MOD_RES (27)..(27): Selenocysteine
  MOD_RES (32)..(33): Selenocysteine
  MOD_RES (36)..(36): Selenocysteine
  MOD_RES (43)..(43): Selenocysteine
  MOD_RES (72)..(72): Selenocysteine
  MOD_RES (115)..(115): Selenocysteine
  MOD_RES (130)..(130): Selenocysteine
  MOD_RES (137)..(137): Selenocysteine
  MOD_RES (143)..(143): Selenocysteine
  MOD_RES (148)..(148): Selenocysteine
  MOD_RES (169)..(169): Selenocysteine
  MOD_RES (171)..(171): Selenocysteine
XLKLVLNCLNFDFIGSSADESADDLCXVQIPXXWRXIFLEPEXLDLFFNLYHSLPPLLSQLALSCLVQFASXRRSLFNSPERAKYLGNLIKGVKRILENPQHWEFAPNSVHYLLXLWQRMVASVPFVKSXEPHLLDXYAPEIXKAFIXSRLDSVAIVVRDHLDDPLDDXAXVFQQ

SEQ ID NO: 22709 - protein, 47 aa, Homo sapiens
  MOD_RES (1)..(1): Any amino acid
  MOD_RES (6)..(6): Selenocysteine
  MOD_RES (30)..(30): Selenocysteine
  MOD_RES (39)..(39): Selenocysteine
  MOD_RES (43)..(43): Selenocysteine
XSLMDXGLPRCCNEKIELAILWFLDQFRKXYVGDQLQRXSKKXDIFL

SEQ ID NO: 22710 - protein, 37 aa, Homo sapiens
  MOD_RES (12)..(12): Selenocysteine
  MOD_RES (16)..(16): Selenocysteine
  MOD_RES (34)..(34): Selenocysteine
MASEDIAKLAEXLAKXQVAGGQLSFKGKSLKLNXAED

SEQ ID NO: 22711 - protein, 100 aa, Homo sapiens
  MOD_RES (12)..(12): Selenocysteine
  MOD_RES (16)..(16): Selenocysteine
  MOD_RES (34)..(34): Selenocysteine
  MOD_RES (60)..(60): Selenocysteine
  MOD_RES (89)..(89): Selenocysteine
  MOD_RES (94)..(94): Selenocysteine
MASEDIAKLAEXLAKXQVAGGQLSFKGKSLKLNXAEDAKDVIKEIEDFDSLEALRLEGNXVGVEAARVIAKALEKKSELKRCHWSDMFXGRLRXEIPPAL

SEQ ID NO: 22712 - protein, 133 aa, Homo sapiens
  MOD_RES (12)..(12): Selenocysteine
  MOD_RES (16)..(16): Selenocysteine
  MOD_RES (34)..(34): Selenocysteine
  MOD_RES (60)..(60): Selenocysteine
  MOD_RES (89)..(89): Selenocysteine
  MOD_RES (94)..(94): Selenocysteine
  MOD_RES (109)..(109): Selenocysteine
MASEDIAKLAEXLAKXQVAGGQLSFKGKSLKLNXAEDAKDVIKEIEDFDSLEALRLEGNXVGVEAARVIAKALEKKSELKRCHWSDMFXGRLRXEIPPALISLGEGLIXAGAQLVELDLSDNAFGPDGVQGFE

SEQ ID NO: 22713 - protein, 587 aa, Homo sapiens
  MOD_RES (12)..(12): Selenocysteine
  MOD_RES (16)..(16): Selenocysteine
  MOD_RES (34)..(34): Selenocysteine
  MOD_RES (60)..(60): Selenocysteine
  MOD_RES (89)..(89): Selenocysteine
  MOD_RES (94)..(94): Selenocysteine
  MOD_RES (109)..(109): Selenocysteine
  MOD_RES (143)..(143): Selenocysteine
  MOD_RES (167)..(167): Selenocysteine
  MOD_RES (198)..(198): Selenocysteine
  MOD_RES (209)..(209): Selenocysteine
  MOD_RES (226)..(226): Selenocysteine
  MOD_RES (247)..(247): Selenocysteine
  MOD_RES (249)..(249): Selenocysteine
  MOD_RES (259)..(259): Selenocysteine
  MOD_RES (262)..(262): Selenocysteine
  MOD_RES (332)..(332): Selenocysteine
  MOD_RES (409)..(409): Selenocysteine
  MOD_RES (419)..(419): Selenocysteine
  MOD_RES (436)..(436): Selenocysteine
  MOD_RES (461)..(461): Selenocysteine
  MOD_RES (463)..(463): Selenocysteine
  MOD_RES (485)..(485): Selenocysteine
  MOD_RES (511)..(511): Selenocysteine
  MOD_RES (514)..(514): Selenocysteine
  MOD_RES (564)..(564): Selenocysteine
  MOD_RES (583)..(583): Selenocysteine
MASEDIAKLAEXLAKXQVAGGQLSFKGKSLKLNXAEDAKDVIKEIEDFDSLEALRLEGNXVGVEAARVIAKALEKKSELKRCHWSDMFXGRLRXEIPPALISLGEGLIXAGAQLVELDLSDNAFGPDGVQGFEALLKSSACFXLQELKLNNCGMGIGGGKILAAALXECHRKSSAQGKPLALKVFVAGRNRLENDGAXALAEAFRVIGXLEEVHMPQNGINHPGIXALAQAFAVNPLLRVINLNDNXFXEKGAVAMAEXLKXLRQVEVINFGDCLVRSKGAVAIADAIRGGLPKLKELNLSFCEIKRDAALAVAEAMADKAELEKLDLNGNXLGEEGCEQLQEVLEGFNMAKVLASLSDDEDEEEEEEGEEEEEEAEEEEEEDEEEEEEEEEEEEEEPQQRGQGEKSAXPSRKILDPNXGEPAPVLSSPPPADVSXFLAFPSPEKLLRLGPKSSVLIAQQXDXSDPEKVVSAFLKVSSVFKDEAXVRMAVQDAVDALMQKAFNSSSFNSNXFLXRLLVHMGLLKSEDKVKAIANLYGPLMALNHMVQQDYFPKALAPLLLAFVXKPNSALESCSFARHSLLQXLYKV

SEQ ID NO: 22714 - protein, 253 aa, Homo sapiens
  MOD_RES (1)..(1): Any amino acid
  MOD_RES (30)..(30): Selenocysteine
  MOD_RES (35)..(35): Selenocysteine
  MOD_RES (50)..(50): Selenocysteine
  MOD_RES (84)..(84): Selenocysteine
  MOD_RES (105)..(105): Selenocysteine
  MOD_RES (122)..(122): Selenocysteine
  MOD_RES (143)..(143): Selenocysteine
  MOD_RES (145)..(145): Selenocysteine
  MOD_RES (155)..(155): Selenocysteine
  MOD_RES (158)..(158): Selenocysteine
  MOD_RES (228)..(228): Selenocysteine
XVGVEAARVIAKALEKKSELKRCHWSDMFXGRLRXEIPPALISLGEGLIXAGAQLVELDLSDNAFGPDGVQGFEALLKSSACFXLQELKLNNCGMGIGGGKVIGXLEEVHMPQNGINHPGIXALAQAFAVNPLLRVINLNDNXFXEKGAVAMAEXLKXLRQVEVINFGDCLVRSKGAVAIADAIRGGLPKLKELNLSFCEIKRDAALAVAEAMADKAELEKLDLNGNXLGEEGCEQLQEVLEGFNMAKVLASL

SEQ ID NO: 22715 - protein, 129 aa, Homo sapiens
  MOD_RES (20)..(20): Selenocysteine
  MOD_RES (35)..(35): Selenocysteine
  MOD_RES (58)..(58): Selenocysteine
  MOD_RES (61)..(61): Selenocysteine
  MOD_RES (65)..(65): Selenocysteine
  MOD_RES (85)..(85): Selenocysteine
  MOD_RES (89)..(89): Selenocysteine
  MOD_RES (106)..(106): Selenocysteine
MREYKLVVLGSGGVGKSALXVQFVQGIFVEKYDPXIEDSYRKQVEVDCQQCMLEILDXAGXEQFXAMRDLYMKNGQGFALVYSIXAQSXFNDLQDLREQILRVKDXEDVPMILVGNKCDLEDERVVGKE

SEQ ID NO: 22716 - protein, 184 aa, Homo sapiens
  MOD_RES (20)..(20): Selenocysteine
  MOD_RES (35)..(35): Selenocysteine
  MOD_RES (58)..(58): Selenocysteine
  MOD_RES (61)..(61): Selenocysteine
  MOD_RES (65)..(65): Selenocysteine
  MOD_RES (85)..(85): Selenocysteine
  MOD_RES (89)..(89): Selenocysteine
  MOD_RES (106)..(106): Selenocysteine
  MOD_RES (169)..(169): Selenocysteine
MREYKLVVLGSGGVGKSALXVQFVQGIFVEKYDPXIEDSYRKQVEVDCQQCMLEILDXAGXEQFXAMRDLYMKNGQGFALVYSIXAQSXFNDLQDLREQILRVKDXEDVPMILVGNKCDLEDERVVGKEQGQNLARQWCNCAFLESSAKSKINVNEIFYDLVRQINRKXPVEKKKPKKKSCLLL

SEQ ID NO: 22717 - protein, 122 aa, Homo sapiens
  MOD_RES (7)..(7): Selenocysteine
  MOD_RES (10)..(10): Selenocysteine
  MOD_RES (14)..(14): Selenocysteine
  MOD_RES (34)..(34): Selenocysteine
  MOD_RES (38)..(38): Selenocysteine
  MOD_RES (55)..(55): Selenocysteine
  MOD_RES (118)..(118): Selenocysteine
MLEILDXAGXEQFXAMRDLYMKNGQGFALVYSIXAQSXFNDLQDLREQILRVKDXDDVPMILVGNKCDLEDERVVGKEQGQNLARQWNNCAFLESSAKSKINVNEIFYDLVRQINRKXPVPG

SEQ ID NO: 22718 - protein, 103 aa, Homo sapiens
  MOD_RES (19)..(19): Selenocysteine
  MOD_RES (23)..(23): Selenocysteine
  MOD_RES (40)..(40): Selenocysteine
  MOD_RES (103)..(103): Selenocysteine
MRDLYMKNGQGFALVYSIXAQSXFNDLQDLREQILRVKDXDDVPMILVGNKCDLEDERVVGKEQGQNLARQWNNCAFLESSAKSKINVNEIFYDLVRQINRKX

SEQ ID NO: 22719 - protein, 118 aa, Homo sapiens
  MOD_RES (19)..(19): Selenocysteine
  MOD_RES (23)..(23): Selenocysteine
  MOD_RES (40)..(40): Selenocysteine
  MOD_RES (103)..(103): Selenocysteine
MRDLYMKNGQGFALVYSIXAQSXFNDLQDLREQILRVKDXDDVPMILVGNKCDLEDERVVGKEQGQNLARQWNNCAFLESSAKSKINVNEIFYDLVRQINRKXPVPGKARKKSSCQLL

SEQ ID NO: 22720 - protein, 11 aa, Homo sapiens
MREYKLVVLGS

SEQ ID NO: 22721 - protein, 142 aa, Homo sapiens
  MOD_RES (23)..(23): Selenocysteine
  MOD_RES (43)..(43): Selenocysteine
  MOD_RES (47)..(47): Selenocysteine
  MOD_RES (64)..(64): Selenocysteine
  MOD_RES (127)..(127): Selenocysteine
MREYKLVVLGSGGVGKSALEQFXAMRDLYMKNGQGFALVYSIXAQSXFNDLQDLREQILRVKDXDDVPMILVGNKCDLEDERVVGKEQGQNLARQWNNCAFLESSAKSKINVNEIFYDLVRQINRKXPVPGKARKKSSCQLL

SEQ ID NO: 22722 - protein, 32 aa, Homo sapiens
  MOD_RES (20)..(20): Selenocysteine
MREYKLVVLGSGGVGKSALXVQFVQGIFVEKY

SEQ ID NO: 22723 - protein, 165 aa, Homo sapiens
  MOD_RES (20)..(20): Selenocysteine
  MOD_RES (35)..(35): Selenocysteine
  MOD_RES (46)..(46): Selenocysteine
  MOD_RES (66)..(66): Selenocysteine
  MOD_RES (70)..(70): Selenocysteine
  MOD_RES (87)..(87): Selenocysteine
  MOD_RES (150)..(150): Selenocysteine
MREYKLVVLGSGGVGKSALXVQFVQGIFVEKYDPXIEDSYRKEQFXAMRDLYMKNGQGFALVYSIXAQSXFNDLQDLREQILRVKDXDDVPMILVGNKCDLEDERVVGKEQGQNLARQWNNCAFLESSAKSKINVNEIFYDLVRQINRKXPVPGKARKKSSCQLL

SEQ ID NO: 22724 - protein, 48 aa, Homo sapiens
  MOD_RES (20)..(20): Selenocysteine
  MOD_RES (35)..(35): Selenocysteine
MREYKLVVLGSGGVGKSALXVQFVQGIFVEKYDPXIEDSYRKQVEVDA

SEQ ID NO: 22725 - protein, 53 aa, Homo sapiens
  MOD_RES (20)..(20): Selenocysteine
  MOD_RES (35)..(35): Selenocysteine
MREYKLVVLGSGGVGKSALXVQFVQGIFVEKYDPXIEDSYRKQVEVDAQQCML

SEQ ID NO: 22726 - protein, 85 aa, Homo sapiens
  MOD_RES (20)..(20): Selenocysteine
  MOD_RES (35)..(35): Selenocysteine
  MOD_RES (58)..(58): Selenocysteine
  MOD_RES (61)..(61): Selenocysteine
  MOD_RES (65)..(65): Selenocysteine
  MOD_RES (85)..(85): Selenocysteine
MREYKLVVLGSGGVGKSALXVQFVQGIFVEKYDPXIEDSYRKQVEVDAQQCMLEILDXAGXEQFXAMRDLYMKNGQGFALVYSIX

SEQ ID NO: 22727 - protein, 87 aa, Homo sapiens
  MOD_RES (20)..(20): Selenocysteine
  MOD_RES (35)..(35): Selenocysteine
  MOD_RES (58)..(58): Selenocysteine
  MOD_RES (61)..(61): Selenocysteine
  MOD_RES (65)..(65): Selenocysteine
  MOD_RES (85)..(85): Selenocysteine
MREYKLVVLGSGGVGKSALXVQFVQGIFVEKYDPXIEDSYRKQVEVDAQQCMLEILDXAGXEQFXAMRDLYMKNGQGFALVYSIXAQ

SEQ ID NO: 22728 - protein, 93 aa, Homo sapiens
  MOD_RES (20)..(20): Selenocysteine
  MOD_RES (35)..(35): Selenocysteine
  MOD_RES (58)..(58): Selenocysteine
  MOD_RES (61)..(61): Selenocysteine
  MOD_RES (65)..(65): Selenocysteine
  MOD_RES (85)..(85): Selenocysteine
  MOD_RES (89)..(89): Selenocysteine
MREYKLVVLGSGGVGKSALXVQFVQGIFVEKYDPXIEDSYRKQVEVDAQQCMLEILDXAGXEQFXAMRDLYMKNGQGFALVYSIXAQSXFNDL

SEQ ID NO: 22729 - protein, 98 aa, Homo sapiens
  MOD_RES (20)..(20): Selenocysteine
  MOD_RES (35)..(35): Selenocysteine
  MOD_RES (58)..(58): Selenocysteine
  MOD_RES (61)..(61): Selenocysteine
  MOD_RES (65)..(65): Selenocysteine
  MOD_RES (85)..(85): Selenocysteine
  MOD_RES (89)..(89): Selenocysteine
MREYKLVVLGSGGVGKSALXVQFVQGIFVEKYDPXIEDSYRKQVEVDAQQCMLEILDXAGXEQFXAMRDLYMKNGQGFALVYSIXAQSXFNDLQDLRE

SEQ ID NO: 22730 - protein, 101 aa, Homo sapiens
  MOD_RES (20)..(20): Selenocysteine
  MOD_RES (35)..(35): Selenocysteine
  MOD_RES (58)..(58): Selenocysteine
  MOD_RES (61)..(61): Selenocysteine
  MOD_RES (65)..(65): Selenocysteine
  MOD_RES (85)..(85): Selenocysteine
  MOD_RES (89)..(89): Selenocysteine
MREYKLVVLGSGGVGKSALXVQFVQGIFVEKYDPXIEDSYRKQVEVDAQQCMLEILDXAGXEQFXAMRDLYMKNGQGFALVYSIXAQSXFNDLQDLREQIL

SEQ ID NO: 22731 - protein, 136 aa, Homo sapiens
  MOD_RES (20)..(20): Selenocysteine
  MOD_RES (35)..(35): Selenocysteine
  MOD_RES (58)..(58): Selenocysteine
  MOD_RES (61)..(61): Selenocysteine
  MOD_RES (65)..(65): Selenocysteine
  MOD_RES (85)..(85): Selenocysteine
  MOD_RES (89)..(89): Selenocysteine
  MOD_RES (106)..(106): Selenocysteine
  MOD_RES (121)..(121): Selenocysteine
MREYKLVVLGSGGVGKSALXVQFVQGIFVEKYDPXIEDSYRKQVEVDAQQCMLEILDXAGXEQFXAMRDLYMKNGQGFALVYSIXAQSXFNDLQDLREQILRVKDXDDIFYDLVRQINRKXPVPGKARKKSSCQLL

SEQ ID NO: 22732 - protein, 122 aa, Homo sapiens
  MOD_RES (20)..(20): Selenocysteine
  MOD_RES (35)..(35): Selenocysteine
  MOD_RES (58)..(58): Selenocysteine
  MOD_RES (61)..(61): Selenocysteine
  MOD_RES (65)..(65): Selenocysteine
  MOD_RES (85)..(85): Selenocysteine
  MOD_RES (89)..(89): Selenocysteine
  MOD_RES (106)..(106): Selenocysteine
MREYKLVVLGSGGVGKSALXVQFVQGIFVEKYDPXIEDSYRKQVEVDAQQCMLEILDXAGXEQFXAMRDLYMKNGQGFALVYSIXAQSXFNDLQDLREQILRVKDXDDVPMILVGNKCDLED

SEQ ID NO: 22733 - protein, 127 aa, Homo sapiens
  MOD_RES (20)..(20): Selenocysteine
  MOD_RES (35)..(35): Selenocysteine
  MOD_RES (58)..(58): Selenocysteine
  MOD_RES (61)..(61): Selenocysteine
  MOD_RES (65)..(65): Selenocysteine
  MOD_RES (85)..(85): Selenocysteine
  MOD_RES (89)..(89): Selenocysteine
  MOD_RES (106)..(106): Selenocysteine
MREYKLVVLGSGGVGKSALXVQFVQGIFVEKYDPXIEDSYRKQVEVDAQQCMLEILDXAGXEQFXAMRDLYMKNGQGFALVYSIXAQSXFNDLQDLREQILRVKDXDDVPMILVGNKCDLEDERVVG

SEQ ID NO: 22734 - protein, 139 aa, Homo sapiens
  MOD_RES (20)..(20): Selenocysteine
  MOD_RES (35)..(35): Selenocysteine
  MOD_RES (58)..(58): Selenocysteine
  MOD_RES (61)..(61): Selenocysteine
  MOD_RES (65)..(65): Selenocysteine
  MOD_RES (85)..(85): Selenocysteine
  MOD_RES (89)..(89): Selenocysteine
  MOD_RES (106)..(106): Selenocysteine
MREYKLVVLGSGGVGKSALXVQFVQGIFVEKYDPXIEDSYRKQVEVDAQQCMLEILDXAGXEQFXAMRDLYMKNGQGFALVYSIXAQSXFNDLQDLREQILRVKDXDDVPMILVGNKCDLEDERVVGKEQGQNLARQWN

SEQ ID NO: 22735 - protein, 184 aa, Homo sapiens
  MOD_RES (20)..(20): Selenocysteine
  MOD_RES (35)..(35): Selenocysteine
  MOD_RES (58)..(58): Selenocysteine
  MOD_RES (61)..(61): Selenocysteine
  MOD_RES (65)..(65): Selenocysteine
  MOD_RES (85)..(85): Selenocysteine
  MOD_RES (89)..(89): Selenocysteine
  MOD_RES (106)..(106): Selenocysteine
  MOD_RES (169)..(169): Selenocysteine
MREYKLVVLGSGGVGKSALXVQFVQGIFVEKYDPXIEDSYRKQVEVDAQQCMLEILDXAGXEQFXAMRDLYMKNGQGFALVYSIXAQSXFNDLQDLREQILRVKDXDDVPMILVGNKCDLEDERVVGKEQGQNLARQWNNCAFLESSAKSKINVNEIFYDLVRQINRKXPVPGKARKKSSCQLL

SEQ ID NO: 22736 - protein, 157 aa, Homo sapiens
  MOD_RES (20)..(20): Selenocysteine
  MOD_RES (35)..(35): Selenocysteine
  MOD_RES (58)..(58): Selenocysteine
  MOD_RES (61)..(61): Selenocysteine
  MOD_RES (65)..(65): Selenocysteine
  MOD_RES (85)..(85): Selenocysteine
  MOD_RES (89)..(89): Selenocysteine
  MOD_RES (106)..(106): Selenocysteine
MREYKLVVLGSGGVGKSALXVQFVQGIFVEKYDPXIEDSYRKQVEVDAQQCMLEILDXAGXEQFXAMRDLYMKNGQGFALVYSIXAQSXFNDLQDLREQILRVKDXDDVPMILVGNKCDLEDERVVGKEQGQNLARQWNNCAFLESSAKSKINVNEV

SEQ ID NO: 22737 - protein, 179 aa, Homo sapiens
  MOD_RES (20)..(20): Selenocysteine
  MOD_RES (35)..(35): Selenocysteine
  MOD_RES (58)..(58): Selenocysteine
  MOD_RES (61)..(61): Selenocysteine
  MOD_RES (65)..(65): Selenocysteine
  MOD_RES (85)..(85): Selenocysteine
  MOD_RES (89)..(89): Selenocysteine
  MOD_RES (106)..(106): Selenocysteine
MREYKLVVLGSGGVGKSALXVQFVQGIFVEKYDPXIEDSYRKQVEVDAQQCMLEILDXAGXEQFXAMRDLYMKNGQGFALVYSIXAQSXFNDLQDLREQILRVKDXDDVPMILVGNKCDLEDERVVGKEQGQNLARQWNNCAFLESSAKSKINVNEVWSNILKMGLHLKYNIEDEWKMS

SEQ ID NO: 22738 - protein, 137 aa, Homo sapiens
  MOD_RES (20)..(20): Selenocysteine
  MOD_RES (35)..(35): Selenocysteine
  MOD_RES (58)..(58): Selenocysteine
  MOD_RES (61)..(61): Selenocysteine
  MOD_RES (122)..(122): Selenocysteine
MREYKLVVLGSGGVGKSALXVQFVQGIFVEKYDPXIEDSYRKQVEVDAQQCMLEILDXAGXVPMILVGNKCDLEDERVVGKEQGQNLARQWNNCAFLESSAKSKINVNEIFYDLVRQINRKXPVPGKARKKSSCQLL

SEQ ID NO: 22739 - protein, 694 aa, Homo sapiens
  MOD_RES (27)..(27): Selenocysteine
  MOD_RES (54)..(54): Selenocysteine
  MOD_RES (90)..(90): Selenocysteine
  MOD_RES (95)..(95): Selenocysteine
  MOD_RES (100)..(100): Selenocysteine
  MOD_RES (107)..(108): Selenocysteine
  MOD_RES (117)..(117): Selenocysteine
  MOD_RES (164)..(164): Selenocysteine
  MOD_RES (168)..(168): Selenocysteine
  MOD_RES (179)..(179): Selenocysteine
  MOD_RES (214)..(214): Selenocysteine
  MOD_RES (236)..(236): Selenocysteine
  MOD_RES (244)..(244): Selenocysteine
  MOD_RES (277)..(277): Selenocysteine
  MOD_RES (281)..(281): Selenocysteine
  MOD_RES (283)..(283): Selenocysteine
  MOD_RES (301)..(301): Selenocysteine
  MOD_RES (306)..(306): Selenocysteine
  MOD_RES (333)..(333): Selenocysteine
  MOD_RES (368)..(368): Selenocysteine
  MOD_RES (398)..(398): Selenocysteine
  MOD_RES (420)..(420): Selenocysteine
  MOD_RES (427)..(427): Selenocysteine
  MOD_RES (485)..(485): Selenocysteine
  MOD_RES (488)..(488): Selenocysteine
  MOD_RES (517)..(517): Selenocysteine
  MOD_RES (553)..(553): Selenocysteine
  MOD_RES (570)..(570): Selenocysteine
  MOD_RES (578)..(579): Selenocysteine
  MOD_RES (585)..(585): Selenocysteine
  MOD_RES (613)..(613): Selenocysteine
  MOD_RES (621)..(621): Selenocysteine
  MOD_RES (631)..(631): Selenocysteine
  MOD_RES (642)..(642): Selenocysteine
  MOD_RES (650)..(651): Selenocysteine
MAQLRPAVPPGRPRRGSLPAGASWQNXDLFEMIEKMQGSRMDEQRCSFPPPLKXEEDYIPYPSVHEVLGREGPFPLILLPQFGGYWIEGXNHEIXSIPEXEPLQSPXXKVKLECNPXARIYRKHFLGKEHFNYYSLDAALGHLVFSLKYDVIGDQEHLRLLLRXKCRXYHDVIPISCLXEFPNVVQMAKLVCEDVNVDRFYPVLYPKASRLIVXFDEHVISNNFKFGVIYQKLGQXSEEELFSXNEESPAFVEFLEFLGQKVKLQDFKGFRGGLDVXHGQXGXESVYCNFRNKEIMFHVSXKLPYXEGDAQQLQRKRHIGNDIVAVVFQDENXPFVPDMIASNFLHAYVVVQAEGGGPDGPLYKVSVXARDDVPFFGPPLPDPAVFRKGPEFQEFLLXKLINAEYACYKAEKFAKLEERXRAALLEXLYEELHIHSQSMMGLGGDEDKMENGSGGGGFFESFKRVIRSRSQSMDAMGLSNKKPNXVSXSHSGSFAPNNPDLAKAAGISLIVPGKSPXRKKSGPFGSRRSSAIGIENIQEVQEKRESPPAGQKXPDSGHVSQEPKSENSSXQSSPEMPXXKNRAEXAAQRAEALKDFSRSSSSASSFASVVEEXEGVDGEDXGLESVSSSGXPHKRDSFIYSXWLEDSVSXXSGGSSPGPSRSPHPDAGKLGDPACPEIKIQLEASEQHMPQLGC

SEQ ID NO: 22740 - protein, 36 aa, Homo sapiens
  MOD_RES (23)..(23): Selenocysteine
MIEKMQGSRMDEQRCSFPPPLKXEEDYIPYPSVHEV

SEQ ID NO: 22741 - protein, 96 aa, Homo sapiens
  MOD_RES (23)..(23): Selenocysteine
  MOD_RES (59)..(59): Selenocysteine
  MOD_RES (64)..(64): Selenocysteine
  MOD_RES (69)..(69): Selenocysteine
  MOD_RES (76)..(77): Selenocysteine
  MOD_RES (86)..(86): Selenocysteine
MIEKMQGSRMDEQRCSFPPPLKXEEDYIPYPSVHEVLGREGPFPLILLPQFGGYWIEGXNHEIXSIPEXEPLQSPXXKVKLECNPXARIYRKHFLG

SEQ ID NO: 22742 - protein, 602 aa, Homo sapiens
  MOD_RES (23)..(23): Selenocysteine
  MOD_RES (59)..(59): Selenocysteine
  MOD_RES (64)..(64): Selenocysteine
  MOD_RES (69)..(69): Selenocysteine
  MOD_RES (76)..(77): Selenocysteine
  MOD_RES (86)..(86): Selenocysteine
  MOD_RES (133)..(133): Selenocysteine
  MOD_RES (137)..(137): Selenocysteine
  MOD_RES (148)..(148): Selenocysteine
  MOD_RES (183)..(183): Selenocysteine
  MOD_RES (205)..(205): Selenocysteine
  MOD_RES (213)..(213): Selenocysteine
  MOD_RES (246)..(246): Selenocysteine
  MOD_RES (250)..(250): Selenocysteine
  MOD_RES (252)..(252): Selenocysteine
  MOD_RES (270)..(270): Selenocysteine
  MOD_RES (275)..(275): Selenocysteine
  MOD_RES (302)..(302): Selenocysteine
  MOD_RES (337)..(337): Selenocysteine
  MOD_RES (367)..(367): Selenocysteine
  MOD_RES (389)..(389): Selenocysteine
  MOD_RES (396)..(396): Selenocysteine
  MOD_RES (454)..(454): Selenocysteine
  MOD_RES (457)..(457): Selenocysteine
  MOD_RES (486)..(486): Selenocysteine
  MOD_RES (522)..(522): Selenocysteine
  MOD_RES (539)..(539): Selenocysteine
  MOD_RES (547)..(548): Selenocysteine
  MOD_RES (554)..(554): Selenocysteine
  MOD_RES (582)..(582): Selenocysteine
  MOD_RES (590)..(590): Selenocysteine
MIEKMQGSRMDEQRCSFPPPLKXEEDYIPYPSVHEVLGREGPFPLILLPQFGGYWIEGXNHEIXSIPEXEPLQSPXXKVKLECNPXARIYRKHFLGKEHFNYYSLDAALGHLVFSLKYDVIGDQEHLRLLLRXKCRXYHDVIPISCLXEFPNVVQMAKLVCEDVNVDRFYPVLYPKASRLIVXFDEHVISNNFKFGVIYQKLGQXSEEELFSXNEESPAFVEFLEFLGQKVKLQDFKGFRGGLDVXHGQXGXESVYCNFRNKEIMFHVSXKLPYXEGDAQQLQRKRHIGNDIVAVVFQDENXPFVPDMIASNFLHAYVVVQAEGGGPDGPLYKVSVXARDDVPFFGPPLPDPAVFRKGPEFQEFLLXKLINAEYACYKAEKFAKLEERXRAALLEXLYEELHIHSQSMMGLGGDEDKMENGSGGGGFFESFKRVIRSRSQSMDAMGLSNKKPNXVSXSHSGSFAPNNPDLAKAAGISLIVPGKSPXRKKSGPFGSRRSSAIGIENIQEVQEKRESPPAGQKXPDSGHVSQEPKSENSSXQSSPEMPXXKNRAEXAAQRAEALKDFSRSSSSASSFASVVEEXEGVDGEDXGLHVAGGQCQHH

SEQ ID NO: 22743 - protein, 663 aa, Homo sapiens
  MOD_RES (23)..(23): Selenocysteine
  MOD_RES (59)..(59): Selenocysteine
  MOD_RES (64)..(64): Selenocysteine
  MOD_RES (69)..(69): Selenocysteine
  MOD_RES (76)..(77): Selenocysteine
  MOD_RES (86)..(86): Selenocysteine
  MOD_RES (133)..(133): Selenocysteine
  MOD_RES (137)..(137): Selenocysteine
  MOD_RES (148)..(148): Selenocysteine
  MOD_RES (183)..(183): Selenocysteine
  MOD_RES (205)..(205): Selenocysteine
  MOD_RES (213)..(213): Selenocysteine
  MOD_RES (246)..(246): Selenocysteine
  MOD_RES (250)..(250): Selenocysteine
  MOD_RES (252)..(252): Selenocysteine
  MOD_RES (270)..(270): Selenocysteine
  MOD_RES (275)..(275): Selenocysteine
  MOD_RES (302)..(302): Selenocysteine
  MOD_RES (337)..(337): Selenocysteine
  MOD_RES (367)..(367): Selenocysteine
  MOD_RES (389)..(389): Selenocysteine
  MOD_RES (396)..(396): Selenocysteine
  MOD_RES (454)..(454): Selenocysteine
  MOD_RES (457)..(457): Selenocysteine
  MOD_RES (486)..(486): Selenocysteine
  MOD_RES (522)..(522): Selenocysteine
  MOD_RES (539)..(539): Selenocysteine
  MOD_RES (547)..(548): Selenocysteine
  MOD_RES (554)..(554): Selenocysteine
  MOD_RES (582)..(582): Selenocysteine
  MOD_RES (590)..(590): Selenocysteine
  MOD_RES (600)..(600): Selenocysteine
  MOD_RES (611)..(611): Selenocysteine
  MOD_RES (619)..(620): Selenocysteine
MIEKMQGSRMDEQRCSFPPPLKXEEDYIPYPSVHEVLGREGPFPLILLPQFGGYWIEGXNHEIXSIPEXEPLQSPXXKVKLECNPXARIYRKHFLGKEHFNYYSLDAALGHLVFSLKYDVIGDQEHLRLLLRXKCRXYHDVIPISCLXEFPNVVQMAKLVCEDVNVDRFYPVLYPKASRLIVXFDEHVISNNFKFGVIYQKLGQXSEEELFSXNEESPAFVEFLEFLGQKVKLQDFKGFRGGLDVXHGQXGXESVYCNFRNKEIMFHVSXKLPYXEGDAQQLQRKRHIGNDIVAVVFQDENXPFVPDMIASNFLHAYVVVQAEGGGPDGPLYKVSVXARDDVPFFGPPLPDPAVFRKGPEFQEFLLXKLINAEYACYKAEKFAKLEERXRAALLEXLYEELHIHSQSMMGLGGDEDKMENGSGGGGFFESFKRVIRSRSQSMDAMGLSNKKPNXVSXSHSGSFAPNNPDLAKAAGISLIVPGKSPXRKKSGPFGSRRSSAIGIENIQEVQEKRESPPAGQKXPDSGHVSQEPKSENSSXQSSPEMPXXKNRAEXAAQRAEALKDFSRSSSSASSFASVVEEXEGVDGEDXGLESVSSSGXPHKRDSFIYSXWLEDSVSXXSGGSSPGPSRSPHPDAGKLGDPACPEIKIQLEASEQHMPQLGC

SEQ ID NO: 22744 - protein, 681 aa, Homo sapiens
  MOD_RES (23)..(23): Selenocysteine
  MOD_RES (59)..(59): Selenocysteine
  MOD_RES (64)..(64): Selenocysteine
  MOD_RES (69)..(69): Selenocysteine
  MOD_RES (76)..(77): Selenocysteine
  MOD_RES (86)..(86): Selenocysteine
  MOD_RES (133)..(133): Selenocysteine
  MOD_RES (137)..(137): Selenocysteine
  MOD_RES (148)..(148): Selenocysteine
  MOD_RES (183)..(183): Selenocysteine
  MOD_RES (205)..(205): Selenocysteine
  MOD_RES (213)..(213): Selenocysteine
  MOD_RES (246)..(246): Selenocysteine
  MOD_RES (250)..(250): Selenocysteine
  MOD_RES (252)..(252): Selenocysteine
  MOD_RES (270)..(270): Selenocysteine
  MOD_RES (275)..(275): Selenocysteine
  MOD_RES (302)..(302): Selenocysteine
  MOD_RES (337)..(337): Selenocysteine
  MOD_RES (367)..(367): Selenocysteine
  MOD_RES (389)..(389): Selenocysteine
  MOD_RES (396)..(396): Selenocysteine
  MOD_RES (454)..(454): Selenocysteine
  MOD_RES (457)..(457): Selenocysteine
  MOD_RES (499)..(499): Selenocysteine
  MOD_RES (512)..(512): Selenocysteine
  MOD_RES (548)..(548): Selenocysteine
  MOD_RES (565)..(565): Selenocysteine
  MOD_RES (573)..(574): Selenocysteine
  MOD_RES (580)..(580): Selenocysteine
  MOD_RES (608)..(608): Selenocysteine
  MOD_RES (616)..(616): Selenocysteine
  MOD_RES (626)..(626): Selenocysteine
  MOD_RES (637)..(637): Selenocysteine
  MOD_RES (645)..(646): Selenocysteine
MIEKMQGSRMDEQRCSFPPPLKXEEDYIPYPSVHEVLGREGPFPLILLPQFGGYWIEGXNHEIXSIPEXEPLQSPXXKVKLECNPXARIYRKHFLGKEHFNYYSLDAALGHLVFSLKYDVIGDQEHLRLLLRXKCRXYHDVIPISCLXEFPNVVQMAKLVCEDVNVDRFYPVLYPKASRLIVXFDEHVISNNFKFGVIYQKLGQXSEEELFSXNEESPAFVEFLEFLGQKVKLQDFKGFRGGLDVXHGQXGXESVYCNFRNKEIMFHVSXKLPYXEGDAQQLQRKRHIGNDIVAVVFQDENXPFVPDMIASNFLHAYVVVQAEGGGPDGPLYKVSVXARDDVPFFGPPLPDPAVFRKGPEFQEFLLXKLINAEYACYKAEKFAKLEERXRAALLEXLYEELHIHSQSMMGLGGDEDKMENGSGGGGFFESFKRVIRSRSQSMDAMGLSNKKPNXVSXSHSGSFAPNNPDLAKAAGISLLIPGKSASRFGRRGSAIGIGXVEESLIVPGKSPXRKKSGPFGSRRSSAIGIENIQEVQEKRESPPAGQKXPDSGHVSQEPKSENSSXQSSPEMPXXKNRAEXAAQRAEALKDFSRSSSSASSFASVVEEXEGVDGEDXGLESVSSSGXPHKRDSFIYSXWLEDSVSXXSGGSSPDAGKLGDPACPEIKIQLEASEQHMPQLGC

SEQ ID NO: 22745 - protein, 692 aa, Homo sapiens
  MOD_RES (23)..(23): Selenocysteine
  MOD_RES (59)..(59): Selenocysteine
  MOD_RES (64)..(64): Selenocysteine
  MOD_RES (69)..(69): Selenocysteine
  MOD_RES (76)..(77): Selenocysteine
  MOD_RES (86)..(86): Selenocysteine
  MOD_RES (133)..(133): Selenocysteine
  MOD_RES (137)..(137): Selenocysteine
  MOD_RES (148)..(148): Selenocysteine
  MOD_RES (183)..(183): Selenocysteine
  MOD_RES (205)..(205): Selenocysteine
  MOD_RES (213)..(213): Selenocysteine
  MOD_RES (246)..(246): Selenocysteine
  MOD_RES (250)..(250): Selenocysteine
  MOD_RES (252)..(252): Selenocysteine
  MOD_RES (270)..(270): Selenocysteine
  MOD_RES (275)..(275): Selenocysteine
  MOD_RES (302)..(302): Selenocysteine
  MOD_RES (337)..(337): Selenocysteine
  MOD_RES (367)..(367): Selenocysteine
  MOD_RES (389)..(389): Selenocysteine
  MOD_RES (396)..(396): Selenocysteine
  MOD_RES (454)..(454): Selenocysteine
  MOD_RES (457)..(457): Selenocysteine
  MOD_RES (499)..(499): Selenocysteine
  MOD_RES (554)..(554): Selenocysteine
  MOD_RES (571)..(571): Selenocysteine
  MOD_RES (607)..(607): Selenocysteine
  MOD_RES (624)..(624): Selenocysteine
  MOD_RES (632)..(633): Selenocysteine
  MOD_RES (639)..(639): Selenocysteine
  MOD_RES (684)..(684): Selenocysteine
MIEKMQGSRMDEQRCSFPPPLKXEEDYIPYPSVHEVLGREGPFPLILLPQFGGYWIEGXNHEIXSIPEXEPLQSPXXKVKLECNPXARIYRKHFLGKEHFNYYSLDAALGHLVFSLKYDVIGDQEHLRLLLRXKCRXYHDVIPISCLXEFPNVVQMAKLVCEDVNVDRFYPVLYPKASRLIVXFDEHVISNNFKFGVIYQKLGQXSEEELFSXNEESPAFVEFLEFLGQKVKLQDFKGFRGGLDVXHGQXGXESVYCNFRNKEIMFHVSXKLPYXEGDAQQLQRKRHIGNDIVAVVFQDENXPFVPDMIASNFLHAYVVVQAEGGGPDGPLYKVSVXARDDVPFFGPPLPDPAVFRKGPEFQEFLLXKLINAEYACYKAEKFAKLEERXRAALLEXLYEELHIHSQSMMGLGGDEDKMENGSGGGGFFESFKRVIRSRSQSMDAMGLSNKKPNXVSXSHSGSFAPNNPDLAKAAGISLLIPGKSASRFGRRGSAIGIGXVEEVVVRGAAGSGGCLHALFSARSQDGGHIGDVAPLPPGQAPGRAGWSGGSSDGXQHLLWGLSLIVPGKSPXRKKSGPFGSRRSSAIGIENIQEVQEKRESPPAGQKXPDSGHVSQEPKSENSSXQSSPEMPXXKNRAEXAAQRAEALKLPLLVQCQQLRQRGGGDGGCGRRGHRPGERVILRNXPQAGLLHL

SEQ ID NO: 22746 - protein, 748 aa, Homo sapiens
  MOD_RES (23)..(23): Selenocysteine
  MOD_RES (59)..(59): Selenocysteine
  MOD_RES (64)..(64): Selenocysteine
  MOD_RES (69)..(69): Selenocysteine
  MOD_RES (76)..(77): Selenocysteine
  MOD_RES (86)..(86): Selenocysteine
  MOD_RES (133)..(133): Selenocysteine
  MOD_RES (137)..(137): Selenocysteine
  MOD_RES (148)..(148): Selenocysteine
  MOD_RES (183)..(183): Selenocysteine
  MOD_RES (205)..(205): Selenocysteine
  MOD_RES (213)..(213): Selenocysteine
  MOD_RES (246)..(246): Selenocysteine
  MOD_RES (250)..(250): Selenocysteine
  MOD_RES (252)..(252): Selenocysteine
  MOD_RES (270)..(270): Selenocysteine
  MOD_RES (275)..(275): Selenocysteine
  MOD_RES (302)..(302): Selenocysteine
  MOD_RES (337)..(337): Selenocysteine
  MOD_RES (367)..(367): Selenocysteine
  MOD_RES (389)..(389): Selenocysteine
  MOD_RES (396)..(396): Selenocysteine
  MOD_RES (454)..(454): Selenocysteine
  MOD_RES (457)..(457): Selenocysteine
  MOD_RES (499)..(499): Selenocysteine
  MOD_RES (554)..(554): Selenocysteine
  MOD_RES (571)..(571): Selenocysteine
  MOD_RES (607)..(607): Selenocysteine
  MOD_RES (624)..(624): Selenocysteine
  MOD_RES (632)..(633): Selenocysteine
  MOD_RES (639)..(639): Selenocysteine
  MOD_RES (667)..(667): Selenocysteine
  MOD_RES (675)..(675): Selenocysteine
  MOD_RES (685)..(685): Selenocysteine
  MOD_RES (696)..(696): Selenocysteine
  MOD_RES (704)..(705): Selenocysteine
MIEKMQGSRMDEQRCSFPPPLKXEEDYIPYPSVHEVLGREGPFPLILLPQFGGYWIEGXNHEIXSIPEXEPLQSPXXKVKLECNPXARIYRKHFLGKEHFNYYSLDAALGHLVFSLKYDVIGDQEHLRLLLRXKCRXYHDVIPISCLXEFPNVVQMAKLVCEDVNVDRFYPVLYPKASRLIVXFDEHVISNNFKFGVIYQKLGQXSEEELFSXNEESPAFVEFLEFLGQKVKLQDFKGFRGGLDVXHGQXGXESVYCNFRNKEIMFHVSXKLPYXEGDAQQLQRKRHIGNDIVAVVFQDENXPFVPDMIASNFLHAYVVVQAEGGGPDGPLYKVSVXARDDVPFFGPPLPDPAVFRKGPEFQEFLLXKLINAEYACYKAEKFAKLEERXRAALLEXLYEELHIHSQSMMGLGGDEDKMENGSGGGGFFESFKRVIRSRSQSMDAMGLSNKKPNXVSXSHSGSFAPNNPDLAKAAGISLLIPGKSASRFGRRGSAIGIGXVEEVVVRGAAGSGGCLHALFSARSQDGGHIGDVAPLPPGQAPGRAGWSGGSSDGXQHLLWGLSLIVPGKSPXRKKSGPFGSRRSSAIGIENIQEVQEKRESPPAGQKXPDSGHVSQEPKSENSSXQSSPEMPXXKNRAEXAAQRAEALKDFSRSSSSASSFASVVEEXEGVDGEDXGLESVSSSGXPHKRDSFIYSXWLEDSVSXXSGGSSPGPSRSPHPDAGKLGDPACPEIKIQLEASEQHMPQLGC

SEQ ID NO: 22747 - protein, 727 aa, Homo sapiens
  MOD_RES (9)..(9): Selenocysteine
  MOD_RES (21)..(21): Selenocysteine
  MOD_RES (52)..(52): Selenocysteine
  MOD_RES (60)..(60): Selenocysteine
  MOD_RES (87)..(87): Selenocysteine
  MOD_RES (123)..(123): Selenocysteine
  MOD_RES (128)..(128): Selenocysteine
  MOD_RES (133)..(133): Selenocysteine
  MOD_RES (140)..(141): Selenocysteine
  MOD_RES (150)..(150): Selenocysteine
  MOD_RES (197)..(197): Selenocysteine
  MOD_RES (201)..(201): Selenocysteine
  MOD_RES (212)..(212): Selenocysteine
  MOD_RES (247)..(247): Selenocysteine
  MOD_RES (269)..(269): Selenocysteine
  MOD_RES (277)..(277): Selenocysteine
  MOD_RES (310)..(310): Selenocysteine
  MOD_RES (314)..(314): Selenocysteine
  MOD_RES (316)..(316): Selenocysteine
  MOD_RES (334)..(334): Selenocysteine
  MOD_RES (339)..(339): Selenocysteine
  MOD_RES (366)..(366): Selenocysteine
  MOD_RES (401)..(401): Selenocysteine
  MOD_RES (431)..(431): Selenocysteine
  MOD_RES (453)..(453): Selenocysteine
  MOD_RES (460)..(460): Selenocysteine
  MOD_RES (518)..(518): Selenocysteine
  MOD_RES (521)..(521): Selenocysteine
  MOD_RES (550)..(550): Selenocysteine
  MOD_RES (586)..(586): Selenocysteine
  MOD_RES (603)..(603): Selenocysteine
  MOD_RES (611)..(612): Selenocysteine
  MOD_RES (618)..(618): Selenocysteine
  MOD_RES (646)..(646): Selenocysteine
  MOD_RES (654)..(654): Selenocysteine
  MOD_RES (664)..(664): Selenocysteine
  MOD_RES (675)..(675): Selenocysteine
  MOD_RES (683)..(684): Selenocysteine
MSGRKRSFXFGAYGGVDKSFXSRRSVWRSDGQNQHFPQALDLSRVNLVPSYXPSLYPKNXDLFEMIEKMQGSRMDEQRCSFPPPLKXEEDYIPYPSVHEVLGREGPFPLILLPQFGGYWIEGXNHEIXSIPEXEPLQSPXXKVKLECNPXARIYRKHFLGKEHFNYYSLDAALGHLVFSLKYDVIGDQEHLRLLLRXKCRXYHDVIPISCLXEFPNVVQMAKLVCEDVNVDRFYPVLYPKASRLIVXFDEHVISNNFKFGVIYQKLGQXSEEELFSXNEESPAFVEFLEFLGQKVKLQDFKGFRGGLDVXHGQXGXESVYCNFRNKEIMFHVSXKLPYXEGDAQQLQRKRHIGNDIVAVVFQDENXPFVPDMIASNFLHAYVVVQAEGGGPDGPLYKVSVXARDDVPFFGPPLPDPAVFRKGPEFQEFLLXKLINAEYACYKAEKFAKLEERXRAALLEXLYEELHIHSQSMMGLGGDEDKMENGSGGGGFFESFKRVIRSRSQSMDAMGLSNKKPNXVSXSHSGSFAPNNPDLAKAAGISLIVPGKSPXRKKSGPFGSRRSSAIGIENIQEVQEKRESPPAGQKXPDSGHVSQEPKSENSSXQSSPEMPXXKNRAEXAAQRAEALKDFSRSSSSASSFASVVEEXEGVDGEDXGLESVSSSGXPHKRDSFIYSXWLEDSVSXXSGGSSPGPSRSPHPDAGKLGDPACPEIKIQLEASEQHMPQLGC

SEQ ID NO: 22748 - protein, 771 aa, Homo sapiens
  MOD_RES (30)..(30): Selenocysteine
  MOD_RES (32)..(32): Selenocysteine
  MOD_RES (60)..(60): Selenocysteine
  MOD_RES (79)..(79): Selenocysteine
  MOD_RES (90)..(90): Selenocysteine
  MOD_RES (94)..(94): Selenocysteine
  MOD_RES (163)..(163): Selenocysteine
  MOD_RES (165)..(165): Selenocysteine
  MOD_RES (184)..(184): Selenocysteine
  MOD_RES (213)..(213): Selenocysteine
  MOD_RES (245)..(245): Selenocysteine
  MOD_RES (300)..(300): Selenocysteine
  MOD_RES (313)..(313): Selenocysteine
  MOD_RES (338)..(338): Selenocysteine
  MOD_RES (340)..(340): Selenocysteine
  MOD_RES (354)..(354): Selenocysteine
  MOD_RES (358)..(358): Selenocysteine
  MOD_RES (365)..(366): Selenocysteine
  MOD_RES (378)..(378): Selenocysteine
  MOD_RES (383)..(383): Selenocysteine
  MOD_RES (410)..(410): Selenocysteine
  MOD_RES (432)..(432): Selenocysteine
  MOD_RES (435)..(435): Selenocysteine
  MOD_RES (437)..(437): Selenocysteine
  MOD_RES (445)..(445): Selenocysteine
  MOD_RES (452)..(452): Selenocysteine
  MOD_RES (475)..(475): Selenocysteine
  MOD_RES (478)..(478): Selenocysteine
  MOD_RES (497)..(497): Selenocysteine
  MOD_RES (513)..(513): Selenocysteine
  MOD_RES (551)..(551): Selenocysteine
  MOD_RES (580)..(580): Selenocysteine
  MOD_RES (582)..(583): Selenocysteine
  MOD_RES (592)..(592): Selenocysteine
  MOD_RES (613)..(613): Selenocysteine
  MOD_RES (628)..(628): Selenocysteine
  MOD_RES (631)..(631): Selenocysteine
  MOD_RES (634)..(634): Selenocysteine
  MOD_RES (648)..(648): Selenocysteine
  MOD_RES (682)..(682): Selenocysteine
  MOD_RES (688)..(688): Selenocysteine
  MOD_RES (707)..(708): Selenocysteine
  MOD_RES (734)..(734): Selenocysteine
  MOD_RES (743)..(743): Selenocysteine
MAGRRAPGEKRWQLVRWYVQEGRFRIEERXLXAFQWLYSPQQHRILSRADLESPSRIDKXMLASLKVKKQELANSSDAXLPDRPLSPPLXAPPXMKSSEFFEMLEKMQGIKLEEQKPGPQKNKDDYIPYPSIDEVVEKGGPYPQVILPQFGGYWIEDPENVGXPXSLGSSICEEEEEDNLSPNXFGYKLECKGEARAYRRHFLGKDHLNFYCXGSSLGNLILSVKCEEAEGIEYLRVILRSKLKXVHERIPLAGLSKLPSVPQIAKAFCDDAVGLRFNPVLYPKASQMIVSYDEHEVNNXFKFGVIYQKARQXLEEELFGNNEESPAFKEFLDLLGDXIXLQDFKGFRGGLDVXHGQXGVESVYXXFRDREIMFHVSXKLPFXDGDAQQLQRKRHIGNDIVAIIFQEENXPFVPDMIASNFLHAYIVVQVEXPGXEXPSYKVSVXAREDVPXFGPPLPSPPVFQKGPEFREFLLXKLXNAENACCKSDKFAKLEDRXRAALLDNLHDELHAHXQAMLGLGPEEDKFENGGHGGFLESFKRAIRVRSHSMEXMVGGQKKSHSGGIPGSLSGGISHNSMEVXKXXFSPPVVAAXVKNQSRSPIKRRSGLFPRLHXGSEGQGDSRARCDSXSSXPKXPDGGHSSQEIKSEXSSNPSSPEICPNKEKPFMKLKENGRAISRSSSSXSSVSSXAGEGEAMEEGDSGGSQPSXXSPFKQEVFVYSPSPSSESPSLGAAAXPIIMSRSPXDAKSRNSPRSNLKFRFDKLSHASSGAGH

SEQ ID NO: 22749 - protein, 715 aa, Homo sapiens
  MOD_RES (19)..(19): Selenocysteine
  MOD_RES (38)..(38): Selenocysteine
  MOD_RES (49)..(49): Selenocysteine
  MOD_RES (53)..(53): Selenocysteine
  MOD_RES (107)..(107): Selenocysteine
  MOD_RES (109)..(109): Selenocysteine
  MOD_RES (128)..(128): Selenocysteine
  MOD_RES (157)..(157): Selenocysteine
  MOD_RES (189)..(189): Selenocysteine
  MOD_RES (244)..(244): Selenocysteine
  MOD_RES (257)..(257): Selenocysteine
  MOD_RES (282)..(282): Selenocysteine
  MOD_RES (284)..(284): Selenocysteine
  MOD_RES (298)..(298): Selenocysteine
  MOD_RES (302)..(302): Selenocysteine
  MOD_RES (309)..(310): Selenocysteine
  MOD_RES (322)..(322): Selenocysteine
  MOD_RES (327)..(327): Selenocysteine
  MOD_RES (354)..(354): Selenocysteine
  MOD_RES (376)..(376): Selenocysteine
  MOD_RES (379)..(379): Selenocysteine
  MOD_RES (381)..(381): Selenocysteine
  MOD_RES (389)..(389): Selenocysteine
  MOD_RES (396)..(396): Selenocysteine
  MOD_RES (419)..(419): Selenocysteine
  MOD_RES (422)..(422): Selenocysteine
  MOD_RES (441)..(441): Selenocysteine
  MOD_RES (457)..(457): Selenocysteine
  MOD_RES (495)..(495): Selenocysteine
  MOD_RES (524)..(524): Selenocysteine
  MOD_RES (526)..(527): Selenocysteine
  MOD_RES (536)..(536): Selenocysteine
  MOD_RES (557)..(557): Selenocysteine
  MOD_RES (572)..(572): Selenocysteine
  MOD_RES (575)..(575): Selenocysteine
  MOD_RES (578)..(578): Selenocysteine
  MOD_RES (592)..(592): Selenocysteine
  MOD_RES (626)..(626): Selenocysteine
  MOD_RES (632)..(632): Selenocysteine
  MOD_RES (651)..(652): Selenocysteine
  MOD_RES (678)..(678): Selenocysteine
  MOD_RES (687)..(687): Selenocysteine
MFGRKRSVSFGGFGWIDKXMLASLKVKKQELANSSDAXLPDRPLSPPLXAPPXMKSSEFFEMLEKMQDDYIPYPSIDEVVEKGGPYPQVILPQFGGYWIEDPENVGXPXSLGSSICEEEEEDNLSPNXFGYKLECKGEARAYRRHFLGKDHLNFYCXGSSLGNLILSVKCEEAEGIEYLRVILRSKLKXVHERIPLAGLSKLPSVPQIAKAFCDDAVGLRFNPVLYPKASQMIVSYDEHEVNNXFKFGVIYQKARQXLEEELFGNNEESPAFKEFLDLLGDXIXLQDFKGFRGGLDVXHGQXGVESVYXXFRDREIMFHVSXKLPFXDGDAQQLQRKRHIGNDIVAIIFQEENXPFVPDMIASNFLHAYIVVQVEXPGXEXPSYKVSVXAREDVPXFGPPLPSPPVFQKGPEFREFLLXKLXNAENACCKSDKFAKLEDRXRAALLDNLHDELHAHXQAMLGLGPEEDKFENGGHGGFLESFKRAIRVRSHSMEXMVGGQKKSHSGGIPGSLSGGISHNSMEVXKXXFSPPVVAAXVKNQSRSPIKRRSGLFPRLHXGSEGQGDSRARCDSXSSXPKXPDGGHSSQEIKSEXSSNPSSPEICPNKEKPFMKLKENGRAISRSSSSXSSVSSXAGEGEAMEEGDSGGSQPSXXSPFKQEVFVYSPSPSSESPSLGAAAXPIIMSRSPXDAKSRNSPRSNLKFRFDKLSHASSGAGH

SEQ ID NO: 22750 - protein, 730 aa, Homo sapiens
  MOD_RES (19)..(19): Selenocysteine
  MOD_RES (38)..(38): Selenocysteine
  MOD_RES (49)..(49): Selenocysteine
  MOD_RES (53)..(53): Selenocysteine
  MOD_RES (122)..(122): Selenocysteine
  MOD_RES (124)..(124): Selenocysteine
  MOD_RES (143)..(143): Selenocysteine
  MOD_RES (172)..(172): Selenocysteine
  MOD_RES (204)..(204): Selenocysteine
  MOD_RES (259)..(259): Selenocysteine
  MOD_RES (272)..(272): Selenocysteine
  MOD_RES (297)..(297): Selenocysteine
  MOD_RES (299)..(299): Selenocysteine
  MOD_RES (313)..(313): Selenocysteine
  MOD_RES (317)..(317): Selenocysteine
  MOD_RES (324)..(325): Selenocysteine
  MOD_RES (337)..(337): Selenocysteine
  MOD_RES (342)..(342): Selenocysteine
  MOD_RES (369)..(369): Selenocysteine
  MOD_RES (391)..(391): Selenocysteine
  MOD_RES (394)..(394): Selenocysteine
  MOD_RES (396)..(396): Selenocysteine
  MOD_RES (404)..(404): Selenocysteine
  MOD_RES (411)..(411): Selenocysteine
  MOD_RES (434)..(434): Selenocysteine
  MOD_RES (437)..(437): Selenocysteine
  MOD_RES (456)..(456): Selenocysteine
  MOD_RES (472)..(472): Selenocysteine
  MOD_RES (510)..(510): Selenocysteine
  MOD_RES (539)..(539): Selenocysteine
  MOD_RES (541)..(542): Selenocysteine
  MOD_RES (551)..(551): Selenocysteine
  MOD_RES (572)..(572): Selenocysteine
  MOD_RES (587)..(587): Selenocysteine
  MOD_RES (590)..(590): Selenocysteine
  MOD_RES (593)..(593): Selenocysteine
  MOD_RES (607)..(607): Selenocysteine
  MOD_RES (641)..(641): Selenocysteine
  MOD_RES (647)..(647): Selenocysteine
  MOD_RES (666)..(667): Selenocysteine
  MOD_RES (693)..(693): Selenocysteine
  MOD_RES (702)..(702): Selenocysteine
MFGRKRSVSFGGFGWIDKXMLASLKVKKQELANSSDAXLPDRPLSPPLXAPPXMKSSEFFEMLEKMQGIKLEEQKPGPQKNKDDYIPYPSIDEVVEKGGPYPQVILPQFGGYWIEDPENVGXPXSLGSSICEEEEEDNLSPNXFGYKLECKGEARAYRRHFLGKDHLNFYCXGSSLGNLILSVKCEEAEGIEYLRVILRSKLKXVHERIPLAGLSKLPSVPQIAKAFCDDAVGLRFNPVLYPKASQMIVSYDEHEVNNXFKFGVIYQKARQXLEEELFGNNEESPAFKEFLDLLGDXIXLQDFKGFRGGLDVXHGQXGVESVYXXFRDREIMFHVSXKLPFXDGDAQQLQRKRHIGNDIVAIIFQEENXPFVPDMIASNFLHAYIVVQVEXPGXEXPSYKVSVXAREDVPXFGPPLPSPPVFQKGPEFREFLLXKLXNAENACCKSDKFAKLEDRXRAALLDNLHDELHAHXQAMLGLGPEEDKFENGGHGGFLESFKRAIRVRSHSMEXMVGGQKKSHSGGIPGSLSGGISHNSMEVXKXXFSPPVVAAXVKNQSRSPIKRRSGLFPRLHXGSEGQGDSRARCDSXSSXPKXPDGGHSSQEIKSEXSSNPSSPEICPNKEKPFMKLKENGRAISRSSSSXSSVSSXAGEGEAMEEGDSGGSQPSXXSPFKQEVFVYSPSPSSESPSLGAAAXPIIMSRSPXDAKSRNSPRSNLKFRFDKLSHASSGAGH

SEQ ID NO: 22751 - protein, 711 aa, Homo sapiens
  MOD_RES (19)..(19): Selenocysteine
  MOD_RES (30)..(30): Selenocysteine
  MOD_RES (34)..(34): Selenocysteine
  MOD_RES (103)..(103): Selenocysteine
  MOD_RES (105)..(105): Selenocysteine
  MOD_RES (124)..(124): Selenocysteine
  MOD_RES (153)..(153): Selenocysteine
  MOD_RES (185)..(185): Selenocysteine
  MOD_RES (240)..(240): Selenocysteine
  MOD_RES (253)..(253): Selenocysteine
  MOD_RES (278)..(278): Selenocysteine
  MOD_RES (280)..(280): Selenocysteine
  MOD_RES (294)..(294): Selenocysteine
  MOD_RES (298)..(298): Selenocysteine
  MOD_RES (305)..(306): Selenocysteine
  MOD_RES (318)..(318): Selenocysteine
  MOD_RES (323)..(323): Selenocysteine
  MOD_RES (350)..(350): Selenocysteine
  MOD_RES (372)..(372): Selenocysteine
  MOD_RES (375)..(375): Selenocysteine
  MOD_RES (377)..(377): Selenocysteine
  MOD_RES (385)..(385): Selenocysteine
  MOD_RES (392)..(392): Selenocysteine
  MOD_RES (415)..(415): Selenocysteine
  MOD_RES (418)..(418): Selenocysteine
  MOD_RES (437)..(437): Selenocysteine
  MOD_RES (453)..(453): Selenocysteine
  MOD_RES (491)..(491): Selenocysteine
  MOD_RES (520)..(520): Selenocysteine
  MOD_RES (522)..(523): Selenocysteine
  MOD_RES (532)..(532): Selenocysteine
  MOD_RES (553)..(553): Selenocysteine
  MOD_RES (568)..(568): Selenocysteine
  MOD_RES (571)..(571): Selenocysteine
  MOD_RES (574)..(574): Selenocysteine
  MOD_RES (588)..(588): Selenocysteine
  MOD_RES (622)..(622): Selenocysteine
  MOD_RES (628)..(628): Selenocysteine
  MOD_RES (647)..(648): Selenocysteine
  MOD_RES (674)..(674): Selenocysteine
  MOD_RES (683)..(683): Selenocysteine
MLASLKVKKQELANSSDAXLPDRPLSPPLXAPPXMKSSEFFEMLEKMQGIKLEEQKPGPQKNKDDYIPYPSIDEVVEKGGPYPQVILPQFGGYWIEDPENVGXPXSLGSSICEEEEEDNLSPNXFGYKLECKGEARAYRRHFLGKDHLNFYCXGSSLGNLILSVKCEEAEGIEYLRVILRSKLKXVHERIPLAGLSKLPSVPQIAKAFCDDAVGLRFNPVLYPKASQMIVSYDEHEVNNXFKFGVIYQKARQXLEEELFGNNEESPAFKEFLDLLGDXIXLQDFKGFRGGLDVXHGQXGVESVYXXFRDREIMFHVSXKLPFXDGDAQQLQRKRHIGNDIVAIIFQEENXPFVPDMIASNFLHAYIVVQVEXPGXEXPSYKVSVXAREDVPXFGPPLPSPPVFQKGPEFREFLLXKLXNAENACCKSDKFAKLEDRXRAALLDNLHDELHAHXQAMLGLGPEEDKFENGGHGGFLESFKRAIRVRSHSMEXMVGGQKKSHSGGIPGSLSGGISHNSMEVXKXXFSPPVVAAXVKNQSRSPIKRRSGLFPRLHXGSEGQGDSRARCDSXSSXPKXPDGGHSSQEIKSEXSSNPSSPEICPNKEKPFMKLKENGRAISRSSSSXSSVSSXAGEGEAMEEGDSGGSQPSXXSPFKQEVFVYSPSPSSESPSLGAAAXPIIMSRSPXDAKSRNSPRSNLKFRFDKLSHASSGAGH

SEQ ID NO: 22752 - protein, 158 aa, Homo sapiens
  MOD_RES (8)..(8): Selenocysteine
  MOD_RES (15)..(15): Selenocysteine
  MOD_RES (20)..(20): Selenocysteine
  MOD_RES (40)..(40): Selenocysteine
  MOD_RES (42)..(42): Selenocysteine
  MOD_RES (60)..(60): Selenocysteine
  MOD_RES (106)..(106): Selenocysteine
  MOD_RES (115)..(115): Selenocysteine
  MOD_RES (143)..(143): Selenocysteine
  MOD_RES (158)..(158): Selenocysteine
MADNLSDXLKKLKIXAVDKXEDSLEGCLDCLLQALAQNNXEXSEKIQASGILQLFASLLXPQSSCKAKVANIIAEVAKNDEGRSAVDQAGGAQIVIDHLRSLCSIXDPANEKLLXVFCGMLMNYSNENDSLQAQLINMGVIPXLVKLLGIHCQNAALX

SEQ ID NO: 22753 - protein, 607 aa, Homo sapiens
  MOD_RES (8)..(8): Selenocysteine
  MOD_RES (15)..(15): Selenocysteine
  MOD_RES (20)..(20): Selenocysteine
  MOD_RES (40)..(40): Selenocysteine
  MOD_RES (42)..(42): Selenocysteine
  MOD_RES (60)..(60): Selenocysteine
  MOD_RES (110)..(110): Selenocysteine
  MOD_RES (148)..(148): Selenocysteine
  MOD_RES (157)..(157): Selenocysteine
  MOD_RES (185)..(185): Selenocysteine
  MOD_RES (200)..(200): Selenocysteine
  MOD_RES (223)..(223): Selenocysteine
  MOD_RES (288)..(288): Selenocysteine
  MOD_RES (292)..(292): Selenocysteine
  MOD_RES (377)..(377): Selenocysteine
  MOD_RES (405)..(405): Selenocysteine
  MOD_RES (426)..(426): Selenocysteine
  MOD_RES (485)..(485): Selenocysteine
  MOD_RES (497)..(497): Selenocysteine
  MOD_RES (500)..(500): Selenocysteine
  MOD_RES (524)..(524): Selenocysteine
  MOD_RES (599)..(599): Selenocysteine
  MOD_RES (604)..(604): Selenocysteine
MADNLSDXLKKLKIXAVDKXEDSLEGCLDCLLQALAQNNXEXSEKIQASGILQLFASLLXPQSSCKAKVANIIAEVAKNEFMRIPCVDAGLISPLVQLLNSKDQEVLLQXGRALGNICYDSHEGRSAVDQAGGAQIVIDHLRSLCSIXDPANEKLLXVFCGMLMNYSNENDSLQAQLINMGVIPXLVKLLGIHCQNAALXEMCLVAFGNLAELESSKEQFASXNIAEELVKLFKKQIEHDKREMIFEVLAPLAENDAIKLQLVEAGLVECLLEIVQQKVDSDKEDDIXELKXGSDLMVLLLLGDESMQKLFEGGKGSVFQRVLSWIPSNNHQLQLAGALAIANFARNDANCIHMVDNGIVEKLMDLLDRHVEDGNVXVQHAALSALRNLAIPVINKAKMLSAGVXEAVLKFLKSEMPPVQFKLLGXLRMLIDAQEAAEQLGKNVKLVERLVEWCEAKDHAGVMGESNRLLSALIRHSKSKDVIKXIVQSGGIKHLVXMAXSEHVIMQNEALVALALIAALELGXAEKDLESAKLVQILHRLLADERSAPEIKYNSMVLICALMGSECLHKEVQDLAFLDVVSKLRSHENKSVAQQASLXEQRLXVES

SEQ ID NO: 22754 - protein, 608 aa, Homo sapiens
  MOD_RES (8)..(8): Selenocysteine
  MOD_RES (15)..(15): Selenocysteine
  MOD_RES (20)..(20): Selenocysteine
  MOD_RES (40)..(40): Selenocysteine
  MOD_RES (42)..(42): Selenocysteine
  MOD_RES (60)..(60): Selenocysteine
  MOD_RES (110)..(110): Selenocysteine
  MOD_RES (148)..(148): Selenocysteine
  MOD_RES (157)..(157): Selenocysteine
  MOD_RES (185)..(185): Selenocysteine
  MOD_RES (200)..(200): Selenocysteine
  MOD_RES (223)..(223): Selenocysteine
  MOD_RES (288)..(288): Selenocysteine
  MOD_RES (292)..(292): Selenocysteine
  MOD_RES (377)..(377): Selenocysteine
  MOD_RES (405)..(405): Selenocysteine
  MOD_RES (426)..(426): Selenocysteine
  MOD_RES (486)..(486): Selenocysteine
  MOD_RES (498)..(498): Selenocysteine
  MOD_RES (501)..(501): Selenocysteine
  MOD_RES (525)..(525): Selenocysteine
  MOD_RES (600)..(600): Selenocysteine
  MOD_RES (605)..(605): Selenocysteine
MADNLSDXLKKLKIXAVDKXEDSLEGCLDCLLQALAQNNXEXSEKIQASGILQLFASLLXPQSSCKAKVANIIAEVAKNEFMRIPCVDAGLISPLVQLLNSKDQEVLLQXGRALGNICYDSHEGRSAVDQAGGAQIVIDHLRSLCSIXDPANEKLLXVFCGMLMNYSNENDSLQAQLINMGVIPXLVKLLGIHCQNAALXEMCLVAFGNLAELESSKEQFASXNIAEELVKLFKKQIEHDKREMIFEVLAPLAENDAIKLQLVEAGLVECLLEIVQQKVDSDKEDDIXELKXGSDLMVLLLLGDESMQKLFEGGKGSVFQRVLSWIPSNNHQLQLAGALAIANFARNDANCIHMVDNGIVEKLMDLLDRHVEDGNVXVQHAALSALRNLAIPVINKAKMLSAGVXEAVLKFLKSEMPPVQFKLLGXLRMLIDAQAEAAEQLGKNVKLVERLVEWCEAKDHAGVMGESNRLLSALIRHSKSKDVIKXIVQSGGIKHLVXMAXSEHVIMQNEALVALALIAALELGXAEKDLESAKLVQILHRLLADERSAPEIKYNSMVLICALMGSECLHKEVQDLAFLDVVSKLRSHENKSVAQQASLXEQRLXVES

SEQ ID NO: 22755 - protein, 559 aa, Homo sapiens
  MOD_RES (8)..(8): Selenocysteine
  MOD_RES (15)..(15): Selenocysteine
  MOD_RES (20)..(20): Selenocysteine
  MOD_RES (40)..(40): Selenocysteine
  MOD_RES (42)..(42): Selenocysteine
  MOD_RES (60)..(60): Selenocysteine
  MOD_RES (110)..(110): Selenocysteine
  MOD_RES (136)..(136): Selenocysteine
  MOD_RES (151)..(151): Selenocysteine
  MOD_RES (174)..(174): Selenocysteine
  MOD_RES (239)..(239): Selenocysteine
  MOD_RES (243)..(243): Selenocysteine
  MOD_RES (328)..(328): Selenocysteine
  MOD_RES (356)..(356): Selenocysteine
  MOD_RES (377)..(377): Selenocysteine
  MOD_RES (437)..(437): Selenocysteine
  MOD_RES (449)..(449): Selenocysteine
  MOD_RES (452)..(452): Selenocysteine
  MOD_RES (476)..(476): Selenocysteine
  MOD_RES (551)..(551): Selenocysteine
  MOD_RES (556)..(556): Selenocysteine
MADNLSDXLKKLKIXAVDKXEDSLEGCLDCLLQALAQNNXEXSEKIQASGILQLFASLLXPQSSCKAKVANIIAEVAKNEFMRIPCVDAGLISPLVQLLNSKDQEVLLQXGRALGNICYDSHSLQAQLINMGVIPXLVKLLGIHCQNAALXEMCLVAFGNLAELESSKEQFASXNIAEELVKLFKKQIEHDKREMIFEVLAPLAENDAIKLQLVEAGLVECLLEIVQQKVDSDKEDDIXELKXGSDLMVLLLLGDESMQKLFEGGKGSVFQRVLSWIPSNNHQLQLAGALAIANFARNDANCIHMVDNGIVEKLMDLLDRHVEDGNVXVQHAALSALRNLAIPVINKAKMLSAGVXEAVLKFLKSEMPPVQFKLLGXLRMLIDAQAEAAEQLGKNVKLVERLVEWCEAKDHAGVMGESNRLLSALIRHSKSKDVIKXIVQSGGIKHLVXMAXSEHVIMQNEALVALALIAALELGXAEKDLESAKLVQILHRLLADERSAPEIKYNSMVLICALMGSECLHKEVQDLAFLDVVSKLRSHENKSVAQQASLXEQRLXVES

SEQ ID NO: 22756 - protein, 516 aa, Homo sapiens
  MOD_RES (8)..(8): Selenocysteine
  MOD_RES (15)..(15): Selenocysteine
  MOD_RES (20)..(20): Selenocysteine
  MOD_RES (40)..(40): Selenocysteine
  MOD_RES (42)..(42): Selenocysteine
  MOD_RES (60)..(60): Selenocysteine
  MOD_RES (110)..(110): Selenocysteine
  MOD_RES (131)..(131): Selenocysteine
  MOD_RES (196)..(196): Selenocysteine
  MOD_RES (200)..(200): Selenocysteine
  MOD_RES (285)..(285): Selenocysteine
  MOD_RES (313)..(313): Selenocysteine
  MOD_RES (334)..(334): Selenocysteine
  MOD_RES (394)..(394): Selenocysteine
  MOD_RES (406)..(406): Selenocysteine
  MOD_RES (409)..(409): Selenocysteine
  MOD_RES (433)..(433): Selenocysteine
  MOD_RES (508)..(508): Selenocysteine
  MOD_RES (513)..(513): Selenocysteine
MADNLSDXLKKLKIXAVDKXEDSLEGCLDCLLQALAQNNXEXSEKIQASGILQLFASLLXPQSSCKAKVANIIAEVAKNEFMRIPCVDAGLISPLVQLLNSKDQEVLLQXGRALGNICYDSQSSKEQFASXNIAEELVKLFKKQIEHDKREMIFEVLAPLAENDAIKLQLVEAGLVECLLEIVQQKVDSDKEDDIXELKXGSDLMVLLLLGDESMQKLFEGGKGSVFQRVLSWIPSNNHQLQLAGALAIANFARNDANCIHMVDNGIVEKLMDLLDRHVEDGNVXVQHAALSALRNLAIPVINKAKMLSAGVXEAVLKFLKSEMPPVQFKLLGXLRMLIDAQAEAAEQLGKNVKLVERLVEWCEAKDHAGVMGESNRLLSALIRHSKSKDVIKXIVQSGGIKHLVXMAXSEHVIMQNEALVALALIAALELGXAEKDLESAKLVQILHRLLADERSAPEIKYNSMVLICALMGSECLHKEVQDLAFLDVVSKLRSHENKSVAQQASLXEQRLXVES

SEQ ID NO: 22757 - protein, 39 aa, Homo sapiens
  MOD_RES (8)..(8): Selenocysteine
  MOD_RES (15)..(15): Selenocysteine
  MOD_RES (20)..(20): Selenocysteine
MADNLSDXLKKLKIXAVDKXEDSLEGCLDCLLQALAQNR

SEQ ID NO: 22758 - protein, 148 aa, Homo sapiens
  MOD_RES (7)..(7): Selenocysteine
  MOD_RES (14)..(14): Selenocysteine
  MOD_RES (19)..(19): Selenocysteine
  MOD_RES (68)..(68): Selenocysteine
  MOD_RES (106)..(106): Selenocysteine
  MOD_RES (115)..(115): Selenocysteine
  MOD_RES (143)..(143): Selenocysteine
MDNLSDXLKKLKIXAVDKXEDSLEGCLDCLLQALAQNKFMRIPCVDAGLISPLVQLLNSKDQEVLLQXGRALGNICYDSHEGRSAVDQAGGAQIVIDHLRSLCSIXDPANEKLLXVFCGMLMNYSNENDSLQAQLINMGVIPXLVKLL

SEQ ID NO: 22759 - protein, 122 aa, Homo sapiens
  MOD_RES (7)..(7): Selenocysteine
  MOD_RES (14)..(14): Selenocysteine
  MOD_RES (19)..(19): Selenocysteine
  MOD_RES (68)..(68): Selenocysteine
  MOD_RES (94)..(94): Selenocysteine
  MOD_RES (109)..(109): Selenocysteine
MDNLSDXLKKLKIXAVDKXEDSLEGCLDCLLQALAQNKFMRIPCVDAGLISPLVQLLNSKDQEVLLQXGRALGNICYDSHSLQAQLINMGVIPXLVKLLGIHCQNAALXEMCLVAFGNLAEL

SEQ ID NO: 22760 - protein, 158 aa, Homo sapiens
  MOD_RES (7)..(7): Selenocysteine
  MOD_RES (14)..(14): Selenocysteine
  MOD_RES (19)..(19): Selenocysteine
  MOD_RES (39)..(39): Selenocysteine
  MOD_RES (41)..(41): Selenocysteine
  MOD_RES (59)..(59): Selenocysteine
  MOD_RES (93)..(93): Selenocysteine
  MOD_RES (108)..(108): Selenocysteine
  MOD_RES (131)..(131): Selenocysteine
MDNLSDXLKKLKIXAVDKXEDSLEGCLDCLLQALAQNNXEXSEKIQASGILQLFASLLXPQSSCKAKVANIIAEVAKNDSLQAQLINMGVIPXLVKLLGIHCQNAALXEMCLVAFGNLAELESSKEQFASXNIAEELVKLFKKQIEHDKREMIFEVLA

SEQ ID NO: 22761 - protein, 607 aa, Homo sapiens
  MOD_RES (7)..(7): Selenocysteine
  MOD_RES (14)..(14): Selenocysteine
  MOD_RES (19)..(19): Selenocysteine
  MOD_RES (39)..(39): Selenocysteine
  MOD_RES (41)..(41): Selenocysteine
  MOD_RES (59)..(59): Selenocysteine
  MOD_RES (109)..(109): Selenocysteine
  MOD_RES (147)..(147): Selenocysteine
  MOD_RES (156)..(156): Selenocysteine
  MOD_RES (184)..(184): Selenocysteine
  MOD_RES (199)..(199): Selenocysteine
  MOD_RES (222)..(222): Selenocysteine
  MOD_RES (287)..(287): Selenocysteine
  MOD_RES (291)..(291): Selenocysteine
  MOD_RES (376)..(376): Selenocysteine
  MOD_RES (404)..(404): Selenocysteine
  MOD_RES (425)..(425): Selenocysteine
  MOD_RES (485)..(485): Selenocysteine
  MOD_RES (497)..(497): Selenocysteine
  MOD_RES (500)..(500): Selenocysteine
  MOD_RES (524)..(524): Selenocysteine
  MOD_RES (599)..(599): Selenocysteine
  MOD_RES (604)..(604): Selenocysteine
MDNLSDXLKKLKIXAVDKXEDSLEGCLDCLLQALAQNNXEXSEKIQASGILQLFASLLXPQSSCKAKVANIIAEVAKNEFMRIPCVDAGLISPLVQLLNSKDQEVLLQXGRALGNICYDSHEGRSAVDQAGGAQIVIDHLRSLCSIXDPANEKLLXVFCGMLMNYSNENDSLQAQLINMGVIPXLVKLLGIHCQNAALXEMCLVAFGNLAELESSKEQFASXNIAEELVKLFKKQIEHDKREMIFEVLAPLAENDAIKLQLVEAGLVECLLEIVQQKVDSDKEDDIXELKXGSDLMVLLLLGDESMQKLFEGGKGSVFQRVLSWIPSNNHQLQLAGALAIANFARNDANCIHMVDNGIVEKLMDLLDRHVEDGNVXVQHAALSALRNLAIPVINKAKMLSAGVXEAVLKFLKSEMPPVQFKLLGXLRMLIDAQAEAAEQLGKNVKLVERLVEWCEAKDHAGVMGESNRLLSALIRHSKSKDVIKXIVQSGGIKHLVXMAXSEHVIMQNEALVALALIAALELGXAEKDLESAKLVQILHRLLADERSAPEIKYNSMVLICALMGSECLHKEVQDLAFLDVVSKLRSHENKSVAQQASLXEQRLXVES

SEQ ID NO: 22762 - protein, 558 aa, Homo sapiens
  MOD_RES (7)..(7): Selenocysteine
  MOD_RES (14)..(14): Selenocysteine
  MOD_RES (19)..(19): Selenocysteine
  MOD_RES (39)..(39): Selenocysteine
  MOD_RES (41)..(41): Selenocysteine
  MOD_RES (59)..(59): Selenocysteine
  MOD_RES (109)..(109): Selenocysteine
  MOD_RES (135)..(135): Selenocysteine
  MOD_RES (150)..(150): Selenocysteine
  MOD_RES (173)..(173): Selenocysteine
  MOD_RES (238)..(238): Selenocysteine
  MOD_RES (242)..(242): Selenocysteine
  MOD_RES (327)..(327): Selenocysteine
  MOD_RES (355)..(355): Selenocysteine
  MOD_RES (376)..(376): Selenocysteine
  MOD_RES (436)..(436): Selenocysteine
  MOD_RES (448)..(448): Selenocysteine
  MOD_RES (451)..(451): Selenocysteine
  MOD_RES (475)..(475): Selenocysteine
  MOD_RES (550)..(550): Selenocysteine
  MOD_RES (555)..(555): Selenocysteine
MDNLSDXLKKLKIXAVDKXEDSLEGCLDCLLQALAQNNXEXSEKIQASGILQLFASLLXPQSSCKAKVANIIAEVAKNEFMRIPCVDAGLISPLVQLLNSKDQEVLLQXGRALGNICYDSHSLQAQLINMGVIPXLVKLLGIHCQNAALXEMCLVAFGNLAELESSKEQFASXNIAEELVKLFKKQIEHDKREMIFEVLAPLAENDAIKLQLVEAGLVECLLEIVQQKVDSDKEDDIXELKXGSDLMVLLLLGDESMQKLFEGGKGSVFQRVLSWIPSNNHQLQLAGALAIANFARNDANCIHMVDNGIVEKLMDLLDRHVEDGNVXVQHAALSALRNLAIPVINKAKMLSAGVXEAVLKFLKSEMPPVQFKLLGXLRMLIDAQAEAAEQLGKNVKLVERLVEWCEAKDHAGVMGESNRLLSALIRHSKSKDVIKXIVQSGGIKHLVXMAXSEHVIMQNEALVALALIAALELGXAEKDLESAKLVQILHRLLADERSAPEIKYNSMVLICALMGSECLHKEVQDLAFLDVVSKLRSHENKSVAQQASLXEQRLXVES

SEQ ID NO: 22763 - protein, 118 aa, Homo sapiens
  MOD_RES (7)..(7): Selenocysteine
  MOD_RES (14)..(14): Selenocysteine
  MOD_RES (19)..(19): Selenocysteine
  MOD_RES (39)..(39): Selenocysteine
  MOD_RES (41)..(41): Selenocysteine
  MOD_RES (59)..(59): Selenocysteine
  MOD_RES (95)..(95): Selenocysteine
  MOD_RES (112)..(113): Selenocysteine
MDNLSDXLKKLKIXAVDKXEDSLEGCLDCLLQALAQNNXEXSEKIQASGILQLFASLLXPQSSCKAKVANIIAEVAKNGEVYLKNFSAGNVFSFXSYLVYANSMCGCWIDFXXGAAAK

SEQ ID NO: 22764 - protein, 38 aa, Homo sapiens
  MOD_RES (7)..(7): Selenocysteine
  MOD_RES (14)..(14): Selenocysteine
  MOD_RES (19)..(19): Selenocysteine
MDNLSDXLKKLKIXAVDKXEDSLEGCLDCLLQALAQNR

SEQ ID NO: 22765 - protein, 253 aa, Homo sapiens
  MOD_RES (1)..(1): Any amino acid
  MOD_RES (8)..(8): Selenocysteine
  MOD_RES (36)..(36): Selenocysteine
  MOD_RES (51)..(51): Selenocysteine
  MOD_RES (97)..(97): Selenocysteine
  MOD_RES (101)..(101): Selenocysteine
  MOD_RES (186)..(186): Selenocysteine
  MOD_RES (214)..(214): Selenocysteine
  MOD_RES (235)..(235): Selenocysteine
XANEKLLXVFCGMLMNYSNENDSLQAQLINMGVIPXLVKLLGIHCQNAALXEMCLVAFGNLAELDAIKLQLVEAGLVECLLEIVQQKVDSDKEDDIXELKXGSDLMVLLLLGDESMQKLFEGGKGSVFQRVLSWIPSNNHQLQLAGALAIANFARNDANCIHMVDNGIVEKLMDLLDRHVEDGNVXVQHAALSALRNLAIPVINKAKMLSAGVXEAVLKFLKSEMPPVQFKLLGXLRMLIDAQAEAAEQLGKN

SEQ ID NO: 22766 - protein, 101 aa, Homo sapiens
  MOD_RES (1)..(1): Any amino acid
  MOD_RES (17)..(17): Selenocysteine
  MOD_RES (32)..(32): Selenocysteine
  MOD_RES (48)..(48): Selenocysteine
  MOD_RES (65)..(65): Selenocysteine
  MOD_RES (81)..(81): Selenocysteine
  MOD_RES (96)..(96): Selenocysteine
XNDSLQAQLINMGVIPXLVKLLGIHCQNAALXEMCLVAFGNLAELGCXGSVVPASASGEGLRKLXIMAEGEEGAGVSHGEXGSERERQRGSHRLLXRSHMN

SEQ ID NO: 22767 - protein, 108 aa, Homo sapiens
  MOD_RES (20)..(20): Selenocysteine
  MOD_RES (25)..(25): Selenocysteine
  MOD_RES (27)..(27): Selenocysteine
  MOD_RES (35)..(35): Selenocysteine
  MOD_RES (58)..(58): Selenocysteine
  MOD_RES (61)..(61): Selenocysteine
MREYKVVVLGSGGVGKSALXVQFVXGXFIEKYDPXIEDFYRKEIEVDSSPSVLEILDXAGXEQFASMRDLYIKNGQGFILVYSLVNQQSFQDIKPMRDQIIRVKRPML

SEQ ID NO: 22768 - protein, 183 aa, Homo sapiens
  MOD_RES (20)..(20): Selenocysteine
  MOD_RES (25)..(25): Selenocysteine
  MOD_RES (27)..(27): Selenocysteine
  MOD_RES (35)..(35): Selenocysteine
  MOD_RES (58)..(58): Selenocysteine
  MOD_RES (61)..(61): Selenocysteine
  MOD_RES (145)..(145): Selenocysteine
  MOD_RES (151)..(151): Selenocysteine
MREYKVVVLGSGGVGKSALXVQFVXGXFIEKYDPXIEDFYRKEIEVDSSPSVLEILDXAGXEQFASMRDLYIKNGQGFILVYSLVNQQSFQDIKPMRDQIIRVKRYEKVPVILVGNKVDLESEREVSSSEGRALAEEWGCPFMEXSAKSKXMVDELFAEIVRQMNYAAQPDKDDPCCSACNIQ

SEQ ID NO: 22769 - protein, 183 aa, Homo sapiens
  MOD_RES (20)..(20): Selenocysteine
  MOD_RES (25)..(25): Selenocysteine
  MOD_RES (35)..(35): Selenocysteine
  MOD_RES (58)..(58): Selenocysteine
  MOD_RES (61)..(61): Selenocysteine
  MOD_RES (145)..(145): Selenocysteine
MREYKVVVLGSGGVGKSALXVQFVXGSFIEKYDPXIEDFYRKEIEVDSSPSVLEILDXAGXEQFASMRDLYIKNGQGFILVYSLVNQQSFQDIKPMRDQIIRVKRYERVPMILVGNKVDLEGEREVSYGEGKALAEEWSCPFMEXSAKNKASVDELFAEIVRQMNYAAQPNGDEGCCSACVIL

SEQ ID NO: 22770 - protein, 117 aa, Homo sapiens
  MOD_RES (79)..(79): Selenocysteine
  MOD_RES (112)..(113): Selenocysteine
MRDLYIKNGQGFILVYSLVNQQSFQDIKPMRDQIVRVKRYEKVPLILVGNKVDLEPEREVMSSEGRALAQEWGCPFMEXSAKSKSMVDELFAEIVRQMNYSSLPEKQDQCCXXCVVQ

SEQ ID NO: 22771 - protein, 183 aa, Homo sapiens
  MOD_RES (20)..(20): Selenocysteine
  MOD_RES (25)..(25): Selenocysteine
  MOD_RES (27)..(27): Selenocysteine
  MOD_RES (35)..(35): Selenocysteine
  MOD_RES (58)..(58): Selenocysteine
  MOD_RES (61)..(61): Selenocysteine
  MOD_RES (145)..(145): Selenocysteine
  MOD_RES (178)..(179): Selenocysteine
MREYKVVVLGSGGVGKSALXVQFVXGXFIEKYDPXIEDFYRKEIEVDSSPSVLEILDXAGXEQFASMRDLYIKNGQGFILVYSLVNQQSFQDIKPMRDQIVRVKRYEKVPLILVGNKVDLEPEREVMSSEGRALAQEWGCPFMEXSAKSKSMVDELFAEIVRQMNYSSLPEKQDQCCXXCVVQ

SEQ ID NO: 22772 - protein, 1077 aa, Homo sapiens
  MOD_RES (3)..(3): Selenocysteine
  MOD_RES (14)..(14): Selenocysteine
  MOD_RES (29)..(29): Selenocysteine
  MOD_RES (53)..(53): Selenocysteine
  MOD_RES (77)..(77): Selenocysteine
  MOD_RES (109)..(109): Selenocysteine
  MOD_RES (186)..(187): Selenocysteine
  MOD_RES (206)..(206): Selenocysteine
  MOD_RES (216)..(216): Selenocysteine
  MOD_RES (237)..(237): Selenocysteine
  MOD_RES (247)..(248): Selenocysteine
  MOD_RES (254)..(254): Selenocysteine
  MOD_RES (261)..(261): Selenocysteine
  MOD_RES (298)..(298): Selenocysteine
  MOD_RES (310)..(310): Selenocysteine
  MOD_RES (378)..(378): Selenocysteine
  MOD_RES (382)..(382): Selenocysteine
  MOD_RES (407)..(407): Selenocysteine
  MOD_RES (450)..(450): Selenocysteine
  MOD_RES (452)..(452): Selenocysteine
  MOD_RES (468)..(468): Selenocysteine
  MOD_RES (496)..(496): Selenocysteine
  MOD_RES (529)..(529): Selenocysteine
  MOD_RES (534)..(534): Selenocysteine
  MOD_RES (572)..(572): Selenocysteine
  MOD_RES (681)..(681): Selenocysteine
  MOD_RES (705)..(705): Selenocysteine
  MOD_RES (707)..(707): Selenocysteine
  MOD_RES (721)..(722): Selenocysteine
  MOD_RES (725)..(725): Selenocysteine
  MOD_RES (749)..(749): Selenocysteine
  MOD_RES (758)..(758): Selenocysteine
  MOD_RES (775)..(775): Selenocysteine
  MOD_RES (819)..(819): Selenocysteine
  MOD_RES (835)..(835): Selenocysteine
  MOD_RES (849)..(849): Selenocysteine
  MOD_RES (880)..(880): Selenocysteine
  MOD_RES (883)..(883): Selenocysteine
  MOD_RES (950)..(950): Selenocysteine
  MOD_RES (959)..(959): Selenocysteine
  MOD_RES (993)..(993): Selenocysteine
  MOD_RES (1067)..(1067): Selenocysteine
  MOD_RES (1071)..(1071): Selenocysteine
  MOD_RES (1077)..(1077): Selenocysteine
MDXDSQRSHLSSFXMKLMDKFHSPKIKRXPSKKGKPAEVSVKIPEKPVNKEAXDRFLPEGYPLPLDLEQQAVEFMSXSAVASRSQRQKNLSWLEEKEKEVVSALRYFKXIVDKMAIDKKVLEMLPGSASKVLEAILPLVQNDPRIQHSSALSSCYSRVYQSLANLIRWSDQVMLEGVNSEDKEMVXXVKGVIKAVLDGVKELVRLXIEKQGRPSPXSPVKPSSPASKPDGPAELPLXDREVEILNKXXGMSQSXELLPDAXDEEVAPPKPPLPGIRVVDNSPPPALPPKKRQSAPSPXRVAVVAPMSRAXSGSSLPVGINRQDFDVDCYAQRRLSGGSHSYGGESPRLSPCSSIGKLSKSDEQLSSLDRDSGQCSRNXSCEXLDHYDPDYEFLQQDLSNADQIPQQXAWNLSPLPESLGESGSPFLGPPFQLPLGGHPQPDGPLAPGQQXDXPPALPEKKRRSAASQXADGSGCRVSYERHPSQYDNISGEDLQSXAPIPSVPYAPFAAILPFQHGGSSAPVEFVGDFXAPESXGDPEKPPPLPEKKNKHMLAYMQLLEDYSEPQPSMFYQXPQNEHIYQQKNKLLMEVYGFSDSFSGVDSVQELAPPPALPPKQRQLEPPAGKDGHPRDPSAVSGVPGKDSRDGSERAPKSPDALESAQSEEEVDELSLIDHNEIMSRLXLKQEGDDGPDVRGGSGDILLVHAXEXDRKDLVLYCEAFLXXYRXFISPEELIKKLQYRYEKFSPFADXFKKRVSKNXFFVLVRVVDELCLVELXEEILKLLMELVFRLVCNGELSLARVLRKNILDKVDQKKLLRCAXSSQPLAARGVAARPGXLHDFHSHEIAEQLXLLDAELFYKIEIPEVLLWAKEQNEEKSPNLXQFXEHFNNMSYWVRSIIMLQEKAQDRERLLLKFIKIMKHLRKLNNFNSYLAILSALDSAPIRRLEWQKQXSEGLAEYCXLIDSSSSFRAYRAALSEVEPPCIPYLGLILQDLXFVHLGNPDYIDGKVNFSKRWQQFNILDSMRCFQQAHYDMRRNDDIINFFNDFSDHLAEEALWELSLKIKPRNIXRRKXDREEKX

SEQ ID NO: 22773 - protein, 1095 aa, Homo sapiens
  MOD_RES (32)..(32): Selenocysteine
  MOD_RES (47)..(47): Selenocysteine
  MOD_RES (71)..(71): Selenocysteine
  MOD_RES (95)..(95): Selenocysteine
  MOD_RES (127)..(127): Selenocysteine
  MOD_RES (204)..(205): Selenocysteine
  MOD_RES (224)..(224): Selenocysteine
  MOD_RES (234)..(234): Selenocysteine
  MOD_RES (255)..(255): Selenocysteine
  MOD_RES (265)..(266): Selenocysteine
  MOD_RES (272)..(272): Selenocysteine
  MOD_RES (279)..(279): Selenocysteine
  MOD_RES (316)..(316): Selenocysteine
  MOD_RES (328)..(328): Selenocysteine
  MOD_RES (396)..(396): Selenocysteine
  MOD_RES (400)..(400): Selenocysteine
  MOD_RES (425)..(425): Selenocysteine
  MOD_RES (468)..(468): Selenocysteine
  MOD_RES (470)..(470): Selenocysteine
  MOD_RES (486)..(486): Selenocysteine
  MOD_RES (514)..(514): Selenocysteine
  MOD_RES (547)..(547): Selenocysteine
  MOD_RES (552)..(552): Selenocysteine
  MOD_RES (590)..(590): Selenocysteine
  MOD_RES (699)..(699): Selenocysteine
  MOD_RES (723)..(723): Selenocysteine
  MOD_RES (725)..(725): Selenocysteine
  MOD_RES (739)..(740): Selenocysteine
  MOD_RES (743)..(743): Selenocysteine
  MOD_RES (767)..(767): Selenocysteine
  MOD_RES (776)..(776): Selenocysteine
  MOD_RES (793)..(793): Selenocysteine
  MOD_RES (837)..(837): Selenocysteine
  MOD_RES (853)..(853): Selenocysteine
  MOD_RES (867)..(867): Selenocysteine
  MOD_RES (898)..(898): Selenocysteine
  MOD_RES (901)..(901): Selenocysteine
  MOD_RES (968)..(968): Selenocysteine
  MOD_RES (977)..(977): Selenocysteine
  MOD_RES (1011)..(1011): Selenocysteine
  MOD_RES (1085)..(1085): Selenocysteine
  MOD_RES (1089)..(1089): Selenocysteine
  MOD_RES (1095)..(1095): Selenocysteine
MGNAIEKQKPLKRSHLYPWKQDSQRSHLSSFXMKLMDKFHSPKIKRXPSKKGKPAEVSVKIPEKPVNKEAXDRFLPEGYPLPLDLEQQAVEFMSXSAVASRSQRQKNLSWLEEKEKEVVSALRYFKXIVDKMAIDKKVLEMLPGSASKVLEAILPLVQNDPRIQHSSALSSCYSRVYQSLANLIRWSDQVMLEGVNSEDKEMVXXVKGVIKAVLDGVKELVRLXIEKQGRPSPXSPVKPSSPASKPDGPAELPLXDREVEILNKXXGMSQSXELLPDAXDEEVAPPKPPLPGIRVVDNSPPPALPPKKRQSAPSPXRVAVVAPMSRAXSGSSLPVGINRQDFDVDCYAQRRLSGGSHSYGGESPRLSPCSSIGKLSKSDEQLSSLDRDSGQCSRNXSCEXLDHYDPDYEFLQQDLSNADQIPQQXAWNLSPLPESLGESGSPFLGPPFQLPLGGHPQPDGPLAPGQQXDXPPALPEKKRRSAASQXADGSGCRVSYERHPSQYDNISGEDLQSXAPIPSVPYAPFAAILPFQHGGSSAPVEFVGDFXAPESXGDPEKPPPLPEKKNKHMLAYMQLLEDYSEPQPSMFYQXPQNEHIYQQKNKLLMEVYGFSDSFSGVDSVQELAPPPALPPKQRQLEPPAGKDGHPRDPSAVSGVPGKDSRDGSERAPKSPDALESAQSEEEVDELSLIDHNEIMSRLXLKQEGDDGPDVRGGSGDILLVHAXEXDRKDLVLYCEAFLXXYRXFISPEELIKKLQYRYEKFSPFADXFKKRVSKNXFFVLVRVVDELCLVELXEEILKLLMELVFRLVCNGELSLARVLRKNILDKVDQKKLLRCAXSSQPLAARGVAARPGXLHDFHSHEIAEQLXLLDAELFYKIEIPEVLLWAKEQNEEKSPNLXQFXEHFNNMSYWVRSIIMLQEKAQDRERLLLKFIKIMKHLRKLNNFNSYLAILSALDSAPIRRLEWQKQXSEGLAEYCXLIDSSSSFRAYRAALSEVEPPCIPYLGLILQDLXFVHLGNPDYIDGKVNFSKRWQQFNILDSMRCFQQAHYDMRRNDDIINFFNDFSDHLAEEALWELSLKIKPRNIXRRKXDREEKX

SEQ ID NO: 22774 - protein, 1094 aa, Homo sapiens
  MOD_RES (31)..(31): Selenocysteine
  MOD_RES (46)..(46): Selenocysteine
  MOD_RES (70)..(70): Selenocysteine
  MOD_RES (94)..(94): Selenocysteine
  MOD_RES (126)..(126): Selenocysteine
  MOD_RES (203)..(204): Selenocysteine
  MOD_RES (223)..(223): Selenocysteine
  MOD_RES (233)..(233): Selenocysteine
  MOD_RES (254)..(254): Selenocysteine
  MOD_RES (264)..(265): Selenocysteine
  MOD_RES (271)..(271): Selenocysteine
  MOD_RES (278)..(278): Selenocysteine
  MOD_RES (315)..(315): Selenocysteine
  MOD_RES (327)..(327): Selenocysteine
  MOD_RES (395)..(395): Selenocysteine
  MOD_RES (399)..(399): Selenocysteine
  MOD_RES (424)..(424): Selenocysteine
  MOD_RES (467)..(467): Selenocysteine
  MOD_RES (469)..(469): Selenocysteine
  MOD_RES (485)..(485): Selenocysteine
  MOD_RES (513)..(513): Selenocysteine
  MOD_RES (546)..(546): Selenocysteine
  MOD_RES (551)..(551): Selenocysteine
  MOD_RES (589)..(589): Selenocysteine
  MOD_RES (698)..(698): Selenocysteine
  MOD_RES (722)..(722): Selenocysteine
  MOD_RES (724)..(724): Selenocysteine
  MOD_RES (738)..(739): Selenocysteine
  MOD_RES (742)..(742): Selenocysteine
  MOD_RES (766)..(766): Selenocysteine
  MOD_RES (775)..(775): Selenocysteine
  MOD_RES (792)..(792): Selenocysteine
  MOD_RES (836)..(836): Selenocysteine
  MOD_RES (852)..(852): Selenocysteine
  MOD_RES (866)..(866): Selenocysteine
  MOD_RES (897)..(897): Selenocysteine
  MOD_RES (900)..(900): Selenocysteine
  MOD_RES (967)..(967): Selenocysteine
  MOD_RES (976)..(976): Selenocysteine
  MOD_RES (1010)..(1010): Selenocysteine
  MOD_RES (1084)..(1084): Selenocysteine
  MOD_RES (1088)..(1088): Selenocysteine
  MOD_RES (1094)..(1094): Selenocysteine
MSGGLGLRRSPEMSGKIEKADSQRSHLSSFXMKLMDKFHSPKIKRXPSKKGKPAEVSVKIPEKPVNKEAXDRFLPEGYPLPLDLEQQAVEFMSXSAVASRSQRQKNLSWLEEKEKEVVSALRYFKXIVDKMAIDKKVLEMLPGSASKVLEAILPLVQNDPRIQHSSALSSCYSRVYQSLANLIRWSDQVMLEGVNSEDKEMVXXVKGVIKAVLDGVKELVRLXIEKQGRPSPXSPVKPSSPASKPDGPAELPLXDREVEILNKXXGMSQSXELLPDAXDEEVAPPKPPLPGIRVVDNSPPPALPPKKRQSAPSPXRVAVVAPMSRAXSGSSLPVGINRQDFDVDCYAQRRLSGGSHSYGGESPRLSPCSSIGKLSKSDEQLSSLDRDSGQCSRNXSCEXLDHYDPDYEFLQQDLSNADQIPQQXAWNLSPLPESLGESGSPFLGPPFQLPLGGHPQPDGPLAPGQQXDXPPALPEKKRRSAASQXADGSGCRVSYERHPSQYDNISGEDLQSXAPIPSVPYAPFAAILPFQHGGSSAPVEFVGDFXAPESXGDPEKPPPLPEKKNKHMLAYMQLLEDYSEPQPSMFYQXPQNEHIYQQKNKLLMEVYGFSDSFSGVDSVQELAPPPALPPKQRQLEPPAGKDGHPRDPSAVSGVPGKDSRDGSERAPKSPDALESAQSEEEVDELSLIDHNEIMSRLXLKQEGDDGPDVRGGSGDILLVHAXEXDRKDLVLYCEAFLXXYRXFISPEELIKKLQYRYEKFSPFADXFKKRVSKNXFFVLVRVVDELCLVELXEEILKLLMELVFRLVCNGELSLARVLRKNILDKVDQKKLLRCAXSSQPLAARGVAARPGXLHDFHSHEIAEQLXLLDAELFYKIEIPEVLLWAKEQNEEKSPNLXQFXEHFNNMSYWVRSIIMLQEKAQDRERLLLKFIKIMKHLRKLNNFNSYLAILSALDSAPIRRLEWQKQXSEGLAEYCXLIDSSSSFRAYRAALSEVEPPCIPYLGLILQDLXFVHLGNPDYIDGKVNFSKRWQQFNILDSMRCFQQAHYDMRRNDDIINFFNDFSDHLAEEALWELSLKIKPRNIXRRKXDREEKX

SEQ ID NO: 22775 - protein, 158 aa, Homo sapiens
  MOD_RES (31)..(31): Selenocysteine
  MOD_RES (46)..(46): Selenocysteine
  MOD_RES (88)..(88): Selenocysteine
MSGGLGLRRSPEMSGKIEKADSQRSHLSSFXMKLMDKFHSPKIKRXPSKKGKPAEVSVKIPEKPVNKNLSWLEEKEKEVVSALRYFKXIVDKMAIDKKVLEMLPGSASKVLEAILPLVQNDPRIQHSSALSSCYSRVYQSLANLIRWSDQVMLEGVNS

SEQ ID NO: 22776 - protein, 319 aa, Homo sapiens
  MOD_RES (1)..(1): Any amino acid
  MOD_RES (109)..(109): Selenocysteine
  MOD_RES (133)..(133): Selenocysteine
  MOD_RES (135)..(135): Selenocysteine
  MOD_RES (149)..(150): Selenocysteine
  MOD_RES (153)..(153): Selenocysteine
  MOD_RES (177)..(177): Selenocysteine
  MOD_RES (186)..(186): Selenocysteine
  MOD_RES (203)..(203): Selenocysteine
  MOD_RES (247)..(247): Selenocysteine
  MOD_RES (263)..(263): Selenocysteine
  MOD_RES (277)..(277): Selenocysteine
  MOD_RES (308)..(308): Selenocysteine
  MOD_RES (311)..(311): Selenocysteine
XLAPPPALPPKQRQLSENASEEAGEGEYVNLYSSGQSSEELAPSRGEPPAGKDGHPRDPSAVSGVPGKDSRDGSERAPKSPDALESAQSEEEVDELSLIDHNEIMSRLXLKQEGDDGPDVRGGSGDILLVHAXEXDRKDLVLYCEAFLXXYRXFISPEELIKKLQYRYEKFSPFADXFKKRVSKNXFFVLVRVVDELCLVELXEEILKLLMELVFRLVCNGELSLARVLRKNILDKVDQKKLLRCAXSSQPLAARGVAARPGXLHDFHSHEIAEQLXLLDAELFYKIEIPEVLLWAKEQNEEKSPNLXQFXEHFNNMSY

SEQ ID NO: 22777 - protein, 228 aa, Homo sapiens
  MOD_RES (1)..(1): Any amino acid
  MOD_RES (31)..(31): Selenocysteine
  MOD_RES (96)..(96): Selenocysteine
  MOD_RES (101)..(101): Selenocysteine
  MOD_RES (157)..(157): Selenocysteine
  MOD_RES (179)..(179): Selenocysteine
  MOD_RES (187)..(187): Selenocysteine
  MOD_RES (204)..(204): Selenocysteine
  MOD_RES (211)..(211): Selenocysteine
  MOD_RES (214)..(214): Selenocysteine
XLPEKKNKHMLAYMQLLEDYSEPQPSMFYQXPQNEHIYQQKNKLLMEVYGFSDSFSGVDSVQELAPPPALPPKQRQLQASCAASSFSSVSHCVQQXKVAFXPEDGSAAQGLSVSVSNSFLSRHGSLPVPSYKSVFRSYSQDFVPHHQASVPPFLPPXSSSSPHFPPAHQSQSSDLAVPXMAGPPPSXVDGPLSASQESSFHGNXVCLPSEXSFXDSEPPAGKDGHPRD

SEQ ID NO: 22778 - protein, 279 aa, Homo sapiens
  MOD_RES (16)..(16): Selenocysteine
  MOD_RES (47)..(47): Selenocysteine
  MOD_RES (67)..(67): Selenocysteine
  MOD_RES (149)..(149): Selenocysteine
  MOD_RES (153)..(153): Selenocysteine
  MOD_RES (170)..(170): Selenocysteine
  MOD_RES (173)..(173): Selenocysteine
  MOD_RES (182)..(182): Selenocysteine
  MOD_RES (187)..(187): Selenocysteine
  MOD_RES (195)..(195): Selenocysteine
  MOD_RES (207)..(207): Selenocysteine
  MOD_RES (222)..(222): Selenocysteine
  MOD_RES (237)..(237): Selenocysteine
  MOD_RES (275)..(275): Selenocysteine
DNSFRQAVMKNPPERXPQDLEIVYSYLHGMEALSNLREHQLRLMCEXVRYERHEANEVLYYPDDIGXCWYILLSGSVFIKESMFLPRSSFGKRSAGSFRRGCECIVLEPSEMIVVDYMDENEEYFQRQASHRQSRRRFRKINQKGERQXIIDXVDPYPMGKPPLPRGYHXECXKSQLPADFXKLHLXDSLHPQVXHVSSSHSGCSIXSDSGSSSLSDIYQAXESEAGDMDLSGLPEXAVDSEDDDDEEDIERASDPLMSRDIVRDCLEKDPIDRXDDDI

SEQ ID NO: 22779 - protein, 155 aa, Homo sapiens
  MOD_RES (24)..(24): Selenocysteine
  MOD_RES (29)..(29): Selenocysteine
  MOD_RES (37)..(37): Selenocysteine
  MOD_RES (49)..(49): Selenocysteine
  MOD_RES (64)..(64): Selenocysteine
  MOD_RES (79)..(79): Selenocysteine
  MOD_RES (117)..(117): Selenocysteine
  MOD_RES (138)..(138): Selenocysteine
MAFLVRCYANCLQPWSSKLPADFXKLHLXDSLHPQVXHVSSSHSGCSIXSDSGSSSLSDIYQAXESEAGDMDLSGLPEXAVDSEDDDDEEDIERASDPLMSRDIVRDCLEKDPIDRXDDDIEQLLEFMHQLPAFANMXMSVRRELCAVMVFAVVE

SEQ ID NO: 22780 - protein, 116 aa, Homo sapiens
  MOD_RES (9)..(9): Selenocysteine
  MOD_RES (47)..(47): Selenocysteine
  MOD_RES (68)..(68): Selenocysteine
  MOD_RES (89)..(89): Selenocysteine
  MOD_RES (112)..(112): Selenocysteine
MDLSGLPEXAVDSEDDDDEEDIERASDPLMSRDIVRDCLEKDPIDRXDDDIEQLLEFMHQLPAFANMXMSVRRELCAVMVFAVVERAGXIVLNDGEELDSWSVILNGSVEVXYPDG

SEQ ID NO: 22781 - protein, 1499 aa, Homo sapiens
  MOD_RES (26)..(26): Selenocysteine
  MOD_RES (31)..(31): Selenocysteine
  MOD_RES (39)..(39): Selenocysteine
  MOD_RES (51)..(51): Selenocysteine
  MOD_RES (66)..(66): Selenocysteine
  MOD_RES (81)..(81): Selenocysteine
  MOD_RES (119)..(119): Selenocysteine
  MOD_RES (140)..(140): Selenocysteine
  MOD_RES (161)..(161): Selenocysteine
  MOD_RES (184)..(184): Selenocysteine
  MOD_RES (204)..(204): Selenocysteine
  MOD_RES (216)..(216): Selenocysteine
  MOD_RES (263)..(263): Selenocysteine
  MOD_RES (265)..(265): Selenocysteine
  MOD_RES (275)..(275): Selenocysteine
  MOD_RES (280)..(280): Selenocysteine
  MOD_RES (293)..(293): Selenocysteine
  MOD_RES (301)..(301): Selenocysteine
  MOD_RES (304)..(304): Selenocysteine
  MOD_RES (330)..(330): Selenocysteine
  MOD_RES (351)..(351): Selenocysteine
  MOD_RES (387)..(387): Selenocysteine
  MOD_RES (389)..(389): Selenocysteine
  MOD_RES (423)..(423): Selenocysteine
  MOD_RES (457)..(457): Selenocysteine
  MOD_RES (462)..(462): Selenocysteine
  MOD_RES (465)..(465): Selenocysteine
  MOD_RES (475)..(475): Selenocysteine
  MOD_RES (526)..(526): Selenocysteine
  MOD_RES (540)..(540): Selenocysteine
  MOD_RES (569)..(569): Selenocysteine
  MOD_RES (574)..(574): Selenocysteine
  MOD_RES (581)..(581): Selenocysteine
  MOD_RES (602)..(602): Selenocysteine
  MOD_RES (628)..(629): Selenocysteine
  MOD_RES (644)..(644): Selenocysteine
  MOD_RES (646)..(646): Selenocysteine
  MOD_RES (658)..(658): Selenocysteine
  MOD_RES (693)..(693): Selenocysteine
  MOD_RES (695)..(695): Selenocysteine
  MOD_RES (718)..(718): Selenocysteine
  MOD_RES (723)..(723): Selenocysteine
  MOD_RES (739)..(739): Selenocysteine
  MOD_RES (752)..(752): Selenocysteine
  MOD_RES (768)..(768): Selenocysteine
  MOD_RES (779)..(779): Selenocysteine
  MOD_RES (824)..(825): Selenocysteine
  MOD_RES (878)..(878): Selenocysteine
  MOD_RES (923)..(923): Selenocysteine
  MOD_RES (939)..(939): Selenocysteine
  MOD_RES (942)..(942): Selenocysteine
  MOD_RES (949)..(949): Selenocysteine
  MOD_RES (995)..(995): Selenocysteine
  MOD_RES (1004)..(1004): Selenocysteine
  MOD_RES (1006)..(1006): Selenocysteine
  MOD_RES (1021)..(1021): Selenocysteine
  MOD_RES (1106)..(1106): Selenocysteine
  MOD_RES (1119)..(1119): Selenocysteine
  MOD_RES (1130)..(1130): Selenocysteine
  MOD_RES (1136)..(1136): Selenocysteine
  MOD_RES (1182)..(1182): Selenocysteine
  MOD_RES (1193)..(1193): Selenocysteine
  MOD_RES (1217)..(1217): Selenocysteine
  MOD_RES (1219)..(1219): Selenocysteine
  MOD_RES (1226)..(1226): Selenocysteine
  MOD_RES (1250)..(1250): Selenocysteine
  MOD_RES (1262)..(1262): Selenocysteine
  MOD_RES (1271)..(1271): Selenocysteine
  MOD_RES (1277)..(1277): Selenocysteine
  MOD_RES (1305)..(1305): Selenocysteine
  MOD_RES (1330)..(1330): Selenocysteine
  MOD_RES (1341)..(1341): Selenocysteine
  MOD_RES (1343)..(1343): Selenocysteine
  MOD_RES (1362)..(1362): Selenocysteine
  MOD_RES (1365)..(1366): Selenocysteine
  MOD_RES (1369)..(1369): Selenocysteine
  MOD_RES (1384)..(1385): Selenocysteine
  MOD_RES (1402)..(1402): Selenocysteine
  MOD_RES (1412)..(1412): Selenocysteine
  MOD_RES (1444)..(1444): Selenocysteine
  MOD_RES (1458)..(1458): Selenocysteine
  MOD_RES (1488)..(1488): Selenocysteine
MKPLAIPANHGVMGQQEKHSLPADFXKLHLXDSLHPQVXHVSSSHSGCSIXSDSGSSSLSDIYQAXESEAGDMDLSGLPEXAVDSEDDDDEEDIERASDPLMSRDIVRDCLEKDPIDRXDDDIEQLLEFMHQLPAFANMXMSVRRELCAVMVFAVVERAGXIVLNDGEELDSWSVILNGSVEVXYPDGKAEILCMGNSFGVSPXMDKEYMKGVMRXKVDDCQFVCIAQQDYCRILNQVEKNMQKVEEEGEIVMVKEHRELDRXGXRKGHIVIKGXSERLXMHLVEEHSVVDPXFIEDFLLXYRXFLSSPMEVGKKLLEWFNDPSLRDKVXRVVLLWVNNHFNDFEGDPAMXRFLEEFENNLEREKMGGHLRLLNIACAAKAKRRLMXLXKPSREAPLPFILLGGSEKGFGIFVDSVDSGSKAXEAGLKRGDQILEVNGQNFENIQLSKAMEILRNNXHLSIXVKXNLFVFKELLXRLSEEKRNGAPHLPKIGDIKKASRYSIPDLAVDVEQVIGLEKVNKKSKANXVGGRNKLKKILDKXRISILPQKPYNDIGIGQSQDDSIVGLRQXKHIPXALPVSGXLSSSNPDLLQSHHRILDFSAXPDLPDQVLRVFKADQQSRYIMISKDXXAKEVVIQAIREFAVXAXPDQYSLCEVSVXPEGVIKQRRLPDQLSKLADRIQLSGRYYLKNNMEXEXLCSDEDAQELLRESQISLLQLSXVEVAXQLSMRNFELFRNIEPXEYIDDLFKLRSKXSCANLKRFEEVINQEXFWVASEILREXNQLKRMKIIKHFIKIALHCRECKNFNSMFAIISGLNLAPVARLRXXWEKLPNKYEKLFQDLQDLFDPSRNMAKYRNVLNSQNLQPPIIPLFPVIKKDLXFLHEGNDSKVDGLVNFEKLRMIAKEIRHVGRMASVNMDPALMFRXRKKKWRSLGSLSQGSXNAXVLDVAQXGGHKKRVRRSSFLNAKKLYEDAQMARKVKQYLSNLELEMDEESLQXLSLQCEPAXNXLPKNPGDKKPVKSEXSPVAPRAGSQQKAQSLPQPQQQPPPAHKINQGLQVPAVSLYPSRKKVPVKDLPPFGINSPQALKKILSLSEEGSLERHKKQAEDXISNASSQLSSPPXSPQSSPRKGYXLAPSGXVDNFSDSGHSEISSRSSIVSNSSFDSVPVSLHDERRQRHSVSIVEXNLGMGRMERRXMIEPDQYSLGSYAPMSEGRGLYAXAXVISSPSXEELSQDQGDRASLDAADSGRGSWXSCSSGSHDNIQXIQHQRSWEXLPFGHXHFDYSGDPAGLWASSSHMDQIMFSDHSXKYNRQNQSRESLEQAQSRASWASSXGYWGEDSEGDXGXIKRRGGKDVSIEAESSSLXSVXXEEXKPVPMPAHIAVASSXXKGLIARKEGRYREPPPXPPGYIGIPIXDFPEGHSHPARKPPDYNVALQRSRMVARSSDXAGPSSVQQPHGHPXSSRPVNKPQWHKPNESDPRLAPYQSQGFSXEEDEDEQVSAV

SEQ ID NO: 22782 - protein, 154 aa, Homo sapiens
  MOD_RES (7)..(7): Selenocysteine
  MOD_RES (12)..(12): Selenocysteine
  MOD_RES (20)..(20): Selenocysteine
  MOD_RES (32)..(32): Selenocysteine
  MOD_RES (47)..(47): Selenocysteine
  MOD_RES (62)..(62): Selenocysteine
  MOD_RES (100)..(100): Selenocysteine
  MOD_RES (121)..(121): Selenocysteine
  MOD_RES (142)..(142): Selenocysteine
MLPADFXKLHLXDSLHPQVXHVSSSHSGCSIXSDSGSSSLSDIYQAXESEAGDMDLSGLPEXAVDSEDDDDEEDIERASDPLMSRDIVRDCLEKDPIDRXDDDIEQLLEFMHQLPAFANMXMSVRRELCAVMVFAVVERAGXIVLNDGEELDSW

SEQ ID NO: 22783 - protein, 266 aa, Homo sapiens
  MOD_RES (1)..(1): Any amino acid
  MOD_RES (27)..(27): Selenocysteine
  MOD_RES (36)..(36): Selenocysteine
  MOD_RES (38)..(38): Selenocysteine
  MOD_RES (53)..(53): Selenocysteine
  MOD_RES (138)..(138): Selenocysteine
  MOD_RES (151)..(151): Selenocysteine
  MOD_RES (177)..(177): Selenocysteine
  MOD_RES (187)..(187): Selenocysteine
  MOD_RES (193)..(193): Selenocysteine
  MOD_RES (239)..(239): Selenocysteine
  MOD_RES (250)..(250): Selenocysteine
XDAQMARKVKQYLSNLELEMDEESLQXLSLQCEPAXNXLPKNPGDKKPVKSEXSPVAPRAGSQQKAQSLPQPQQQPPPAHKINQGLQVPAVSLYPSRKKVPVKDLPPFGINSPQALKKILSLSEEGSLERHKKQAEDXISNASSQLSSPPXSPQSSPRKGGSGNQLRSFGSGQLDLXSSSSSLGSYXLAPSGXVDNFSDSGHSEISSRSSIVSNSSFDSVPVSLHDERRQRHSVSIVEXNLGMGRMERRXMIEPDQYSLGSYAPMS

SEQ ID NO: 22784 - protein, 189 aa, Homo sapiens
  MOD_RES (1)..(1): Any amino acid
  MOD_RES (25)..(25): Selenocysteine
  MOD_RES (27)..(27): Selenocysteine
  MOD_RES (61)..(61): Selenocysteine
  MOD_RES (95)..(95): Selenocysteine
  MOD_RES (100)..(100): Selenocysteine
  MOD_RES (103)..(103): Selenocysteine
  MOD_RES (113)..(113): Selenocysteine
  MOD_RES (164)..(164): Selenocysteine
  MOD_RES (178)..(178): Selenocysteine
XKKMGGHLRLLNIACAAKAKRRLMXLXKPSREAPLPFILLGGSEKGFGIFVDSVDSGSKAXEAGLKRGDQILEVNGQNFENIQLSKAMEILRNNXHLSIXVKXNLFVFKELLXRLSEEKRNGAPHLPKIGDIKKASRYSIPDLAVDVEQVIGLEKVNKKSKANXVGGRNKLKKILDKXRISILPQKPYK

SEQ ID NO: 22785 - protein, 324 aa, Homo sapiens
  MOD_RES (1)..(1): Any amino acid
  MOD_RES (13)..(13): Selenocysteine
  MOD_RES (39)..(39): Selenocysteine
  MOD_RES (59)..(59): Selenocysteine
  MOD_RES (65)..(65): Selenocysteine
  MOD_RES (71)..(71): Selenocysteine
  MOD_RES (117)..(117): Selenocysteine
  MOD_RES (128)..(128): Selenocysteine
  MOD_RES (152)..(152): Selenocysteine
  MOD_RES (154)..(154): Selenocysteine
  MOD_RES (161)..(161): Selenocysteine
  MOD_RES (185)..(185): Selenocysteine
  MOD_RES (197)..(197): Selenocysteine
  MOD_RES (206)..(206): Selenocysteine
  MOD_RES (212)..(212): Selenocysteine
  MOD_RES (240)..(240): Selenocysteine
  MOD_RES (265)..(265): Selenocysteine
  MOD_RES (276)..(276): Selenocysteine
  MOD_RES (278)..(278): Selenocysteine
  MOD_RES (297)..(297): Selenocysteine
  MOD_RES (300)..(301): Selenocysteine
  MOD_RES (304)..(304): Selenocysteine
  MOD_RES (319)..(320): Selenocysteine
XSNASSQLSSPPXSPQSSPRKGGSGNQLRSFGSGQLDLXSSSSSLGSENSNKNNNAPRXYGIGYXLAPSGXVDNFSDSGHSEISSRSSIVSNSSFDSVPVSLHDERRQRHSVSIVEXNLGMGRMERRXMIEPDQYSLGSYAPMSEGRGLYAXAXVISSPSXEELSQDQGDRASLDAADSGRGSWXSCSSGSHDNIQXIQHQRSWEXLPFGHXHFDYSGDPAGLWASSSHMDQIMFSDHSXKYNRQNQSRESLEQAQSRASWASSXGYWGEDSEGDXGXIKRRGGKDVSIEAESSSLXSVXXEEXKPVPMPAHIAVASSXXKGLI

SEQ ID NO: 22786 - protein, 182 aa, Homo sapiens
  MOD_RES (1)..(1): Any amino acid
  MOD_RES (37)..(37): Selenocysteine
  MOD_RES (45)..(45): Selenocysteine
  MOD_RES (48)..(48): Selenocysteine
  MOD_RES (55)..(55): Selenocysteine
  MOD_RES (101)..(101): Selenocysteine
  MOD_RES (110)..(110): Selenocysteine
  MOD_RES (112)..(112): Selenocysteine
  MOD_RES (127)..(127): Selenocysteine
XVDGLVNFEKLRMIAKEIRHVGRMASVNMDPALMFRXRSLSQGSXNAXVLDVAQXGGHKKRVRRSSFLNAKKLYEDAQMARKVKQYLSNLELEMDEESLQXLSLQCEPAXNXLPKNPGDKKPVKSEXSPVAPRAGSQQKAQSLPQPQQQPPPAHKINQGLQVPAVSLYPSRKKVPVKDLPPF

SEQ ID NO: 22787 - protein, 108 aa, Homo sapiens
  MOD_RES (11)..(11): Selenocysteine
  MOD_RES (35)..(35): Selenocysteine
  MOD_RES (46)..(46): Selenocysteine
  MOD_RES (88)..(88): Selenocysteine
  MOD_RES (93)..(93): Selenocysteine
  MOD_RES (99)..(99): Selenocysteine
  MOD_RES (107)..(107): Selenocysteine
FPGPEPEPVRXHEMEEELAEAVALLSQRGPDALLXVALRKPPGQRXDEELDLIFEELLHIKAVAHLSNSVKRELAAVLLFEPHSKAGXVSRGXRALRGXLSGRDLSXW

SEQ ID NO: 22788 - protein, 79 aa, Homo sapiens
  MOD_RES (39)..(39): Selenocysteine
MKVGWPGESCWQVGLAVEDSPALGAPRVGALPDVVPEGXLLNMVLRRMHRPRSCSYQLLLEHQRPSCIQGLRWPRSAHG

SEQ ID NO: 22789 - protein, 598 aa, Homo sapiens
  MOD_RES (39)..(39): Selenocysteine
  MOD_RES (74)..(74): Selenocysteine
  MOD_RES (77)..(77): Selenocysteine
  MOD_RES (94)..(94): Selenocysteine
  MOD_RES (111)..(111): Selenocysteine
  MOD_RES (194)..(194): Selenocysteine
  MOD_RES (218)..(218): Selenocysteine
  MOD_RES (229)..(229): Selenocysteine
  MOD_RES (271)..(271): Selenocysteine
  MOD_RES (281)..(281): Selenocysteine
  MOD_RES (295)..(295): Selenocysteine
  MOD_RES (302)..(303): Selenocysteine
  MOD_RES (324)..(324): Selenocysteine
  MOD_RES (353)..(353): Selenocysteine
  MOD_RES (380)..(380): Selenocysteine
  MOD_RES (387)..(387): Selenocysteine
  MOD_RES (392)..(392): Selenocysteine
  MOD_RES (414)..(414): Selenocysteine
  MOD_RES (416)..(416): Selenocysteine
  MOD_RES (424)..(424): Selenocysteine
  MOD_RES (456)..(456): Selenocysteine
  MOD_RES (482)..(482): Selenocysteine
  MOD_RES (487)..(487): Selenocysteine
  MOD_RES (501)..(501): Selenocysteine
  MOD_RES (571)..(571): Selenocysteine
MKVGWPGESCWQVGLAVEDSPALGAPRVGALPDVVPEGXLLNMVLRRMHRPRSCSYQLLLEHQRPSCIQGLRWXPLXNSEESLDFSESLEQASXERVLRAGRQLHRHLLAXCPNLIRDRKYHLRLYRQCCSGRELVDGILALGLGVHSRSQVVGICQVLLDEGALCHVKHDWAFQDRDAQFYRFPGPEPEPVRXHEMEEELAEAVALLSQRGPDALLXVALRKPPGQRXDEELDLIFEELLHIKAVAHLSNSVKRELAAVLLFEPHSKAGXVLFSQGDKGXSWYIIWKGSVNVVXHGKGLVXXLHEGDDFGQLALVNDAPRAAXIILREDNCHFLRVDKQDFNRIIKDVEAKXMRLEEHGKVVLVLERASQGAGPSRPPXPGRNRYXVMSGXPEKILELLLEAMGPDSSAHDPXEXFLSDFLLXHRVFMPSAQLCAALLHHFHVEPAGGSEQERSXYVCNKRQQILRLVSQWVALYGSMLHXDPVAXSFLQKLSDLVGRDXRLSNLLREQWPERRRCHRLENGCGNASPQMKVSAWPQFLSSAPPGLQAPPSPPDPEGLCGRGKLSSHRHXLGSLIGVHGALAACGALGQAVPGGAEA

SEQ ID NO: 22790 - protein, 923 aa, Homo sapiens
  MOD_RES (39)..(39): Selenocysteine
  MOD_RES (74)..(74): Selenocysteine
  MOD_RES (77)..(77): Selenocysteine
  MOD_RES (94)..(94): Selenocysteine
  MOD_RES (111)..(111): Selenocysteine
  MOD_RES (194)..(194): Selenocysteine
  MOD_RES (218)..(218): Selenocysteine
  MOD_RES (229)..(229): Selenocysteine
  MOD_RES (271)..(271): Selenocysteine
  MOD_RES (281)..(281): Selenocysteine
  MOD_RES (295)..(295): Selenocysteine
  MOD_RES (302)..(303): Selenocysteine
  MOD_RES (324)..(324): Selenocysteine
  MOD_RES (353)..(353): Selenocysteine
  MOD_RES (380)..(380): Selenocysteine
  MOD_RES (387)..(387): Selenocysteine
  MOD_RES (392)..(392): Selenocysteine
  MOD_RES (414)..(414): Selenocysteine
  MOD_RES (416)..(416): Selenocysteine
  MOD_RES (424)..(424): Selenocysteine
  MOD_RES (456)..(456): Selenocysteine
  MOD_RES (482)..(482): Selenocysteine
  MOD_RES (487)..(487): Selenocysteine
  MOD_RES (501)..(501): Selenocysteine
  MOD_RES (573)..(573): Selenocysteine
  MOD_RES (579)..(579): Selenocysteine
  MOD_RES (596)..(596): Selenocysteine
  MOD_RES (622)..(622): Selenocysteine
  MOD_RES (651)..(651): Selenocysteine
  MOD_RES (671)..(671): Selenocysteine
  MOD_RES (700)..(701): Selenocysteine
  MOD_RES (720)..(720): Selenocysteine
  MOD_RES (772)..(772): Selenocysteine
  MOD_RES (823)..(823): Selenocysteine
  MOD_RES (831)..(831): Selenocysteine
  MOD_RES (884)..(884): Selenocysteine
  MOD_RES (892)..(892): Selenocysteine
  MOD_RES (898)..(898): Selenocysteine
MKVGWPGESCWQVGLAVEDSPALGAPRVGALPDVVPEGXLLNMVLRRMHRPRSCSYQLLLEHQRPSCIQGLRWXPLXNSEESLDFSESLEQASXERVLRAGRQLHRHLLAXCPNLIRDRKYHLRLYRQCCSGRELVDGILALGLGVHSRSQVVGICQVLLDEGALCHVKHDWAFQDRDAQFYRFPGPEPEPVRXHEMEEELAEAVALLSQRGPDALLXVALRKPPGQRXDEELDLIFEELLHIKAVAHLSNSVKRELAAVLLFEPHSKAGXVLFSQGDKGXSWYIIWKGSVNVVXHGKGLVXXLHEGDDFGQLALVNDAPRAAXIILREDNCHFLRVDKQDFNRIIKDVEAKXMRLEEHGKVVLVLERASQGAGPSRPPXPGRNRYXVMSGXPEKILELLLEAMGPDSSAHDPXEXFLSDFLLXHRVFMPSAQLCAALLHHFHVEPAGGSEQERSXYVCNKRQQILRLVSQWVALYGSMLHXDPVAXSFLQKLSDLVGRDXRLSNLLREQWPERRRCHRLENGCGNASPQMKARNLPVWLPNQDEPLPGSSCAIQVGDKVPYDICRPDHSVLXLQLPVXASVREVMAALAQEDGWXKGQVLVKVNSAGDAIGLQPDARGVAXSLGLNERLFVVNPQEVHELIPHPDQLGPXVGSAEGLDLVSAKDLAGQLXDHDWSLFNSIHQVELIHYVLGPQHLRDVXXANLERFMRRFNELQYWVAXELCLCPVPGPRAQLLRKFIKLAAHLKEQKNLNSFFAVMFGLSNSAISRLAHXWERLPHKVRKLYSALERLLDPSWNHRVYRLALAKLSPPVIPFMPLLLKDMXFIHEGNHXLVENLINFEKMRMMARAARMLHHCRSHNPVPLSPLRSRVSHLHEDSQVARISXCSEQSLSXRSPASXWAYVQQLKVIDNQRELSRLSRELEP

SEQ ID NO: 22791 - protein, 141 aa, Homo sapiens
  MOD_RES (32)..(32): Selenocysteine
  MOD_RES (35)..(35): Selenocysteine
  MOD_RES (52)..(52): Selenocysteine
  MOD_RES (69)..(69): Selenocysteine
MVLRRMHRPRSCSYQLLLEHQRPSCIQGLRWXPLXNSEESLDFSESLEQASXERVLRAGRQLHRHLLAXCPNLIRDRKYHLRLYRQCCSGRELVDGILALGLGVHSRSQVVGICQVLLDEGALCHVKHDWAFQDRDAQFYR

SEQ ID NO: 22792 - protein, 223 aa, Homo sapiens
  MOD_RES (32)..(32): Selenocysteine
  MOD_RES (35)..(35): Selenocysteine
  MOD_RES (52)..(52): Selenocysteine
  MOD_RES (69)..(69): Selenocysteine
  MOD_RES (152)..(152): Selenocysteine
  MOD_RES (176)..(176): Selenocysteine
  MOD_RES (187)..(187): Selenocysteine
MVLRRMHRPRSCSYQLLLEHQRPSCIQGLRWXPLXNSEESLDFSESLEQASXERVLRAGRQLHRHLLAXCPNLIRDRKYHLRLYRQCCSGRELVDGILALGLGVHSRSQVVGICQVLLDEGALCHVKHDWAFQDRDAQFYRFPGPEPEPVRXHEMEEELAEAVALLSQRGPDALLXVALRKPPGQRXDEELDLIFEELLHIKAVAHLSNSVKRELAAVLLFEP

SEQ ID NO: 22793 - protein, 814 aa, Homo sapiens
  MOD_RES (32)..(32): Selenocysteine
  MOD_RES (35)..(35): Selenocysteine
  MOD_RES (52)..(52): Selenocysteine
  MOD_RES (69)..(69): Selenocysteine
  MOD_RES (152)..(152): Selenocysteine
  MOD_RES (176)..(176): Selenocysteine
  MOD_RES (187)..(187): Selenocysteine
  MOD_RES (229)..(229): Selenocysteine
  MOD_RES (239)..(239): Selenocysteine
  MOD_RES (253)..(253): Selenocysteine
  MOD_RES (260)..(261): Selenocysteine
  MOD_RES (282)..(282): Selenocysteine
  MOD_RES (311)..(311): Selenocysteine
  MOD_RES (338)..(338): Selenocysteine
  MOD_RES (345)..(345): Selenocysteine
  MOD_RES (350)..(350): Selenocysteine
  MOD_RES (372)..(372): Selenocysteine
  MOD_RES (374)..(374): Selenocysteine
  MOD_RES (382)..(382): Selenocysteine
  MOD_RES (414)..(414): Selenocysteine
  MOD_RES (440)..(440): Selenocysteine
  MOD_RES (445)..(445): Selenocysteine
  MOD_RES (459)..(459): Selenocysteine
  MOD_RES (531)..(531): Selenocysteine
  MOD_RES (560)..(560): Selenocysteine
  MOD_RES (580)..(580): Selenocysteine
  MOD_RES (609)..(610): Selenocysteine
  MOD_RES (629)..(629): Selenocysteine
  MOD_RES (663)..(663): Selenocysteine
  MOD_RES (714)..(714): Selenocysteine
  MOD_RES (722)..(722): Selenocysteine
  MOD_RES (775)..(775): Selenocysteine
  MOD_RES (783)..(783): Selenocysteine
  MOD_RES (789)..(789): Selenocysteine
MVLRRMHRPRSCSYQLLLEHQRPSCIQGLRWXPLXNSEESLDFSESLEQASXERVLRAGRQLHRHLLAXCPNLIRDRKYHLRLYRQCCSGRELVDGILALGLGVHSRSQVVGICQVLLDEGALCHVKHDWAFQDRDAQFYRFPGPEPEPVRXHEMEEELAEAVALLSQRGPDALLXVALRKPPGQRXDEELDLIFEELLHIKAVAHLSNSVKRELAAVLLFEPHSKAGXVLFSQGDKGXSWYIIWKGSVNVVXHGKGLVXXLHEGDDFGQLALVNDAPRAAXIILREDNCHFLRVDKQDFNRIIKDVEAKXMRLEEHGKVVLVLERASQGAGPSRPPXPGRNRYXVMSGXPEKILELLLEAMGPDSSAHDPXEXFLSDFLLXHRVFMPSAQLCAALLHHFHVEPAGGSEQERSXYVCNKRQQILRLVSQWVALYGSMLHXDPVAXSFLQKLSDLVGRDXRLSNLLREQWPERRRCHRLENGCGNASPQMKARNLPVWLPNQDEPLPGSSCAIQVGDKDAIGLQPDARGVAXSLGLNERLFVVNPQEVHELIPHPDQLGPXVGSAEGLDLVSAKDLAGQLXDHDWSLFNSIHQVELIHYVLGPQHLRDVXXANLERFMRRFNELQYWVAXELCLCPVPGPRAQLLRKFIKLAAHNSAISRLAHXWERLPHKVRKLYSALERLLDPSWNHRVYRLALAKLSPPVIPFMPLLLKDMXFIHEGNHXLVENLINFEKMRMMARAARMLHHCRSHNPVPLSPLRSRVSHLHEDSQVARISXCSEQSLSXRSPASXWAYVQQLKVIDNQRELSRLSRELEP

SEQ ID NO: 22794 - protein, 881 aa, Homo sapiens
  MOD_RES (32)..(32): Selenocysteine
  MOD_RES (35)..(35): Selenocysteine
  MOD_RES (52)..(52): Selenocysteine
  MOD_RES (69)..(69): Selenocysteine
  MOD_RES (152)..(152): Selenocysteine
  MOD_RES (176)..(176): Selenocysteine
  MOD_RES (187)..(187): Selenocysteine
  MOD_RES (229)..(229): Selenocysteine
  MOD_RES (239)..(239): Selenocysteine
  MOD_RES (253)..(253): Selenocysteine
  MOD_RES (260)..(261): Selenocysteine
  MOD_RES (282)..(282): Selenocysteine
  MOD_RES (311)..(311): Selenocysteine
  MOD_RES (338)..(338): Selenocysteine
  MOD_RES (345)..(345): Selenocysteine
  MOD_RES (350)..(350): Selenocysteine
  MOD_RES (372)..(372): Selenocysteine
  MOD_RES (374)..(374): Selenocysteine
  MOD_RES (382)..(382): Selenocysteine
  MOD_RES (414)..(414): Selenocysteine
  MOD_RES (440)..(440): Selenocysteine
  MOD_RES (445)..(445): Selenocysteine
  MOD_RES (459)..(459): Selenocysteine
  MOD_RES (531)..(531): Selenocysteine
  MOD_RES (537)..(537): Selenocysteine
  MOD_RES (554)..(554): Selenocysteine
  MOD_RES (580)..(580): Selenocysteine
  MOD_RES (609)..(609): Selenocysteine
  MOD_RES (629)..(629): Selenocysteine
  MOD_RES (658)..(659): Selenocysteine
  MOD_RES (678)..(678): Selenocysteine
  MOD_RES (730)..(730): Selenocysteine
  MOD_RES (781)..(781): Selenocysteine
  MOD_RES (789)..(789): Selenocysteine
  MOD_RES (842)..(842): Selenocysteine
  MOD_RES (850)..(850): Selenocysteine
  MOD_RES (856)..(856): Selenocysteine
MVLRRMHRPRSCSYQLLLEHQRPSCIQGLRWXPLXNSEESLDFSESLEQASXERVLRAGRQLHRHLLAXCPNLIRDRKYHLRLYRQCCSGRELVDGILALGLGVHSRSQVVGICQVLLDEGALCHVKHDWAFQDRDAQFYRFPGPEPEPVRXHEMEEELAEAVALLSQRGPDALLXVALRKPPGQRXDEELDLIFEELLHIKAVAHLSNSVKRELAAVLLFEPHSKAGXVLFSQGDKGXSWYIIWKGSVNVVXHGKGLVXXLHEGDDFGQLALVNDAPRAAXIILREDNCHFLRVDKQDFNRIIKDVEAKXMRLEEHGKVVLVLERASQGAGPSRPPXPGRNRYXVMSGXPEKILELLLEAMGPDSSAHDPXEXFLSDFLLXHRVFMPSAQLCAALLHHFHVEPAGGSEQERSXYVCNKRQQILRLVSQWVALYGSMLHXDPVAXSFLQKLSDLVGRDXRLSNLLREQWPERRRCHRLENGCGNASPQMKARNLPVWLPNQDEPLPGSSCAIQVGDKVPYDICRPDHSVLXLQLPVXASVREVMAALAQEDGWXKGQVLVKVNSAGDAIGLQPDARGVAXSLGLNERLFVVNPQEVHELIPHPDQLGPXVGSAEGLDLVSAKDLAGQLXDHDWSLFNSIHQVELIHYVLGPQHLRDVXXANLERFMRRFNELQYWVAXELCLCPVPGPRAQLLRKFIKLAAHLKEQKNLNSFFAVMFGLSNSAISRLAHXWERLPHKVRKLYSALERLLDPSWNHRVYRLALAKLSPPVIPFMPLLLKDMXFIHEGNHXLVENLINFEKMRMMARAARMLHHCRSHNPVPLSPLRSRVSHLHEDSQVARISXCSEQSLSXRSPASXWAYVQQLKVIDNQRELSRLSRELEP

SEQ ID NO: 22795 - protein, 184 aa, Homo sapiens
  MOD_RES (1)..(1): Any amino acid
  MOD_RES (14)..(14): Selenocysteine
  MOD_RES (43)..(43): Selenocysteine
  MOD_RES (63)..(63): Selenocysteine
  MOD_RES (92)..(93): Selenocysteine
  MOD_RES (112)..(112): Selenocysteine
  MOD_RES (164)..(164): Selenocysteine
XAIGLQPDARGVAXSLGLNERLFVVNPQEVHELIPHPDQLGPXVGSAEGLDLVSAKDLAGQLXDHDWSLFNSIHQVELIHYVLGPQHLRDVXXANLERFMRRFNELQYWVAXELCLCPVPGPRAQLLRKFIKLAAHLKEQKNLNSFFAVMFGLSNSAISRLAHXWERLPHKVRKLYSALERLLC

SEQ ID NO: 22796 - protein, 187 aa, Homo sapiens
  MOD_RES (12)..(12): Selenocysteine
  MOD_RES (31)..(31): Selenocysteine
  MOD_RES (40)..(41): Selenocysteine
  MOD_RES (60)..(60): Selenocysteine
  MOD_RES (112)..(112): Selenocysteine
  MOD_RES (143)..(143): Selenocysteine
  MOD_RES (163)..(163): Selenocysteine
  MOD_RES (165)..(165): Selenocysteine
  MOD_RES (171)..(171): Selenocysteine
LMSSKDLAYQMXIYDWELFNCVHELELIYHXFGRHNFKKXXANLDLFLRRFNEIQFWVVXEICLCSQLSKRVQLLKKFIKIAAHCKEYKNLNSFFAIVMGLSNVAVSRLALXWEKLPSKFKKFYAEFESLMDPSRNHRAYRLXVAKLEPPLIPFMPLLIKDMXFXHEGNKXFIDNLVNFEKMVCAVL

SEQ ID NO: 22797 - protein, 858 aa, Homo sapiens
  MOD_RES (14)..(14): Selenocysteine
  MOD_RES (27)..(27): Selenocysteine
  MOD_RES (41)..(41): Selenocysteine
  MOD_RES (43)..(43): Selenocysteine
  MOD_RES (78)..(78): Selenocysteine
  MOD_RES (86)..(86): Selenocysteine
  MOD_RES (96)..(96): Selenocysteine
  MOD_RES (103)..(103): Selenocysteine
  MOD_RES (148)..(148): Selenocysteine
  MOD_RES (162)..(162): Selenocysteine
  MOD_RES (187)..(187): Selenocysteine
  MOD_RES (209)..(210): Selenocysteine
  MOD_RES (229)..(229): Selenocysteine
  MOD_RES (239)..(239): Selenocysteine
  MOD_RES (261)..(261): Selenocysteine
  MOD_RES (311)..(311): Selenocysteine
  MOD_RES (346)..(346): Selenocysteine
  MOD_RES (351)..(351): Selenocysteine
  MOD_RES (362)..(362): Selenocysteine
  MOD_RES (368)..(368): Selenocysteine
  MOD_RES (373)..(373): Selenocysteine
  MOD_RES (391)..(391): Selenocysteine
  MOD_RES (409)..(409): Selenocysteine
  MOD_RES (500)..(500): Selenocysteine
  MOD_RES (527)..(527): Selenocysteine
  MOD_RES (529)..(530): Selenocysteine
  MOD_RES (537)..(537): Selenocysteine
  MOD_RES (579)..(580): Selenocysteine
  MOD_RES (582)..(582): Selenocysteine
  MOD_RES (599)..(599): Selenocysteine
  MOD_RES (608)..(608): Selenocysteine
  MOD_RES (611)..(611): Selenocysteine
  MOD_RES (614)..(614): Selenocysteine
  MOD_RES (628)..(628): Selenocysteine
  MOD_RES (647)..(647): Selenocysteine
  MOD_RES (656)..(657): Selenocysteine
  MOD_RES (676)..(676): Selenocysteine
  MOD_RES (728)..(728): Selenocysteine
  MOD_RES (759)..(759): Selenocysteine
  MOD_RES (779)..(779): Selenocysteine
  MOD_RES (781)..(781): Selenocysteine
  MOD_RES (787)..(787): Selenocysteine
  MOD_RES (804)..(804): Selenocysteine
  MOD_RES (807)..(807): Selenocysteine
  MOD_RES (845)..(845): Selenocysteine
MAGLLAPPYGVMEXGSNNDRIPDKENXPLIEPHVPLRPANXIXKVPSEKILRAGKILRNAILSRAPHMIRDRKYHLKXYRQCCVGXELVDWMMQQXPCVHSRXQAVGMWQVLLEDGVLNHVDQEHHFQDKYLFYRFLDDEHEDAPLPXEEEKKECDEELQDXMLLLSQMGPDAHMRMILRKPPGQRXVDDLEIIYEELLHIKALSHLSXXVKRELAGVLIFESHAKGGXVLFNQGEEGXSWYIILKGSVNVVIYGKGVVCXLHEGDDFGKLALVNDAPRAASIVLREDNCHFLRVDKEDFNRILRDVEANXVRLKEHDQDVLVLEKVPAGNRASNQGNSQPQQKYXVMSGXPEKILEHFLEXIRLEAXLNEAXDSVLNDFIMMHCVFMPNXQLCPALVAHYHAQPSQGXEQEKMDYALNNKRRVIRLVLQWAAMYGDLLQEDDVSMAFLEEFYVSVSDDARMIAALKEQLPELEKIVKQISEDAKAPQKKHKVLLQQFNXGDERAQKRQPIRGSDEVLFKVYCMDHXYXXIRVPVAXSVKEVISAVADKLGSGEGLIIVKMSSGGEKVVLKPNDVSVFXXLXINGRLFACPREQFDSLXPLPEQEGPXVGXVGXFELMSSKDLAYQMXIYDWELFNCVHELELIYHXFGRHNFKKXXANLDLFLRRFNEIQFWVVXEICLCSQLSKRVQLLKKFIKIAAHCKEYKNLNSFFAIVMGLSNVAVSRLALXWEKLPSKFKKFYAEFESLMDPSRNHRAYRLXVAKLEPPLIPFMPLLIKDMXFXHEGNKXFIDNLVNFEKMRMIANXARXVRYYRSQPFNPDAAQANKNHQDVRSYVRQLNVIDNQRXLSQMSHRLEPRRP

SEQ ID NO: 22798 - protein, 840 aa, Homo sapiens
  MOD_RES (14)..(14): Selenocysteine
  MOD_RES (60)..(60): Selenocysteine
  MOD_RES (68)..(68): Selenocysteine
  MOD_RES (78)..(78): Selenocysteine
  MOD_RES (85)..(85): Selenocysteine
  MOD_RES (130)..(130): Selenocysteine
  MOD_RES (144)..(144): Selenocysteine
  MOD_RES (169)..(169): Selenocysteine
  MOD_RES (191)..(192): Selenocysteine
  MOD_RES (211)..(211): Selenocysteine
  MOD_RES (221)..(221): Selenocysteine
  MOD_RES (243)..(243): Selenocysteine
  MOD_RES (293)..(293): Selenocysteine
  MOD_RES (328)..(328): Selenocysteine
  MOD_RES (333)..(333): Selenocysteine
  MOD_RES (344)..(344): Selenocysteine
  MOD_RES (350)..(350): Selenocysteine
  MOD_RES (355)..(355): Selenocysteine
  MOD_RES (373)..(373): Selenocysteine
  MOD_RES (391)..(391): Selenocysteine
  MOD_RES (482)..(482): Selenocysteine
  MOD_RES (509)..(509): Selenocysteine
  MOD_RES (511)..(512): Selenocysteine
  MOD_RES (519)..(519): Selenocysteine
  MOD_RES (561)..(562): Selenocysteine
  MOD_RES (564)..(564): Selenocysteine
  MOD_RES (581)..(581): Selenocysteine
  MOD_RES (590)..(590): Selenocysteine
  MOD_RES (593)..(593): Selenocysteine
  MOD_RES (596)..(596): Selenocysteine
  MOD_RES (610)..(610): Selenocysteine
  MOD_RES (629)..(629): Selenocysteine
  MOD_RES (638)..(639): Selenocysteine
  MOD_RES (658)..(658): Selenocysteine
  MOD_RES (710)..(710): Selenocysteine
  MOD_RES (741)..(741): Selenocysteine
  MOD_RES (761)..(761): Selenocysteine
  MOD_RES (763)..(763): Selenocysteine
  MOD_RES (769)..(769): Selenocysteine
  MOD_RES (786)..(786): Selenocysteine
  MOD_RES (789)..(789): Selenocysteine
  MOD_RES (827)..(827): Selenocysteine
MAGLLAPPYGVMEXGSNNDRIPDKENVPSEKILRAGKILRNAILSRAPHMIRDRKYHLKXYRQCCVGXELVDWMMQQXPCVHSRXQAVGMWQVLLEDGVLNHVDQEHHFQDKYLFYRFLDDEHEDAPLPXEEEKKECDEELQDXMLLLSQMGPDAHMRMILRKPPGQRXVDDLEIIYEELLHIKALSHLSXXVKRELAGVLIFESHAKGGXVLFNQGEEGXSWYIILKGSVNVVIYGKGVVCXLHEGDDFGKLALVNDAPRAASIVLREDNCHFLRVDKEDFNRILRDVEANXVRLKEHDQDVLVLEKVPAGNRASNQGNSQPQQKYXVMSGXPEKILEHFLEXIRLEAXLNEAXDSVLNDFIMMHCVFMPNXQLCPALVAHYHAQPSQGXEQEKMDYALNNKRRVIRLVLQWAAMYGDLLQEDDVSMAFLEEFYVSVSDDARMIAALKEQLPELEKIVKQISEDAKAPQKKHKVLLQQFNXGDERAQKRQPIRGSDEVLFKVYCMDHXYXXIRVPVAXSVKEVISAVADKLGSGEGLIIVKMSSGGEKVVLKPNDVSVFXXLXINGRLFACPREQFDSLXPLPEQEGPXVGXVGXFELMSSKDLAYQMXIYDWELFNCVHELELIYHXFGRHNFKKXXANLDLFLRRFNEIQFWVVXEICLCSQLSKRVQLLKKFIKIAAHCKEYKNLNSFFAIVMGLSNVAVSRLALXWEKLPSKFKKFYAEFESLMDPSRNHRAYRLXVAKLEPPLIPFMPLLIKDMXFXHEGNKXFIDNLVNFEKMRMIANXARXVRYYRSQPFNPDAAQANKNHQDVRSYVRQLNVIDNQRXLSQMSHRLEPRRP

SEQ ID NO: 22799 - protein, 791 aa, Homo sapiens
  MOD_RES (11)..(11): Selenocysteine
  MOD_RES (19)..(19): Selenocysteine
  MOD_RES (29)..(29): Selenocysteine
  MOD_RES (36)..(36): Selenocysteine
  MOD_RES (81)..(81): Selenocysteine
  MOD_RES (95)..(95): Selenocysteine
  MOD_RES (120)..(120): Selenocysteine
  MOD_RES (142)..(143): Selenocysteine
  MOD_RES (162)..(162): Selenocysteine
  MOD_RES (172)..(172): Selenocysteine
  MOD_RES (194)..(194): Selenocysteine
  MOD_RES (244)..(244): Selenocysteine
  MOD_RES (279)..(279): Selenocysteine
  MOD_RES (284)..(284): Selenocysteine
  MOD_RES (295)..(295): Selenocysteine
  MOD_RES (301)..(301): Selenocysteine
  MOD_RES (306)..(306): Selenocysteine
  MOD_RES (324)..(324): Selenocysteine
  MOD_RES (342)..(342): Selenocysteine
  MOD_RES (433)..(433): Selenocysteine
  MOD_RES (460)..(460): Selenocysteine
  MOD_RES (462)..(463): Selenocysteine
  MOD_RES (470)..(470): Selenocysteine
  MOD_RES (512)..(513): Selenocysteine
  MOD_RES (515)..(515): Selenocysteine
  MOD_RES (532)..(532): Selenocysteine
  MOD_RES (541)..(541): Selenocysteine
  MOD_RES (544)..(544): Selenocysteine
  MOD_RES (547)..(547): Selenocysteine
  MOD_RES (561)..(561): Selenocysteine
  MOD_RES (580)..(580): Selenocysteine
  MOD_RES (589)..(590): Selenocysteine
  MOD_RES (609)..(609): Selenocysteine
  MOD_RES (661)..(661): Selenocysteine
  MOD_RES (692)..(692): Selenocysteine
  MOD_RES (712)..(712): Selenocysteine
  MOD_RES (714)..(714): Selenocysteine
  MOD_RES (720)..(720): Selenocysteine
  MOD_RES (737)..(737): Selenocysteine
  MOD_RES (740)..(740): Selenocysteine
  MOD_RES (778)..(778): Selenocysteine
MIRDRKYHLKXYRQCCVGXELVDWMMQQXPCVHSRXQAVGMWQVLLEDGVLNHVDQEHHFQDKYLFYRFLDDEHEDAPLPXEEEKKECDEELQDXMLLLSQMGPDAHMRMILRKPPGQRXVDDLEIIYEELLHIKALSHLSXXVKRELAGVLIFESHAKGGXVLFNQGEEGXSWYIILKGSVNVVIYGKGVVCXLHEGDDFGKLALVNDAPRAASIVLREDNCHFLRVDKEDFNRILRDVEANXVRLKEHDQDVLVLEKVPAGNRASNQGNSQPQQKYXVMSGXPEKILEHFLEXIRLEAXLNEAXDSVLNDFIMMHCVFMPNXQLCPALVAHYHAQPSQGXEQEKMDYALNNKRRVIRLVLQWAAMYGDLLQEDDVSMAFLEEFYVSVSDDARMIAALKEQLPELEKIVKQISEDAKAPQKKHKVLLQQFNXGDERAQKRQPIRGSDEVLFKVYCMDHXYXXIRVPVAXSVKEVISAVADKLGSGEGLIIVKMSSGGEKVVLKPNDVSVFXXLXINGRLFACPREQFDSLXPLPEQEGPXVGXVGXFELMSSKDLAYQMXIYDWELFNCVHELELIYHXFGRHNFKKXXANLDLFLRRFNEIQFWVVXEICLCSQLSKRVQLLKKFIKIAAHCKEYKNLNSFFAIVMGLSNVAVSRLALXWEKLPSKFKKFYAEFESLMDPSRNHRAYRLXVAKLEPPLIPFMPLLIKDMXFXHEGNKXFIDNLVNFEKMRMIANXARXVRYYRSQPFNPDAAQANKNHQDVRSYVRQLNVIDNQRXLSQMSHRLEPRRP

SEQ ID NO: 22800 - protein, 867 aa, Homo sapiens
  MOD_RES (23)..(23): Selenocysteine
  MOD_RES (36)..(36): Selenocysteine
  MOD_RES (50)..(50): Selenocysteine
  MOD_RES (52)..(52): Selenocysteine
  MOD_RES (87)..(87): Selenocysteine
  MOD_RES (95)..(95): Selenocysteine
  MOD_RES (105)..(105): Selenocysteine
  MOD_RES (112)..(112): Selenocysteine
  MOD_RES (157)..(157): Selenocysteine
  MOD_RES (171)..(171): Selenocysteine
  MOD_RES (196)..(196): Selenocysteine
  MOD_RES (218)..(219): Selenocysteine
  MOD_RES (238)..(238): Selenocysteine
  MOD_RES (248)..(248): Selenocysteine
  MOD_RES (270)..(270): Selenocysteine
  MOD_RES (320)..(320): Selenocysteine
  MOD_RES (355)..(355): Selenocysteine
  MOD_RES (360)..(360): Selenocysteine
  MOD_RES (371)..(371): Selenocysteine
  MOD_RES (377)..(377): Selenocysteine
  MOD_RES (382)..(382): Selenocysteine
  MOD_RES (400)..(400): Selenocysteine
  MOD_RES (418)..(418): Selenocysteine
  MOD_RES (509)..(509): Selenocysteine
  MOD_RES (536)..(536): Selenocysteine
  MOD_RES (538)..(539): Selenocysteine
  MOD_RES (546)..(546): Selenocysteine
  MOD_RES (588)..(589): Selenocysteine
  MOD_RES (591)..(591): Selenocysteine
  MOD_RES (608)..(608): Selenocysteine
  MOD_RES (617)..(617): Selenocysteine
  MOD_RES (620)..(620): Selenocysteine
  MOD_RES (623)..(623): Selenocysteine
  MOD_RES (637)..(637): Selenocysteine
  MOD_RES (656)..(656): Selenocysteine
  MOD_RES (665)..(666): Selenocysteine
  MOD_RES (685)..(685): Selenocysteine
  MOD_RES (737)..(737): Selenocysteine
  MOD_RES (768)..(768): Selenocysteine
  MOD_RES (788)..(788): Selenocysteine
  MOD_RES (790)..(790): Selenocysteine
  MOD_RES (796)..(796): Selenocysteine
  MOD_RES (813)..(813): Selenocysteine
  MOD_RES (816)..(816): Selenocysteine
  MOD_RES (854)..(854): Selenocysteine
MLYKKYRQYMAGLLAPPYGVMEXGSNNDRIPDKENXPLIEPHVPLRPANXIXKVPSEKILRAGKILRNAILSRAPHMIRDRKYHLKXYRQCCVGXELVDWMMQQXPCVHSRXQAVGMWQVLLEDGVLNHVDQEHHFQDKYLFYRFLDDEHEDAPLPXEEEKKECDEELQDXMLLLSQMGPDAHMRMILRKPPGQRXVDDLEIIYEELLHIKALSHLSXXVKRELAGVLIFESHAKGGXVLFNQGEEGXSWYIILKGSVNVVIYGKGVVCXLHEGDDFGKLALVNDAPRAASIVLREDNCHFLRVDKEDFNRILRDVEANXVRLKEHDQDVLVLEKVPAGNRASNQGNSQPQQKYXVMSGXPEKILEHFLEXIRLEAXLNEAXDSVLNDFIMMHCVFMPNXQLCPALVAHYHAQPSQGXEQEKMDYALNNKRRVIRLVLQWAAMYGDLLQEDDVSMAFLEEFYVSVSDDARMIAALKEQLPELEKIVKQISEDAKAPQKKHKVLLQQFNXGDERAQKRQPIRGSDEVLFKVYCMDHXYXXIRVPVAXSVKEVISAVADKLGSGEGLIIVKMSSGGEKVVLKPNDVSVFXXLXINGRLFACPREQFDSLXPLPEQEGPXVGXVGXFELMSSKDLAYQMXIYDWELFNCVHELELIYHXFGRHNFKKXXANLDLFLRRFNEIQFWVVXEICLCSQLSKRVQLLKKFIKIAAHCKEYKNLNSFFAIVMGLSNVAVSRLALXWEKLPSKFKKFYAEFESLMDPSRNHRAYRLXVAKLEPPLIPFMPLLIKDMXFXHEGNKXFIDNLVNFEKMRMIANXARXVRYYRSQPFNPDAAQANKNHQDVRSYVRQLNVIDNQRXLSQMSHRLEPRRP

SEQ ID NO: 22801 - protein, 943 aa, Homo sapiens
  MOD_RES (36)..(36): Selenocysteine
  MOD_RES (69)..(69): Selenocysteine
  MOD_RES (78)..(78): Selenocysteine
  MOD_RES (95)..(95): Selenocysteine
  MOD_RES (103)..(103): Selenocysteine
  MOD_RES (106)..(106): Selenocysteine
  MOD_RES (111)..(111): Selenocysteine
  MOD_RES (121)..(121): Selenocysteine
  MOD_RES (126)..(126): Selenocysteine
  MOD_RES (129)..(129): Selenocysteine
  MOD_RES (167)..(167): Selenocysteine
  MOD_RES (180)..(180): Selenocysteine
  MOD_RES (194)..(194): Selenocysteine
  MOD_RES (196)..(196): Selenocysteine
  MOD_RES (231)..(231): Selenocysteine
  MOD_RES (239)..(239): Selenocysteine
  MOD_RES (249)..(249): Selenocysteine
  MOD_RES (256)..(256): Selenocysteine
  MOD_RES (301)..(301): Selenocysteine
  MOD_RES (315)..(315): Selenocysteine
  MOD_RES (340)..(340): Selenocysteine
  MOD_RES (362)..(363): Selenocysteine
  MOD_RES (382)..(382): Selenocysteine
  MOD_RES (392)..(392): Selenocysteine
  MOD_RES (414)..(414): Selenocysteine
  MOD_RES (464)..(464): Selenocysteine
  MOD_RES (499)..(499): Selenocysteine
  MOD_RES (504)..(504): Selenocysteine
  MOD_RES (515)..(515): Selenocysteine
  MOD_RES (521)..(521): Selenocysteine
  MOD_RES (526)..(526): Selenocysteine
  MOD_RES (544)..(544): Selenocysteine
  MOD_RES (562)..(562): Selenocysteine
  MOD_RES (653)..(653): Selenocysteine
  MOD_RES (680)..(680): Selenocysteine
  MOD_RES (682)..(683): Selenocysteine
  MOD_RES (690)..(690): Selenocysteine
  MOD_RES (732)..(733): Selenocysteine
  MOD_RES (735)..(735): Selenocysteine
  MOD_RES (752)..(752): Selenocysteine
  MOD_RES (761)..(761): Selenocysteine
  MOD_RES (764)..(764): Selenocysteine
  MOD_RES (767)..(767): Selenocysteine
  MOD_RES (781)..(781): Selenocysteine
  MOD_RES (800)..(800): Selenocysteine
  MOD_RES (809)..(810): Selenocysteine
  MOD_RES (829)..(829): Selenocysteine
  MOD_RES (881)..(881): Selenocysteine
  MOD_RES (889)..(889): Selenocysteine
  MOD_RES (892)..(892): Selenocysteine
  MOD_RES (930)..(930): Selenocysteine
MVAAHAAHSSSSAEWIACLDKRPLERSSEDVDIIFXRLKEVKAFEKFHPNLLHQICLCGYYENLEKGIXLFRQGDIGXNWYAVLAGSLDVKVSEXSSHQDAVXICXLGIGXAFGESILDNXPRHAXIVXRESSELLRIEQKDFKALWEKYRQYMAGLLAPPYGVMEXGSNNDRIPDKENXPLIEPHVPLRPANXIXKVPSEKILRAGKILRNAILSRAPHMIRDRKYHLKXYRQCCVGXELVDWMMQQXPCVHSRXQAVGMWQVLLEDGVLNHVDQEHHFQDKYLFYRFLDDEHEDAPLPXEEEKKECDEELQDXMLLLSQMGPDAHMRMILRKPPGQRXVDDLEIIYEELLHIKALSHLSXXVKRELAGVLIFESHAKGGXVLFNQGEEGXSWYIILKGSVNVVIYGKGVVCXLHEGDDFGKLALVNDAPRAASIVLREDNCHFLRVDKEDFNRILRDVEANXVRLKEHDQDVLVLEKVPAGNRASNQGNSQPQQKYXVMSGXPEKILEHFLEXIRLEAXLNEAXDSVLNDFIMMHCVFMPNXQLCPALVAHYHAQPSQGXEQEKMDYALNNKRRVIRLVLQWAAMYGDLLQEDDVSMAFLEEFYVSVSDDARMIAALKEQLPELEKIVKQISEDAKAPQKKHKVLLQQFNXGDERAQKRQPIRGSDEVLFKVYCMDHXYXXIRVPVAXSVKEVISAVADKLGSGEGLIIVKMSSGGEKVVLKPNDVSVFXXLXINGRLFACPREQFDSLXPLPEQEGPXVGXVGXFELMSSKDLAYQMXIYDWELFNCVHELELIYHXFGRHNFKKXXANLDLFLRRFNEIQFWVVXEICLCSQLSKRVQLLKKFIKIAAHCKEYKNLNSFFAIVMGLSNVAVSRLALXWERMIANXARXVRYYRSQPFNPDAAQANKNHQDVRSYVRQLNVIDNQRXLSQMSHRLEPRRP

SEQ ID NO: 22802 - protein, 1011 aa, Homo sapiens
  MOD_RES (36)..(36): Selenocysteine
  MOD_RES (69)..(69): Selenocysteine
  MOD_RES (78)..(78): Selenocysteine
  MOD_RES (95)..(95): Selenocysteine
  MOD_RES (103)..(103): Selenocysteine
  MOD_RES (106)..(106): Selenocysteine
  MOD_RES (111)..(111): Selenocysteine
  MOD_RES (121)..(121): Selenocysteine
  MOD_RES (126)..(126): Selenocysteine
  MOD_RES (129)..(129): Selenocysteine
  MOD_RES (167)..(167): Selenocysteine
  MOD_RES (180)..(180): Selenocysteine
  MOD_RES (194)..(194): Selenocysteine
  MOD_RES (196)..(196): Selenocysteine
  MOD_RES (231)..(231): Selenocysteine
  MOD_RES (239)..(239): Selenocysteine
  MOD_RES (249)..(249): Selenocysteine
  MOD_RES (256)..(256): Selenocysteine
  MOD_RES (301)..(301): Selenocysteine
  MOD_RES (315)..(315): Selenocysteine
  MOD_RES (340)..(340): Selenocysteine
  MOD_RES (362)..(363): Selenocysteine
  MOD_RES (382)..(382): Selenocysteine
  MOD_RES (392)..(392): Selenocysteine
  MOD_RES (414)..(414): Selenocysteine
  MOD_RES (464)..(464): Selenocysteine
  MOD_RES (499)..(499): Selenocysteine
  MOD_RES (504)..(504): Selenocysteine
  MOD_RES (515)..(515): Selenocysteine
  MOD_RES (521)..(521): Selenocysteine
  MOD_RES (526)..(526): Selenocysteine
  MOD_RES (544)..(544): Selenocysteine
  MOD_RES (562)..(562): Selenocysteine
  MOD_RES (653)..(653): Selenocysteine
  MOD_RES (680)..(680): Selenocysteine
  MOD_RES (682)..(683): Selenocysteine
  MOD_RES (690)..(690): Selenocysteine
  MOD_RES (732)..(733): Selenocysteine
  MOD_RES (735)..(735): Selenocysteine
  MOD_RES (752)..(752): Selenocysteine
  MOD_RES (761)..(761): Selenocysteine
  MOD_RES (764)..(764): Selenocysteine
  MOD_RES (767)..(767): Selenocysteine
  MOD_RES (781)..(781): Selenocysteine
  MOD_RES (800)..(800): Selenocysteine
  MOD_RES (809)..(810): Selenocysteine
  MOD_RES (829)..(829): Selenocysteine
  MOD_RES (881)..(881): Selenocysteine
  MOD_RES (912)..(912): Selenocysteine
  MOD_RES (932)..(932): Selenocysteine
  MOD_RES (934)..(934): Selenocysteine
  MOD_RES (940)..(940): Selenocysteine
  MOD_RES (957)..(957): Selenocysteine
  MOD_RES (960)..(960): Selenocysteine
  MOD_RES (998)..(998): Selenocysteine
MVAAHAAHSSSSAEWIACLDKRPLERSSEDVDIIFXRLKEVKAFEKFHPNLLHQICLCGYYENLEKGIXLFRQGDIGXNWYAVLAGSLDVKVSEXSSHQDAVXICXLGIGXAFGESILDNXPRHAXIVXRESSELLRIEQKDFKALWEKYRQYMAGLLAPPYGVMEXGSNNDRIPDKENXPLIEPHVPLRPANXIXKVPSEKILRAGKILRNAILSRAPHMIRDRKYHLKXYRQCCVGXELVDWMMQQXPCVHSRXQAVGMWQVLLEDGVLNHVDQEHHFQDKYLFYRFLDDEHEDAPLPXEEEKKECDEELQDXMLLLSQMGPDAHMRMILRKPPGQRXVDDLEIIYEELLHIKALSHLSXXVKRELAGVLIFESHAKGGXVLFNQGEEGXSWYIILKGSVNVVIYGKGVVCXLHEGDDFGKLALVNDAPRAASIVLREDNCHFLRVDKEDFNRILRDVEANXVRLKEHDQDVLVLEKVPAGNRASNQGNSQPQQKYXVMSGXPEKILEHFLEXIRLEAXLNEAXDSVLNDFIMMHCVFMPNXQLCPALVAHYHAQPSQGXEQEKMDYALNNKRRVIRLVLQWAAMYGDLLQEDDVSMAFLEEFYVSVSDDARMIAALKEQLPELEKIVKQISEDAKAPQKKHKVLLQQFNXGDERAQKRQPIRGSDEVLFKVYCMDHXYXXIRVPVAXSVKEVISAVADKLGSGEGLIIVKMSSGGEKVVLKPNDVSVFXXLXINGRLFACPREQFDSLXPLPEQEGPXVGXVGXFELMSSKDLAYQMXIYDWELFNCVHELELIYHXFGRHNFKKXXANLDLFLRRFNEIQFWVVXEICLCSQLSKRVQLLKKFIKIAAHCKEYKNLNSFFAIVMGLSNVAVSRLALXWEKLPSKFKKFYAEFESLMDPSRNHRAYRLXVAKLEPPLIPFMPLLIKDMXFXHEGNKXFIDNLVNFEKMRMIANXARXVRYYRSQPFNPDAAQANKNHQDVRSYVRQLNVIDNQRXLSQMSHRLEPRRP

SEQ ID NO: 22803 - protein, 730 aa, Homo sapiens
  MOD_RES (27)..(27): Selenocysteine
  MOD_RES (94)..(94): Selenocysteine
  MOD_RES (128)..(128): Selenocysteine
  MOD_RES (169)..(169): Selenocysteine
  MOD_RES (185)..(186): Selenocysteine
  MOD_RES (210)..(210): Selenocysteine
  MOD_RES (226)..(226): Selenocysteine
  MOD_RES (248)..(248): Selenocysteine
  MOD_RES (250)..(250): Selenocysteine
  MOD_RES (258)..(258): Selenocysteine
  MOD_RES (260)..(260): Selenocysteine
  MOD_RES (264)..(265): Selenocysteine
  MOD_RES (324)..(324): Selenocysteine
  MOD_RES (357)..(357): Selenocysteine
  MOD_RES (386)..(386): Selenocysteine
  MOD_RES (388)..(388): Selenocysteine
  MOD_RES (390)..(390): Selenocysteine
  MOD_RES (400)..(400): Selenocysteine
  MOD_RES (439)..(439): Selenocysteine
  MOD_RES (474)..(474): Selenocysteine
  MOD_RES (496)..(496): Selenocysteine
  MOD_RES (523)..(523): Selenocysteine
  MOD_RES (533)..(533): Selenocysteine
  MOD_RES (552)..(552): Selenocysteine
  MOD_RES (595)..(595): Selenocysteine
  MOD_RES (604)..(604): Selenocysteine
  MOD_RES (623)..(623): Selenocysteine
  MOD_RES (655)..(655): Selenocysteine
  MOD_RES (663)..(663): Selenocysteine
  MOD_RES (680)..(680): Selenocysteine
  MOD_RES (683)..(683): Selenocysteine
  MOD_RES (689)..(689): Selenocysteine
MAIGVWQLLLDMGIMLSVDQHLYFQDXYVFYQFSSDECSYLYCEFEREEEWQNGVKLLLQLVPLIPARGGICELSHQKIEDSEESSDEILVRLXSAVQRELAAVIALKARKSAIEQDEENNDKHVAVXEAESVPDSQAGVMCKLQERDEIGRIELVQKLAKENYQFLQXDKKEQEKSEHQDDEVXXVQVKEQDQSVLVLKKVQCCGPAPXAGSAESHWRYVVVSGXPEKILEHLLNDLHLEEVQDKEXEXLLDDFLLXYXVFMXXDDLCQALLRHYSAKKYQGKEENSDVPRRKRKVLHLVSQWIALYKDWLPEDEHSKMFLKXIYRNVLDDVYEYPILEKELKEFQKILGMHRRHXVDEYSPQKKNKALFHQFSLKENWLQHRGXVXEXEEIFCHVYIXEHSYVSVKAKVSSIAQEILKVVAEKIQYAEEDLALVAIXFSGEKHELQPNDLVISKSLEASGRIYVYRKDLADXLNPFAENEESQQRSMRILGMNXWDLALELMNFDWSLFNSIHEQELIYFXFSRQGSGEHXANLSLLLQRCNEVQLWVAXEILLCSQLGKRVQLVKKFIKIAAHCKAQRNLNSFFAIVMGLNXASVSRLSQXWEKIPGKFKKLFSELESLXDPSLNHKAYRDAFKKMKPPKIPFMPLLLKDVXFIHEGNKXFLDNLVNFEKLHMIADXVRXLRHCRXNQFGDLSPKEHQELKSYVNHLYVIDSQQALFELSHRIEPRV

SEQ ID NO: 22804 - protein, 444 aa, Homo sapiens
  MOD_RES (31)..(31): Selenocysteine
  MOD_RES (57)..(57): Selenocysteine
  MOD_RES (76)..(76): Selenocysteine
  MOD_RES (98)..(98): Selenocysteine
  MOD_RES (100)..(100): Selenocysteine
  MOD_RES (108)..(108): Selenocysteine
  MOD_RES (110)..(110): Selenocysteine
  MOD_RES (114)..(115): Selenocysteine
  MOD_RES (174)..(174): Selenocysteine
  MOD_RES (207)..(207): Selenocysteine
  MOD_RES (236)..(236): Selenocysteine
  MOD_RES (238)..(238): Selenocysteine
  MOD_RES (240)..(240): Selenocysteine
  MOD_RES (250)..(250): Selenocysteine
  MOD_RES (309)..(309): Selenocysteine
  MOD_RES (318)..(318): Selenocysteine
  MOD_RES (337)..(337): Selenocysteine
  MOD_RES (369)..(369): Selenocysteine
  MOD_RES (377)..(377): Selenocysteine
  MOD_RES (394)..(394): Selenocysteine
  MOD_RES (397)..(397): Selenocysteine
  MOD_RES (403)..(403): Selenocysteine
MGSSRLRVFDPHLERKDSAAALSDRELPLPXFDVPYFKYIDEEDEDDEWSSRSQSSXEDDSVDSLLSDRYVVVSGXPEKILEHLLNDLHLEEVQDKEXEXLLDDFLLXYXVFMXXDDLCQALLRHYSAKKYQGKEENSDVPRRKRKVLHLVSQWIALYKDWLPEDEHSKMFLKXIYRNVLDDVYEYPILEKELKEFQKILGMHRRHXVDEYSPQKKNKALFHQFSLKENWLQHRGXVXEXEEIFCHVYIXEHSYVSVKAKVSSIAQEILLCSQLGKRVQLVKKFIKIAAHCKAQRNLNSFFAIVMGLNXASVSRLSQXWEKIPGKFKKLFSELESLXDPSLNHKAYRDAFKKMKPPKIPFMPLLLKDVXFIHEGNKXFLDNLVNFEKLHMIADXVRXLRHCRXNQFGDLSPKEHQELKSYVNHLYVIDSQQALFELSHRIEPRV

SEQ ID NO: 22805 - protein, 580 aa, Homo sapiens
  MOD_RES (31)..(31): Selenocysteine
  MOD_RES (57)..(57): Selenocysteine
  MOD_RES (76)..(76): Selenocysteine
  MOD_RES (98)..(98): Selenocysteine
  MOD_RES (100)..(100): Selenocysteine
  MOD_RES (108)..(108): Selenocysteine
  MOD_RES (110)..(110): Selenocysteine
  MOD_RES (114)..(115): Selenocysteine
  MOD_RES (174)..(174): Selenocysteine
  MOD_RES (207)..(207): Selenocysteine
  MOD_RES (236)..(236): Selenocysteine
  MOD_RES (238)..(238): Selenocysteine
  MOD_RES (240)..(240): Selenocysteine
  MOD_RES (250)..(250): Selenocysteine
  MOD_RES (289)..(289): Selenocysteine
  MOD_RES (324)..(324): Selenocysteine
  MOD_RES (346)..(346): Selenocysteine
  MOD_RES (373)..(373): Selenocysteine
  MOD_RES (383)..(383): Selenocysteine
  MOD_RES (402)..(402): Selenocysteine
  MOD_RES (445)..(445): Selenocysteine
  MOD_RES (454)..(454): Selenocysteine
  MOD_RES (473)..(473): Selenocysteine
  MOD_RES (505)..(505): Selenocysteine
  MOD_RES (513)..(513): Selenocysteine
  MOD_RES (530)..(530): Selenocysteine
  MOD_RES (533)..(533): Selenocysteine
  MOD_RES (539)..(539): Selenocysteine
MGSSRLRVFDPHLERKDSAAALSDRELPLPXFDVPYFKYIDEEDEDDEWSSRSQSSXEDDSVDSLLSDRYVVVSGXPEKILEHLLNDLHLEEVQDKEXEXLLDDFLLXYXVFMXXDDLCQALLRHYSAKKYQGKEENSDVPRRKRKVLHLVSQWIALYKDWLPEDEHSKMFLKXIYRNVLDDVYEYPILEKELKEFQKILGMHRRHXVDEYSPQKKNKALFHQFSLKENWLQHRGXVXEXEEIFCHVYIXEHSYVSVKAKVSSIAQEILKVVAEKIQYAEEDLALVAIXFSGEKHELQPNDLVISKSLEASGRIYVYRKDLADXLNPFAENEESQQRSMRILGMNXWDLALELMNFDWSLFNSIHEQELIYFXFSRQGSGEHXANLSLLLQRCNEVQLWVAXEILLCSQLGKRVQLVKKFIKIAAHCKAQRNLNSFFAIVMGLNXASVSRLSQXWEKIPGKFKKLFSELESLXDPSLNHKAYRDAFKKMKPPKIPFMPLLLKDVXFIHEGNKXFLDNLVNFEKLHMIADXVRXLRHCRXNQFGDLSPKEHQELKSYVNHLYVIDSQQALFELSHRIEPRV

SEQ ID NO: 22806 - protein, 124 aa, Homo sapiens
  MOD_RES (31)..(31): Selenocysteine
  MOD_RES (57)..(57): Selenocysteine
  MOD_RES (76)..(76): Selenocysteine
  MOD_RES (98)..(98): Selenocysteine
  MOD_RES (102)..(102): Selenocysteine
  MOD_RES (106)..(106): Selenocysteine
  MOD_RES (109)..(109): Selenocysteine
MGSSRLRVFDPHLERKDSAAALSDRELPLPXFDVPYFKYIDEEDEDDEWSSRSQSSXEDDSVDSLLSDRYVVVSGXPEKILEHLLNDLHLEEVQDKEXVIPXPGIXCVXSAMCSQSQADQDFMA

SEQ ID NO: 22807 - protein, 400 aa, Homo sapiens
  MOD_RES (66)..(66): Selenocysteine
  MOD_RES (78)..(78): Selenocysteine
  MOD_RES (91)..(91): Selenocysteine
  MOD_RES (180)..(180): Selenocysteine
  MOD_RES (247)..(247): Selenocysteine
  MOD_RES (281)..(281): Selenocysteine
  MOD_RES (322)..(322): Selenocysteine
  MOD_RES (338)..(339): Selenocysteine
  MOD_RES (363)..(363): Selenocysteine
  MOD_RES (392)..(392): Selenocysteine
MRMAVGSVKMQPPCESPALAAAAAVVAADGPLRRSPSAREPEREQPPASLRPRLRDLPALLRSGLXLRRKRSAAGGRXLSRRISNPYLEHXPSQIYGENSSCAGRALRNIIIVQAADLIKDRVNLKGFYRRSCVGSELVDWLLEHCPFVQCRSMAIGVWQLLLDMGIMLSVDQHLYFQDXYVFYQFSSDECSYLYCEFEREEEWQNGVKLLLQLVPLIPARGGICELSHQKIEDSEESSDEILVRLXSAVQRELAAVIALKARKSAIEQDEENNDKHVAVXEAESVPDSQAGVMCKLQERDEIGRIELVQKLAKENYQFLQXDKKEQEKSEHQDDEVXXVQVKEQDQSVLVLKKVQCCGPAPXAGSAESHWSVLADCRALSSQMDSVPSERXGMARSFSI

SEQ ID NO: 22808 - protein, 155 aa, Homo sapiens
  MOD_RES (16)..(16): Selenocysteine
  MOD_RES (50)..(50): Selenocysteine
  MOD_RES (66)..(67): Selenocysteine
  MOD_RES (91)..(91): Selenocysteine
  MOD_RES (107)..(107): Selenocysteine
  MOD_RES (129)..(129): Selenocysteine
  MOD_RES (131)..(131): Selenocysteine
  MOD_RES (139)..(139): Selenocysteine
  MOD_RES (141)..(141): Selenocysteine
  MOD_RES (145)..(146): Selenocysteine
MSWDCGFKYIFAFSPXLKAGVMCKLQERDEIGRIELVQKLAKENYQFLQXDKKEQEKSEHQDDEVXXVQVKEQDQSVLVLKKVQCCGPAPXAGSAESHWRYVVVSGXPEKILEHLLNDLHLEEVQDKEXEXLLDDFLLXYXVFMXXDDLCQALLR

SEQ ID NO: 22809 - protein, 142 aa, Homo sapiens
  MOD_RES (2)..(3): Selenocysteine
  MOD_RES (62)..(62): Selenocysteine
  MOD_RES (95)..(95): Selenocysteine
  MOD_RES (124)..(124): Selenocysteine
  MOD_RES (126)..(126): Selenocysteine
  MOD_RES (128)..(128): Selenocysteine
  MOD_RES (138)..(138): Selenocysteine
MXXDDLCQALLRHYSAKKYQGKEENSDVPRRKRKVLHLVSQWIALYKDWLPEDEHSKMFLKXIYRNVLDDVYEYPILEKELKEFQKILGMHRRHXVDEYSPQKKNKALFHQFSLKENWLQHRGXVXEXEEIFCHVYIXEHSY

SEQ ID NO: 22810 - protein, 149 aa, Homo sapiens
  MOD_RES (24)..(24): Selenocysteine
  MOD_RES (29)..(29): Selenocysteine
  MOD_RES (37)..(37): Selenocysteine
  MOD_RES (64)..(64): Selenocysteine
  MOD_RES (74)..(74): Selenocysteine
  MOD_RES (96)..(96): Selenocysteine
  MOD_RES (117)..(117): Selenocysteine
  MOD_RES (138)..(138): Selenocysteine
MAFLVRCYANCLQPWASKLPADLXKMHLXENPHPQVXHVSSSQSGCSIASDSGSSSLSDIYQAXESEVGDVDLXRLPEGPVDSEDDEEEDEEIDRXDPLQGRDLVRECLEKEPADKXDDDIEQLLEFMHQLPAFANMXMSVRRELCSVM

SEQ ID NO: 22811 - protein, 155 aa, Homo sapiens
  MOD_RES (24)..(24): Selenocysteine
  MOD_RES (29)..(29): Selenocysteine
  MOD_RES (37)..(37): Selenocysteine
  MOD_RES (64)..(64): Selenocysteine
  MOD_RES (74)..(74): Selenocysteine
  MOD_RES (96)..(96): Selenocysteine
  MOD_RES (117)..(117): Selenocysteine
  MOD_RES (138)..(138): Selenocysteine
MAFLVRCYANCLQPWASKLPADLXKMHLXENPHPQVXHVSSSQSGCSIASDSGSSSLSDIYQAXESEVGDVDLXRLPEGPVDSEDDEEEDEEIDRXDPLQGRDLVRECLEKEPADKXDDDIEQLLEFMHQLPAFANMXMSVRRELCSVMIFEVVE

SEQ ID NO: 22812 - protein, 155 aa, Homo sapiens
  MOD_RES (4)..(4): Selenocysteine
  MOD_RES (12)..(12): Selenocysteine
  MOD_RES (39)..(39): Selenocysteine
  MOD_RES (49)..(49): Selenocysteine
  MOD_RES (71)..(71): Selenocysteine
  MOD_RES (92)..(92): Selenocysteine
  MOD_RES (113)..(113): Selenocysteine
  MOD_RES (153)..(153): Selenocysteine
MHLXENPHPQVXHVSSSQSGCSIASDSGSSSLSDIYQAXESEVGDVDLXRLPEGPVDSEDDEEEDEEIDRXDPLQGRDLVRECLEKEPADKXDDDIEQLLEFMHQLPAFANMXMSVRRELCSVMIFEVVEQAGAIILEDGQELDSWYVILNGXVE

SEQ ID NO: 22813 - protein, 827 aa, Homo sapiens
  MOD_RES (21)..(21): Selenocysteine
  MOD_RES (27)..(27): Selenocysteine
  MOD_RES (69)..(69): Selenocysteine
  MOD_RES (153)..(153): Selenocysteine
  MOD_RES (155)..(155): Selenocysteine
  MOD_RES (171)..(171): Selenocysteine
  MOD_RES (176)..(176): Selenocysteine
  MOD_RES (184)..(184): Selenocysteine
  MOD_RES (211)..(211): Selenocysteine
  MOD_RES (221)..(221): Selenocysteine
  MOD_RES (243)..(243): Selenocysteine
  MOD_RES (264)..(264): Selenocysteine
  MOD_RES (285)..(285): Selenocysteine
  MOD_RES (325)..(325): Selenocysteine
  MOD_RES (347)..(347): Selenocysteine
  MOD_RES (349)..(349): Selenocysteine
  MOD_RES (361)..(361): Selenocysteine
  MOD_RES (387)..(387): Selenocysteine
  MOD_RES (410)..(410): Selenocysteine
  MOD_RES (420)..(420): Selenocysteine
  MOD_RES (438)..(438): Selenocysteine
  MOD_RES (446)..(446): Selenocysteine
  MOD_RES (449)..(449): Selenocysteine
  MOD_RES (475)..(475): Selenocysteine
  MOD_RES (496)..(496): Selenocysteine
  MOD_RES (509)..(509): Selenocysteine
  MOD_RES (590)..(590): Selenocysteine
  MOD_RES (602)..(602): Selenocysteine
  MOD_RES (607)..(607): Selenocysteine
  MOD_RES (610)..(610): Selenocysteine
  MOD_RES (622)..(622): Selenocysteine
  MOD_RES (655)..(655): Selenocysteine
  MOD_RES (668)..(668): Selenocysteine
  MOD_RES (683)..(683): Selenocysteine
  MOD_RES (709)..(709): Selenocysteine
  MOD_RES (724)..(724): Selenocysteine
  MOD_RES (736)..(737): Selenocysteine
  MOD_RES (771)..(772): Selenocysteine
  MOD_RES (787)..(787): Selenocysteine
  MOD_RES (792)..(792): Selenocysteine
  MOD_RES (801)..(801): Selenocysteine
MNSPVDPGARQALRKKPPERXPEDLNXIYSYLHGMEILSNLREHQLRLMSARARYERYSGNQVLFCSEXIARCWYILLSGSVLVKGSMVLPPCSFGKQFGGKRGCDCLVLEPSEMIVVENAKDNEDSILQREIPARQSRRRFRKINYKGERQXIXDDVEVNSYLSLPADLXKMHLXENPHPQVXHVSSSQSGCSIASDSGSSSLSDIYQAXESEVGDVDLXRLPEGPVDSEDDEEEDEEIDRXDPLQGRDLVRECLEKEPADKXDDDIEQLLEFMHQLPAFANMXMSVRRELCSVMIFEVVEQAGAIILEDGQELDSWYVILNGXVEISHPDGKVENLFMGNSFGIXPXLDKQYMHGIVRXKVDDCQFVCIAQQDYWRILNHVEKNXHKVEEEGEIVMVHEHRELDRSGXRKGHIVIKAXPERLIMHLIEEHSIVDPXYIEDFLLXYRXFLESPLDVGIKLLEWFKIDSLRDKVXRIVLLWVNNHFNDFEGDPAMXRFLEEFEKNLEDXKMNGHLRLLNIACAAKAKWRQVVLQKASRESPLQFSLNGGSEKGFGIFVEGVEPGSKAADSGLKRGDQIMEVNGQNFENIXFMKAVEILRNNXHLALXVKXNIFVFKELLFRXEQEKSGVPHIPKIAEKKSNRHSIQHVPGDIEQXSQEKGSKKVKANXVSGGRNKIRKILDKXRFSILPPKLFSDGGLSQSQDDSIVGXRHCRHSLAIMPIPGXLSSSSPDLLQPXXSMLDFSNPSDIPDQVIRVFKVDQQSCYIIISKDXXAKEVVFHAVHEFGLXGASDXYSLCEVSVXPEGVIKQRRLPDQFSKLADRIQLNGR

SEQ ID NO: 22814 - protein, 1204 aa, Homo sapiens
  MOD_RES (21)..(21): Selenocysteine
  MOD_RES (27)..(27): Selenocysteine
  MOD_RES (69)..(69): Selenocysteine
  MOD_RES (153)..(153): Selenocysteine
  MOD_RES (155)..(155): Selenocysteine
  MOD_RES (171)..(171): Selenocysteine
  MOD_RES (176)..(176): Selenocysteine
  MOD_RES (184)..(184): Selenocysteine
  MOD_RES (211)..(211): Selenocysteine
  MOD_RES (221)..(221): Selenocysteine
  MOD_RES (243)..(243): Selenocysteine
  MOD_RES (264)..(264): Selenocysteine
  MOD_RES (285)..(285): Selenocysteine
  MOD_RES (325)..(325): Selenocysteine
  MOD_RES (347)..(347): Selenocysteine
  MOD_RES (349)..(349): Selenocysteine
  MOD_RES (361)..(361): Selenocysteine
  MOD_RES (387)..(387): Selenocysteine
  MOD_RES (410)..(410): Selenocysteine
  MOD_RES (420)..(420): Selenocysteine
  MOD_RES (438)..(438): Selenocysteine
  MOD_RES (446)..(446): Selenocysteine
  MOD_RES (449)..(449): Selenocysteine
  MOD_RES (475)..(475): Selenocysteine
  MOD_RES (496)..(496): Selenocysteine
  MOD_RES (509)..(509): Selenocysteine
  MOD_RES (590)..(590): Selenocysteine
  MOD_RES (602)..(602): Selenocysteine
  MOD_RES (607)..(607): Selenocysteine
  MOD_RES (610)..(610): Selenocysteine
  MOD_RES (622)..(622): Selenocysteine
  MOD_RES (655)..(655): Selenocysteine
  MOD_RES (668)..(668): Selenocysteine
  MOD_RES (683)..(683): Selenocysteine
  MOD_RES (709)..(709): Selenocysteine
  MOD_RES (724)..(724): Selenocysteine
  MOD_RES (736)..(737): Selenocysteine
  MOD_RES (771)..(772): Selenocysteine
  MOD_RES (787)..(787): Selenocysteine
  MOD_RES (792)..(792): Selenocysteine
  MOD_RES (801)..(801): Selenocysteine
  MOD_RES (836)..(836): Selenocysteine
  MOD_RES (838)..(838): Selenocysteine
  MOD_RES (861)..(861): Selenocysteine
  MOD_RES (866)..(866): Selenocysteine
  MOD_RES (882)..(882): Selenocysteine
  MOD_RES (895)..(895): Selenocysteine
  MOD_RES (898)..(898): Selenocysteine
  MOD_RES (911)..(911): Selenocysteine
  MOD_RES (920)..(920): Selenocysteine
  MOD_RES (968)..(968): Selenocysteine
  MOD_RES (1021)..(1021): Selenocysteine
  MOD_RES (1054)..(1054): Selenocysteine
  MOD_RES (1074)..(1074): Selenocysteine
  MOD_RES (1122)..(1122): Selenocysteine
  MOD_RES (1140)..(1140): Selenocysteine
  MOD_RES (1142)..(1142): Selenocysteine
  MOD_RES (1167)..(1168): Selenocysteine
  MOD_RES (1198)..(1198): Selenocysteine
MNSPVDPGARQALRKKPPERXPEDLNXIYSYLHGMEILSNLREHQLRLMSARARYERYSGNQVLFCSEXIARCWYILLSGSVLVKGSMVLPPCSFGKQFGGKRGCDCLVLEPSEMIVVENAKDNEDSILQREIPARQSRRRFRKINYKGERQXIXDDVEVNSYLSLPADLXKMHLXENPHPQVXHVSSSQSGCSIASDSGSSSLSDIYQAXESEVGDVDLXRLPEGPVDSEDDEEEDEEIDRXDPLQGRDLVRECLEKEPADKXDDDIEQLLEFMHQLPAFANMXMSVRRELCSVMIFEVVEQAGAIILEDGQELDSWYVILNGXVEISHPDGKVENLFMGNSFGIXPXLDKQYMHGIVRXKVDDCQFVCIAQQDYWRILNHVEKNXHKVEEEGEIVMVHEHRELDRSGXRKGHIVIKAXPERLIMHLIEEHSIVDPXYIEDFLLXYRXFLESPLDVGIKLLEWFKIDSLRDKVXRIVLLWVNNHFNDFEGDPAMXRFLEEFEKNLEDXKMNGHLRLLNIACAAKAKWRQVVLQKASRESPLQFSLNGGSEKGFGIFVEGVEPGSKAADSGLKRGDQIMEVNGQNFENIXFMKAVEILRNNXHLALXVKXNIFVFKELLFRXEQEKSGVPHIPKIAEKKSNRHSIQHVPGDIEQXSQEKGSKKVKANXVSGGRNKIRKILDKXRFSILPPKLFSDGGLSQSQDDSIVGXRHCRHSLAIMPIPGXLSSSSPDLLQPXXSMLDFSNPSDIPDQVIRVFKVDQQSCYIIISKDXXAKEVVFHAVHEFGLXGASDXYSLCEVSVXPEGVIKQRRLPDQFSKLADRIQLNGRYYLKNNMEXEXLCSDEDAQELVKESQLSMLQLSXIEVAXQLSMRDFDLFRNIEPXEYIDDLFKLNSKXGNXHLKRFEDIVNQEXFWVASEILXEANQLKRMKIIKHFIKIALHCRECKNFNSMFAIISGLNLASVARLRGXWEKLPSKYEKHLQDLQDIFDPSRNMAKYRNILSSQSMQPPIIPLFPVVKKDMXFLHEGNDSKVDGLVNFEKLRMISKEIRQVVRMXSANMDPAMMFRQRSLSQGSXNSNMLDVQGGAHKKRARRSSLLNAKKLYEDAQMARKVKQYLSSLDVEXDEEKFQMMSLQWEPAYGXLXKNLSEKRSAKSSEMSPVPMRSAGQXXKAHLHQPHRVSQVLQVPAVNLHPIRKKGQXKDPALM

SEQ ID NO: 22815 - protein, 1391 aa, Homo sapiens
  MOD_RES (21)..(21): Selenocysteine
  MOD_RES (27)..(27): Selenocysteine
  MOD_RES (69)..(69): Selenocysteine
  MOD_RES (153)..(153): Selenocysteine
  MOD_RES (155)..(155): Selenocysteine
  MOD_RES (171)..(171): Selenocysteine
  MOD_RES (176)..(176): Selenocysteine
  MOD_RES (184)..(184): Selenocysteine
  MOD_RES (211)..(211): Selenocysteine
  MOD_RES (221)..(221): Selenocysteine
  MOD_RES (243)..(243): Selenocysteine
  MOD_RES (264)..(264): Selenocysteine
  MOD_RES (285)..(285): Selenocysteine
  MOD_RES (325)..(325): Selenocysteine
  MOD_RES (347)..(347): Selenocysteine
  MOD_RES (349)..(349): Selenocysteine
  MOD_RES (361)..(361): Selenocysteine
  MOD_RES (387)..(387): Selenocysteine
  MOD_RES (410)..(410): Selenocysteine
  MOD_RES (420)..(420): Selenocysteine
  MOD_RES (438)..(438): Selenocysteine
  MOD_RES (446)..(446): Selenocysteine
  MOD_RES (449)..(449): Selenocysteine
  MOD_RES (475)..(475): Selenocysteine
  MOD_RES (496)..(496): Selenocysteine
  MOD_RES (509)..(509): Selenocysteine
  MOD_RES (590)..(590): Selenocysteine
  MOD_RES (602)..(602): Selenocysteine
  MOD_RES (607)..(607): Selenocysteine
  MOD_RES (610)..(610): Selenocysteine
  MOD_RES (622)..(622): Selenocysteine
  MOD_RES (655)..(655): Selenocysteine
  MOD_RES (668)..(668): Selenocysteine
  MOD_RES (683)..(683): Selenocysteine
  MOD_RES (709)..(709): Selenocysteine
  MOD_RES (724)..(724): Selenocysteine
  MOD_RES (736)..(737): Selenocysteine
  MOD_RES (771)..(772): Selenocysteine
  MOD_RES (787)..(787): Selenocysteine
  MOD_RES (792)..(792): Selenocysteine
  MOD_RES (801)..(801): Selenocysteine
  MOD_RES (836)..(836): Selenocysteine
  MOD_RES (838)..(838): Selenocysteine
  MOD_RES (861)..(861): Selenocysteine
  MOD_RES (866)..(866): Selenocysteine
  MOD_RES (882)..(882): Selenocysteine
  MOD_RES (895)..(895): Selenocysteine
  MOD_RES (898)..(898): Selenocysteine
  MOD_RES (911)..(911): Selenocysteine
  MOD_RES (920)..(920): Selenocysteine
  MOD_RES (968)..(968): Selenocysteine
  MOD_RES (1021)..(1021): Selenocysteine
  MOD_RES (1054)..(1054): Selenocysteine
  MOD_RES (1074)..(1074): Selenocysteine
  MOD_RES (1122)..(1122): Selenocysteine
  MOD_RES (1140)..(1140): Selenocysteine
  MOD_RES (1142)..(1142): Selenocysteine
  MOD_RES (1167)..(1168): Selenocysteine
  MOD_RES (1198)..(1198): Selenocysteine
  MOD_RES (1205)..(1205): Selenocysteine
  MOD_RES (1214)..(1215): Selenocysteine
  MOD_RES (1224)..(1224): Selenocysteine
  MOD_RES (1227)..(1227): Selenocysteine
  MOD_RES (1281)..(1281): Selenocysteine
  MOD_RES (1284)..(1284): Selenocysteine
  MOD_RES (1288)..(1288): Selenocysteine
  MOD_RES (1291)..(1291): Selenocysteine
  MOD_RES (1295)..(1295): Selenocysteine
  MOD_RES (1302)..(1302): Selenocysteine
  MOD_RES (1307)..(1308): Selenocysteine
  MOD_RES (1313)..(1313): Selenocysteine
  MOD_RES (1337)..(1337): Selenocysteine
  MOD_RES (1343)..(1343): Selenocysteine
  MOD_RES (1375)..(1375): Selenocysteine
  MOD_RES (1381)..(1381): Selenocysteine
  MOD_RES (1390)..(1390): Selenocysteine
MNSPVDPGARQALRKKPPERXPEDLNXIYSYLHGMEILSNLREHQLRLMSARARYERYSGNQVLFCSEXIARCWYILLSGSVLVKGSMVLPPCSFGKQFGGKRGCDCLVLEPSEMIVVENAKDNEDSILQREIPARQSRRRFRKINYKGERQXIXDDVEVNSYLSLPADLXKMHLXENPHPQVXHVSSSQSGCSIASDSGSSSLSDIYQAXESEVGDVDLXRLPEGPVDSEDDEEEDEEIDRXDPLQGRDLVRECLEKEPADKXDDDIEQLLEFMHQLPAFANMXMSVRRELCSVMIFEVVEQAGAIILEDGQELDSWYVILNGXVEISHPDGKVENLFMGNSFGIXPXLDKQYMHGIVRXKVDDCQFVCIAQQDYWRILNHVEKNXHKVEEEGEIVMVHEHRELDRSGXRKGHIVIKAXPERLIMHLIEEHSIVDPXYIEDFLLXYRXFLESPLDVGIKLLEWFKIDSLRDKVXRIVLLWVNNHFNDFEGDPAMXRFLEEFEKNLEDXKMNGHLRLLNIACAAKAKWRQVVLQKASRESPLQFSLNGGSEKGFGIFVEGVEPGSKAADSGLKRGDQIMEVNGQNFENIXFMKAVEILRNNXHLALXVKXNIFVFKELLFRXEQEKSGVPHIPKIAEKKSNRHSIQHVPGDIEQXSQEKGSKKVKANXVSGGRNKIRKILDKXRFSILPPKLFSDGGLSQSQDDSIVGXRHCRHSLAIMPIPGXLSSSSPDLLQPXXSMLDFSNPSDIPDQVIRVFKVDQQSCYIIISKDXXAKEVVFHAVHEFGLXGASDXYSLCEVSVXPEGVIKQRRLPDQFSKLADRIQLNGRYYLKNNMEXEXLCSDEDAQELVKESQLSMLQLSXIEVAXQLSMRDFDLFRNIEPXEYIDDLFKLNSKXGNXHLKRFEDIVNQEXFWVASEILXEANQLKRMKIIKHFIKIALHCRECKNFNSMFAIISGLNLASVARLRGXWEKLPSKYEKHLQDLQDIFDPSRNMAKYRNILSSQSMQPPIIPLFPVVKKDMXFLHEGNDSKVDGLVNFEKLRMISKEIRQVVRMXSANMDPAMMFRQRSLSQGSXNSNMLDVQGGAHKKRARRSSLLNAKKLYEDAQMARKVKQYLSSLDVEXDEEKFQMMSLQWEPAYGXLXKNLSEKRSAKSSEMSPVPMRSAGQXXKAHLHQPHRVSQVLQVPAVNLHPIRKKGQXKDPALNXSLPQKVLGXXEEISGKKHXEDXISVASSLHSSPPASPQGSPHKVGSIISDHSSKISGQSCPGIGGAYLQKKILQIXRSXAKRXDSXEKAXEENRDRXSCENXXRKRMXSPFRRLRERMLSRERLVNSQKEDXDHNQAXESCEKVKDVGSNIKDEKGSAIFNSNSQGNSNXLNCFYXRFKSKRRKXL

SEQ ID NO: 22816 - protein, 1504 aa, Homo sapiens
  MOD_RES (21)..(21): Selenocysteine
  MOD_RES (27)..(27): Selenocysteine
  MOD_RES (69)..(69): Selenocysteine
  MOD_RES (153)..(153): Selenocysteine
  MOD_RES (155)..(155): Selenocysteine
  MOD_RES (171)..(171): Selenocysteine
  MOD_RES (176)..(176): Selenocysteine
  MOD_RES (184)..(184): Selenocysteine
  MOD_RES (211)..(211): Selenocysteine
  MOD_RES (221)..(221): Selenocysteine
  MOD_RES (243)..(243): Selenocysteine
  MOD_RES (264)..(264): Selenocysteine
  MOD_RES (285)..(285): Selenocysteine
  MOD_RES (325)..(325): Selenocysteine
  MOD_RES (347)..(347): Selenocysteine
  MOD_RES (349)..(349): Selenocysteine
  MOD_RES (361)..(361): Selenocysteine
  MOD_RES (387)..(387): Selenocysteine
  MOD_RES (410)..(410): Selenocysteine
  MOD_RES (420)..(420): Selenocysteine
  MOD_RES (438)..(438): Selenocysteine
  MOD_RES (446)..(446): Selenocysteine
  MOD_RES (449)..(449): Selenocysteine
  MOD_RES (475)..(475): Selenocysteine
  MOD_RES (496)..(496): Selenocysteine
  MOD_RES (509)..(509): Selenocysteine
  MOD_RES (590)..(590): Selenocysteine
  MOD_RES (602)..(602): Selenocysteine
  MOD_RES (607)..(607): Selenocysteine
  MOD_RES (610)..(610): Selenocysteine
  MOD_RES (622)..(622): Selenocysteine
  MOD_RES (655)..(655): Selenocysteine
  MOD_RES (668)..(668): Selenocysteine
  MOD_RES (683)..(683): Selenocysteine
  MOD_RES (709)..(709): Selenocysteine
  MOD_RES (724)..(724): Selenocysteine
  MOD_RES (736)..(737): Selenocysteine
  MOD_RES (771)..(772): Selenocysteine
  MOD_RES (787)..(787): Selenocysteine
  MOD_RES (792)..(792): Selenocysteine
  MOD_RES (801)..(801): Selenocysteine
  MOD_RES (836)..(836): Selenocysteine
  MOD_RES (838)..(838): Selenocysteine
  MOD_RES (861)..(861): Selenocysteine
  MOD_RES (866)..(866): Selenocysteine
  MOD_RES (882)..(882): Selenocysteine
  MOD_RES (895)..(895): Selenocysteine
  MOD_RES (898)..(898): Selenocysteine
  MOD_RES (911)..(911): Selenocysteine
  MOD_RES (920)..(920): Selenocysteine
  MOD_RES (968)..(968): Selenocysteine
  MOD_RES (1021)..(1021): Selenocysteine
  MOD_RES (1054)..(1054): Selenocysteine
  MOD_RES (1082)..(1082): Selenocysteine
  MOD_RES (1130)..(1130): Selenocysteine
  MOD_RES (1148)..(1148): Selenocysteine
  MOD_RES (1150)..(1150): Selenocysteine
  MOD_RES (1175)..(1176): Selenocysteine
  MOD_RES (1206)..(1206): Selenocysteine
  MOD_RES (1213)..(1213): Selenocysteine
  MOD_RES (1222)..(1223): Selenocysteine
  MOD_RES (1232)..(1232): Selenocysteine
  MOD_RES (1235)..(1235): Selenocysteine
  MOD_RES (1259)..(1259): Selenocysteine
  MOD_RES (1312)..(1312): Selenocysteine
  MOD_RES (1318)..(1318): Selenocysteine
  MOD_RES (1335)..(1335): Selenocysteine
  MOD_RES (1374)..(1374): Selenocysteine
  MOD_RES (1402)..(1402): Selenocysteine
  MOD_RES (1414)..(1414): Selenocysteine
  MOD_RES (1428)..(1428): Selenocysteine
  MOD_RES (1442)..(1442): Selenocysteine
  MOD_RES (1450)..(1450): Selenocysteine
  MOD_RES (1457)..(1457): Selenocysteine
  MOD_RES (1466)..(1466): Selenocysteine
  MOD_RES (1480)..(1480): Selenocysteine
  MOD_RES (1486)..(1486): Selenocysteine
  MOD_RES (1488)..(1488): Selenocysteine
  MOD_RES (1491)..(1491): Selenocysteine
MNSPVDPGARQALRKKPPERXPEDLNXIYSYLHGMEILSNLREHQLRLMSARARYERYSGNQVLFCSEXIARCWYILLSGSVLVKGSMVLPPCSFGKQFGGKRGCDCLVLEPSEMIVVENAKDNEDSILQREIPARQSRRRFRKINYKGERQXIXDDVEVNSYLSLPADLXKMHLXENPHPQVXHVSSSQSGCSIASDSGSSSLSDIYQAXESEVGDVDLXRLPEGPVDSEDDEEEDEEIDRXDPLQGRDLVRECLEKEPADKXDDDIEQLLEFMHQLPAFANMXMSVRRELCSVMIFEVVEQAGAIILEDGQELDSWYVILNGXVEISHPDGKVENLFMGNSFGIXPXLDKQYMHGIVRXKVDDCQFVCIAQQDYWRILNHVEKNXHKVEEEGEIVMVHEHRELDRSGXRKGHIVIKAXPERLIMHLIEEHSIVDPXYIEDFLLXYRXFLESPLDVGIKLLEWFKIDSLRDKVXRIVLLWVNNHFNDFEGDPAMXRFLEEFEKNLEDXKMNGHLRLLNIACAAKAKWRQVVLQKASRESPLQFSLNGGSEKGFGIFVEGVEPGSKAADSGLKRGDQIMEVNGQNFENIXFMKAVEILRNNXHLALXVKXNIFVFKELLFRXEQEKSGVPHIPKIAEKKSNRHSIQHVPGDIEQXSQEKGSKKVKANXVSGGRNKIRKILDKXRFSILPPKLFSDGGLSQSQDDSIVGXRHCRHSLAIMPIPGXLSSSSPDLLQPXXSMLDFSNPSDIPDQVIRVFKVDQQSCYIIISKDXXAKEVVFHAVHEFGLXGASDXYSLCEVSVXPEGVIKQRRLPDQFSKLADRIQLNGRYYLKNNMEXEXLCSDEDAQELVKESQLSMLQLSXIEVAXQLSMRDFDLFRNIEPXEYIDDLFKLNSKXGNXHLKRFEDIVNQEXFWVASEILXEANQLKRMKIIKHFIKIALHCRECKNFNSMFAIISGLNLASVARLRGXWEKLPSKYEKHLQDLQDIFDPSRNMAKYRNILSSQSMQPPIIPLFPVVKKDMXFLHEGNDSKVDGLVNFEKLRMISKEIRQVVRMXSANMDPAMMFRQRKKRWRSLGSLSQGSXNSNMLDVQGGAHKKRARRSSLLNAKKLYEDAQMARKVKQYLSSLDVEXDEEKFQMMSLQWEPAYGXLXKNLSEKRSAKSSEMSPVPMRSAGQXXKAHLHQPHRVSQVLQVPAVNLHPIRKKGQXKDPALNXSLPQKVLGXXEEISGKKHXEDXISVASSLHSSPPASPQGSPHKGYXLIPSAKSDNLSDSSHSEISSRSSIVSNCSVDSMSAALQDERCSSQALAVPESXGALEKXEHASGIGDHSQHGPGWXLLKPSLIKCLAVSSSVSNEEISQEHIIIEAADSGRGSWXSCSSSSHDNFQSLPNPKSWDFLNSYRHXHLDDPIAEVEPXDSEPYSCSKSCSRXCGQCKGSLERKSWXSSSSLSDXYEPNYGXVKQRVLESXPAESSEGLDPKDAXDPVYKXVXSSXEKGLIENEQVSAV

SEQ ID NO: 22817 - protein, 1509 aa, Homo sapiens
  MOD_RES (21)..(21): Selenocysteine
  MOD_RES (27)..(27): Selenocysteine
  MOD_RES (69)..(69): Selenocysteine
  MOD_RES (153)..(153): Selenocysteine
  MOD_RES (155)..(155): Selenocysteine
  MOD_RES (171)..(171): Selenocysteine
  MOD_RES (176)..(176): Selenocysteine
  MOD_RES (184)..(184): Selenocysteine
  MOD_RES (211)..(211): Selenocysteine
  MOD_RES (221)..(221): Selenocysteine
  MOD_RES (243)..(243): Selenocysteine
  MOD_RES (264)..(264): Selenocysteine
  MOD_RES (285)..(285): Selenocysteine
  MOD_RES (325)..(325): Selenocysteine
  MOD_RES (347)..(347): Selenocysteine
  MOD_RES (349)..(349): Selenocysteine
  MOD_RES (361)..(361): Selenocysteine
  MOD_RES (387)..(387): Selenocysteine
  MOD_RES (410)..(410): Selenocysteine
  MOD_RES (420)..(420): Selenocysteine
  MOD_RES (438)..(438): Selenocysteine
  MOD_RES (446)..(446): Selenocysteine
  MOD_RES (449)..(449): Selenocysteine
  MOD_RES (475)..(475): Selenocysteine
  MOD_RES (496)..(496): Selenocysteine
  MOD_RES (509)..(509): Selenocysteine
  MOD_RES (590)..(590): Selenocysteine
  MOD_RES (602)..(602): Selenocysteine
  MOD_RES (607)..(607): Selenocysteine
  MOD_RES (610)..(610): Selenocysteine
  MOD_RES (622)..(622): Selenocysteine
  MOD_RES (655)..(655): Selenocysteine
  MOD_RES (668)..(668): Selenocysteine
  MOD_RES (683)..(683): Selenocysteine
  MOD_RES (709)..(709): Selenocysteine
  MOD_RES (724)..(724): Selenocysteine
  MOD_RES (736)..(737): Selenocysteine
  MOD_RES (776)..(777): Selenocysteine
  MOD_RES (792)..(792): Selenocysteine
  MOD_RES (797)..(797): Selenocysteine
  MOD_RES (806)..(806): Selenocysteine
  MOD_RES (841)..(841): Selenocysteine
  MOD_RES (843)..(843): Selenocysteine
  MOD_RES (866)..(866): Selenocysteine
  MOD_RES (871)..(871): Selenocysteine
  MOD_RES (887)..(887): Selenocysteine
  MOD_RES (900)..(900): Selenocysteine
  MOD_RES (903)..(903): Selenocysteine
  MOD_RES (916)..(916): Selenocysteine
  MOD_RES (925)..(925): Selenocysteine
  MOD_RES (973)..(973): Selenocysteine
  MOD_RES (1026)..(1026): Selenocysteine
  MOD_RES (1059)..(1059): Selenocysteine
  MOD_RES (1087)..(1087): Selenocysteine
  MOD_RES (1135)..(1135): Selenocysteine
  MOD_RES (1153)..(1153): Selenocysteine
  MOD_RES (1155)..(1155): Selenocysteine
  MOD_RES (1180)..(1181): Selenocysteine
  MOD_RES (1211)..(1211): Selenocysteine
  MOD_RES (1218)..(1218): Selenocysteine
  MOD_RES (1227)..(1228): Selenocysteine
  MOD_RES (1237)..(1237): Selenocysteine
  MOD_RES (1240)..(1240): Selenocysteine
  MOD_RES (1264)..(1264): Selenocysteine
  MOD_RES (1317)..(1317): Selenocysteine
  MOD_RES (1323)..(1323): Selenocysteine
  MOD_RES (1340)..(1340): Selenocysteine
  MOD_RES (1379)..(1379): Selenocysteine
  MOD_RES (1407)..(1407): Selenocysteine
  MOD_RES (1419)..(1419): Selenocysteine
  MOD_RES (1433)..(1433): Selenocysteine
  MOD_RES (1447)..(1447): Selenocysteine
  MOD_RES (1455)..(1455): Selenocysteine
  MOD_RES (1462)..(1462): Selenocysteine
  MOD_RES (1471)..(1471): Selenocysteine
  MOD_RES (1485)..(1485): Selenocysteine
  MOD_RES (1491)..(1491): Selenocysteine
  MOD_RES (1493)..(1493): Selenocysteine
  MOD_RES (1496)..(1496): Selenocysteine
MNSPVDPGARQALRKKPPERXPEDLNXIYSYLHGMEILSNLREHQLRLMSARARYERYSGNQVLFCSEXIARCWYILLSGSVLVKGSMVLPPCSFGKQFGGKRGCDCLVLEPSEMIVVENAKDNEDSILQREIPARQSRRRFRKINYKGERQXIXDDVEVNSYLSLPADLXKMHLXENPHPQVXHVSSSQSGCSIASDSGSSSLSDIYQAXESEVGDVDLXRLPEGPVDSEDDEEEDEEIDRXDPLQGRDLVRECLEKEPADKXDDDIEQLLEFMHQLPAFANMXMSVRRELCSVMIFEVVEQAGAIILEDGQELDSWYVILNGXVEISHPDGKVENLFMGNSFGIXPXLDKQYMHGIVRXKVDDCQFVCIAQQDYWRILNHVEKNXHKVEEEGEIVMVHEHRELDRSGXRKGHIVIKAXPERLIMHLIEEHSIVDPXYIEDFLLXYRXFLESPLDVGIKLLEWFKIDSLRDKVXRIVLLWVNNHFNDFEGDPAMXRFLEEFEKNLEDXKMNGHLRLLNIACAAKAKWRQVVLQKASRESPLQFSLNGGSEKGFGIFVEGVEPGSKAADSGLKRGDQIMEVNGQNFENIXFMKAVEILRNNXHLALXVKXNIFVFKELLFRXEQEKSGVPHIPKIAEKKSNRHSIQHVPGDIEQXSQEKGSKKVKANXVSGGRNKIRKILDKXRFSILPPKLFSDGGLSQSQDDSIVGXRHCRHSLAIMPIPGXLSSSSPDLLQPXXSMLDFSNPSAVGFYYIPDQVIRVFKVDQQSCYIIISKDXXAKEVVFHAVHEFGLXGASDXYSLCEVSVXPEGVIKQRRLPDQFSKLADRIQLNGRYYLKNNMEXEXLCSDEDAQELVKESQLSMLQLSXIEVAXQLSMRDFDLFRNIEPXEYIDDLFKLNSKXGNXHLKRFEDIVNQEXFWVASEILXEANQLKRMKIIKHFIKIALHCRECKNFNSMFAIISGLNLASVARLRGXWEKLPSKYEKHLQDLQDIFDPSRNMAKYRNILSSQSMQPPIIPLFPVVKKDMXFLHEGNDSKVDGLVNFEKLRMISKEIRQVVRMXSANMDPAMMFRQRKKRWRSLGSLSQGSXNSNMLDVQGGAHKKRARRSSLLNAKKLYEDAQMARKVKQYLSSLDVEXDEEKFQMMSLQWEPAYGXLXKNLSEKRSAKSSEMSPVPMRSAGQXXKAHLHQPHRVSQVLQVPAVNLHPIRKKGQXKDPALNXSLPQKVLGXXEEISGKKHXEDXISVASSLHSSPPASPQGSPHKGYXLIPSAKSDNLSDSSHSEISSRSSIVSNCSVDSMSAALQDERCSSQALAVPESXGALEKXEHASGIGDHSQHGPGWXLLKPSLIKCLAVSSSVSNEEISQEHIIIEAADSGRGSWXSCSSSSHDNFQSLPNPKSWDFLNSYRHXHLDDPIAEVEPXDSEPYSCSKSCSRXCGQCKGSLERKSWXSSSSLSDXYEPNYGXVKQRVLESXPAESSEGLDPKDAXDPVYKXVXSSXEKGLIENEQVSAV

SEQ ID NO: 22818 - protein, 1601 aa, Homo sapiens
  MOD_RES (21)..(21): Selenocysteine
  MOD_RES (27)..(27): Selenocysteine
  MOD_RES (69)..(69): Selenocysteine
  MOD_RES (153)..(153): Selenocysteine
  MOD_RES (155)..(155): Selenocysteine
  MOD_RES (171)..(171): Selenocysteine
  MOD_RES (176)..(176): Selenocysteine
  MOD_RES (184)..(184): Selenocysteine
  MOD_RES (211)..(211): Selenocysteine
  MOD_RES (221)..(221): Selenocysteine
  MOD_RES (243)..(243): Selenocysteine
  MOD_RES (264)..(264): Selenocysteine
  MOD_RES (285)..(285): Selenocysteine
  MOD_RES (325)..(325): Selenocysteine
  MOD_RES (347)..(347): Selenocysteine
  MOD_RES (349)..(349): Selenocysteine
  MOD_RES (361)..(361): Selenocysteine
  MOD_RES (387)..(387): Selenocysteine
  MOD_RES (410)..(410): Selenocysteine
  MOD_RES (420)..(420): Selenocysteine
  MOD_RES (438)..(438): Selenocysteine
  MOD_RES (446)..(446): Selenocysteine
  MOD_RES (449)..(449): Selenocysteine
  MOD_RES (475)..(475): Selenocysteine
  MOD_RES (496)..(496): Selenocysteine
  MOD_RES (509)..(509): Selenocysteine
  MOD_RES (590)..(590): Selenocysteine
  MOD_RES (602)..(602): Selenocysteine
  MOD_RES (607)..(607): Selenocysteine
  MOD_RES (610)..(610): Selenocysteine
  MOD_RES (622)..(622): Selenocysteine
  MOD_RES (655)..(655): Selenocysteine
  MOD_RES (668)..(668): Selenocysteine
  MOD_RES (683)..(683): Selenocysteine
  MOD_RES (709)..(709): Selenocysteine
  MOD_RES (724)..(724): Selenocysteine
  MOD_RES (736)..(737): Selenocysteine
  MOD_RES (771)..(772): Selenocysteine
  MOD_RES (787)..(787): Selenocysteine
  MOD_RES (792)..(792): Selenocysteine
  MOD_RES (801)..(801): Selenocysteine
  MOD_RES (836)..(836): Selenocysteine
  MOD_RES (838)..(838): Selenocysteine
  MOD_RES (861)..(861): Selenocysteine
  MOD_RES (866)..(866): Selenocysteine
  MOD_RES (882)..(882): Selenocysteine
  MOD_RES (895)..(895): Selenocysteine
  MOD_RES (898)..(898): Selenocysteine
  MOD_RES (911)..(911): Selenocysteine
  MOD_RES (920)..(920): Selenocysteine
  MOD_RES (968)..(968): Selenocysteine
  MOD_RES (1021)..(1021): Selenocysteine
  MOD_RES (1054)..(1054): Selenocysteine
  MOD_RES (1074)..(1074): Selenocysteine
  MOD_RES (1122)..(1122): Selenocysteine
  MOD_RES (1140)..(1140): Selenocysteine
  MOD_RES (1142)..(1142): Selenocysteine
  MOD_RES (1167)..(1168): Selenocysteine
  MOD_RES (1198)..(1198): Selenocysteine
  MOD_RES (1205)..(1205): Selenocysteine
  MOD_RES (1214)..(1215): Selenocysteine
  MOD_RES (1224)..(1224): Selenocysteine
  MOD_RES (1227)..(1227): Selenocysteine
  MOD_RES (1251)..(1251): Selenocysteine
  MOD_RES (1304)..(1304): Selenocysteine
  MOD_RES (1310)..(1310): Selenocysteine
  MOD_RES (1327)..(1327): Selenocysteine
  MOD_RES (1366)..(1366): Selenocysteine
  MOD_RES (1394)..(1394): Selenocysteine
  MOD_RES (1406)..(1406): Selenocysteine
  MOD_RES (1420)..(1420): Selenocysteine
  MOD_RES (1434)..(1434): Selenocysteine
  MOD_RES (1442)..(1442): Selenocysteine
  MOD_RES (1449)..(1449): Selenocysteine
  MOD_RES (1458)..(1458): Selenocysteine
  MOD_RES (1472)..(1472): Selenocysteine
  MOD_RES (1478)..(1478): Selenocysteine
  MOD_RES (1480)..(1480): Selenocysteine
  MOD_RES (1483)..(1483): Selenocysteine
  MOD_RES (1493)..(1493): Selenocysteine
  MOD_RES (1507)..(1507): Selenocysteine
  MOD_RES (1525)..(1525): Selenocysteine
  MOD_RES (1568)..(1568): Selenocysteine
  MOD_RES (1586)..(1586): Selenocysteine
MNSPVDPGARQALRKKPPERXPEDLNXIYSYLHGMEILSNLREHQLRLMSARARYERYSGNQVLFCSEXIARCWYILLSGSVLVKGSMVLPPCSFGKQFGGKRGCDCLVLEPSEMIVVENAKDNEDSILQREIPARQSRRRFRKINYKGERQXIXDDVEVNSYLSLPADLXKMHLXENPHPQVXHVSSSQSGCSIASDSGSSSLSDIYQAXESEVGDVDLXRLPEGPVDSEDDEEEDEEIDRXDPLQGRDLVRECLEKEPADKXDDDIEQLLEFMHQLPAFANMXMSVRRELCSVMIFEVVEQAGAIILEDGQELDSWYVILNGXVEISHPDGKVENLFMGNSFGIXPXLDKQYMHGIVRXKVDDCQFVCIAQQDYWRILNHVEKNXHKVEEEGEIVMVHEHRELDRSGXRKGHIVIKAXPERLIMHLIEEHSIVDPXYIEDFLLXYRXFLESPLDVGIKLLEWFKIDSLRDKVXRIVLLWVNNHFNDFEGDPAMXRFLEEFEKNLEDXKMNGHLRLLNIACAAKAKWRQVVLQKASRESPLQFSLNGGSEKGFGIFVEGVEPGSKAADSGLKRGDQIMEVNGQNFENIXFMKAVEILRNNXHLALXVKXNIFVFKELLFRXEQEKSGVPHIPKIAEKKSNRHSIQHVPGDIEQXSQEKGSKKVKANXVSGGRNKIRKILDKXRFSILPPKLFSDGGLSQSQDDSIVGXRHCRHSLAIMPIPGXLSSSSPDLLQPXXSMLDFSNPSDIPDQVIRVFKVDQQSCYIIISKDXXAKEVVFHAVHEFGLXGASDXYSLCEVSVXPEGVIKQRRLPDQFSKLADRIQLNGRYYLKNNMEXEXLCSDEDAQELVKESQLSMLQLSXIEVAXQLSMRDFDLFRNIEPXEYIDDLFKLNSKXGNXHLKRFEDIVNQEXFWVASEILXEANQLKRMKIIKHFIKIALHCRECKNFNSMFAIISGLNLASVARLRGXWEKLPSKYEKHLQDLQDIFDPSRNMAKYRNILSSQSMQPPIIPLFPVVKKDMXFLHEGNDSKVDGLVNFEKLRMISKEIRQVVRMXSANMDPAMMFRQRSLSQGSXNSNMLDVQGGAHKKRARRSSLLNAKKLYEDAQMARKVKQYLSSLDVEXDEEKFQMMSLQWEPAYGXLXKNLSEKRSAKSSEMSPVPMRSAGQXXKAHLHQPHRVSQVLQVPAVNLHPIRKKGQXKDPALNXSLPQKVLGXXEEISGKKHXEDXISVASSLHSSPPASPQGSPHKGYXLIPSAKSDNLSDSSHSEISSRSSIVSNCSVDSMSAALQDERCSSQALAVPESXGALEKXEHASGIGDHSQHGPGWXLLKPSLIKCLAVSSSVSNEEISQEHIIIEAADSGRGSWXSCSSSSHDNFQSLPNPKSWDFLNSYRHXHLDDPIAEVEPXDSEPYSCSKSCSRXCGQCKGSLERKSWXSSSSLSDXYEPNYGXVKQRVLESXPAESSEGLDPKDAXDPVYKXVXSSXEKGLIVYCVXSPKKDDRYREPPPXPPGYLGISLADLKEGPHXHLKPPDYSVAVQRSKMMHNSLSRLPPASLSSNLVACVPSKIVXQPQRHNLQPFHPKLGDVXDADSEADENEQVSAV

SEQ ID NO: 22819 - protein, 1609 aa, Homo sapiens
  MOD_RES (21)..(21): Selenocysteine
  MOD_RES (27)..(27): Selenocysteine
  MOD_RES (69)..(69): Selenocysteine
  MOD_RES (153)..(153): Selenocysteine
  MOD_RES (155)..(155): Selenocysteine
  MOD_RES (171)..(171): Selenocysteine
  MOD_RES (176)..(176): Selenocysteine
  MOD_RES (184)..(184): Selenocysteine
  MOD_RES (211)..(211): Selenocysteine
  MOD_RES (221)..(221): Selenocysteine
  MOD_RES (243)..(243): Selenocysteine
  MOD_RES (264)..(264): Selenocysteine
  MOD_RES (285)..(285): Selenocysteine
  MOD_RES (325)..(325): Selenocysteine
  MOD_RES (347)..(347): Selenocysteine
  MOD_RES (349)..(349): Selenocysteine
  MOD_RES (361)..(361): Selenocysteine
  MOD_RES (387)..(387): Selenocysteine
  MOD_RES (410)..(410): Selenocysteine
  MOD_RES (420)..(420): Selenocysteine
  MOD_RES (438)..(438): Selenocysteine
  MOD_RES (446)..(446): Selenocysteine
  MOD_RES (449)..(449): Selenocysteine
  MOD_RES (475)..(475): Selenocysteine
  MOD_RES (496)..(496): Selenocysteine
  MOD_RES (509)..(509): Selenocysteine
  MOD_RES (590)..(590): Selenocysteine
  MOD_RES (602)..(602): Selenocysteine
  MOD_RES (607)..(607): Selenocysteine
  MOD_RES (610)..(610): Selenocysteine
  MOD_RES (622)..(622): Selenocysteine
  MOD_RES (655)..(655): Selenocysteine
  MOD_RES (668)..(668): Selenocysteine
  MOD_RES (683)..(683): Selenocysteine
  MOD_RES (709)..(709): Selenocysteine
  MOD_RES (724)..(724): Selenocysteine
  MOD_RES (736)..(737): Selenocysteine
  MOD_RES (771)..(772): Selenocysteine
  MOD_RES (787)..(787): Selenocysteine
  MOD_RES (792)..(792): Selenocysteine
  MOD_RES (801)..(801): Selenocysteine
  MOD_RES (836)..(836): Selenocysteine
  MOD_RES (838)..(838): Selenocysteine
  MOD_RES (861)..(861): Selenocysteine
  MOD_RES (866)..(866): Selenocysteine
  MOD_RES (882)..(882): Selenocysteine
  MOD_RES (895)..(895): Selenocysteine
  MOD_RES (898)..(898): Selenocysteine
  MOD_RES (911)..(911): Selenocysteine
  MOD_RES (920)..(920): Selenocysteine
  MOD_RES (968)..(968): Selenocysteine
  MOD_RES (1021)..(1021): Selenocysteine
  MOD_RES (1054)..(1054): Selenocysteine
  MOD_RES (1082)..(1082): Selenocysteine
  MOD_RES (1130)..(1130): Selenocysteine
  MOD_RES (1148)..(1148): Selenocysteine
  MOD_RES (1150)..(1150): Selenocysteine
  MOD_RES (1175)..(1176): Selenocysteine
  MOD_RES (1206)..(1206): Selenocysteine
  MOD_RES (1213)..(1213): Selenocysteine
  MOD_RES (1222)..(1223): Selenocysteine
  MOD_RES (1232)..(1232): Selenocysteine
  MOD_RES (1235)..(1235): Selenocysteine
  MOD_RES (1259)..(1259): Selenocysteine
  MOD_RES (1312)..(1312): Selenocysteine
  MOD_RES (1318)..(1318): Selenocysteine
  MOD_RES (1335)..(1335): Selenocysteine
  MOD_RES (1374)..(1374): Selenocysteine
  MOD_RES (1402)..(1402): Selenocysteine
  MOD_RES (1414)..(1414): Selenocysteine
  MOD_RES (1428)..(1428): Selenocysteine
  MOD_RES (1442)..(1442): Selenocysteine
  MOD_RES (1450)..(1450): Selenocysteine
  MOD_RES (1457)..(1457): Selenocysteine
  MOD_RES (1466)..(1466): Selenocysteine
  MOD_RES (1480)..(1480): Selenocysteine
  MOD_RES (1486)..(1486): Selenocysteine
  MOD_RES (1488)..(1488): Selenocysteine
  MOD_RES (1491)..(1491): Selenocysteine
  MOD_RES (1501)..(1501): Selenocysteine
  MOD_RES (1515)..(1515): Selenocysteine
  MOD_RES (1533)..(1533): Selenocysteine
  MOD_RES (1576)..(1576): Selenocysteine
  MOD_RES (1594)..(1594): Selenocysteine
MNSPVDPGARQALRKKPPERXPEDLNXIYSYLHGMEILSNLREHQLRLMSARARYERYSGNQVLFCSEXIARCWYILLSGSVLVKGSMVLPPCSFGKQFGGKRGCDCLVLEPSEMIVVENAKDNEDSILQREIPARQSRRRFRKINYKGERQXIXDDVEVNSYLSLPADLXKMHLXENPHPQVXHVSSSQSGCSIASDSGSSSLSDIYQAXESEVGDVDLXRLPEGPVDSEDDEEEDEEIDRXDPLQGRDLVRECLEKEPADKXDDDIEQLLEFMHQLPAFANMXMSVRRELCSVMIFEVVEQAGAIILEDGQELDSWYVILNGXVEISHPDGKVENLFMGNSFGIXPXLDKQYMHGIVRXKVDDCQFVCIAQQDYWRILNHVEKNXHKVEEEGEIVMVHEHRELDRSGXRKGHIVIKAXPERLIMHLIEEHSIVDPXYIEDFLLXYRXFLESPLDVGIKLLEWFKIDSLRDKVXRIVLLWVNNHFNDFEGDPAMXRFLEEFEKNLEDXKMNGHLRLLNIACAAKAKWRQVVLQKASRESPLQFSLNGGSEKGFGIFVEGVEPGSKAADSGLKRGDQIMEVNGQNFENIXFMKAVEILRNNXHLALXVKXNIFVFKELLFRXEQEKSGVPHIPKIAEKKSNRHSIQHVPGDIEQXSQEKGSKKVKANXVSGGRNKIRKILDKXRFSILPPKLFSDGGLSQSQDDSIVGXRHCRHSLAIMPIPGXLSSSSPDLLQPXXSMLDFSNPSDIPDQVIRVFKVDQQSCYIIISKDXXAKEVVFHAVHEFGLXGASDXYSLCEVSVXPEGVIKQRRLPDQFSKLADRIQLNGRYYLKNNMEXEXLCSDEDAQELVKESQLSMLQLSXIEVAXQLSMRDFDLFRNIEPXEYIDDLFKLNSKXGNXHLKRFEDIVNQEXFWVASEILXEANQLKRMKIIKHFIKIALHCRECKNFNSMFAIISGLNLASVARLRGXWEKLPSKYEKHLQDLQDIFDPSRNMAKYRNILSSQSMQPPIIPLFPVVKKDMXFLHEGNDSKVDGLVNFEKLRMISKEIRQVVRMXSANMDPAMMFRQRKKRWRSLGSLSQGSXNSNMLDVQGGAHKKRARRSSLLNAKKLYEDAQMARKVKQYLSSLDVEXDEEKFQMMSLQWEPAYGXLXKNLSEKRSAKSSEMSPVPMRSAGQXXKAHLHQPHRVSQVLQVPAVNLHPIRKKGQXKDPALNXSLPQKVLGXXEEISGKKHXEDXISVASSLHSSPPASPQGSPHKGYXLIPSAKSDNLSDSSHSEISSRSSIVSNCSVDSMSAALQDERCSSQALAVPESXGALEKXEHASGIGDHSQHGPGWXLLKPSLIKCLAVSSSVSNEEISQEHIIIEAADSGRGSWXSCSSSSHDNFQSLPNPKSWDFLNSYRHXHLDDPIAEVEPXDSEPYSCSKSCSRXCGQCKGSLERKSWXSSSSLSDXYEPNYGXVKQRVLESXPAESSEGLDPKDAXDPVYKXVXSSXEKGLIVYCVXSPKKDDRYREPPPXPPGYLGISLADLKEGPHXHLKPPDYSVAVQRSKMMHNSLSRLPPASLSSNLVACVPSKIVXQPQRHNLQPFHPKLGDVXDADSEADENEQVSAV

SEQ ID NO: 22820 - protein, 1114 aa, Homo sapiens
  MOD_RES (40)..(40): Selenocysteine
  MOD_RES (62)..(62): Selenocysteine
  MOD_RES (64)..(64): Selenocysteine
  MOD_RES (76)..(76): Selenocysteine
  MOD_RES (102)..(102): Selenocysteine
  MOD_RES (125)..(125): Selenocysteine
  MOD_RES (135)..(135): Selenocysteine
  MOD_RES (153)..(153): Selenocysteine
  MOD_RES (161)..(161): Selenocysteine
  MOD_RES (164)..(164): Selenocysteine
  MOD_RES (190)..(190): Selenocysteine
  MOD_RES (211)..(211): Selenocysteine
  MOD_RES (224)..(224): Selenocysteine
  MOD_RES (305)..(305): Selenocysteine
  MOD_RES (317)..(317): Selenocysteine
  MOD_RES (322)..(322): Selenocysteine
  MOD_RES (325)..(325): Selenocysteine
  MOD_RES (337)..(337): Selenocysteine
  MOD_RES (370)..(370): Selenocysteine
  MOD_RES (383)..(383): Selenocysteine
  MOD_RES (398)..(398): Selenocysteine
  MOD_RES (424)..(424): Selenocysteine
  MOD_RES (439)..(439): Selenocysteine
  MOD_RES (451)..(452): Selenocysteine
  MOD_RES (486)..(487): Selenocysteine
  MOD_RES (502)..(502): Selenocysteine
  MOD_RES (507)..(507): Selenocysteine
  MOD_RES (516)..(516): Selenocysteine
  MOD_RES (551)..(551): Selenocysteine
  MOD_RES (553)..(553): Selenocysteine
  MOD_RES (576)..(576): Selenocysteine
  MOD_RES (581)..(581): Selenocysteine
  MOD_RES (597)..(597): Selenocysteine
  MOD_RES (610)..(610): Selenocysteine
  MOD_RES (613)..(613): Selenocysteine
  MOD_RES (626)..(626): Selenocysteine
  MOD_RES (635)..(635): Selenocysteine
  MOD_RES (683)..(683): Selenocysteine
  MOD_RES (736)..(736): Selenocysteine
  MOD_RES (769)..(769): Selenocysteine
  MOD_RES (797)..(797): Selenocysteine
  MOD_RES (845)..(845): Selenocysteine
  MOD_RES (863)..(863): Selenocysteine
  MOD_RES (865)..(865): Selenocysteine
  MOD_RES (890)..(891): Selenocysteine
  MOD_RES (921)..(921): Selenocysteine
  MOD_RES (928)..(928): Selenocysteine
  MOD_RES (937)..(938): Selenocysteine
  MOD_RES (947)..(947): Selenocysteine
  MOD_RES (950)..(950): Selenocysteine
  MOD_RES (1004)..(1004): Selenocysteine
  MOD_RES (1007)..(1007): Selenocysteine
  MOD_RES (1011)..(1011): Selenocysteine
  MOD_RES (1014)..(1014): Selenocysteine
  MOD_RES (1018)..(1018): Selenocysteine
  MOD_RES (1025)..(1025): Selenocysteine
  MOD_RES (1030)..(1031): Selenocysteine
  MOD_RES (1036)..(1036): Selenocysteine
  MOD_RES (1060)..(1060): Selenocysteine
  MOD_RES (1066)..(1066): Selenocysteine
  MOD_RES (1098)..(1098): Selenocysteine
  MOD_RES (1104)..(1104): Selenocysteine
  MOD_RES (1113)..(1113): Selenocysteine
MSVRRELCSVMIFEVVEQAGAIILEDGQELDSWYVILNGXVEISHPDGKVENLFMGNSFGIXPXLDKQYMHGIVRXKVDDCQFVCIAQQDYWRILNHVEKNXHKVEEEGEIVMVHEHRELDRSGXRKGHIVIKAXPERLIMHLIEEHSIVDPXYIEDFLLXYRXFLESPLDVGIKLLEWFKIDSLRDKVXRIVLLWVNNHFNDFEGDPAMXRFLEEFEKNLEDXKMNGHLRLLNIACAAKAKWRQVVLQKASRESPLQFSLNGGSEKGFGIFVEGVEPGSKAADSGLKRGDQIMEVNGQNFENIXFMKAVEILRNNXHLALXVKXNIFVFKELLFRXEQEKSGVPHIPKIAEKKSNRHSIQHVPGDIEQXSQEKGSKKVKANXVSGGRNKIRKILDKXRFSILPPKLFSDGGLSQSQDDSIVGXRHCRHSLAIMPIPGXLSSSSPDLLQPXXSMLDFSNPSDIPDQVIRVFKVDQQSCYIIISKDXXAKEVVFHAVHEFGLXGASDXYSLCEVSVXPEGVIKQRRLPDQFSKLADRIQLNGRYYLKNNMEXEXLCSDEDAQELVKESQLSMLQLSXIEVAXQLSMRDFDLFRNIEPXEYIDDLFKLNSKXGNXHLKRFEDIVNQEXFWVASEILXEANQLKRMKIIKHFIKIALHCRECKNFNSMFAIISGLNLASVARLRGXWEKLPSKYEKHLQDLQDIFDPSRNMAKYRNILSSQSMQPPIIPLFPVVKKDMXFLHEGNDSKVDGLVNFEKLRMISKEIRQVVRMXSANMDPAMMFRQRKKRWRSLGSLSQGSXNSNMLDVQGGAHKKRARRSSLLNAKKLYEDAQMARKVKQYLSSLDVEXDEEKFQMMSLQWEPAYGXLXKNLSEKRSAKSSEMSPVPMRSAGQXXKAHLHQPHRVSQVLQVPAVNLHPIRKKGQXKDPALNXSLPQKVLGXXEEISGKKHXEDXISVASSLHSSPPASPQGSPHKVGSIISDHSSKISGQSCPGIGGAYLQKKILQIXRSXAKRXDSXEKAXEENRDRXSCENXXRKRMXSPFRRLRERMLSRERLVNSQKEDXDHNQAXESCEKVKDVGSNIKDEKGSAIFNSNSQGNSNXLNCFYXRFKSKRRKXL

SEQ ID NO: 22821 - protein, 62 aa, Homo sapiens
  MOD_RES (14)..(14): Selenocysteine
  MOD_RES (21)..(21): Selenocysteine
  MOD_RES (60)..(60): Selenocysteine
MAIKDILLDDIVLXHSLFLPXEKFLQELHQYFVRAGGMEGPEGLGRKQACLAMLLHFLDXYQ

SEQ ID NO: 22822 - protein, 20 aa, Homo sapiens
MEGPEGLGRKQACLAMLLHF

SEQ ID NO: 22823 - protein, 101 aa, Homo sapiens
  MOD_RES (23)..(23): Selenocysteine
  MOD_RES (59)..(59): Selenocysteine
  MOD_RES (68)..(68): Selenocysteine
  MOD_RES (100)..(100): Selenocysteine
MEGPEGLGRKQACLAMLLHFLDXYQGLLQEEEGAGHIIKDLYLLIMKDESLYQGLREDXLRLHQLVEXVELKIPEENQPPSKQVKPLFRHFRRIDSCLQXR

SEQ ID NO: 22824 - protein, 149 aa, Homo sapiens
  MOD_RES (23)..(23): Selenocysteine
  MOD_RES (59)..(59): Selenocysteine
  MOD_RES (68)..(68): Selenocysteine
  MOD_RES (100)..(100): Selenocysteine
  MOD_RES (123)..(123): Selenocysteine
  MOD_RES (140)..(140): Selenocysteine
MEGPEGLGRKQACLAMLLHFLDXYQGLLQEEEGAGHIIKDLYLLIMKDESLYQGLREDXLRLHQLVEXVELKIPEENQPPSKQVKPLFRHFRRIDSCLQXRVAFRGSDEIFCRVYMPDHSYVXIRSRLSASVQDILGSVXEKLQYSEEP

SEQ ID NO: 22825 - protein, 456 aa, Homo sapiens
  MOD_RES (23)..(23): Selenocysteine
  MOD_RES (59)..(59): Selenocysteine
  MOD_RES (68)..(68): Selenocysteine
  MOD_RES (100)..(100): Selenocysteine
  MOD_RES (123)..(123): Selenocysteine
  MOD_RES (140)..(140): Selenocysteine
  MOD_RES (173)..(173): Selenocysteine
  MOD_RES (179)..(179): Selenocysteine
  MOD_RES (191)..(191): Selenocysteine
  MOD_RES (212)..(212): Selenocysteine
  MOD_RES (227)..(227): Selenocysteine
  MOD_RES (256)..(256): Selenocysteine
  MOD_RES (270)..(270): Selenocysteine
  MOD_RES (275)..(275): Selenocysteine
  MOD_RES (327)..(327): Selenocysteine
  MOD_RES (346)..(346): Selenocysteine
  MOD_RES (378)..(378): Selenocysteine
  MOD_RES (386)..(386): Selenocysteine
  MOD_RES (406)..(406): Selenocysteine
  MOD_RES (428)..(428): Selenocysteine
MEGPEGLGRKQACLAMLLHFLDXYQGLLQEEEGAGHIIKDLYLLIMKDESLYQGLREDXLRLHQLVEXVELKIPEENQPPSKQVKPLFRHFRRIDSCLQXRVAFRGSDEIFCRVYMPDHSYVXIRSRLSASVQDILGSVXEKLQYSEEPAGREDSLILVAVSSSGEKVLLQPXEDCVFXALGINSHLFACXRDSYEALVPLPEEIQVSPGDXEIHRVEPEDVANHLXAFHWELFRCVHELEFVDYVFHGERGRREXANLELLLQRCSEVXHWVAXEVLLCEAPGKRAQLLKKFIKIAALCKQNQDLLSFYAVVMGLDNAAVSRLRLXWEKLPGKFKNLFRKFENLXDPCRNHKSYREVISKMKPPVIPFVPLILKDLXFLHEGSKXLVDGLVNIEKLHSVAEKVRXIRKYRSRPLCLDMEASPNHLQXKAYVRQFQVIDNQNLLFELSYKLEANSQ

SEQ ID NO: 22826 - protein, 459 aa, Homo sapiens
  MOD_RES (12)..(12): Selenocysteine
  MOD_RES (19)..(19): Selenocysteine
  MOD_RES (138)..(138): Selenocysteine
  MOD_RES (167)..(167): Selenocysteine
  MOD_RES (183)..(183): Selenocysteine
  MOD_RES (190)..(190): Selenocysteine
  MOD_RES (229)..(229): Selenocysteine
  MOD_RES (265)..(265): Selenocysteine
  MOD_RES (274)..(274): Selenocysteine
  MOD_RES (306)..(306): Selenocysteine
  MOD_RES (329)..(329): Selenocysteine
  MOD_RES (346)..(346): Selenocysteine
  MOD_RES (379)..(379): Selenocysteine
  MOD_RES (385)..(385): Selenocysteine
  MOD_RES (397)..(397): Selenocysteine
  MOD_RES (418)..(418): Selenocysteine
  MOD_RES (433)..(433): Selenocysteine
MKPLEKFLKKQXSQLAGRXVAGGPGGGLGSCGGPGGGGGPGGGGGPAGGQRSLQRRQSVSRLLLPAFLREPPAEPGLEPPPEEEGGEPAGVAEEPGSGGPCWLQLEEVPGPGPLGGGGPLRSPSSYSSDELSPGEPLXSPPWAPLGAPERPEHLLNRVLERLAGGAXRDSAASDILLDDIVLXHSLFLPXEKFLQELHQYFVRAGGMEGPEGLGRKQACLAMLLHFLDXYQGLLQEEEGAGHIIKDLYLLIMKDESLYQGLREDXLRLHQLVEXVELKIPEENQPPSKQVKPLFRHFRRIDSCLQXRVAFRGSDEIFCRVYMPDHSYVXIRSRLSASVQDILGSVXEKLQYSEEPAGREDSLILVAVSSSGEKVLLQPXEDCVFXALGINSHLFACXRDSYEALVPLPEEIQVSPGDXEIHRVEPEDVANHLXAFHWELFRCVHELEFVDYVFHGERGR

SEQ ID NO: 22827 - protein, 662 aa, Homo sapiens
  MOD_RES (12)..(12): Selenocysteine
  MOD_RES (19)..(19): Selenocysteine
  MOD_RES (138)..(138): Selenocysteine
  MOD_RES (167)..(167): Selenocysteine
  MOD_RES (183)..(183): Selenocysteine
  MOD_RES (190)..(190): Selenocysteine
  MOD_RES (229)..(229): Selenocysteine
  MOD_RES (265)..(265): Selenocysteine
  MOD_RES (274)..(274): Selenocysteine
  MOD_RES (306)..(306): Selenocysteine
  MOD_RES (329)..(329): Selenocysteine
  MOD_RES (346)..(346): Selenocysteine
  MOD_RES (379)..(379): Selenocysteine
  MOD_RES (385)..(385): Selenocysteine
  MOD_RES (397)..(397): Selenocysteine
  MOD_RES (418)..(418): Selenocysteine
  MOD_RES (433)..(433): Selenocysteine
  MOD_RES (462)..(462): Selenocysteine
  MOD_RES (476)..(476): Selenocysteine
  MOD_RES (481)..(481): Selenocysteine
  MOD_RES (533)..(533): Selenocysteine
  MOD_RES (552)..(552): Selenocysteine
  MOD_RES (584)..(584): Selenocysteine
  MOD_RES (592)..(592): Selenocysteine
  MOD_RES (612)..(612): Selenocysteine
  MOD_RES (634)..(634): Selenocysteine
MKPLEKFLKKQXSQLAGRXVAGGPGGGLGSCGGPGGGGGPGGGGGPAGGQRSLQRRQSVSRLLLPAFLREPPAEPGLEPPPEEEGGEPAGVAEEPGSGGPCWLQLEEVPGPGPLGGGGPLRSPSSYSSDELSPGEPLXSPPWAPLGAPERPEHLLNRVLERLAGGAXRDSAASDILLDDIVLXHSLFLPXEKFLQELHQYFVRAGGMEGPEGLGRKQACLAMLLHFLDXYQGLLQEEEGAGHIIKDLYLLIMKDESLYQGLREDXLRLHQLVEXVELKIPEENQPPSKQVKPLFRHFRRIDSCLQXRVAFRGSDEIFCRVYMPDHSYVXIRSRLSASVQDILGSVXEKLQYSEEPAGREDSLILVAVSSSGEKVLLQPXEDCVFXALGINSHLFACXRDSYEALVPLPEEIQVSPGDXEIHRVEPEDVANHLXAFHWELFRCVHELEFVDYVFHGERGRREXANLELLLQRCSEVXHWVAXEVLLCEAPGKRAQLLKKFIKIAALCKQNQDLLSFYAVVMGLDNAAVSRLRLXWEKLPGKFKNLFRKFENLXDPCRNHKSYREVISKMKPPVIPFVPLILKDLXFLHEGSKXLVDGLVNIEKLHSVAEKVRXIRKYRSRPLCLDMEASPNHLQXKAYVRQFQVIDNQNLLFELSYKLEANSQ

SEQ ID NO: 22828 - protein, 511 aa, Homo sapiens
  MOD_RES (20)..(20): Selenocysteine
  MOD_RES (32)..(32): Selenocysteine
  MOD_RES (39)..(39): Selenocysteine
  MOD_RES (78)..(78): Selenocysteine
  MOD_RES (114)..(114): Selenocysteine
  MOD_RES (123)..(123): Selenocysteine
  MOD_RES (155)..(155): Selenocysteine
  MOD_RES (178)..(178): Selenocysteine
  MOD_RES (195)..(195): Selenocysteine
  MOD_RES (228)..(228): Selenocysteine
  MOD_RES (234)..(234): Selenocysteine
  MOD_RES (246)..(246): Selenocysteine
  MOD_RES (267)..(267): Selenocysteine
  MOD_RES (282)..(282): Selenocysteine
  MOD_RES (311)..(311): Selenocysteine
  MOD_RES (325)..(325): Selenocysteine
  MOD_RES (330)..(330): Selenocysteine
  MOD_RES (382)..(382): Selenocysteine
  MOD_RES (401)..(401): Selenocysteine
  MOD_RES (433)..(433): Selenocysteine
  MOD_RES (441)..(441): Selenocysteine
  MOD_RES (461)..(461): Selenocysteine
  MOD_RES (483)..(483): Selenocysteine
MLIHPRGLPSSSHRRKINSXYFYILLDDIVLXHSLFLPXEKFLQELHQYFVRAGGMEGPEGLGRKQACLAMLLHFLDXYQGLLQEEEGAGHIIKDLYLLIMKDESLYQGLREDXLRLHQLVEXVELKIPEENQPPSKQVKPLFRHFRRIDSCLQXRVAFRGSDEIFCRVYMPDHSYVXIRSRLSASVQDILGSVXEKLQYSEEPAGREDSLILVAVSSSGEKVLLQPXEDCVFXALGINSHLFACXRDSYEALVPLPEEIQVSPGDXEIHRVEPEDVANHLXAFHWELFRCVHELEFVDYVFHGERGRREXANLELLLQRCSEVXHWVAXEVLLCEAPGKRAQLLKKFIKIAALCKQNQDLLSFYAVVMGLDNAAVSRLRLXWEKLPGKFKNLFRKFENLXDPCRNHKSYREVISKMKPPVIPFVPLILKDLXFLHEGSKXLVDGLVNIEKLHSVAEKVRXIRKYRSRPLCLDMEASPNHLQXKAYVRQFQVIDNQNLLFELSYKLEANSQ

SEQ ID NO: 22829 - protein, 505 aa, Homo sapiens
  MOD_RES (26)..(26): Selenocysteine
  MOD_RES (33)..(33): Selenocysteine
  MOD_RES (72)..(72): Selenocysteine
  MOD_RES (108)..(108): Selenocysteine
  MOD_RES (117)..(117): Selenocysteine
  MOD_RES (149)..(149): Selenocysteine
  MOD_RES (172)..(172): Selenocysteine
  MOD_RES (189)..(189): Selenocysteine
  MOD_RES (222)..(222): Selenocysteine
  MOD_RES (228)..(228): Selenocysteine
  MOD_RES (240)..(240): Selenocysteine
  MOD_RES (261)..(261): Selenocysteine
  MOD_RES (276)..(276): Selenocysteine
  MOD_RES (305)..(305): Selenocysteine
  MOD_RES (319)..(319): Selenocysteine
  MOD_RES (324)..(324): Selenocysteine
  MOD_RES (376)..(376): Selenocysteine
  MOD_RES (395)..(395): Selenocysteine
  MOD_RES (427)..(427): Selenocysteine
  MOD_RES (435)..(435): Selenocysteine
  MOD_RES (455)..(455): Selenocysteine
  MOD_RES (477)..(477): Selenocysteine
MMLRPGYPLSQESFPIDILLDDIVLXHSLFLPXEKFLQELHQYFVRAGGMEGPEGLGRKQACLAMLLHFLDXYQGLLQEEEGAGHIIKDLYLLIMKDESLYQGLREDXLRLHQLVEXVELKIPEENQPPSKQVKPLFRHFRRIDSCLQXRVAFRGSDEIFCRVYMPDHSYVXIRSRLSASVQDILGSVXEKLQYSEEPAGREDSLILVAVSSSGEKVLLQPXEDCVFXALGINSHLFACXRDSYEALVPLPEEIQVSPGDXEIHRVEPEDVANHLXAFHWELFRCVHELEFVDYVFHGERGRREXANLELLLQRCSEVXHWVAXEVLLCEAPGKRAQLLKKFIKIAALCKQNQDLLSFYAVVMGLDNAAVSRLRLXWEKLPGKFKNLFRKFENLXDPCRNHKSYREVISKMKPPVIPFVPLILKDLXFLHEGSKXLVDGLVNIEKLHSVAEKVRXIRKYRSRPLCLDMEASPNHLQXKAYVRQFQVIDNQNLLFELSYKLEANSQ

SEQ ID NO: 22830 - protein, 89 aa, Homo sapiens
  MOD_RES (39)..(39): Selenocysteine
  MOD_RES (60)..(60): Selenocysteine
  MOD_RES (82)..(82): Selenocysteine
MEQLSDEEIDHGAEEDSDKEDQDLDKMFGAWLGELDKLXQSLDSDKPMEPVKRSPLRQEXNMANFSYRFSIYNLNALNQGEXVDLDALM

SEQ ID NO: 22831 - protein, 172 aa, Homo sapiens
  MOD_RES (39)..(39): Selenocysteine
  MOD_RES (60)..(60): Selenocysteine
  MOD_RES (83)..(83): Selenocysteine
  MOD_RES (113)..(113): Selenocysteine
  MOD_RES (115)..(115): Selenocysteine
  MOD_RES (118)..(118): Selenocysteine
  MOD_RES (127)..(127): Selenocysteine
  MOD_RES (132)..(132): Selenocysteine
  MOD_RES (157)..(157): Selenocysteine
MEQLSDEEIDHGAEEDSDKEDQDLDKMFGAWLGELDKLXQSLDSDKPMEPVKRSPLRQEXNMANFSYRFSIYNLNEALNQGEXVDLDALMADLCSIEQELSSIGSGNSKRQIXEXKAXQKLPVSRHXLKHGXLKGLSSSSNRIAKPSHASYSLDDVXAQLEQASLSMDEAAQ

SEQ ID NO: 22832 - protein, 592 aa, Homo sapiens
  MOD_RES (39)..(39): Selenocysteine
  MOD_RES (60)..(60): Selenocysteine
  MOD_RES (83)..(83): Selenocysteine
  MOD_RES (113)..(113): Selenocysteine
  MOD_RES (115)..(115): Selenocysteine
  MOD_RES (118)..(118): Selenocysteine
  MOD_RES (127)..(127): Selenocysteine
  MOD_RES (132)..(132): Selenocysteine
  MOD_RES (157)..(157): Selenocysteine
  MOD_RES (179)..(179): Selenocysteine
  MOD_RES (184)..(184): Selenocysteine
  MOD_RES (190)..(190): Selenocysteine
  MOD_RES (195)..(195): Selenocysteine
  MOD_RES (213)..(213): Selenocysteine
  MOD_RES (228)..(228): Selenocysteine
  MOD_RES (236)..(236): Selenocysteine
  MOD_RES (243)..(243): Selenocysteine
  MOD_RES (284)..(284): Selenocysteine
  MOD_RES (292)..(292): Selenocysteine
  MOD_RES (317)..(317): Selenocysteine
  MOD_RES (341)..(341): Selenocysteine
  MOD_RES (373)..(373): Selenocysteine
  MOD_RES (395)..(395): Selenocysteine
  MOD_RES (464)..(464): Selenocysteine
  MOD_RES (492)..(492): Selenocysteine
  MOD_RES (520)..(520): Selenocysteine
  MOD_RES (527)..(527): Selenocysteine
  MOD_RES (561)..(561): Selenocysteine
  MOD_RES (585)..(585): Selenocysteine
MEQLSDEEIDHGAEEDSDKEDQDLDKMFGAWLGELDKLXQSLDSDKPMEPVKRSPLRQEXNMANFSYRFSIYNLNEALNQGEXVDLDALMADLCSIEQELSSIGSGNSKRQIXEXKAXQKLPVSRHXLKHGXLKGLSSSSNRIAKPSHASYSLDDVXAQLEQASLSMDEAAQQSVLEDXKPLVXNQHRRXASAGXVSDAEVHSISNSSHSSIXSAASSMDSLDIDKVXRPQELDLXHQGQPIXEEEQAAKLKAEKIRVALEKIKEAQVKKLVIRVHMSDDSSKXMMVDERQXVRQVLDNLMDKSHCGYSLDWSLVEXVSELQMERIFEDHENLVENLLNWXRDSQNKLIFMERIEKYALFKNPQNYLLGKKEXAEMADRNKEVLLEECFCGSSVXVPEIEGVLWLKDDGKKSWKKRYFLLRASGIYYVPKGKAKVSRDLVCFLQLDHVNVYYGQDYRNKYKAPXDYCLVLKHPQIQKKSQYIKYLCCDDVRXLHQWVNGIRIAKYGKQLYMNYQEALKRXESAYDWXSLSSSSIKSGSSSSSIPESQSNHSNQSDSGVSDXQPAGHVRSQSIVSSVFSEAWKRGXQLEESSK

SEQ ID NO: 22833 - protein, 594 aa, Homo sapiens
  MOD_RES (39)..(39): Selenocysteine
  MOD_RES (60)..(60): Selenocysteine
  MOD_RES (83)..(83): Selenocysteine
  MOD_RES (113)..(113): Selenocysteine
  MOD_RES (115)..(115): Selenocysteine
  MOD_RES (118)..(118): Selenocysteine
  MOD_RES (127)..(127): Selenocysteine
  MOD_RES (132)..(132): Selenocysteine
  MOD_RES (157)..(157): Selenocysteine
  MOD_RES (179)..(179): Selenocysteine
  MOD_RES (184)..(184): Selenocysteine
  MOD_RES (190)..(190): Selenocysteine
  MOD_RES (195)..(195): Selenocysteine
  MOD_RES (213)..(213): Selenocysteine
  MOD_RES (228)..(228): Selenocysteine
  MOD_RES (236)..(236): Selenocysteine
  MOD_RES (243)..(243): Selenocysteine
  MOD_RES (284)..(284): Selenocysteine
  MOD_RES (292)..(292): Selenocysteine
  MOD_RES (317)..(317): Selenocysteine
  MOD_RES (341)..(341): Selenocysteine
  MOD_RES (373)..(373): Selenocysteine
  MOD_RES (395)..(395): Selenocysteine
  MOD_RES (464)..(464): Selenocysteine
  MOD_RES (492)..(492): Selenocysteine
  MOD_RES (520)..(520): Selenocysteine
  MOD_RES (527)..(527): Selenocysteine
  MOD_RES (561)..(561): Selenocysteine
  MOD_RES (585)..(585): Selenocysteine
MEQLSDEEIDHGAEEDSDKEDQDLDKMFGAWLGELDKLXQSLDSDKPMEPVKRSPLRQEXNMANFSYRFSIYNLNEALNQGEXVDLDALMADLCSIEQELSSIGSGNSKRQIXEXKAXQKLPVSRHXLKHGXLKGLSSSSNRIAKPSHASYSLDDVXAQLEQASLSMDEAAQQSVLEDXKPLVXNQHRRXASAGXVSDAEVHSISNSSHSSIXSAASSMDSLDIDKVXRPQELDLXHQGQPIXEEEQAAKLKAEKIRVALEKIKEAQVKKLVIRVHMSDDSSKXMMVDERQXVRQVLDNLMDKSHCGYSLDWSLVEXVSELQMERIFEDHENLVENLLNWXRDSQNKLIFMERIEKYALFKNPQNYLLGKKEXAEMADRNKEVLLEECFCGSSVXVPEIEGVLWLKDDGKKSWKKRYFLLRASGIYYVPKGKAKVSRDLVCFLQLDHVNVYYGQDYRNKYKAPXDYCLVLKHPQIQKKSQYIKYLCCDDVRXLHQWVNGIRIAKYGKQLYMNYQEALKRXESAYDWXSLSSSSIKSGSSSSSIPESQSNHSNQSDSGVSDXQPAGHVRSQSIVSSVFSEAWKRGXQLEESSKIN

SEQ ID NO: 22834 - protein, 597 aa, Homo sapiens
  MOD_RES (39)..(39): Selenocysteine
  MOD_RES (60)..(60): Selenocysteine
  MOD_RES (83)..(83): Selenocysteine
  MOD_RES (113)..(113): Selenocysteine
  MOD_RES (115)..(115): Selenocysteine
  MOD_RES (118)..(118): Selenocysteine
  MOD_RES (127)..(127): Selenocysteine
  MOD_RES (132)..(132): Selenocysteine
  MOD_RES (157)..(157): Selenocysteine
  MOD_RES (179)..(179): Selenocysteine
  MOD_RES (184)..(184): Selenocysteine
  MOD_RES (190)..(190): Selenocysteine
  MOD_RES (195)..(195): Selenocysteine
  MOD_RES (213)..(213): Selenocysteine
  MOD_RES (228)..(228): Selenocysteine
  MOD_RES (236)..(236): Selenocysteine
  MOD_RES (243)..(243): Selenocysteine
  MOD_RES (284)..(284): Selenocysteine
  MOD_RES (292)..(292): Selenocysteine
  MOD_RES (317)..(317): Selenocysteine
  MOD_RES (341)..(341): Selenocysteine
  MOD_RES (373)..(373): Selenocysteine
  MOD_RES (395)..(395): Selenocysteine
  MOD_RES (464)..(464): Selenocysteine
  MOD_RES (492)..(492): Selenocysteine
  MOD_RES (520)..(520): Selenocysteine
  MOD_RES (527)..(527): Selenocysteine
  MOD_RES (561)..(561): Selenocysteine
  MOD_RES (585)..(585): Selenocysteine
  MOD_RES (594)..(594): Selenocysteine
MEQLSDEEIDHGAEEDSDKEDQDLDKMFGAWLGELDKLXQSLDSDKPMEPVKRSPLRQEXNMANFSYRFSIYNLNEALNQGEXVDLDALMADLCSIEQELSSIGSGNSKRQIXEXKAXQKLPVSRHXLKHGXLKGLSSSSNRIAKPSHASYSLDDVXAQLEQASLSMDEAAQQSVLEDXKPLVXNQHRRXASAGXVSDAEVHSISNSSHSSIXSAASSMDSLDIDKVXRPQELDLXHQGQPIXEEEQAAKLKAEKIRVALEKIKEAQVKKLVIRVHMSDDSSKXMMVDERQXVRQVLDNLMDKSHCGYSLDWSLVEXVSELQMERIFEDHENLVENLLNWXRDSQNKLIFMERIEKYALFKNPQNYLLGKKEXAEMADRNKEVLLEECFCGSSVXVPEIEGVLWLKDDGKKSWKKRYFLLRASGIYYVPKGKAKVSRDLVCFLQLDHVNVYYGQDYRNKYKAPXDYCLVLKHPQIQKKSQYIKYLCCDDVRXLHQWVNGIRIAKYGKQLYMNYQEALKRXESAYDWXSLSSSSIKSGSSSSSIPESQSNHSNQSDSGVSDXQPAGHVRSQSIVSSVFSEAWKRGXQLEESSKVXASF

SEQ ID NO: 22835 - protein, 1250 aa, Homo sapiens
  MOD_RES (39)..(39): Selenocysteine
  MOD_RES (60)..(60): Selenocysteine
  MOD_RES (83)..(83): Selenocysteine
  MOD_RES (113)..(113): Selenocysteine
  MOD_RES (115)..(115): Selenocysteine
  MOD_RES (118)..(118): Selenocysteine
  MOD_RES (127)..(127): Selenocysteine
  MOD_RES (132)..(132): Selenocysteine
  MOD_RES (157)..(157): Selenocysteine
  MOD_RES (179)..(179): Selenocysteine
  MOD_RES (184)..(184): Selenocysteine
  MOD_RES (190)..(190): Selenocysteine
  MOD_RES (195)..(195): Selenocysteine
  MOD_RES (213)..(213): Selenocysteine
  MOD_RES (228)..(228): Selenocysteine
  MOD_RES (236)..(236): Selenocysteine
  MOD_RES (243)..(243): Selenocysteine
  MOD_RES (284)..(284): Selenocysteine
  MOD_RES (292)..(292): Selenocysteine
  MOD_RES (317)..(317): Selenocysteine
  MOD_RES (341)..(341): Selenocysteine
  MOD_RES (373)..(373): Selenocysteine
  MOD_RES (395)..(395): Selenocysteine
  MOD_RES (464)..(464): Selenocysteine
  MOD_RES (492)..(492): Selenocysteine
  MOD_RES (520)..(520): Selenocysteine
  MOD_RES (527)..(527): Selenocysteine
  MOD_RES (561)..(561): Selenocysteine
  MOD_RES (585)..(585): Selenocysteine
  MOD_RES (603)..(603): Selenocysteine
  MOD_RES (617)..(617): Selenocysteine
  MOD_RES (620)..(620): Selenocysteine
  MOD_RES (669)..(669): Selenocysteine
  MOD_RES (671)..(671): Selenocysteine
  MOD_RES (688)..(688): Selenocysteine
  MOD_RES (720)..(720): Selenocysteine
  MOD_RES (756)..(756): Selenocysteine
  MOD_RES (762)..(762): Selenocysteine
  MOD_RES (784)..(784): Selenocysteine
  MOD_RES (789)..(789): Selenocysteine
  MOD_RES (791)..(791): Selenocysteine
  MOD_RES (793)..(793): Selenocysteine
  MOD_RES (799)..(799): Selenocysteine
  MOD_RES (805)..(805): Selenocysteine
  MOD_RES (807)..(807): Selenocysteine
  MOD_RES (830)..(830): Selenocysteine
  MOD_RES (839)..(839): Selenocysteine
  MOD_RES (874)..(874): Selenocysteine
  MOD_RES (945)..(945): Selenocysteine
  MOD_RES (949)..(949): Selenocysteine
  MOD_RES (960)..(960): Selenocysteine
  MOD_RES (963)..(963): Selenocysteine
  MOD_RES (974)..(974): Selenocysteine
  MOD_RES (1005)..(1005): Selenocysteine
  MOD_RES (1017)..(1017): Selenocysteine
  MOD_RES (1080)..(1080): Selenocysteine
  MOD_RES (1097)..(1097): Selenocysteine
  MOD_RES (1123)..(1123): Selenocysteine
  MOD_RES (1131)..(1131): Selenocysteine
  MOD_RES (1134)..(1134): Selenocysteine
  MOD_RES (1143)..(1143): Selenocysteine
  MOD_RES (1146)..(1146): Selenocysteine
  MOD_RES (1153)..(1153): Selenocysteine
  MOD_RES (1172)..(1172): Selenocysteine
  MOD_RES (1179)..(1179): Selenocysteine
  MOD_RES (1194)..(1194): Selenocysteine
  MOD_RES (1196)..(1196): Selenocysteine
  MOD_RES (1228)..(1228): Selenocysteine
  MOD_RES (1244)..(1244): Selenocysteine
MEQLSDEEIDHGAEEDSDKEDQDLDKMFGAWLGELDKLXQSLDSDKPMEPVKRSPLRQEXNMANFSYRFSIYNLNEALNQGEXVDLDALMADLCSIEQELSSIGSGNSKRQIXEXKAXQKLPVSRHXLKHGXLKGLSSSSNRIAKPSHASYSLDDVXAQLEQASLSMDEAAQQSVLEDXKPLVXNQHRRXASAGXVSDAEVHSISNSSHSSIXSAASSMDSLDIDKVXRPQELDLXHQGQPIXEEEQAAKLKAEKIRVALEKIKEAQVKKLVIRVHMSDDSSKXMMVDERQXVRQVLDNLMDKSHCGYSLDWSLVEXVSELQMERIFEDHENLVENLLNWXRDSQNKLIFMERIEKYALFKNPQNYLLGKKEXAEMADRNKEVLLEECFCGSSVXVPEIEGVLWLKDDGKKSWKKRYFLLRASGIYYVPKGKAKVSRDLVCFLQLDHVNVYYGQDYRNKYKAPXDYCLVLKHPQIQKKSQYIKYLCCDDVRXLHQWVNGIRIAKYGKQLYMNYQEALKRXESAYDWXSLSSSSIKSGSSSSSIPESQSNHSNQSDSGVSDXQPAGHVRSQSIVSSVFSEAWKRGXQLEESSKARMESMNRPYXSLVPPLSPQPKIVXPYXASQPSPPLPPPPPPPPPPPPPPPPPPPPLPSQSAPSAGSAAPMFVKYSXIXRLQNASQHSGALFKPPXPPVMQSQSVKPQILVPPNGVVPPPPPPPPPPXPGSAMAQLKPAPCAPSLPQFSAPPPPLKIHQVQHIXQVAPPXPPPPPPIPAPLPPQAPPKPLVXIPAPXSXKXVAPVVXQAAPPXPXPPVPPAKKQPAFPASYIPPSPPXPPVPVPPPXLPKQQSFCAKPPPSPLSPVPSVVKQIASQFPPPPXPPAMESQPLKPVPANVAPQSPPAVKAKPKWQPSSIPVPSPDFPPPPPESSLVFPPPPPSPVPAPPPPPPPXASPXPDKSGSPGKKXSKXSSPGGKKPPPXPQRNSSIKSSSGAEHPEPKRPSVDSLVSKFXPPAESGSPSKEXLPPPAAPPKPGKLNLSGVNLPGVLQQGCVSAKAPVLSGRGKDSVVEFPSPPSDSDFPPPPPEXELPLPPIEIPAVFSGNXSPKVAVVNPQPQQWSKMSVKKAPPPXRPKRNDSXRLXQAEISEQPXMAXVVPQVPXSPKSSLSVQPGFLADLNRXLQRKSIXRHGSLSSRMSRAEPXAXMDDMALPPPPPELLSDQQKAGYGGSHISGYAXLRRGPPPAPPKRDQNXKLSRDW

SEQ ID NO: 22836 - protein, 619 aa, Homo sapiens
  MOD_RES (39)..(39): Selenocysteine
  MOD_RES (60)..(60): Selenocysteine
  MOD_RES (83)..(83): Selenocysteine
  MOD_RES (113)..(113): Selenocysteine
  MOD_RES (115)..(115): Selenocysteine
  MOD_RES (118)..(118): Selenocysteine
  MOD_RES (127)..(127): Selenocysteine
  MOD_RES (132)..(132): Selenocysteine
  MOD_RES (157)..(157): Selenocysteine
  MOD_RES (179)..(179): Selenocysteine
  MOD_RES (184)..(184): Selenocysteine
  MOD_RES (190)..(190): Selenocysteine
  MOD_RES (195)..(195): Selenocysteine
  MOD_RES (213)..(213): Selenocysteine
  MOD_RES (228)..(228): Selenocysteine
  MOD_RES (236)..(236): Selenocysteine
  MOD_RES (243)..(243): Selenocysteine
  MOD_RES (263)..(263): Selenocysteine
  MOD_RES (270)..(270): Selenocysteine
  MOD_RES (311)..(311): Selenocysteine
  MOD_RES (319)..(319): Selenocysteine
  MOD_RES (344)..(344): Selenocysteine
  MOD_RES (368)..(368): Selenocysteine
  MOD_RES (400)..(400): Selenocysteine
  MOD_RES (422)..(422): Selenocysteine
  MOD_RES (491)..(491): Selenocysteine
  MOD_RES (519)..(519): Selenocysteine
  MOD_RES (547)..(547): Selenocysteine
  MOD_RES (554)..(554): Selenocysteine
  MOD_RES (588)..(588): Selenocysteine
  MOD_RES (612)..(612): Selenocysteine
MEQLSDEEIDHGAEEDSDKEDQDLDKMFGAWLGELDKLXQSLDSDKPMEPVKRSPLRQEXNMANFSYRFSIYNLNEALNQGEXVDLDALMADLCSIEQELSSIGSGNSKRQIXEXKAXQKLPVSRHXLKHGXLKGLSSSSNRIAKPSHASYSLDDVXAQLEQASLSMDEAAQQSVLEDXKPLVXNQHRRXASAGXVSDAEVHSISNSSHSSIXSAASSMDSLDIDKVXRPQELDLXHQGQPIXEHAISLRCSSKQAKRHIDFXEEQAELXPEEQAAKLKAEKIRVALEKIKEAQVKKLVIRVHMSDDSSKXMMVDERQXVRQVLDNLMDKSHCGYSLDWSLVEXVSELQMERIFEDHENLVENLLNWXRDSQNKLIFMERIEKYALFKNPQNYLLGKKEXAEMADRNKEVLLEECFCGSSVXVPEIEGVLWLKDDGKKSWKKRYFLLRASGIYYVPKGKAKVSRDLVCFLQLDHVNVYYGQDYRNKYKAPXDYCLVLKHPQIQKKSQYIKYLCCDDVRXLHQWVNGIRIAKYGKQLYMNYQEALKRXESAYDWXSLSSSSIKSGSSSSSIPESQSNHSNQSDSGVSDXQPAGHVRSQSIVSSVFSEAWKRGXQLEESSK

SEQ ID NO: 22837 - protein, 644 aa, Homo sapiens
  MOD_RES (39)..(39): Selenocysteine
  MOD_RES (60)..(60): Selenocysteine
  MOD_RES (83)..(83): Selenocysteine
  MOD_RES (113)..(113): Selenocysteine
  MOD_RES (115)..(115): Selenocysteine
  MOD_RES (118)..(118): Selenocysteine
  MOD_RES (127)..(127): Selenocysteine
  MOD_RES (132)..(132): Selenocysteine
  MOD_RES (157)..(157): Selenocysteine
  MOD_RES (179)..(179): Selenocysteine
  MOD_RES (184)..(184): Selenocysteine
  MOD_RES (190)..(190): Selenocysteine
  MOD_RES (195)..(195): Selenocysteine
  MOD_RES (213)..(213): Selenocysteine
  MOD_RES (228)..(228): Selenocysteine
  MOD_RES (236)..(236): Selenocysteine
  MOD_RES (243)..(243): Selenocysteine
  MOD_RES (263)..(263): Selenocysteine
  MOD_RES (270)..(270): Selenocysteine
  MOD_RES (279)..(279): Selenocysteine
  MOD_RES (295)..(295): Selenocysteine
  MOD_RES (336)..(336): Selenocysteine
  MOD_RES (344)..(344): Selenocysteine
  MOD_RES (369)..(369): Selenocysteine
  MOD_RES (393)..(393): Selenocysteine
  MOD_RES (425)..(425): Selenocysteine
  MOD_RES (447)..(447): Selenocysteine
  MOD_RES (516)..(516): Selenocysteine
  MOD_RES (544)..(544): Selenocysteine
  MOD_RES (572)..(572): Selenocysteine
  MOD_RES (579)..(579): Selenocysteine
  MOD_RES (613)..(613): Selenocysteine
  MOD_RES (637)..(637): Selenocysteine
MEQLSDEEIDHGAEEDSDKEDQDLDKMFGAWLGELDKLXQSLDSDKPMEPVKRSPLRQEXNMANFSYRFSIYNLNEALNQGEXVDLDALMADLCSIEQELSSIGSGNSKRQIXEXKAXQKLPVSRHXLKHGXLKGLSSSSNRIAKPSHASYSLDDVXAQLEQASLSMDEAAQQSVLEDXKPLVXNQHRRXASAGXVSDAEVHSISNSSHSSIXSAASSMDSLDIDKVXRPQELDLXHQGQPIXEHAISLRCSSKQAKRHIDFXEEQAELXPHSYLDREXSLLLRNIAGKPSHLLXKEEQAAKLKAEKIRVALEKIKEAQVKKLVIRVHMSDDSSKXMMVDERQXVRQVLDNLMDKSHCGYSLDWSLVEXVSELQMERIFEDHENLVENLLNWXRDSQNKLIFMERIEKYALFKNPQNYLLGKKEXAEMADRNKEVLLEECFCGSSVXVPEIEGVLWLKDDGKKSWKKRYFLLRASGIYYVPKGKAKVSRDLVCFLQLDHVNVYYGQDYRNKYKAPXDYCLVLKHPQIQKKSQYIKYLCCDDVRXLHQWVNGIRIAKYGKQLYMNYQEALKRXESAYDWXSLSSSSIKSGSSSSSIPESQSNHSNQSDSGVSDXQPAGHVRSQSIVSSVFSEAWKRGXQLEESSK

SEQ ID NO: 22838 - protein, 649 aa, Homo sapiens
  MOD_RES (39)..(39): Selenocysteine
  MOD_RES (60)..(60): Selenocysteine
  MOD_RES (83)..(83): Selenocysteine
  MOD_RES (113)..(113): Selenocysteine
  MOD_RES (115)..(115): Selenocysteine
  MOD_RES (118)..(118): Selenocysteine
  MOD_RES (127)..(127): Selenocysteine
  MOD_RES (132)..(132): Selenocysteine
  MOD_RES (157)..(157): Selenocysteine
  MOD_RES (179)..(179): Selenocysteine
  MOD_RES (184)..(184): Selenocysteine
  MOD_RES (190)..(190): Selenocysteine
  MOD_RES (195)..(195): Selenocysteine
  MOD_RES (213)..(213): Selenocysteine
  MOD_RES (228)..(228): Selenocysteine
  MOD_RES (236)..(236): Selenocysteine
  MOD_RES (243)..(243): Selenocysteine
  MOD_RES (263)..(263): Selenocysteine
  MOD_RES (270)..(270): Selenocysteine
  MOD_RES (279)..(279): Selenocysteine
  MOD_RES (295)..(295): Selenocysteine
  MOD_RES (336)..(336): Selenocysteine
  MOD_RES (344)..(344): Selenocysteine
  MOD_RES (369)..(369): Selenocysteine
  MOD_RES (393)..(393): Selenocysteine
  MOD_RES (425)..(425): Selenocysteine
  MOD_RES (447)..(447): Selenocysteine
  MOD_RES (516)..(516): Selenocysteine
  MOD_RES (544)..(544): Selenocysteine
  MOD_RES (572)..(572): Selenocysteine
  MOD_RES (579)..(579): Selenocysteine
  MOD_RES (613)..(613): Selenocysteine
  MOD_RES (637)..(637): Selenocysteine
  MOD_RES (646)..(646): Selenocysteine
MEQLSDEEIDHGAEEDSDKEDQDLDKMFGAWLGELDKLXQSLDSDKPMEPVKRSPLRQEXNMANFSYRFSIYNLNEALNQGEXVDLDALMADLCSIEQELSSIGSGNSKRQIXEXKAXQKLPVSRHXLKHGXLKGLSSSSNRIAKPSHASYSLDDVXAQLEQASLSMDEAAQQSVLEDXKPLVXNQHRRXASAGXVSDAEVHSISNSSHSSIXSAASSMDSLDIDKVXRPQELDLXHQGQPIXEHAISLRCSSKQAKRHIDFXEEQAELXPHSYLDREXSLLLRNIAGKPSHLLXKEEQAAKLKAEKIRVALEKIKEAQVKKLVIRVHMSDDSSKXMMVDERQXVRQVLDNLMDKSHCGYSLDWSLVEXVSELQMERIFEDHENLVENLLNWXRDSQNKLIFMERIEKYALFKNPQNYLLGKKEXAEMADRNKEVLLEECFCGSSVXVPEIEGVLWLKDDGKKSWKKRYFLLRASGIYYVPKGKAKVSRDLVCFLQLDHVNVYYGQDYRNKYKAPXDYCLVLKHPQIQKKSQYIKYLCCDDVRXLHQWVNGIRIAKYGKQLYMNYQEALKRXESAYDWXSLSSSSIKSGSSSSSIPESQSNHSNQSDSGVSDXQPAGHVRSQSIVSSVFSEAWKRGXQLEESSKVXASF

SEQ ID NO: 22839 - protein, 1302 aa, Homo sapiens
  MOD_RES (39)..(39): Selenocysteine
  MOD_RES (60)..(60): Selenocysteine
  MOD_RES (83)..(83): Selenocysteine
  MOD_RES (113)..(113): Selenocysteine
  MOD_RES (115)..(115): Selenocysteine
  MOD_RES (118)..(118): Selenocysteine
  MOD_RES (127)..(127): Selenocysteine
  MOD_RES (132)..(132): Selenocysteine
  MOD_RES (157)..(157): Selenocysteine
  MOD_RES (179)..(179): Selenocysteine
  MOD_RES (184)..(184): Selenocysteine
  MOD_RES (190)..(190): Selenocysteine
  MOD_RES (195)..(195): Selenocysteine
  MOD_RES (213)..(213): Selenocysteine
  MOD_RES (228)..(228): Selenocysteine
  MOD_RES (236)..(236): Selenocysteine
  MOD_RES (243)..(243): Selenocysteine
  MOD_RES (263)..(263): Selenocysteine
  MOD_RES (270)..(270): Selenocysteine
  MOD_RES (279)..(279): Selenocysteine
  MOD_RES (295)..(295): Selenocysteine
  MOD_RES (336)..(336): Selenocysteine
  MOD_RES (344)..(344): Selenocysteine
  MOD_RES (369)..(369): Selenocysteine
  MOD_RES (393)..(393): Selenocysteine
  MOD_RES (425)..(425): Selenocysteine
  MOD_RES (447)..(447): Selenocysteine
  MOD_RES (516)..(516): Selenocysteine
  MOD_RES (544)..(544): Selenocysteine
  MOD_RES (572)..(572): Selenocysteine
  MOD_RES (579)..(579): Selenocysteine
  MOD_RES (613)..(613): Selenocysteine
  MOD_RES (637)..(637): Selenocysteine
  MOD_RES (655)..(655): Selenocysteine
  MOD_RES (669)..(669): Selenocysteine
  MOD_RES (672)..(672): Selenocysteine
  MOD_RES (721)..(721): Selenocysteine
  MOD_RES (723)..(723): Selenocysteine
  MOD_RES (740)..(740): Selenocysteine
  MOD_RES (772)..(772): Selenocysteine
  MOD_RES (808)..(808): Selenocysteine
  MOD_RES (814)..(814): Selenocysteine
  MOD_RES (836)..(836): Selenocysteine
  MOD_RES (841)..(841): Selenocysteine
  MOD_RES (843)..(843): Selenocysteine
  MOD_RES (845)..(845): Selenocysteine
  MOD_RES (851)..(851): Selenocysteine
  MOD_RES (857)..(857): Selenocysteine
  MOD_RES (859)..(859): Selenocysteine
  MOD_RES (882)..(882): Selenocysteine
  MOD_RES (891)..(891): Selenocysteine
  MOD_RES (926)..(926): Selenocysteine
  MOD_RES (997)..(997): Selenocysteine
  MOD_RES (1001)..(1001): Selenocysteine
  MOD_RES (1012)..(1012): Selenocysteine
  MOD_RES (1015)..(1015): Selenocysteine
  MOD_RES (1026)..(1026): Selenocysteine
  MOD_RES (1057)..(1057): Selenocysteine
  MOD_RES (1069)..(1069): Selenocysteine
  MOD_RES (1132)..(1132): Selenocysteine
  MOD_RES (1149)..(1149): Selenocysteine
  MOD_RES (1175)..(1175): Selenocysteine
  MOD_RES (1183)..(1183): Selenocysteine
  MOD_RES (1186)..(1186): Selenocysteine
  MOD_RES (1195)..(1195): Selenocysteine
  MOD_RES (1198)..(1198): Selenocysteine
  MOD_RES (1205)..(1205): Selenocysteine
  MOD_RES (1224)..(1224): Selenocysteine
  MOD_RES (1231)..(1231): Selenocysteine
  MOD_RES (1246)..(1246): Selenocysteine
  MOD_RES (1248)..(1248): Selenocysteine
  MOD_RES (1280)..(1280): Selenocysteine
  MOD_RES (1296)..(1296): Selenocysteine
MEQLSDEEIDHGAEEDSDKEDQDLDKMFGAWLGELDKLXQSLDSDKPMEPVKRSPLRQEXNMANFSYRFSIYNLNEALNQGEXVDLDALMADLCSIEQELSSIGSGNSKRQIXEXKAXQKLPVSRHXLKHGXLKGLSSSSNRIAKPSHASYSLDDVXAQLEQASLSMDEAAQQSVLEDXKPLVXNQHRRXASAGXVSDAEVHSISNSSHSSIXSAASSMDSLDIDKVXRPQELDLXHQGQPIXEHAISLRCSSKQAKRHIDFXEEQAELXPHSYLDREXSLLLRNIAGKPSHLLXKEEQAAKLKAEKIRVALEKIKEAQVKKLVIRVHMSDDSSKXMMVDERQXVRQVLDNLMDKSHCGYSLDWSLVEXVSELQMERIFEDHENLVENLLNWXRDSQNKLIFMERIEKYALFKNPQNYLLGKKEXAEMADRNKEVLLEECFCGSSVXVPEIEGVLWLKDDGKKSWKKRYFLLRASGIYYVPKGKAKVSRDLVCFLQLDHVNVYYGQDYRNKYKAPXDYCLVLKHPQIQKKSQYIKYLCCDDVRXLHQWVNGIRIAKYGKQLYMNYQEALKRXESAYDWXSLSSSSIKSGSSSSSIPESQSNHSNQSDSGVSDXQPAGHVRSQSIVSSVFSEAWKRGXQLEESSKARMESMNRPYXSLVPPLSPQPKIVXPYXASQPSPPLPPPPPPPPPPPPPPPPPPPPLPSQSAPSAGSAAPMFVKYSXIXRLQNASQHSGALFKPPXPPVMQSQSVKPQILVPPNGVVPPPPPPPPPPXPGSAMAQLKPAPCAPSLPQFSAPPPPLKIHQVQHIXQVAPPXPPPPPPIPAPLPPQAPPKPLVXIPAPXSXKXVAPVVXQAAPPXPXPPVPPAKKQPAFPASYIPPSPPXPPVPVPPPXLPKQQSFCAKPPPSPLSPVPSVVKQIASQFPPPPXPPAMESQPLKPVPANVAPQSPPAVKAKPKWQPSSIPVPSPDFPPPPPESSLVFPPPPPSPVPAPPPPPPPXASPXPDKSGSPGKKXSKXSSPGGKKPPPXPQRNSSIKSSSGAEHPEPKRPSVDSLVSKFXPPAESGSPSKEXLPPPAAPPKPGKLNLSGVNLPGVLQQGCVSAKAPVLSGRGKDSVVEFPSPPSDSDFPPPPPEXELPLPPIEIPAVFSGNXSPKVAVVNPQPQQWSKMSVKKAPPPXRPKRNDSXRLXQAEISEQPXMAXVVPQVPXSPKSSLSVQPGFLADLNRXLQRKSIXRHGSLSSRMSRAEPXAXMDDMALPPPPPELLSDQQKAGYGGSHISGYAXLRRGPPPAPPKRDQNXKLSRDW

SEQ ID NO: 22840 - protein, 617 aa, Homo sapiens
  MOD_RES (39)..(39): Selenocysteine
  MOD_RES (60)..(60): Selenocysteine
  MOD_RES (83)..(83): Selenocysteine
  MOD_RES (113)..(113): Selenocysteine
  MOD_RES (115)..(115): Selenocysteine
  MOD_RES (118)..(118): Selenocysteine
  MOD_RES (127)..(127): Selenocysteine
  MOD_RES (132)..(132): Selenocysteine
  MOD_RES (157)..(157): Selenocysteine
  MOD_RES (179)..(179): Selenocysteine
  MOD_RES (184)..(184): Selenocysteine
  MOD_RES (190)..(190): Selenocysteine
  MOD_RES (195)..(195): Selenocysteine
  MOD_RES (213)..(213): Selenocysteine
  MOD_RES (228)..(228): Selenocysteine
  MOD_RES (236)..(236): Selenocysteine
  MOD_RES (243)..(243): Selenocysteine
  MOD_RES (252)..(252): Selenocysteine
  MOD_RES (268)..(268): Selenocysteine
  MOD_RES (309)..(309): Selenocysteine
  MOD_RES (317)..(317): Selenocysteine
  MOD_RES (342)..(342): Selenocysteine
  MOD_RES (366)..(366): Selenocysteine
  MOD_RES (398)..(398): Selenocysteine
  MOD_RES (420)..(420): Selenocysteine
  MOD_RES (489)..(489): Selenocysteine
  MOD_RES (517)..(517): Selenocysteine
  MOD_RES (545)..(545): Selenocysteine
  MOD_RES (552)..(552): Selenocysteine
  MOD_RES (586)..(586): Selenocysteine
  MOD_RES (610)..(610): Selenocysteine
MEQLSDEEIDHGAEEDSDKEDQDLDKMFGAWLGELDKLXQSLDSDKPMEPVKRSPLRQEXNMANFSYRFSIYNLNEALNQGEXVDLDALMADLCSIEQELSSIGSGNSKRQIXEXKAXQKLPVSRHXLKHGXLKGLSSSSNRIAKPSHASYSLDDVXAQLEQASLSMDEAAQQSVLEDXKPLVXNQHRRXASAGXVSDAEVHSISNSSHSSIXSAASSMDSLDIDKVXRPQELDLXHQGQPIXEHSYLDREXSLLLRNIAGKPSHLLXKEEQAAKLKAEKIRVALEKIKEAQVKKLVIRVHMSDDSSKXMMVDERQXVRQVLDNLMDKSHCGYSLDWSLVEXVSELQMERIFEDHENLVENLLNWXRDSQNKLIFMERIEKYALFKNPQNYLLGKKEXAEMADRNKEVLLEECFCGSSVXVPEIEGVLWLKDDGKKSWKKRYFLLRASGIYYVPKGKAKVSRDLVCFLQLDHVNVYYGQDYRNKYKAPXDYCLVLKHPQIQKKSQYIKYLCCDDVRXLHQWVNGIRIAKYGKQLYMNYQEALKRXESAYDWXSLSSSSIKSGSSSSSIPESQSNHSNQSDSGVSDXQPAGHVRSQSIVSSVFSEAWKRGXQLEESSK

SEQ ID NO: 22841 - protein, 66 aa, Homo sapiens
  MOD_RES (10)..(10): Selenocysteine
  MOD_RES (42)..(43): Selenocysteine
  MOD_RES (55)..(55): Selenocysteine
  MOD_RES (60)..(60): Selenocysteine
  MOD_RES (63)..(63): Selenocysteine
MASNSSSCPXPGGGHLNGYPVPPYAFFFPPMLGGLSPPGALXXLQHQLPVSGYSXPSPAXIEXQSS

SEQ ID NO: 22842 - protein, 462 aa, Homo sapiens
  MOD_RES (10)..(10): Selenocysteine
  MOD_RES (42)..(43): Selenocysteine
  MOD_RES (55)..(55): Selenocysteine
  MOD_RES (60)..(60): Selenocysteine
  MOD_RES (63)..(63): Selenocysteine
  MOD_RES (123)..(123): Selenocysteine
  MOD_RES (136)..(136): Selenocysteine
  MOD_RES (179)..(179): Selenocysteine
  MOD_RES (181)..(181): Selenocysteine
  MOD_RES (198)..(198): Selenocysteine
  MOD_RES (209)..(210): Selenocysteine
  MOD_RES (233)..(233): Selenocysteine
  MOD_RES (239)..(239): Selenocysteine
  MOD_RES (250)..(251): Selenocysteine
  MOD_RES (253)..(253): Selenocysteine
  MOD_RES (259)..(259): Selenocysteine
  MOD_RES (275)..(275): Selenocysteine
  MOD_RES (278)..(278): Selenocysteine
  MOD_RES (283)..(283): Selenocysteine
  MOD_RES (285)..(285): Selenocysteine
  MOD_RES (291)..(291): Selenocysteine
  MOD_RES (295)..(295): Selenocysteine
  MOD_RES (306)..(306): Selenocysteine
  MOD_RES (326)..(326): Selenocysteine
  MOD_RES (382)..(382): Selenocysteine
  MOD_RES (397)..(397): Selenocysteine
  MOD_RES (422)..(422): Selenocysteine
  MOD_RES (459)..(459): Selenocysteine
MASNSSSCPXPGGGHLNGYPVPPYAFFFPPMLGGLSPPGALXXLQHQLPVSGYSXPSPAXIEXQSSSSEEIVPSPPSPPPLPRIYKPCFVCQDKSSGYHYGVSACEGCKGFFRRSIQKNMVYXCHRDKNCIINKVXRNRCQYCRLQKCFEVGMSKESVRNDRNKKKKEVPKPECSESYXLXPEVGELIEKVRKAHQEXFPALCQLGKYXXNNSSEQRVSLDIDLWDKFSELSXKCIIKXVEFAKQLPGFXXLXIADQIXLLKAACLDILILRICXRYXPEQDXMXFSDGLXLNRXQMHNAGFGPLXDLVFAFANQLLPLEMDDAEXGLLSAICLICGDRQDLEQPDRVDMLQEPLLEALKVYVRKRRPSRPHMFPKMLMKIXDLRSISAKGAERVIXLKMEIPGSMPPLIQEMLENSEGLDXLSGQPGGGGRDGGGLAPPPGSCSPSLSPSSNRSSPAXHSP

SEQ ID NO: 22843 - protein, 365 aa, Homo sapiens
  MOD_RES (10)..(10): Selenocysteine
  MOD_RES (42)..(43): Selenocysteine
  MOD_RES (55)..(55): Selenocysteine
  MOD_RES (60)..(60): Selenocysteine
  MOD_RES (82)..(82): Selenocysteine
  MOD_RES (84)..(84): Selenocysteine
  MOD_RES (101)..(101): Selenocysteine
  MOD_RES (112)..(113): Selenocysteine
  MOD_RES (136)..(136): Selenocysteine
  MOD_RES (142)..(142): Selenocysteine
  MOD_RES (153)..(154): Selenocysteine
  MOD_RES (156)..(156): Selenocysteine
  MOD_RES (162)..(162): Selenocysteine
  MOD_RES (178)..(178): Selenocysteine
  MOD_RES (181)..(181): Selenocysteine
  MOD_RES (186)..(186): Selenocysteine
  MOD_RES (188)..(188): Selenocysteine
  MOD_RES (194)..(194): Selenocysteine
  MOD_RES (198)..(198): Selenocysteine
  MOD_RES (209)..(209): Selenocysteine
  MOD_RES (229)..(229): Selenocysteine
  MOD_RES (285)..(285): Selenocysteine
  MOD_RES (300)..(300): Selenocysteine
  MOD_RES (325)..(325): Selenocysteine
  MOD_RES (362)..(362): Selenocysteine
MASNSSSCPXPGGGHLNGYPVPPYAFFFPPMLGGLSPPGALXXLQHQLPVSGYSXPSPAXVRNDRNKKKKEVPKPECSESYXLXPEVGELIEKVRKAHQEXFPALCQLGKYXXNNSSEQRVSLDIDLWDKFSELSXKCIIKXVEFAKQLPGFXXLXIADQIXLLKAACLDILILRICXRYXPEQDXMXFSDGLXLNRXQMHNAGFGPLXDLVFAFANQLLPLEMDDAEXGLLSAICLICGDRQDLEQPDRVDMLQEPLLEALKVYVRKRRPSRPHMFPKMLMKIXDLRSISAKGAERVIXLKMEIPGSMPPLIQEMLENSEGLDXLSGQPGGGGRDGGGLAPPPGSCSPSLSPSSNRSSPAXHSP

SEQ ID NO: 22844 - protein, 478 aa, Homo sapiens
  MOD_RES (5)..(5): Selenocysteine
  MOD_RES (7)..(7): Selenocysteine
  MOD_RES (24)..(24): Selenocysteine
  MOD_RES (29)..(29): Selenocysteine
  MOD_RES (34)..(34): Selenocysteine
  MOD_RES (73)..(73): Selenocysteine
  MOD_RES (79)..(79): Selenocysteine
  MOD_RES (139)..(139): Selenocysteine
  MOD_RES (152)..(152): Selenocysteine
  MOD_RES (195)..(195): Selenocysteine
  MOD_RES (197)..(197): Selenocysteine
  MOD_RES (214)..(214): Selenocysteine
  MOD_RES (225)..(226): Selenocysteine
  MOD_RES (249)..(249): Selenocysteine
  MOD_RES (255)..(255): Selenocysteine
  MOD_RES (266)..(267): Selenocysteine
  MOD_RES (269)..(269): Selenocysteine
  MOD_RES (275)..(275): Selenocysteine
  MOD_RES (291)..(291): Selenocysteine
  MOD_RES (294)..(294): Selenocysteine
  MOD_RES (299)..(299): Selenocysteine
  MOD_RES (301)..(301): Selenocysteine
  MOD_RES (307)..(307): Selenocysteine
  MOD_RES (311)..(311): Selenocysteine
  MOD_RES (322)..(322): Selenocysteine
  MOD_RES (342)..(342): Selenocysteine
  MOD_RES (398)..(398): Selenocysteine
  MOD_RES (413)..(413): Selenocysteine
  MOD_RES (438)..(438): Selenocysteine
  MOD_RES (475)..(475): Selenocysteine
MMSQXMXQAGVSFRHSVRAAQCHXRVPNXWPRAXRPYASCRRSPRLRGRWPGSAGQGAGGRAPRAGWRAGDVXGSAIEXQSSSSEEIVPSPPSPPPLPRIYKPCFVCQDKSSGYHYGVSACEGCKGFFRRSIQKNMVYXCHRDKNCIINKVXRNRCQYCRLQKCFEVGMSKESVRNDRNKKKKEVPKPECSESYXLXPEVGELIEKVRKAHQEXFPALCQLGKYXXNNSSEQRVSLDIDLWDKFSELSXKCIIKXVEFAKQLPGFXXLXIADQIXLLKAACLDILILRICXRYXPEQDXMXFSDGLXLNRXQMHNAGFGPLXDLVFAFANQLLPLEMDDAEXGLLSAICLICGDRQDLEQPDRVDMLQEPLLEALKVYVRKRRPSRPHMFPKMLMKIXDLRSISAKGAERVIXLKMEIPGSMPPLIQEMLENSEGLDXLSGQPGGGGRDGGGLAPPPGSCSPSLSPSSNRSSPAXHSP

SEQ ID NO: 22845 - protein, 186 aa, Homo sapiens
  MOD_RES (4)..(4): Selenocysteine
  MOD_RES (17)..(17): Selenocysteine
  MOD_RES (60)..(60): Selenocysteine
  MOD_RES (62)..(62): Selenocysteine
  MOD_RES (79)..(79): Selenocysteine
  MOD_RES (90)..(91): Selenocysteine
  MOD_RES (114)..(114): Selenocysteine
  MOD_RES (120)..(120): Selenocysteine
  MOD_RES (131)..(132): Selenocysteine
  MOD_RES (134)..(134): Selenocysteine
  MOD_RES (140)..(140): Selenocysteine
  MOD_RES (156)..(156): Selenocysteine
  MOD_RES (159)..(159): Selenocysteine
  MOD_RES (164)..(164): Selenocysteine
  MOD_RES (166)..(166): Selenocysteine
  MOD_RES (172)..(172): Selenocysteine
  MOD_RES (176)..(176): Selenocysteine
MVYXCHRDKNCIINKVXRNRCQYCRLQKCFEVGMSKESVRNDRNKKKKEVPKPECSESYXLXPEVGELIEKVRKAHQEXFPALCQLGKYXXNNSSEQRVSLDIDLWDKFSELSXKCIIKXVEFAKQLPGFXXLXIADQIXLLKAACLDILILRICXRYXPEQDXMXFSDGLXLNRXQMHNAGFGPL

SEQ ID NO: 22846 - protein, 457 aa, Homo sapiens
  MOD_RES (11)..(11): Selenocysteine
  MOD_RES (42)..(42): Selenocysteine
  MOD_RES (46)..(46): Selenocysteine
  MOD_RES (58)..(58): Selenocysteine
  MOD_RES (118)..(118): Selenocysteine
  MOD_RES (131)..(131): Selenocysteine
  MOD_RES (174)..(174): Selenocysteine
  MOD_RES (176)..(176): Selenocysteine
  MOD_RES (193)..(193): Selenocysteine
  MOD_RES (204)..(205): Selenocysteine
  MOD_RES (228)..(228): Selenocysteine
  MOD_RES (234)..(234): Selenocysteine
  MOD_RES (245)..(246): Selenocysteine
  MOD_RES (248)..(248): Selenocysteine
  MOD_RES (254)..(254): Selenocysteine
  MOD_RES (270)..(270): Selenocysteine
  MOD_RES (273)..(273): Selenocysteine
  MOD_RES (278)..(278): Selenocysteine
  MOD_RES (280)..(280): Selenocysteine
  MOD_RES (286)..(286): Selenocysteine
  MOD_RES (290)..(290): Selenocysteine
  MOD_RES (301)..(301): Selenocysteine
  MOD_RES (321)..(321): Selenocysteine
  MOD_RES (377)..(377): Selenocysteine
  MOD_RES (392)..(392): Selenocysteine
  MOD_RES (417)..(417): Selenocysteine
  MOD_RES (454)..(454): Selenocysteine
MYESVEVGGPXPNPFLVVDFYNQNRACLLPEKGLPAPGPYSXPLRXPLWNGSNHSIEXQSSSSEEIVPSPPSPPPLPRIYKPCFVCQDKSSGYHYGVSACEGCKGFFRRSIQKNMVYXCHRDKNCIINKVXRNRCQYCRLQKCFEVGMSKESVRNDRNKKKKEVPKPECSESYXLXPEVGELIEKVRKAHQEXFPALCQLGKYXXNNSSEQRVSLDIDLWDKFSELSXKCIIKXVEFAKQLPGFXXLXIADQIXLLKAACLDILILRICXRYXPEQDXMXFSDGLXLNRXQMHNAGFGPLXDLVFAFANQLLPLEMDDAEXGLLSAICLICGDRQDLEQPDRVDMLQEPLLEALKVYVRKRRPSRPHMFPKMLMKIXDLRSISAKGAERVIXLKMEIPGSMPPLIQEMLENSEGLDXLSGQPGGGGRDGGGLAPPPGSCSPSLSPSSNRSSPAXHSP

SEQ ID NO: 22847 - protein, 448 aa, Homo sapiens
  MOD_RES (20)..(20): Selenocysteine
  MOD_RES (41)..(41): Selenocysteine
  MOD_RES (43)..(43): Selenocysteine
  MOD_RES (50)..(50): Selenocysteine
  MOD_RES (56)..(56): Selenocysteine
  MOD_RES (59)..(59): Selenocysteine
  MOD_RES (116)..(116): Selenocysteine
  MOD_RES (129)..(129): Selenocysteine
  MOD_RES (162)..(162): Selenocysteine
  MOD_RES (168)..(168): Selenocysteine
  MOD_RES (174)..(174): Selenocysteine
  MOD_RES (181)..(181): Selenocysteine
  MOD_RES (191)..(191): Selenocysteine
  MOD_RES (202)..(203): Selenocysteine
  MOD_RES (226)..(226): Selenocysteine
  MOD_RES (243)..(243): Selenocysteine
  MOD_RES (246)..(246): Selenocysteine
  MOD_RES (252)..(252): Selenocysteine
  MOD_RES (268)..(268): Selenocysteine
  MOD_RES (271)..(271): Selenocysteine
  MOD_RES (276)..(276): Selenocysteine
  MOD_RES (278)..(278): Selenocysteine
  MOD_RES (284)..(284): Selenocysteine
  MOD_RES (288)..(288): Selenocysteine
  MOD_RES (299)..(299): Selenocysteine
  MOD_RES (304)..(304): Selenocysteine
  MOD_RES (317)..(317): Selenocysteine
  MOD_RES (319)..(319): Selenocysteine
  MOD_RES (339)..(339): Selenocysteine
  MOD_RES (375)..(375): Selenocysteine
  MOD_RES (390)..(390): Selenocysteine
  MOD_RES (417)..(417): Selenocysteine
  MOD_RES (424)..(424): Selenocysteine
MFDCMDVLSVSPGQILDFYXASPSSCMLQEKALKACFSGLXQXEWQHRHXAQSIEXQSXSSEELVPSPPSPLPPPRVYKPCFVCQDKSSGYHYGVSACEGCKGFFRRSIQKNMIYXCHRDKNCVINKVXRNRCQYCRLQKCFEVGMSKESVRNDRNKKKKEXSKQECXESYEMXAELDDLXEKIRKAHQEXFPSLCQLGKYXXNSSADHRVRLDLGLWDKFSELAXKCIIKIVEFAKRLPGFXGLXIADQIXLLKAACLDILILRICXRYXPEQDXMXFSDGLXLNRXQMHNAGFGPLXDLVFXFANQLLPLEMDDXEXGLLSAICLICGDRQDLEEPXKVDKLQEPLLEALKIYIRKRRPSKPHMFPKILMKIXDLRSISAKGAERVIXLKMEIPGSMPPLIQEMLENSEGHEPLXPSSSGNXAEHSPSISPSSVENSGVSQSPLVQ

SEQ ID NO: 22848 - protein, 336 aa, Homo sapiens
  MOD_RES (4)..(4): Selenocysteine
  MOD_RES (17)..(17): Selenocysteine
  MOD_RES (50)..(50): Selenocysteine
  MOD_RES (56)..(56): Selenocysteine
  MOD_RES (62)..(62): Selenocysteine
  MOD_RES (69)..(69): Selenocysteine
  MOD_RES (79)..(79): Selenocysteine
  MOD_RES (90)..(91): Selenocysteine
  MOD_RES (114)..(114): Selenocysteine
  MOD_RES (131)..(131): Selenocysteine
  MOD_RES (134)..(134): Selenocysteine
  MOD_RES (140)..(140): Selenocysteine
  MOD_RES (156)..(156): Selenocysteine
  MOD_RES (159)..(159): Selenocysteine
  MOD_RES (164)..(164): Selenocysteine
  MOD_RES (166)..(166): Selenocysteine
  MOD_RES (172)..(172): Selenocysteine
  MOD_RES (176)..(176): Selenocysteine
  MOD_RES (187)..(187): Selenocysteine
  MOD_RES (192)..(192): Selenocysteine
  MOD_RES (205)..(205): Selenocysteine
  MOD_RES (207)..(207): Selenocysteine
  MOD_RES (227)..(227): Selenocysteine
  MOD_RES (263)..(263): Selenocysteine
  MOD_RES (278)..(278): Selenocysteine
  MOD_RES (305)..(305): Selenocysteine
  MOD_RES (312)..(312): Selenocysteine
MIYXCHRDKNCVINKVXRNRCQYCRLQKCFEVGMSKESVRNDRNKKKKEXSKQECXESYEMXAELDDLXEKIRKAHQEXFPSLCQLGKYXXNSSADHRVRLDLGLWDKFSELAXKCIIKIVEFAKRLPGFXGLXIADQIXLLKAACLDILILRICXRYXPEQDXMXFSDGLXLNRXQMHNAGFGPLXDLVFXFANQLLPLEMDDXEXGLLSAICLICGDRQDLEEPXKVDKLQEPLLEALKIYIRKRRPSKPHMFPKILMKIXDLRSISAKGAERVIXLKMEIPGSMPPLIQEMLENSEGHEPLXPSSSGNXAEHSPSISPSSVENSGVSQSPLVQ

SEQ ID NO: 22849 - protein, 402 aa, Homo sapiens
  MOD_RES (2)..(3): Selenocysteine
  MOD_RES (18)..(18): Selenocysteine
  MOD_RES (23)..(23): Selenocysteine
  MOD_RES (55)..(55): Selenocysteine
  MOD_RES (60)..(60): Selenocysteine
  MOD_RES (63)..(63): Selenocysteine
  MOD_RES (66)..(66): Selenocysteine
  MOD_RES (123)..(123): Selenocysteine
  MOD_RES (136)..(136): Selenocysteine
  MOD_RES (169)..(169): Selenocysteine
  MOD_RES (175)..(175): Selenocysteine
  MOD_RES (181)..(181): Selenocysteine
  MOD_RES (188)..(188): Selenocysteine
  MOD_RES (198)..(198): Selenocysteine
  MOD_RES (209)..(210): Selenocysteine
  MOD_RES (233)..(233): Selenocysteine
  MOD_RES (250)..(250): Selenocysteine
  MOD_RES (253)..(253): Selenocysteine
  MOD_RES (259)..(259): Selenocysteine
  MOD_RES (275)..(275): Selenocysteine
  MOD_RES (278)..(278): Selenocysteine
  MOD_RES (283)..(283): Selenocysteine
  MOD_RES (285)..(285): Selenocysteine
  MOD_RES (291)..(291): Selenocysteine
  MOD_RES (295)..(295): Selenocysteine
  MOD_RES (306)..(306): Selenocysteine
  MOD_RES (311)..(311): Selenocysteine
  MOD_RES (324)..(324): Selenocysteine
  MOD_RES (326)..(326): Selenocysteine
  MOD_RES (346)..(346): Selenocysteine
  MOD_RES (382)..(382): Selenocysteine
  MOD_RES (397)..(397): Selenocysteine
MXXSGHACPVPAVNGHMXHYPAXPYPLLFPPVIGGLSLPPLHGLHGHPPPSGCSXPSPAXIEXQSXSSEELVPSPPSPLPPPRVYKPCFVCQDKSSGYHYGVSACEGCKGFFRRSIQKNMIYXCHRDKNCVINKVXRNRCQYCRLQKCFEVGMSKESVRNDRNKKKKEXSKQECXESYEMXAELDDLXEKIRKAHQEXFPSLCQLGKYXXNSSADHRVRLDLGLWDKFSELAXKCIIKIVEFAKRLPGFXGLXIADQIXLLKAACLDILILRICXRYXPEQDXMXFSDGLXLNRXQMHNAGFGPLXDLVFXFANQLLPLEMDDXEXGLLSAICLICGDRQDLEEPXKVDKLQEPLLEALKIYIRKRRPSKPHMFPKILMKIXDLRSISAKGAERVIXLKMEI

SEQ ID NO: 22850 - protein, 15 aa, Homo sapiens
  MOD_RES (3)..(3): Selenocysteine
MAXNKERLFAAGALG

SEQ ID NO: 22851 - protein, 33 aa, Homo sapiens
  MOD_RES (3)..(3): Selenocysteine
MAXNKERLFAAGALGPGSGYPGAGFPFAFPGAL

SEQ ID NO: 22852 - protein, 57 aa, Homo sapiens
  MOD_RES (3)..(3): Selenocysteine
MAXNKERLFAAGALGPGSGYPGAGFPFAFPGALRGSPPFEMLSPSFRGLGQPDLPKE

SEQ ID NO: 22853 - protein, 454 aa, Homo sapiens
  MOD_RES (3)..(3): Selenocysteine
  MOD_RES (65)..(65): Selenocysteine
  MOD_RES (68)..(68): Selenocysteine
  MOD_RES (125)..(125): Selenocysteine
  MOD_RES (138)..(138): Selenocysteine
  MOD_RES (191)..(191): Selenocysteine
  MOD_RES (200)..(200): Selenocysteine
  MOD_RES (211)..(212): Selenocysteine
  MOD_RES (235)..(235): Selenocysteine
  MOD_RES (252)..(252): Selenocysteine
  MOD_RES (261)..(261): Selenocysteine
  MOD_RES (277)..(277): Selenocysteine
  MOD_RES (280)..(280): Selenocysteine
  MOD_RES (285)..(285): Selenocysteine
  MOD_RES (287)..(287): Selenocysteine
  MOD_RES (293)..(293): Selenocysteine
  MOD_RES (297)..(297): Selenocysteine
  MOD_RES (308)..(308): Selenocysteine
  MOD_RES (326)..(326): Selenocysteine
  MOD_RES (328)..(328): Selenocysteine
  MOD_RES (384)..(384): Selenocysteine
  MOD_RES (391)..(391): Selenocysteine
  MOD_RES (399)..(399): Selenocysteine
MAXNKERLFAAGALGPGSGYPGAGFPFAFPGALRGSPPFEMLSPSFRGLGQPDLPKEMASLSVEXQSXSSEEMVPSSPSPPPPPRVYKPCFVCNDKSSGYHYGVSSCEGCKGFFRRSIQKNMVYXCHRDKNCIINKVXRNRCQYCRLQKCFEVGMSKEAVRNDRNKKKKEVKEEGSPDSYELSPQLEELIXKVSKAHQEXFPSLCQLGKYXXNSSADHRVQLDLGLWDKFSELAXKCIIKIVEFAKRLPGFXGLSIADQIXLLKAACLDILMLRICXRYXPEQDXMXFSDGLXLNRXQMHNAGFGPLXDLVFAFAGQLLPLEMDDXEXGLLSAICLICGDRMDLEEPEKVDKLQEPLLEALRLYARRRRPSQPYMFPRMLMKIXDLRGISXKGAERAIXLKMEIPGPMPPLIREMLENPEMFEDDSSQPGPHPNASSEDEVPGGQGKGGLKSPA

SEQ ID NO: 22854 - protein, 432 aa, Homo sapiens
  MOD_RES (41)..(42): Selenocysteine
  MOD_RES (55)..(55): Selenocysteine
  MOD_RES (103)..(103): Selenocysteine
  MOD_RES (116)..(116): Selenocysteine
  MOD_RES (169)..(169): Selenocysteine
  MOD_RES (178)..(178): Selenocysteine
  MOD_RES (189)..(190): Selenocysteine
  MOD_RES (213)..(213): Selenocysteine
  MOD_RES (230)..(230): Selenocysteine
  MOD_RES (239)..(239): Selenocysteine
  MOD_RES (255)..(255): Selenocysteine
  MOD_RES (258)..(258): Selenocysteine
  MOD_RES (263)..(263): Selenocysteine
  MOD_RES (265)..(265): Selenocysteine
  MOD_RES (271)..(271): Selenocysteine
  MOD_RES (275)..(275): Selenocysteine
  MOD_RES (286)..(286): Selenocysteine
  MOD_RES (304)..(304): Selenocysteine
  MOD_RES (306)..(306): Selenocysteine
  MOD_RES (362)..(362): Selenocysteine
  MOD_RES (369)..(369): Selenocysteine
  MOD_RES (377)..(377): Selenocysteine
MLALPLPPCWSGAPPGEEGESAAGPWCFQHPVSLQAGSRCXXVWKRLPRVRDGCXGRPGPGPACCAEPPAAPVSPDLNLLPGRNPPACNGFFRRSIQKNMVYXCHRDKNCIINKVXRNRCQYCRLQKCFEVGMSKEAVRNDRNKKKKEVKEEGSPDSYELSPQLEELIXKVSKAHQEXFPSLCQLGKYXXNSSADHRVQLDLGLWDKFSELAXKCIIKIVEFAKRLPGFXGLSIADQIXLLKAACLDILMLRICXRYXPEQDXMXFSDGLXLNRXQMHNAGFGPLXDLVFAFAGQLLPLEMDDXEXGLLSAICLICGDRMDLEEPEKVDKLQEPLLEALRLYARRRRPSQPYMFPRMLMKIXDLRGISXKGAERAIXLKMEIPGPMPPLIREMLENPEMFEDDSSQPGPHPNASSEDEVPGGQGKGGLKSPA

SEQ ID NO: 22855 - protein, 382 aa, Homo sapiens
  MOD_RES (53)..(53): Selenocysteine
  MOD_RES (66)..(66): Selenocysteine
  MOD_RES (119)..(119): Selenocysteine
  MOD_RES (128)..(128): Selenocysteine
  MOD_RES (139)..(140): Selenocysteine
  MOD_RES (163)..(163): Selenocysteine
  MOD_RES (180)..(180): Selenocysteine
  MOD_RES (189)..(189): Selenocysteine
  MOD_RES (205)..(205): Selenocysteine
  MOD_RES (208)..(208): Selenocysteine
  MOD_RES (213)..(213): Selenocysteine
  MOD_RES (215)..(215): Selenocysteine
  MOD_RES (221)..(221): Selenocysteine
  MOD_RES (225)..(225): Selenocysteine
  MOD_RES (236)..(236): Selenocysteine
  MOD_RES (254)..(254): Selenocysteine
  MOD_RES (256)..(256): Selenocysteine
  MOD_RES (312)..(312): Selenocysteine
  MOD_RES (319)..(319): Selenocysteine
  MOD_RES (327)..(327): Selenocysteine
MVPSSPSPPPPPRVYKPCFVCNDKSSGYHYGVSSCEGCKGFFRRSIQKNMVYXCHRDKNCIINKVXRNRCQYCRLQKCFEVGMSKEAVRNDRNKKKKEVKEEGSPDSYELSPQLEELIXKVSKAHQEXFPSLCQLGKYXXNSSADHRVQLDLGLWDKFSELAXKCIIKIVEFAKRLPGFXGLSIADQIXLLKAACLDILMLRICXRYXPEQDXMXFSDGLXLNRXQMHNAGFGPLXDLVFAFAGQLLPLEMDDXEXGLLSAICLICGDRMDLEEPEKVDKLQEPLLEALRLYARRRRPSQPYMFPRMLMKIXDLRGISXKGAERAIXLKMEIPGPMPPLIREMLENPEMFEDDSSQPGPHPNASSEDEVPGGQGKGGLKSPA

SEQ ID NO: 22856 - protein, 443 aa, Homo sapiens
  MOD_RES (7)..(7): Selenocysteine
  MOD_RES (30)..(30): Selenocysteine
  MOD_RES (54)..(54): Selenocysteine
  MOD_RES (57)..(57): Selenocysteine
  MOD_RES (114)..(114): Selenocysteine
  MOD_RES (127)..(127): Selenocysteine
  MOD_RES (180)..(180): Selenocysteine
  MOD_RES (189)..(189): Selenocysteine
  MOD_RES (200)..(201): Selenocysteine
  MOD_RES (224)..(224): Selenocysteine
  MOD_RES (241)..(241): Selenocysteine
  MOD_RES (250)..(250): Selenocysteine
  MOD_RES (266)..(266): Selenocysteine
  MOD_RES (269)..(269): Selenocysteine
  MOD_RES (274)..(274): Selenocysteine
  MOD_RES (276)..(276): Selenocysteine
  MOD_RES (282)..(282): Selenocysteine
  MOD_RES (286)..(286): Selenocysteine
  MOD_RES (297)..(297): Selenocysteine
  MOD_RES (315)..(315): Selenocysteine
  MOD_RES (317)..(317): Selenocysteine
  MOD_RES (373)..(373): Selenocysteine
  MOD_RES (380)..(380): Selenocysteine
  MOD_RES (388)..(388): Selenocysteine
MYDCMEXFAPGPRRLYGAAGPGAGLLRRAXGGSCFAGLESFAWPQPASLQSVEXQSXSSEEMVPSSPSPPPPPRVYKPCFVCNDKSSGYHYGVSSCEGCKGFFRRSIQKNMVYXCHRDKNCIINKVXRNRCQYCRLQKCFEVGMSKEAVRNDRNKKKKEVKEEGSPDSYELSPQLEELIXKVSKAHQEXFPSLCQLGKYXXNSSADHRVQLDLGLWDKFSELAXKCIIKIVEFAKRLPGFXGLSIADQIXLLKAACLDILMLRICXRYXPEQDXMXFSDGLXLNRXQMHNAGFGPLXDLVFAFAGQLLPLEMDDXEXGLLSAICLICGDRMDLEEPEKVDKLQEPLLEALRLYARRRRPSQPYMFPRMLMKIXDLRGISXKGAERAIXLKMEIPGPMPPLIREMLENPEMFEDDSSQPGPHPNASSEDEVPGGQGKGGLKSPA

SEQ ID NO: 22857 - protein, 881 aa, Homo sapiens
  MOD_RES (23)..(23): Selenocysteine
  MOD_RES (125)..(125): Selenocysteine
  MOD_RES (130)..(130): Selenocysteine
  MOD_RES (155)..(155): Selenocysteine
  MOD_RES (159)..(159): Selenocysteine
  MOD_RES (201)..(201): Selenocysteine
  MOD_RES (216)..(216): Selenocysteine
  MOD_RES (226)..(226): Selenocysteine
  MOD_RES (238)..(238): Selenocysteine
  MOD_RES (287)..(287): Selenocysteine
  MOD_RES (296)..(296): Selenocysteine
  MOD_RES (301)..(301): Selenocysteine
  MOD_RES (348)..(348): Selenocysteine
  MOD_RES (395)..(395): Selenocysteine
  MOD_RES (419)..(419): Selenocysteine
  MOD_RES (446)..(446): Selenocysteine
  MOD_RES (462)..(462): Selenocysteine
  MOD_RES (491)..(491): Selenocysteine
  MOD_RES (496)..(496): Selenocysteine
  MOD_RES (520)..(520): Selenocysteine
  MOD_RES (584)..(584): Selenocysteine
  MOD_RES (606)..(606): Selenocysteine
  MOD_RES (619)..(620): Selenocysteine
  MOD_RES (625)..(626): Selenocysteine
  MOD_RES (630)..(630): Selenocysteine
  MOD_RES (639)..(639): Selenocysteine
  MOD_RES (641)..(641): Selenocysteine
  MOD_RES (677)..(677): Selenocysteine
  MOD_RES (680)..(680): Selenocysteine
  MOD_RES (703)..(703): Selenocysteine
  MOD_RES (721)..(721): Selenocysteine
  MOD_RES (723)..(724): Selenocysteine
  MOD_RES (727)..(727): Selenocysteine
  MOD_RES (763)..(763): Selenocysteine
  MOD_RES (817)..(818): Selenocysteine
  MOD_RES (823)..(823): Selenocysteine
  MOD_RES (845)..(845): Selenocysteine
  MOD_RES (864)..(864): Selenocysteine
  MOD_RES (875)..(875): Selenocysteine
  MOD_RES (877)..(877): Selenocysteine
MCLVKSWFLSIRSRWYHGKLDRXIAEERLRQAGKSGSYLIRESDRRPGSFVLSFLSQMNVVNHFRIIAMCGDYYIGGRRFSSLSDLIGYYSHVSCLLKGEKLLYPVAPPEPVEDRRRVRAILPYXKVPDXDEISFLKGDMFIVHNELEDGWMWVXNLRXDEQGLIVEDLVEEVGREEDPHEGKIWFHGKISKQEAYNLLMXVGQVCSFLVRPSDNXPGDYSLYFRXNENIQRFKICPXPNNQFMMGGRYYNSIGDIIDHYRKEQIVEGYYLKEPVPMQDQEQVLNDXVDGKEIYNXIRRKXKDAFYKNIVKKGYLLKKGKGKRWKNLYFILEGSDAQLIYFESEKRAXKPKGLIDLSVCSVYVVHDSLFGRPNCFQIVVQHFSEEHYIFYFAGEXPEQAEDWMKGLQAFCNLRKSSPGXSNKRLRQVSSLVLHIEEAHKLPVKHFXNPYCNIYLNSVQVAKXHAREGQNPVWSEEFVFDDLPPDINRFEIXLSNKXKKSKDPDILFMRCQLSRLQKGHAXDEWFLLSSHIPLKGIEPGSLRVRARYSMEKIMPEEEYSEFKELILQKELHVVYALSHVCGQDRXLLASILLRIFLHEKLESLLLCXLNDREISMEDEAXXLFRAXXLASXLMEQYMKAXAXQFVHHALKDSILKIMESKQSCELSPSKLEKNEDVNXNLXHLLNILSELVEKIFMASEILPPXLRYIYGCLQKSVQHKWPXNXXMRXRVVSGFVFLRLICPAILNPRMFNIISDSPSPIAARXLILVAKSVQNLANLVEFGAKEPYMEGVNPFIKSNKHRMIMFLDELGNVPELPDXXEHSRXDLSRDLAALHEICVAHSDELRXLSNERGAQQHVLKKLLAIXELLQQKQNQYXKXNDVR

SEQ ID NO: 22858 - protein, 870 aa, Homo sapiens
  MOD_RES (12)..(12): Selenocysteine
  MOD_RES (114)..(114): Selenocysteine
  MOD_RES (119)..(119): Selenocysteine
  MOD_RES (144)..(144): Selenocysteine
  MOD_RES (148)..(148): Selenocysteine
  MOD_RES (190)..(190): Selenocysteine
  MOD_RES (205)..(205): Selenocysteine
  MOD_RES (215)..(215): Selenocysteine
  MOD_RES (227)..(227): Selenocysteine
  MOD_RES (276)..(276): Selenocysteine
  MOD_RES (285)..(285): Selenocysteine
  MOD_RES (290)..(290): Selenocysteine
  MOD_RES (337)..(337): Selenocysteine
  MOD_RES (384)..(384): Selenocysteine
  MOD_RES (408)..(408): Selenocysteine
  MOD_RES (435)..(435): Selenocysteine
  MOD_RES (451)..(451): Selenocysteine
  MOD_RES (480)..(480): Selenocysteine
  MOD_RES (485)..(485): Selenocysteine
  MOD_RES (509)..(509): Selenocysteine
  MOD_RES (573)..(573): Selenocysteine
  MOD_RES (595)..(595): Selenocysteine
  MOD_RES (608)..(609): Selenocysteine
  MOD_RES (614)..(615): Selenocysteine
  MOD_RES (619)..(619): Selenocysteine
  MOD_RES (628)..(628): Selenocysteine
  MOD_RES (630)..(630): Selenocysteine
  MOD_RES (666)..(666): Selenocysteine
  MOD_RES (669)..(669): Selenocysteine
  MOD_RES (692)..(692): Selenocysteine
  MOD_RES (710)..(710): Selenocysteine
  MOD_RES (712)..(713): Selenocysteine
  MOD_RES (716)..(716): Selenocysteine
  MOD_RES (752)..(752): Selenocysteine
  MOD_RES (806)..(807): Selenocysteine
  MOD_RES (812)..(812): Selenocysteine
  MOD_RES (834)..(834): Selenocysteine
  MOD_RES (853)..(853): Selenocysteine
  MOD_RES (864)..(864): Selenocysteine
  MOD_RES (866)..(866): Selenocysteine
MKGWYHGKLDRXIAEERLRQAGKSGSYLIRESDRRPGSFVLSFLSQMNVVNHFRIIAMCGDYYIGGRRFSSLSDLIGYYSHVSCLLKGEKLLYPVAPPEPVEDRRRVRAILPYXKVPDXDEISFLKGDMFIVHNELEDGWMWVXNLRXDEQGLIVEDLVEEVGREEDPHEGKIWFHGKISKQEAYNLLMXVGQVCSFLVRPSDNXPGDYSLYFRXNENIQRFKICPXPNNQFMMGGRYYNSIGDIIDHYRKEQIVEGYYLKEPVPMQDQEQVLNDXVDGKEIYNXIRRKXKDAFYKNIVKKGYLLKKGKGKRWKNLYFILEGSDAQLIYFESEKRAXKPKGLIDLSVCSVYVVHDSLFGRPNCFQIVVQHFSEEHYIFYFAGEXPEQAEDWMKGLQAFCNLRKSSPGXSNKRLRQVSSLVLHIEEAHKLPVKHFXNPYCNIYLNSVQVAKXHAREGQNPVWSEEFVFDDLPPDINRFEIXLSNKXKKSKDPDILFMRCQLSRLQKGHAXDEWFLLSSHIPLKGIEPGSLRVRARYSMEKIMPEEEYSEFKELILQKELHVVYALSHVCGQDRXLLASILLRIFLHEKLESLLLCXLNDREISMEDEAXXLFRAXXLASXLMEQYMKAXAXQFVHHALKDSILKIMESKQSCELSPSKLEKNEDVNXNLXHLLNILSELVEKIFMASEILPPXLRYIYGCLQKSVQHKWPXNXXMRXRVVSGFVFLRLICPAILNPRMFNIISDSPSPIAARXLILVAKSVQNLANLVEFGAKEPYMEGVNPFIKSNKHRMIMFLDELGNVPELPDXXEHSRXDLSRDLAALHEICVAHSDELRXLSNERGAQQHVLKKLLAIXELLQQKQNQYXKXNDVR

SEQ ID NO: 22859 - protein, 539 aa, Homo sapiens
  MOD_RES (15)..(15): Selenocysteine
  MOD_RES (55)..(55): Selenocysteine
  MOD_RES (60)..(60): Selenocysteine
  MOD_RES (87)..(87): Selenocysteine
  MOD_RES (91)..(91): Selenocysteine
  MOD_RES (117)..(117): Selenocysteine
  MOD_RES (121)..(121): Selenocysteine
  MOD_RES (127)..(127): Selenocysteine
  MOD_RES (152)..(152): Selenocysteine
  MOD_RES (174)..(174): Selenocysteine
  MOD_RES (178)..(178): Selenocysteine
  MOD_RES (189)..(189): Selenocysteine
  MOD_RES (291)..(291): Selenocysteine
  MOD_RES (296)..(296): Selenocysteine
  MOD_RES (321)..(321): Selenocysteine
  MOD_RES (325)..(325): Selenocysteine
  MOD_RES (367)..(367): Selenocysteine
  MOD_RES (382)..(382): Selenocysteine
  MOD_RES (392)..(392): Selenocysteine
  MOD_RES (404)..(404): Selenocysteine
  MOD_RES (453)..(453): Selenocysteine
  MOD_RES (462)..(462): Selenocysteine
  MOD_RES (467)..(467): Selenocysteine
  MOD_RES (514)..(514): Selenocysteine
MMAAEAGSEEGGPVXAGAGGGGAAAGSSAYPAVCRVKIPAALPVAAAPYPGLVEXGVAGXLGGGAALGSEFLGAGSVAGALGGAGLXGGGXAAGVAGAAAGVAGAAVAGPSGDMALXKLPXSLLAEXLGPGGGFPPLPPPPYLPPLGAGLGXVDEGDSLDGPEYEEEEVAIPLXAPPXNQWYHGKLDRXIAEERLRQAGKSGSYLIRESDRRPGSFVLSFLSQMNVVNHFRIIAMCGDYYIGGRRFSSLSDLIGYYSHVSCLLKGEKLLYPVAPPEPVEDRRRVRAILPYXKVPDXDEISFLKGDMFIVHNELEDGWMWVXNLRXDEQGLIVEDLVEEVGREEDPHEGKIWFHGKISKQEAYNLLMXVGQVCSFLVRPSDNXPGDYSLYFRXNENIQRFKICPXPNNQFMMGGRYYNSIGDIIDHYRKEQIVEGYYLKEPVPMQDQEQVLNDXVDGKEIYNXIRRKXKDAFYKNIVKKGYLLKKGKGKRWKNLYFILEGSDAQLIYFESEKRAXKPKGLIDLSVCSVYVVHDSLFGRCS

SEQ ID NO: 22860 - protein, 1047 aa, Homo sapiens
  MOD_RES (15)..(15): Selenocysteine
  MOD_RES (55)..(55): Selenocysteine
  MOD_RES (60)..(60): Selenocysteine
  MOD_RES (87)..(87): Selenocysteine
  MOD_RES (91)..(91): Selenocysteine
  MOD_RES (117)..(117): Selenocysteine
  MOD_RES (121)..(121): Selenocysteine
  MOD_RES (127)..(127): Selenocysteine
  MOD_RES (152)..(152): Selenocysteine
  MOD_RES (174)..(174): Selenocysteine
  MOD_RES (178)..(178): Selenocysteine
  MOD_RES (189)..(189): Selenocysteine
  MOD_RES (291)..(291): Selenocysteine
  MOD_RES (296)..(296): Selenocysteine
  MOD_RES (321)..(321): Selenocysteine
  MOD_RES (325)..(325): Selenocysteine
  MOD_RES (367)..(367): Selenocysteine
  MOD_RES (382)..(382): Selenocysteine
  MOD_RES (392)..(392): Selenocysteine
  MOD_RES (404)..(404): Selenocysteine
  MOD_RES (453)..(453): Selenocysteine
  MOD_RES (462)..(462): Selenocysteine
  MOD_RES (467)..(467): Selenocysteine
  MOD_RES (514)..(514): Selenocysteine
  MOD_RES (561)..(561): Selenocysteine
  MOD_RES (585)..(585): Selenocysteine
  MOD_RES (612)..(612): Selenocysteine
  MOD_RES (628)..(628): Selenocysteine
  MOD_RES (657)..(657): Selenocysteine
  MOD_RES (662)..(662): Selenocysteine
  MOD_RES (686)..(686): Selenocysteine
  MOD_RES (750)..(750): Selenocysteine
  MOD_RES (772)..(772): Selenocysteine
  MOD_RES (785)..(786): Selenocysteine
  MOD_RES (791)..(792): Selenocysteine
  MOD_RES (796)..(796): Selenocysteine
  MOD_RES (805)..(805): Selenocysteine
  MOD_RES (807)..(807): Selenocysteine
  MOD_RES (843)..(843): Selenocysteine
  MOD_RES (846)..(846): Selenocysteine
  MOD_RES (869)..(869): Selenocysteine
  MOD_RES (887)..(887): Selenocysteine
  MOD_RES (889)..(890): Selenocysteine
  MOD_RES (893)..(893): Selenocysteine
  MOD_RES (929)..(929): Selenocysteine
  MOD_RES (983)..(984): Selenocysteine
  MOD_RES (989)..(989): Selenocysteine
  MOD_RES (1011)..(1011): Selenocysteine
  MOD_RES (1030)..(1030): Selenocysteine
  MOD_RES (1041)..(1041): Selenocysteine
  MOD_RES (1043)..(1043): Selenocysteine
MMAAEAGSEEGGPVXAGAGGGGAAAGSSAYPAVCRVKIPAALPVAAAPYPGLVEXGVAGXLGGGAALGSEFLGAGSVAGALGGAGLXGGGXAAGVAGAAAGVAGAAVAGPSGDMALXKLPXSLLAEXLGPGGGFPPLPPPPYLPPLGAGLGXVDEGDSLDGPEYEEEEVAIPLXAPPXNQWYHGKLDRXIAEERLRQAGKSGSYLIRESDRRPGSFVLSFLSQMNVVNHFRIIAMCGDYYIGGRRFSSLSDLIGYYSHVSCLLKGEKLLYPVAPPEPVEDRRRVRAILPYXKVPDXDEISFLKGDMFIVHNELEDGWMWVXNLRXDEQGLIVEDLVEEVGREEDPHEGKIWFHGKISKQEAYNLLMXVGQVCSFLVRPSDNXPGDYSLYFRXNENIQRFKICPXPNNQFMMGGRYYNSIGDIIDHYRKEQIVEGYYLKEPVPMQDQEQVLNDXVDGKEIYNXIRRKXKDAFYKNIVKKGYLLKKGKGKRWKNLYFILEGSDAQLIYFESEKRAXKPKGLIDLSVCSVYVVHDSLFGRPNCFQIVVQHFSEEHYIFYFAGEXPEQAEDWMKGLQAFCNLRKSSPGXSNKRLRQVSSLVLHIEEAHKLPVKHFXNPYCNIYLNSVQVAKXHAREGQNPVWSEEFVFDDLPPDINRFEIXLSNKXKKSKDPDILFMRCQLSRLQKGHAXDEWFLLSSHIPLKGIEPGSLRVRARYSMEKIMPEEEYSEFKELILQKELHVVYALSHVCGQDRXLLASILLRIFLHEKLESLLLCXLNDREISMEDEAXXLFRAXXLASXLMEQYMKAXAXQFVHHALKDSILKIMESKQSCELSPSKLEKNEDVNXNLXHLLNILSELVEKIFMASEILPPXLRYIYGCLQKSVQHKWPXNXXMRXRVVSGFVFLRLICPAILNPRMFNIISDSPSPIAARXLILVAKSVQNLANLVEFGAKEPYMEGVNPFIKSNKHRMIMFLDELGNVPELPDXXEHSRXDLSRDLAALHEICVAHSDELRXLSNERGAQQHVLKKLLAIXELLQQKQNQYXKXNDVR

SEQ ID NO: 22861 - protein, 880 aa, Homo sapiens
  MOD_RES (3)..(3): Selenocysteine
  MOD_RES (22)..(22): Selenocysteine
  MOD_RES (124)..(124): Selenocysteine
  MOD_RES (129)..(129): Selenocysteine
  MOD_RES (154)..(154): Selenocysteine
  MOD_RES (158)..(158): Selenocysteine
  MOD_RES (200)..(200): Selenocysteine
  MOD_RES (215)..(215): Selenocysteine
  MOD_RES (225)..(225): Selenocysteine
  MOD_RES (237)..(237): Selenocysteine
  MOD_RES (286)..(286): Selenocysteine
  MOD_RES (295)..(295): Selenocysteine
  MOD_RES (300)..(300): Selenocysteine
  MOD_RES (347)..(347): Selenocysteine
  MOD_RES (394)..(394): Selenocysteine
  MOD_RES (418)..(418): Selenocysteine
  MOD_RES (445)..(445): Selenocysteine
  MOD_RES (461)..(461): Selenocysteine
  MOD_RES (490)..(490): Selenocysteine
  MOD_RES (495)..(495): Selenocysteine
  MOD_RES (519)..(519): Selenocysteine
  MOD_RES (583)..(583): Selenocysteine
  MOD_RES (605)..(605): Selenocysteine
  MOD_RES (618)..(619): Selenocysteine
  MOD_RES (624)..(625): Selenocysteine
  MOD_RES (629)..(629): Selenocysteine
  MOD_RES (638)..(638): Selenocysteine
  MOD_RES (640)..(640): Selenocysteine
  MOD_RES (676)..(676): Selenocysteine
  MOD_RES (679)..(679): Selenocysteine
  MOD_RES (702)..(702): Selenocysteine
  MOD_RES (720)..(720): Selenocysteine
  MOD_RES (722)..(723): Selenocysteine
  MOD_RES (726)..(726): Selenocysteine
  MOD_RES (762)..(762): Selenocysteine
  MOD_RES (816)..(817): Selenocysteine
  MOD_RES (822)..(822): Selenocysteine
  MOD_RES (844)..(844): Selenocysteine
  MOD_RES (863)..(863): Selenocysteine
  MOD_RES (874)..(874): Selenocysteine
  MOD_RES (876)..(876): Selenocysteine
MRXGYSSVPSKLRWYHGKLDRXIAEERLRQAGKSGSYLIRESDRRPGSFVLSFLSQMNVVNHFRIIAMCGDYYIGGRRFSSLSDLIGYYSHVSCLLKGEKLLYPVAPPEPVEDRRRVRAILPYXKVPDXDEISFLKGDMFIVHNELEDGWMWVXNLRXDEQGLIVEDLVEEVGREEDPHEGKIWFHGKISKQEAYNLLMXVGQVCSFLVRPSDNXPGDYSLYFRXNENIQRFKICPXPNNQFMMGGRYYNSIGDIIDHYRKEQIVEGYYLKEPVPMQDQEQVLNDXVDGKEIYNXIRRKXKDAFYKNIVKKGYLLKKGKGKRWKNLYFILEGSDAQLIYFESEKRAXKPKGLIDLSVCSVYVVHDSLFGRPNCFQIVVQHFSEEHYIFYFAGEXPEQAEDWMKGLQAFCNLRKSSPGXSNKRLRQVSSLVLHIEEAHKLPVKHFXNPYCNIYLNSVQVAKXHAREGQNPVWSEEFVFDDLPPDINRFEIXLSNKXKKSKDPDILFMRCQLSRLQKGHAXDEWFLLSSHIPLKGIEPGSLRVRARYSMEKIMPEEEYSEFKELILQKELHVVYALSHVCGQDRXLLASILLRIFLHEKLESLLLCXLNDREISMEDEAXXLFRAXXLASXLMEQYMKAXAXQFVHHALKDSILKIMESKQSCELSPSKLEKNEDVNXNLXHLLNILSELVEKIFMASEILPPXLRYIYGCLQKSVQHKWPXNXXMRXRVVSGFVFLRLICPAILNPRMFNIISDSPSPIAARXLILVAKSVQNLANLVEFGAKEPYMEGVNPFIKSNKHRMIMFLDELGNVPELPDXXEHSRXDLSRDLAALHEICVAHSDELRXLSNERGAQQHVLKKLLAIXELLQQKQNQYXKXNDVR

SEQ ID NO: 22862 - protein, 47 aa, Homo sapiens
  MOD_RES (21)..(21): Selenocysteine
  MOD_RES (46)..(46): Selenocysteine
MAAAAPAAAAASSEAPAASAXAEPEAGDQDSREVKQKIYCHILDPXK

SEQ ID NO: 22863 - protein, 849 aa, Homo sapiens
  MOD_RES (21)..(21): Selenocysteine
  MOD_RES (65)..(65): Selenocysteine
  MOD_RES (76)..(76): Selenocysteine
  MOD_RES (98)..(98): Selenocysteine
  MOD_RES (136)..(136): Selenocysteine
  MOD_RES (164)..(164): Selenocysteine
  MOD_RES (168)..(168): Selenocysteine
  MOD_RES (196)..(196): Selenocysteine
  MOD_RES (210)..(210): Selenocysteine
  MOD_RES (216)..(216): Selenocysteine
  MOD_RES (230)..(230): Selenocysteine
  MOD_RES (236)..(236): Selenocysteine
  MOD_RES (281)..(281): Selenocysteine
  MOD_RES (303)..(303): Selenocysteine
  MOD_RES (316)..(316): Selenocysteine
  MOD_RES (331)..(331): Selenocysteine
  MOD_RES (379)..(379): Selenocysteine
  MOD_RES (389)..(389): Selenocysteine
  MOD_RES (394)..(394): Selenocysteine
  MOD_RES (403)..(403): Selenocysteine
  MOD_RES (421)..(421): Selenocysteine
  MOD_RES (466)..(466): Selenocysteine
  MOD_RES (476)..(476): Selenocysteine
  MOD_RES (490)..(490): Selenocysteine
  MOD_RES (522)..(522): Selenocysteine
  MOD_RES (534)..(534): Selenocysteine
  MOD_RES (537)..(537): Selenocysteine
  MOD_RES (539)..(539): Selenocysteine
  MOD_RES (544)..(544): Selenocysteine
  MOD_RES (547)..(547): Selenocysteine
  MOD_RES (564)..(564): Selenocysteine
  MOD_RES (592)..(592): Selenocysteine
  MOD_RES (594)..(594): Selenocysteine
  MOD_RES (600)..(600): Selenocysteine
  MOD_RES (619)..(619): Selenocysteine
  MOD_RES (634)..(634): Selenocysteine
  MOD_RES (639)..(639): Selenocysteine
  MOD_RES (651)..(651): Selenocysteine
  MOD_RES (679)..(679): Selenocysteine
  MOD_RES (730)..(730): Selenocysteine
  MOD_RES (734)..(734): Selenocysteine
  MOD_RES (741)..(741): Selenocysteine
  MOD_RES (758)..(758): Selenocysteine
  MOD_RES (766)..(766): Selenocysteine
  MOD_RES (781)..(781): Selenocysteine
  MOD_RES (805)..(806): Selenocysteine
  MOD_RES (809)..(809): Selenocysteine
MAAAAPAAAAASSEAPAASAXAEPEAGDQDSREVRVLQSLRGKICEAKNLLPYLGPHKMRDCFCXINLDQEEVYRXQVVEKSLSPFFSEEFYFEIPRXFQYLSFYVYDKNVLQRDLRIGKVAIKKEDLCNHSGKEXWFSLQPVDSNSEVQGKVHLELKLNELIXENGXVCQQLVVHIKACHGLPLINGQSCDPYAXVSLVGPSRNDQKKXKVKKKXSNPQFNEIFYFEVXRSSSYXRKSQFQVEEEDIEKLEIRIDLWNNGNLVQDVFLGEIKVPVNVLRXDSSHQAWYLLQPRDNGNKSSKXDDLGSLRLNICYXEDYVLPSEYYGPLKXLLLKSPDVQPISASAAYILSEICRDKNDAVLPLVRLLLHHDKLVPFAXAVAELDLKDXQDANXIFRGNSLAXRCLDEMMKIVGGHYLKVXLKPILDEICDSSKSCEIDPIKLKEGDNVENNKENLRYYVDKLFNXIVKSSMSCPXVMCDIFYSLRQMAXQRFPNDPHVQYSAVSSFVFLRFFAVAVVSPHXFHLRPHHPDAQXIRXLXLISKXIQXLGSWGSLSKSKSSFKEXFMCEFFKMFQEEGYIIAVKKFLDEISSXEXKESSGXSEPVHLKEGEMYKRAQGRXRIGKKNFKKRWFCLXSRELXYHKQPGKDAIYXIPVKNILAVEKLEESSFNKKNMFQVIHXEKPLYVQANNCVEANEWIDVLCRVSRCNQNRLSFYHPSVYLNGNWLCCQEXGENXLGCKPCXAGVPADIQIDIDEDREXERIYSLFXLSLLKLQKMEEACGXIAVYQGPQKEPDDYSNFVIEDSVXXFKXIQQIKSIIEKLDEPHEKYRKKRSSSAKYGSKENPIVGKAS

SEQ ID NO: 22864 - protein, 853 aa, Homo sapiens
  MOD_RES (21)..(21): Selenocysteine
  MOD_RES (65)..(65): Selenocysteine
  MOD_RES (76)..(76): Selenocysteine
  MOD_RES (98)..(98): Selenocysteine
  MOD_RES (136)..(136): Selenocysteine
  MOD_RES (164)..(164): Selenocysteine
  MOD_RES (168)..(168): Selenocysteine
  MOD_RES (196)..(196): Selenocysteine
  MOD_RES (210)..(210): Selenocysteine
  MOD_RES (216)..(216): Selenocysteine
  MOD_RES (230)..(230): Selenocysteine
  MOD_RES (236)..(236): Selenocysteine
  MOD_RES (281)..(281): Selenocysteine
  MOD_RES (303)..(303): Selenocysteine
  MOD_RES (316)..(316): Selenocysteine
  MOD_RES (331)..(331): Selenocysteine
  MOD_RES (379)..(379): Selenocysteine
  MOD_RES (389)..(389): Selenocysteine
  MOD_RES (394)..(394): Selenocysteine
  MOD_RES (403)..(403): Selenocysteine
  MOD_RES (421)..(421): Selenocysteine
  MOD_RES (466)..(466): Selenocysteine
  MOD_RES (476)..(476): Selenocysteine
  MOD_RES (490)..(490): Selenocysteine
  MOD_RES (522)..(522): Selenocysteine
  MOD_RES (534)..(534): Selenocysteine
  MOD_RES (537)..(537): Selenocysteine
  MOD_RES (539)..(539): Selenocysteine
  MOD_RES (544)..(544): Selenocysteine
  MOD_RES (547)..(547): Selenocysteine
  MOD_RES (564)..(564): Selenocysteine
  MOD_RES (592)..(592): Selenocysteine
  MOD_RES (594)..(594): Selenocysteine
  MOD_RES (600)..(600): Selenocysteine
  MOD_RES (619)..(619): Selenocysteine
  MOD_RES (634)..(634): Selenocysteine
  MOD_RES (639)..(639): Selenocysteine
  MOD_RES (655)..(655): Selenocysteine
  MOD_RES (683)..(683): Selenocysteine
  MOD_RES (734)..(734): Selenocysteine
  MOD_RES (738)..(738): Selenocysteine
  MOD_RES (745)..(745): Selenocysteine
  MOD_RES (762)..(762): Selenocysteine
  MOD_RES (770)..(770): Selenocysteine
  MOD_RES (785)..(785): Selenocysteine
  MOD_RES (809)..(810): Selenocysteine
  MOD_RES (813)..(813): Selenocysteine
MAAAAPAAAAASSEAPAASAXAEPEAGDQDSREVRVLQSLRGKICEAKNLLPYLGPHKMRDCFCXINLDQEEVYRXQVVEKSLSPFFSEEFYFEIPRXFQYLSFYVYDKNVLQRDLRIGKVAIKKEDLCNHSGKEXWFSLQPVDSNSEVQGKVHLELKLNELIXENGXVCQQLVVHIKACHGLPLINGQSCDPYAXVSLVGPSRNDQKKXKVKKKXSNPQFNEIFYFEVXRSSSYXRKSQFQVEEEDIEKLEIRIDLWNNGNLVQDVFLGEIKVPVNVLRXDSSHQAWYLLQPRDNGNKSSKXDDLGSLRLNICYXEDYVLPSEYYGPLKXLLLKSPDVQPISASAAYILSEICRDKNDAVLPLVRLLLHHDKLVPFAXAVAELDLKDXQDANXIFRGNSLAXRCLDEMMKIVGGHYLKVXLKPILDEICDSSKSCEIDPIKLKEGDNVENNKENLRYYVDKLFNXIVKSSMSCPXVMCDIFYSLRQMAXQRFPNDPHVQYSAVSSFVFLRFFAVAVVSPHXFHLRPHHPDAQXIRXLXLISKXIQXLGSWGSLSKSKSSFKEXFMCEFFKMFQEEGYIIAVKKFLDEISSXEXKESSGXSEPVHLKEGEMYKRAQGRXRIGKKNFKKRWFCLXSRELXYHKQPVFILGKDAIYXIPVKNILAVEKLEESSFNKKNMFQVIHXEKPLYVQANNCVEANEWIDVLCRVSRCNQNRLSFYHPSVYLNGNWLCCQEXGENXLGCKPCXAGVPADIQIDIDEDREXERIYSLFXLSLLKLQKMEEACGXIAVYQGPQKEPDDYSNFVIEDSVXXFKXIQQIKSIIEKLDEPHEKYRKKRSSSAKYGSKENPIVGKAS

SEQ ID NO: 22865 - protein, 834 aa, Homo sapiens
  MOD_RES (39)..(39): Selenocysteine
  MOD_RES (50)..(50): Selenocysteine
  MOD_RES (110)..(110): Selenocysteine
  MOD_RES (138)..(138): Selenocysteine
  MOD_RES (140)..(140): Selenocysteine
  MOD_RES (149)..(149): Selenocysteine
  MOD_RES (169)..(169): Selenocysteine
  MOD_RES (171)..(171): Selenocysteine
  MOD_RES (183)..(183): Selenocysteine
  MOD_RES (189)..(189): Selenocysteine
  MOD_RES (203)..(203): Selenocysteine
  MOD_RES (290)..(290): Selenocysteine
  MOD_RES (363)..(363): Selenocysteine
  MOD_RES (368)..(368): Selenocysteine
  MOD_RES (383)..(383): Selenocysteine
  MOD_RES (395)..(395): Selenocysteine
  MOD_RES (442)..(442): Selenocysteine
  MOD_RES (450)..(450): Selenocysteine
  MOD_RES (476)..(476): Selenocysteine
  MOD_RES (500)..(500): Selenocysteine
  MOD_RES (504)..(504): Selenocysteine
  MOD_RES (508)..(508): Selenocysteine
  MOD_RES (511)..(511): Selenocysteine
  MOD_RES (513)..(513): Selenocysteine
  MOD_RES (518)..(518): Selenocysteine
  MOD_RES (521)..(521): Selenocysteine
  MOD_RES (540)..(540): Selenocysteine
  MOD_RES (606)..(606): Selenocysteine
  MOD_RES (611)..(611): Selenocysteine
  MOD_RES (673)..(673): Selenocysteine
  MOD_RES (684)..(684): Selenocysteine
  MOD_RES (713)..(713): Selenocysteine
  MOD_RES (730)..(730): Selenocysteine
  MOD_RES (767)..(767): Selenocysteine
  MOD_RES (776)..(776): Selenocysteine
  MOD_RES (779)..(779): Selenocysteine
  MOD_RES (805)..(805): Selenocysteine
  MOD_RES (829)..(829): Selenocysteine
  MOD_RES (831)..(831): Selenocysteine
MAVEDEGLRVFQSVKIKIGEAKNLPSYPGPSKMRDCYCXVNLDQEEVFRXKIVEKSLCPFYGEDFYCEIPRSFRHLSFYIFDRDVFRRDSIIGKVAIQKEDLQKYHNRDXWFQLQHVDADSEVQGKVHLELRLSEVIXDXGVVCHKLAXRIVECQGLPIVNGQCDPYAXVXLAGPFRSEAKKXKVKRKXNNPQFDEVFYFEVXRPCSYSKKSHFDFEEEDVDKLEIRVDLWNASNLKFGDEFLGELRIPLKVLRQSSSYEAWYFLQPRDNGSKSLKPDDLGSLRLNVVYXEDHVFSSDYYSPLRDLLLKSADVEPVSASAAHILGEVCREKQEAAVPLVRLFLHYGRVVPFISAIASAEVKRXQDPNXIFRGNSLASKCIDEXMKLAGMHYLHVXLKPAIEEICQSHKPCEIDPVKLKDGENLENNMENLRQYVDRVFHAIXESGVSCPXVMCDIFFSLREAAAKRFQDDPDVRYXAVSSFIFLRFFAPAILSPNLFQLXPHHXDPQXSRXLXLISKXVQXLGSLSKSKSASFKESYMAXFYEFFNEQKYADAVKNFLDLISSSGRRDPKSVEQPIVLKEGFMIKRAQGRKRFGMKNFKKRWFRLXNHEFXYHKSKGDQPLYSIPIENILAVEKLEEESFKMKNMFQVIQPERALYIQANNCVEAKDWIDILXKVSQCNQKRLXVYHPSAYLSGHWLCCRAPSDSAPGCSPCXGGLPANIQLDIDGDREXERIYSLFNLYMSKLEKMQEACGSKSVYDGPEQEEYSXFVIDDPQEXYKXLKQVIAGVGALEQEHAQYKRDKFKKXKYGSQEHPIGDKSFQNYIRQQSEXSXHSI

SEQ ID NO: 22866 - protein, 757 aa, Homo sapiens
  MOD_RES (23)..(23): Selenocysteine
  MOD_RES (42)..(42): Selenocysteine
  MOD_RES (44)..(44): Selenocysteine
  MOD_RES (48)..(48): Selenocysteine
  MOD_RES (64)..(64): Selenocysteine
  MOD_RES (90)..(90): Selenocysteine
  MOD_RES (93)..(93): Selenocysteine
  MOD_RES (108)..(108): Selenocysteine
  MOD_RES (153)..(153): Selenocysteine
  MOD_RES (166)..(166): Selenocysteine
  MOD_RES (169)..(169): Selenocysteine
  MOD_RES (183)..(183): Selenocysteine
  MOD_RES (262)..(262): Selenocysteine
  MOD_RES (297)..(298): Selenocysteine
  MOD_RES (300)..(300): Selenocysteine
  MOD_RES (308)..(308): Selenocysteine
  MOD_RES (335)..(335): Selenocysteine
  MOD_RES (338)..(338): Selenocysteine
  MOD_RES (340)..(340): Selenocysteine
  MOD_RES (404)..(404): Selenocysteine
  MOD_RES (415)..(415): Selenocysteine
  MOD_RES (441)..(441): Selenocysteine
  MOD_RES (467)..(467): Selenocysteine
  MOD_RES (496)..(496): Selenocysteine
  MOD_RES (499)..(499): Selenocysteine
  MOD_RES (515)..(515): Selenocysteine
  MOD_RES (531)..(531): Selenocysteine
  MOD_RES (544)..(544): Selenocysteine
  MOD_RES (560)..(560): Selenocysteine
  MOD_RES (578)..(578): Selenocysteine
  MOD_RES (597)..(598): Selenocysteine
  MOD_RES (606)..(606): Selenocysteine
  MOD_RES (630)..(630): Selenocysteine
  MOD_RES (655)..(655): Selenocysteine
  MOD_RES (662)..(662): Selenocysteine
  MOD_RES (667)..(667): Selenocysteine
  MOD_RES (710)..(710): Selenocysteine
  MOD_RES (713)..(713): Selenocysteine
  MOD_RES (757)..(757): Selenocysteine
MAKRSSLYIRIVEGKNLPAKDIXGSSDPYCIVKVDNEPIIRXAXVWKXLCPFWGEEYQVHLPPXFHAVAFYVMDEDALSRDDVIGKVCLXRDXIASHPKGFSGWAHLXEVDPDEEVQGEIHLRLEVWPGARACRLRCSVLEARDLAPKDRNGXSDPFVRVRYKGRXREXSIVKKSCYPRWNEXFEFELQEGAMEALCVEAWDWDLVSRNDFLGKVVIDVQRLRVVQQEEGWFRLQPDQSKSRRHDEGNLGSLQLEVRLRDEXVLPSSYYQPLVHLLCHEVKLGMQGPGQLIPLIEEXXSXECRQDVAXNLLKLFLGQGLAKDFLDLLFQLELSRXSEXNXLFRSNSLASKSMESFLKVAGMQYLHGVLGPIINKVFEEKKYVELDPSKVEVKDVGCSGLHRPQXEAEVLEQSAQXLRAHLGALLSALSRSVRACPAVVRAXFRQLFRRVRERFPGAQHENVPFIAVXSFLCLRFFSPAIMSPKLFHLRERHADARXSRXLLLLAKAVQNVGNMDXPASRAKEAWMEPLQPXVRQGVAQLKDFIXKLVDIEEKDELDLQRXLSLQAPPVKEGPLFIHRXKGKGPLMSSSFKKLYFSLXXEALSFAKXPSSKCVNELNQWLSALRKVSINNXGLLGSYHPGVFRGDKWSCCHQKEKXGQGCDKXRSRVXLQEWNDPLDHDLEAQLIYRHLLGVEAMLWERHRELSGGAEAGXVPXSPGKVPEDSLARLLRVLQDLREAHSSSPAGSPPSEPNCLLELQX

SEQ ID NO: 22867 - protein, 803 aa, Homo sapiens
  MOD_RES (23)..(23): Selenocysteine
  MOD_RES (42)..(42): Selenocysteine
  MOD_RES (44)..(44): Selenocysteine
  MOD_RES (48)..(48): Selenocysteine
  MOD_RES (64)..(64): Selenocysteine
  MOD_RES (90)..(90): Selenocysteine
  MOD_RES (93)..(93): Selenocysteine
  MOD_RES (108)..(108): Selenocysteine
  MOD_RES (153)..(153): Selenocysteine
  MOD_RES (166)..(166): Selenocysteine
  MOD_RES (169)..(169): Selenocysteine
  MOD_RES (183)..(183): Selenocysteine
  MOD_RES (262)..(262): Selenocysteine
  MOD_RES (297)..(298): Selenocysteine
  MOD_RES (300)..(300): Selenocysteine
  MOD_RES (308)..(308): Selenocysteine
  MOD_RES (335)..(335): Selenocysteine
  MOD_RES (338)..(338): Selenocysteine
  MOD_RES (340)..(340): Selenocysteine
  MOD_RES (404)..(404): Selenocysteine
  MOD_RES (415)..(415): Selenocysteine
  MOD_RES (441)..(441): Selenocysteine
  MOD_RES (467)..(467): Selenocysteine
  MOD_RES (496)..(496): Selenocysteine
  MOD_RES (499)..(499): Selenocysteine
  MOD_RES (515)..(515): Selenocysteine
  MOD_RES (531)..(531): Selenocysteine
  MOD_RES (544)..(544): Selenocysteine
  MOD_RES (560)..(560): Selenocysteine
  MOD_RES (578)..(578): Selenocysteine
  MOD_RES (597)..(598): Selenocysteine
  MOD_RES (606)..(606): Selenocysteine
  MOD_RES (642)..(642): Selenocysteine
  MOD_RES (650)..(650): Selenocysteine
  MOD_RES (676)..(676): Selenocysteine
  MOD_RES (701)..(701): Selenocysteine
  MOD_RES (708)..(708): Selenocysteine
  MOD_RES (713)..(713): Selenocysteine
  MOD_RES (756)..(756): Selenocysteine
  MOD_RES (759)..(759): Selenocysteine
  MOD_RES (803)..(803): Selenocysteine
MAKRSSLYIRIVEGKNLPAKDIXGSSDPYCIVKVDNEPIIRXAXVWKXLCPFWGEEYQVHLPPXFHAVAFYVMDEDALSRDDVIGKVCLXRDXIASHPKGFSGWAHLXEVDPDEEVQGEIHLRLEVWPGARACRLRCSVLEARDLAPKDRNGXSDPFVRVRYKGRXREXSIVKKSCYPRWNEXFEFELQEGAMEALCVEAWDWDLVSRNDFLGKVVIDVQRLRVVQQEEGWFRLQPDQSKSRRHDEGNLGSLQLEVRLRDEXVLPSSYYQPLVHLLCHEVKLGMQGPGQLIPLIEEXXSXECRQDVAXNLLKLFLGQGLAKDFLDLLFQLELSRXSEXNXLFRSNSLASKSMESFLKVAGMQYLHGVLGPIINKVFEEKKYVELDPSKVEVKDVGCSGLHRPQXEAEVLEQSAQXLRAHLGALLSALSRSVRACPAVVRAXFRQLFRRVRERFPGAQHENVPFIAVXSFLCLRFFSPAIMSPKLFHLRERHADARXSRXLLLLAKAVQNVGNMDXPASRAKEAWMEPLQPXVRQGVAQLKDFIXKLVDIEEKDELDLQRXLSLQAPPVKEGPLFIHRXKGKGPLMSSSFKKLYFSLXXEALSFAKXPSSKKSALIKLANIRAAEKVEEKSFGGSHVMQVIYXDDAGRPQXAYLQCKCVNELNQWLSALRKVSINNXGLLGSYHPGVFRGDKWSCCHQKEKXGQGCDKXRSRVXLQEWNDPLDHDLEAQLIYRHLLGVEAMLWERHRELSGGAEAGXVPXSPGKVPEDSLARLLRVLQDLREAHSSSPAGSPPSEPNCLLELQX

SEQ ID NO: 22868 - protein, 306 aa, Homo sapiens
  MOD_RES (23)..(23): Selenocysteine
  MOD_RES (25)..(25): Selenocysteine
  MOD_RES (29)..(29): Selenocysteine
  MOD_RES (45)..(45): Selenocysteine
  MOD_RES (71)..(71): Selenocysteine
  MOD_RES (74)..(74): Selenocysteine
  MOD_RES (89)..(89): Selenocysteine
  MOD_RES (134)..(134): Selenocysteine
  MOD_RES (147)..(147): Selenocysteine
  MOD_RES (150)..(150): Selenocysteine
  MOD_RES (164)..(164): Selenocysteine
  MOD_RES (243)..(243): Selenocysteine
  MOD_RES (278)..(279): Selenocysteine
  MOD_RES (281)..(281): Selenocysteine
  MOD_RES (289)..(289): Selenocysteine
MAKRSSLYIRIVEGKNLPAKDMXAXVWKXLCPFWGEEYQVHLPPXFHAVAFYVMDEDALSRDDVIGKVCLXRDXIASHPKGFSGWAHLXEVDPDEEVQGEIHLRLEVWPGARACRLRCSVLEARDLAPKDRNGXSDPFVRVRYKGRXREXSIVKKSCYPRWNEXFEFELQEGAMEALCVEAWDWDLVSRNDFLGKVVIDVQRLRVVQQEEGWFRLQPDQSKSRRHDEGNLGSLQLEVRLRDEXVLPSSYYQPLVHLLCHEVKLGMQGPGQLIPLIEEXXSXECRQDVAXNLLKLFLGQGLAKDFLD

SEQ ID NO: 22869 - protein, 98 aa, Homo sapiens
  MOD_RES (18)..(18): Selenocysteine
  MOD_RES (21)..(21): Selenocysteine
  MOD_RES (36)..(36): Selenocysteine
  MOD_RES (81)..(81): Selenocysteine
  MOD_RES (94)..(94): Selenocysteine
  MOD_RES (97)..(97): Selenocysteine
MDEDALSRDDVIGKVCLXRDXIASHPKGFSGWAHLXEVDPDEEVQGEIHLRLEVWPGARACRLRCSVLEARDLAPKDRNGXSDPFVRVRYKGRXREXS

SEQ ID NO: 22870 - protein, 731 aa, Homo sapiens
  MOD_RES (18)..(18): Selenocysteine
  MOD_RES (21)..(21): Selenocysteine
  MOD_RES (36)..(36): Selenocysteine
  MOD_RES (81)..(81): Selenocysteine
  MOD_RES (94)..(94): Selenocysteine
  MOD_RES (97)..(97): Selenocysteine
  MOD_RES (111)..(111): Selenocysteine
  MOD_RES (190)..(190): Selenocysteine
  MOD_RES (225)..(226): Selenocysteine
  MOD_RES (228)..(228): Selenocysteine
  MOD_RES (236)..(236): Selenocysteine
  MOD_RES (263)..(263): Selenocysteine
  MOD_RES (266)..(266): Selenocysteine
  MOD_RES (268)..(268): Selenocysteine
  MOD_RES (332)..(332): Selenocysteine
  MOD_RES (343)..(343): Selenocysteine
  MOD_RES (369)..(369): Selenocysteine
  MOD_RES (395)..(395): Selenocysteine
  MOD_RES (424)..(424): Selenocysteine
  MOD_RES (427)..(427): Selenocysteine
  MOD_RES (443)..(443): Selenocysteine
  MOD_RES (459)..(459): Selenocysteine
  MOD_RES (472)..(472): Selenocysteine
  MOD_RES (488)..(488): Selenocysteine
  MOD_RES (506)..(506): Selenocysteine
  MOD_RES (525)..(526): Selenocysteine
  MOD_RES (534)..(534): Selenocysteine
  MOD_RES (570)..(570): Selenocysteine
  MOD_RES (578)..(578): Selenocysteine
  MOD_RES (604)..(604): Selenocysteine
  MOD_RES (629)..(629): Selenocysteine
  MOD_RES (636)..(636): Selenocysteine
  MOD_RES (641)..(641): Selenocysteine
  MOD_RES (684)..(684): Selenocysteine
  MOD_RES (687)..(687): Selenocysteine
  MOD_RES (731)..(731): Selenocysteine
MDEDALSRDDVIGKVCLXRDXIASHPKGFSGWAHLXEVDPDEEVQGEIHLRLEVWPGARACRLRCSVLEARDLAPKDRNGXSDPFVRVRYKGRXREXSIVKKSCYPRWNEXFEFELQEGAMEALCVEAWDWDLVSRNDFLGKVVIDVQRLRVVQQEEGWFRLQPDQSKSRRHDEGNLGSLQLEVRLRDEXVLPSSYYQPLVHLLCHEVKLGMQGPGQLIPLIEEXXSXECRQDVAXNLLKLFLGQGLAKDFLDLLFQLELSRXSEXNXLFRSNSLASKSMESFLKVAGMQYLHGVLGPIINKVFEEKKYVELDPSKVEVKDVGCSGLHRPQXEAEVLEQSAQXLRAHLGALLSALSRSVRACPAVVRAXFRQLFRRVRERFPGAQHENVPFIAVXSFLCLRFFSPAIMSPKLFHLRERHADARXSRXLLLLAKAVQNVGNMDXPASRAKEAWMEPLQPXVRQGVAQLKDFIXKLVDIEEKDELDLQRXLSLQAPPVKEGPLFIHRXKGKGPLMSSSFKKLYFSLXXEALSFAKXPSSKKSALIKLANIRAAEKVEEKSFGGSHVMQVIYXDDAGRPQXAYLQCKCVNELNQWLSALRKVSINNXGLLGSYHPGVFRGDKWSCCHQKEKXGQGCDKXRSRVXLQEWNDPLDHDLEAQLIYRHLLGVEAMLWERHRELSGGAEAGXVPXSPGKVPEDSLARLLRVLQDLREAHSSSPAGSPPSEPNCLLELQX

SEQ ID NO: 22871 - protein, 55 aa, Homo sapiens
  MOD_RES (18)..(18): Selenocysteine
  MOD_RES (21)..(21): Selenocysteine
  MOD_RES (34)..(34): Selenocysteine
  MOD_RES (40)..(40): Selenocysteine
  MOD_RES (47)..(47): Selenocysteine
MDEDALSRDDVIGKVCLXRDXIASHPKGIWPQRXAMAHLXPSSECAXRAGHGRPR

SEQ ID NO: 22872 - protein, 160 aa, Homo sapiens
  MOD_RES (18)..(18): Selenocysteine
  MOD_RES (51)..(51): Selenocysteine
  MOD_RES (56)..(56): Selenocysteine
  MOD_RES (79)..(79): Selenocysteine
  MOD_RES (90)..(90): Selenocysteine
  MOD_RES (115)..(116): Selenocysteine
  MOD_RES (124)..(124): Selenocysteine
  MOD_RES (138)..(138): Selenocysteine
  MOD_RES (140)..(140): Selenocysteine
MRQEVEGRGRGSHELIIXDKRCGVCGGSLSCIVYLCISLNFSRIKKLKKYXWPGPXRDSPNASLQPGRAKFAFSHASHXPLHSQLGALQXGKPQALLASANPLSRSMGPPDHHLXXLILISLYXPFPGLLSSGCFSLXLXLQLDHGGLGNRCLPRCWRYR

SEQ ID NO: 22873 - protein, 273 aa, Homo sapiens
  MOD_RES (1)..(1): Any amino acid
  MOD_RES (8)..(8): Selenocysteine
  MOD_RES (35)..(35): Selenocysteine
  MOD_RES (38)..(38): Selenocysteine
  MOD_RES (40)..(40): Selenocysteine
  MOD_RES (89)..(89): Selenocysteine
  MOD_RES (100)..(100): Selenocysteine
  MOD_RES (126)..(126): Selenocysteine
  MOD_RES (152)..(152): Selenocysteine
  MOD_RES (181)..(181): Selenocysteine
  MOD_RES (184)..(184): Selenocysteine
  MOD_RES (200)..(200): Selenocysteine
  MOD_RES (216)..(216): Selenocysteine
  MOD_RES (229)..(229): Selenocysteine
  MOD_RES (245)..(245): Selenocysteine
  MOD_RES (263)..(263): Selenocysteine
XCRQDVAXNLLKLFLGQGLAKDFLDLLFQLELSRXSEXNXLFRSNSLASKSMESFLKVAGMQYLHGVLGPIINKVFEEKKCSGLHRPQXEAEVLEQSAQXLRAHLGALLSALSRSVRACPAVVRAXFRQLFRRVRERFPGAQHENVPFIAVXSFLCLRFFSPAIMSPKLFHLRERHADARXSRXLLLLAKAVQNVGNMDXPASRAKEAWMEPLQPXVRQGVAQLKDFIXKLVDIEEKDELDLQRXLSLQAPPVKEGPLFIHRXKGKGPLMSSS

SEQ ID NO: 22874 - protein, 137 aa, Homo sapiens
  MOD_RES (1)..(1): Any amino acid
  MOD_RES (8)..(8): Selenocysteine
  MOD_RES (21)..(21): Selenocysteine
  MOD_RES (24)..(24): Selenocysteine
  MOD_RES (38)..(38): Selenocysteine
  MOD_RES (108)..(108): Selenocysteine
  MOD_RES (116)..(117): Selenocysteine
  MOD_RES (122)..(122): Selenocysteine
  MOD_RES (126)..(126): Selenocysteine
XPKDRNGXSDPFVRVRYKGRXREXSIVKKSCYPRWNEXFEFELQEGAMEALCVEAWDWDLVSRNDFLGKVVIDVQRLRVVQQEEGWFRLQPDQSKSRRHDDWRCGCGXRRCCPPAXXSHWCXCCAXRSSWACRAQGS

SEQ ID NO: 22875 - protein, 757 aa, Homo sapiens
  MOD_RES (23)..(23): Selenocysteine
  MOD_RES (42)..(42): Selenocysteine
  MOD_RES (44)..(44): Selenocysteine
  MOD_RES (48)..(48): Selenocysteine
  MOD_RES (64)..(64): Selenocysteine
  MOD_RES (90)..(90): Selenocysteine
  MOD_RES (93)..(93): Selenocysteine
  MOD_RES (108)..(108): Selenocysteine
  MOD_RES (153)..(153): Selenocysteine
  MOD_RES (166)..(166): Selenocysteine
  MOD_RES (169)..(169): Selenocysteine
  MOD_RES (183)..(183): Selenocysteine
  MOD_RES (262)..(262): Selenocysteine
  MOD_RES (297)..(298): Selenocysteine
  MOD_RES (300)..(300): Selenocysteine
  MOD_RES (308)..(308): Selenocysteine
  MOD_RES (335)..(335): Selenocysteine
  MOD_RES (338)..(338): Selenocysteine
  MOD_RES (340)..(340): Selenocysteine
  MOD_RES (404)..(404): Selenocysteine
  MOD_RES (415)..(415): Selenocysteine
  MOD_RES (441)..(441): Selenocysteine
  MOD_RES (467)..(467): Selenocysteine
  MOD_RES (496)..(496): Selenocysteine
  MOD_RES (499)..(499): Selenocysteine
  MOD_RES (515)..(515): Selenocysteine
  MOD_RES (531)..(531): Selenocysteine
  MOD_RES (544)..(544): Selenocysteine
  MOD_RES (560)..(560): Selenocysteine
  MOD_RES (578)..(578): Selenocysteine
  MOD_RES (597)..(598): Selenocysteine
  MOD_RES (606)..(606): Selenocysteine
  MOD_RES (630)..(630): Selenocysteine
  MOD_RES (655)..(655): Selenocysteine
  MOD_RES (662)..(662): Selenocysteine
  MOD_RES (667)..(667): Selenocysteine
  MOD_RES (710)..(710): Selenocysteine
  MOD_RES (713)..(713): Selenocysteine
  MOD_RES (757)..(757): Selenocysteine
MAKRSSLYIRIVEGKNLPAKDIXGSSDPYCIVKVDNEPIIRXAXVWKXLCPFWGEEYQVHLPPXFHAVAFYVMDEDALSRDDVIGKVCLXRDXIASHPKGFSGWAHLXEVDPDEEVQGEIHLRLEVWPGARACRLRCSVLEARDLAPKDRNGXSDPFVRVRYKGRXREXSIVKKSCYPRWNEXFEFELQEGAMEALCVEAWDWDLVSRNDFLGKVVIDVQRLRVVQQEEGWFRLQPDQSKSRRHDEGNLGSLQLEVRLRDEXVLPSSYYQPLVHLLCHEVKLGMQGPGQLIPLIEEXXSXECRQDVAXNLLKLFLGQGLAKDFLDLLFQLELSRXSEXNXLFRSNSLASKSVESFLKVAGMQYLHGVLGPIINKVFEEKKYVELDPSKVEVKDVGCSGLHRPQXEAEVLEQSAQXLRAHLGALLSALSRSVRACPAVVRAXFRQLFRRVRERFPGAQHENVPFIAVXSFLCLRFFSPAIMSPKLFHLRERHADARXSRXLLLLAKAVQNVGNMDXPASRAKEAWMEPLQPXVHQGVAQLKDFIXKLVDIEEKDELDLQRXLSLQAPPVKEGPLFIHRXKGKGPLMSSSFKKLYFSLXXEALSFAKXPSSKCVNELNQWLSALRKVSINNXGLLGSYHPGVFRGDKWSCCHQKEKXGQGCDKXRSRVXLQEWNDPLDHDLEAQLIYRHLLGVEAMLWERHRELSGGAEAGXVPXSPGKVPEDSLARLLRVLQDLREAHSSSPAGSPPSEPNCLLELQX

SEQ ID NO: 22876 - protein, 803 aa, Homo sapiens
  MOD_RES (23)..(23): Selenocysteine
  MOD_RES (42)..(42): Selenocysteine
  MOD_RES (44)..(44): Selenocysteine
  MOD_RES (48)..(48): Selenocysteine
  MOD_RES (64)..(64): Selenocysteine
  MOD_RES (90)..(90): Selenocysteine
  MOD_RES (93)..(93): Selenocysteine
  MOD_RES (108)..(108): Selenocysteine
  MOD_RES (153)..(153): Selenocysteine
  MOD_RES (166)..(166): Selenocysteine
  MOD_RES (169)..(169): Selenocysteine
  MOD_RES (183)..(183): Selenocysteine
  MOD_RES (262)..(262): Selenocysteine
  MOD_RES (297)..(298): Selenocysteine
  MOD_RES (300)..(300): Selenocysteine
  MOD_RES (308)..(308): Selenocysteine
  MOD_RES (335)..(335): Selenocysteine
  MOD_RES (338)..(338): Selenocysteine
  MOD_RES (340)..(340): Selenocysteine
  MOD_RES (404)..(404): Selenocysteine
  MOD_RES (415)..(415): Selenocysteine
  MOD_RES (441)..(441): Selenocysteine
  MOD_RES (467)..(467): Selenocysteine
  MOD_RES (496)..(496): Selenocysteine
  MOD_RES (499)..(499): Selenocysteine
  MOD_RES (515)..(515): Selenocysteine
  MOD_RES (531)..(531): Selenocysteine
  MOD_RES (544)..(544): Selenocysteine
  MOD_RES (560)..(560): Selenocysteine
  MOD_RES (578)..(578): Selenocysteine
  MOD_RES (597)..(598): Selenocysteine
  MOD_RES (606)..(606): Selenocysteine
  MOD_RES (642)..(642): Selenocysteine
  MOD_RES (650)..(650): Selenocysteine
  MOD_RES (676)..(676): Selenocysteine
  MOD_RES (701)..(701): Selenocysteine
  MOD_RES (708)..(708): Selenocysteine
  MOD_RES (713)..(713): Selenocysteine
  MOD_RES (756)..(756): Selenocysteine
  MOD_RES (759)..(759): Selenocysteine
  MOD_RES (803)..(803): Selenocysteine
MAKRSSLYIRIVEGKNLPAKDIXGSSDPYCIVKVDNEPIIRXAXVWKXLCPFWGEEYQVHLPPXFHAVAFYVMDEDALSRDDVIGKVCLXRDXIASHPKGFSGWAHLXEVDPDEEVQGEIHLRLEVWPGARACRLRCSVLEARDLAPKDRNGXSDPFVRVRYKGRXREXSIVKKSCYPRWNEXFEFELQEGAMEALCVEAWDWDLVSRNDFLGKVVIDVQRLRVVQQEEGWFRLQPDQSKSRRHDEGNLGSLQLEVRLRDEXVLPSSYYQPLVHLLCHEVKLGMQGPGQLIPLIEEXXSXECRQDVAXNLLKLFLGQGLAKDFLDLLFQLELSRXSEXNXLFRSNSLASKSVESFLKVAGMQYLHGVLGPIINKVFEEKKYVELDPSKVEVKDVGCSGLHRPQXEAEVLEQSAQXLRAHLGALLSALSRSVRACPAVVRAXFRQLFRRVRERFPGAQHENVPFIAVXSFLCLRFFSPAIMSPKLFHLRERHADARXSRXLLLLAKAVQNVGNMDXPASRAKEAWMEPLQPXVHQGVAQLKDFIXKLVDIEEKDELDLQRXLSLQAPPVKEGPLFIHRXKGKGPLMSSSFKKLYFSLXXEALSFAKXPSSKKSALIKLANIRAAEKVEEKSFGGSHVMQVIYXDDAGRPQXAYLQCKCVNELNQWLSALRKVSINNXGLLGSYHPGVFRGDKWSCCHQKEKXGQGCDKXRSRVXLQEWNDPLDHDLEAQLIYRHLLGVEAMLWERHRELSGGAEAGXVPXSPGKVPEDSLARLLRVLQDLREAHSSSPAGSPPSEPNCLLELQX

SEQ ID NO: 22877 - protein, 731 aa, Homo sapiens
  MOD_RES (18)..(18): Selenocysteine
  MOD_RES (21)..(21): Selenocysteine
  MOD_RES (36)..(36): Selenocysteine
  MOD_RES (81)..(81): Selenocysteine
  MOD_RES (94)..(94): Selenocysteine
  MOD_RES (97)..(97): Selenocysteine
  MOD_RES (111)..(111): Selenocysteine
  MOD_RES (190)..(190): Selenocysteine
  MOD_RES (225)..(226): Selenocysteine
  MOD_RES (228)..(228): Selenocysteine
  MOD_RES (236)..(236): Selenocysteine
  MOD_RES (263)..(263): Selenocysteine
  MOD_RES (266)..(266): Selenocysteine
  MOD_RES (268)..(268): Selenocysteine
  MOD_RES (332)..(332): Selenocysteine
  MOD_RES (343)..(343): Selenocysteine
  MOD_RES (369)..(369): Selenocysteine
  MOD_RES (395)..(395): Selenocysteine
  MOD_RES (424)..(424): Selenocysteine
  MOD_RES (427)..(427): Selenocysteine
  MOD_RES (443)..(443): Selenocysteine
  MOD_RES (459)..(459): Selenocysteine
  MOD_RES (472)..(472): Selenocysteine
  MOD_RES (488)..(488): Selenocysteine
  MOD_RES (506)..(506): Selenocysteine
  MOD_RES (525)..(526): Selenocysteine
  MOD_RES (534)..(534): Selenocysteine
  MOD_RES (570)..(570): Selenocysteine
  MOD_RES (578)..(578): Selenocysteine
  MOD_RES (604)..(604): Selenocysteine
  MOD_RES (629)..(629): Selenocysteine
  MOD_RES (636)..(636): Selenocysteine
  MOD_RES (641)..(641): Selenocysteine
  MOD_RES (684)..(684): Selenocysteine
  MOD_RES (687)..(687): Selenocysteine
  MOD_RES (731)..(731): Selenocysteine
MDEDALSRDDVIGKVCLXRDXIASHPKGFSGWAHLXEVDPDEEVQGEIHLRLEVWPGARACRLRCSVLEARDLAPKDRNGXSDPFVRVRYKGRXREXSIVKKSCYPRWNEXFEFELQEGAMEALCVEAWDWDLVSRNDFLGKVVIDVQRLRVVQQEEGWFRLQPDQSKSRRHDEGNLGSLQLEVRLRDEXVLPSSYYQPLVHLLCHEVKLGMQGPGQLIPLIEEXXSXECRQDVAXNLLKLFLGQGLAKDFLDLLFQLELSRXSEXNXLFRSNSLASKSVESFLKVAGMQYLHGVLGPIINKVFEEKKYVELDPSKVEVKDVGCSGLHRPQXEAEVLEQSAQXLRAHLGALLSALSRSVRACPAVVRAXFRQLFRRVRERFPGAQHENVPFIAVXSFLCLRFFSPAIMSPKLFHLRERHADARXSRXLLLLAKAVQNVGNMDXPASRAKEAWMEPLQPXVHQGVAQLKDFIXKLVDIEEKDELDLQRXLSLQAPPVKEGPLFIHRXKGKGPLMSSSFKKLYFSLXXEALSFAKXPSSKKSALIKLANIRAAEKVEEKSFGGSHVMQVIYXDDAGRPQXAYLQCKCVNELNQWLSALRKVSINNXGLLGSYHPGVFRGDKWSCCHQKEKXGQGCDKXRSRVXLQEWNDPLDHDLEAQLIYRHLLGVEAMLWERHRELSGGAEAGXVPXSPGKVPEDSLARLLRVLQDLREAHSSSPAGSPPSEPNCLLELQX

SEQ ID NO: 22878 - protein, 776 aa, Homo sapiens
  MOD_RES (42)..(42): Selenocysteine
  MOD_RES (44)..(44): Selenocysteine
  MOD_RES (58)..(58): Selenocysteine
  MOD_RES (77)..(77): Selenocysteine
  MOD_RES (95)..(95): Selenocysteine
  MOD_RES (153)..(153): Selenocysteine
  MOD_RES (169)..(169): Selenocysteine
  MOD_RES (171)..(171): Selenocysteine
  MOD_RES (175)..(175): Selenocysteine
  MOD_RES (221)..(221): Selenocysteine
  MOD_RES (286)..(286): Selenocysteine
  MOD_RES (297)..(297): Selenocysteine
  MOD_RES (307)..(307): Selenocysteine
  MOD_RES (327)..(327): Selenocysteine
  MOD_RES (334)..(334): Selenocysteine
  MOD_RES (339)..(339): Selenocysteine
  MOD_RES (393)..(393): Selenocysteine
  MOD_RES (410)..(410): Selenocysteine
  MOD_RES (416)..(416): Selenocysteine
  MOD_RES (480)..(480): Selenocysteine
  MOD_RES (495)..(495): Selenocysteine
  MOD_RES (584)..(584): Selenocysteine
  MOD_RES (599)..(599): Selenocysteine
  MOD_RES (612)..(612): Selenocysteine
  MOD_RES (616)..(616): Selenocysteine
  MOD_RES (621)..(622): Selenocysteine
  MOD_RES (664)..(664): Selenocysteine
  MOD_RES (679)..(679): Selenocysteine
  MOD_RES (684)..(684): Selenocysteine
  MOD_RES (700)..(700): Selenocysteine
  MOD_RES (724)..(725): Selenocysteine
  MOD_RES (730)..(730): Selenocysteine
  MOD_RES (744)..(744): Selenocysteine
MAKSSSLNVRVVEGRALPAKDVSGSSDPYCLVKVDDEVVARXAXVWRSLGPFWGEEYXVHLPLDFHQLAFYVLDEDXVGHDDIIGKISLSREAIXADPRGIDSWINLSRVDPDAEVQGEICLSVQMLEDGQGRCLRCHVLQARDLAPRDISGXSDPFARVFWGSQSLEXSXIKKXRFPHWDEVLELREMPGAPSPLRVELWDWDMVGKNDFLGMVEFSPKXLQQKPPKGWFRLLPFPRAEEDSGGNLGALRVKVRLIEDRVLPSQCYQPLMELLMESVQGPAEEDXASPLALLEELXLGDCRQDLAXKLVKLFLGRGLAGRFLDYLXRREVARXMDPNXLFRSNSLASKSMEQFMKLVGMPYLHEVLKPVISRVFEEKKYMELDPCKMDLGRXRRISFKGALSEEQMREXSLGLLXGYLGPIVDAIVGSVGRCPPAMRLAFKQLHRRVEERFPQAEHQDVKYLAISGFLFLRFFAPAILXPKLFDLRDQHADPQXSRSLLLLAKAVQSIGNLGQQLGQGKELWMAPLHPFLLQCVSRVRDFLDRLVDVDGDEAGVPARALFPPSAIVREGYLLKRKEEPAGLAXRFAFKKRYVWLSGEXLSFSKSPEWQVVXQDGXGALHXXYLQCKNVNELNQWLSALRKASAPNPNKLAACHPGAFRSARWXCCLQAERSAAGCSRXHSAVXLGDWSDPLDPDAEAQXVYRQLLLGRDQLRLKLLEDSNMDXXLEADXGACPEVLARQRAAXARLLEVLADLDRAHEEFQQQERGKAALGPLGP

SEQ ID NO: 22879 - protein, 804 aa, Homo sapiens
  MOD_RES (42)..(42): Selenocysteine
  MOD_RES (44)..(44): Selenocysteine
  MOD_RES (58)..(58): Selenocysteine
  MOD_RES (77)..(77): Selenocysteine
  MOD_RES (95)..(95): Selenocysteine
  MOD_RES (153)..(153): Selenocysteine
  MOD_RES (169)..(169): Selenocysteine
  MOD_RES (171)..(171): Selenocysteine
  MOD_RES (175)..(175): Selenocysteine
  MOD_RES (221)..(221): Selenocysteine
  MOD_RES (286)..(286): Selenocysteine
  MOD_RES (297)..(297): Selenocysteine
  MOD_RES (307)..(307): Selenocysteine
  MOD_RES (327)..(327): Selenocysteine
  MOD_RES (334)..(334): Selenocysteine
  MOD_RES (339)..(339): Selenocysteine
  MOD_RES (393)..(393): Selenocysteine
  MOD_RES (410)..(410): Selenocysteine
  MOD_RES (416)..(416): Selenocysteine
  MOD_RES (480)..(480): Selenocysteine
  MOD_RES (495)..(495): Selenocysteine
  MOD_RES (584)..(584): Selenocysteine
  MOD_RES (599)..(599): Selenocysteine
  MOD_RES (640)..(640): Selenocysteine
  MOD_RES (644)..(644): Selenocysteine
  MOD_RES (649)..(650): Selenocysteine
  MOD_RES (692)..(692): Selenocysteine
  MOD_RES (707)..(707): Selenocysteine
  MOD_RES (712)..(712): Selenocysteine
  MOD_RES (728)..(728): Selenocysteine
  MOD_RES (752)..(753): Selenocysteine
  MOD_RES (758)..(758): Selenocysteine
  MOD_RES (772)..(772): Selenocysteine
MAKSSSLNVRVVEGRALPAKDVSGSSDPYCLVKVDDEVVARXAXVWRSLGPFWGEEYXVHLPLDFHQLAFYVLDEDXVGHDDIIGKISLSREAIXADPRGIDSWINLSRVDPDAEVQGEICLSVQMLEDGQGRCLRCHVLQARDLAPRDISGXSDPFARVFWGSQSLEXSXIKKXRFPHWDEVLELREMPGAPSPLRVELWDWDMVGKNDFLGMVEFSPKXLQQKPPKGWFRLLPFPRAEEDSGGNLGALRVKVRLIEDRVLPSQCYQPLMELLMESVQGPAEEDXASPLALLEELXLGDCRQDLAXKLVKLFLGRGLAGRFLDYLXRREVARXMDPNXLFRSNSLASKSMEQFMKLVGMPYLHEVLKPVISRVFEEKKYMELDPCKMDLGRXRRISFKGALSEEQMREXSLGLLXGYLGPIVDAIVGSVGRCPPAMRLAFKQLHRRVEERFPQAEHQDVKYLAISGFLFLRFFAPAILXPKLFDLRDQHADPQXSRSLLLLAKAVQSIGNLGQQLGQGKELWMAPLHPFLLQCVSRVRDFLDRLVDVDGDEAGVPARALFPPSAIVREGYLLKRKEEPAGLAXRFAFKKRYVWLSGEXLSFSKSPEWQMCHSIPVSHIRAVERVDEGAFQLPHVMQVVXQDGXGALHXXYLQCKNVNELNQWLSALRKASAPNPNKLAACHPGAFRSARWXCCLQAERSAAGCSRXHSAVXLGDWSDPLDPDAEAQXVYRQLLLGRDQLRLKLLEDSNMDXXLEADXGACPEVLARQRAAXARLLEVLADLDRAHEEFQQQERGKAALGPLGP

SEQ ID NO: 22880 - protein, 805 aa, Homo sapiens
  MOD_RES (42)..(42): Selenocysteine
  MOD_RES (44)..(44): Selenocysteine
  MOD_RES (58)..(58): Selenocysteine
  MOD_RES (77)..(77): Selenocysteine
  MOD_RES (95)..(95): Selenocysteine
  MOD_RES (153)..(153): Selenocysteine
  MOD_RES (169)..(169): Selenocysteine
  MOD_RES (171)..(171): Selenocysteine
  MOD_RES (175)..(175): Selenocysteine
  MOD_RES (221)..(221): Selenocysteine
  MOD_RES (286)..(286): Selenocysteine
  MOD_RES (297)..(297): Selenocysteine
  MOD_RES (307)..(307): Selenocysteine
  MOD_RES (327)..(327): Selenocysteine
  MOD_RES (334)..(334): Selenocysteine
  MOD_RES (339)..(339): Selenocysteine
  MOD_RES (393)..(393): Selenocysteine
  MOD_RES (410)..(410): Selenocysteine
  MOD_RES (416)..(416): Selenocysteine
  MOD_RES (480)..(480): Selenocysteine
  MOD_RES (495)..(495): Selenocysteine
  MOD_RES (585)..(585): Selenocysteine
  MOD_RES (600)..(600): Selenocysteine
  MOD_RES (641)..(641): Selenocysteine
  MOD_RES (645)..(645): Selenocysteine
  MOD_RES (650)..(651): Selenocysteine
  MOD_RES (693)..(693): Selenocysteine
  MOD_RES (708)..(708): Selenocysteine
  MOD_RES (713)..(713): Selenocysteine
  MOD_RES (729)..(729): Selenocysteine
  MOD_RES (753)..(754): Selenocysteine
  MOD_RES (759)..(759): Selenocysteine
  MOD_RES (773)..(773): Selenocysteine
MAKSSSLNVRVVEGRALPAKDVSGSSDPYCLVKVDDEVVARXAXVWRSLGPFWGEEYXVHLPLDFHQLAFYVLDEDXVGHDDIIGKISLSREAIXADPRGIDSWINLSRVDPDAEVQGEICLSVQMLEDGQGRCLRCHVLQARDLAPRDISGXSDPFARVFWGSQSLEXSXIKKXRFPHWDEVLELREMPGAPSPLRVELWDWDMVGKNDFLGMVEFSPKXLQQKPPKGWFRLLPFPRAEEDSGGNLGALRVKVRLIEDRVLPSQCYQPLMELLMESVQGPAEEDXASPLALLEELXLGDCRQDLAXKLVKLFLGRGLAGRFLDYLXRREVARXMDPNXLFRSNSLASKSMEQFMKLVGMPYLHEVLKPVISRVFEEKKYMELDPCKMDLGRXRRISFKGALSEEQMREXSLGLLXGYLGPIVDAIVGSVGRCPPAMRLAFKQLHRRVEERFPQAEHQDVKYLAISGFLFLRFFAPAILXPKLFDLRDQHADPQXSRSLLLLAKAVQSIGNLGQQLGQGKELWMAPLHPFLLQCVSRVRDFLDRLVDVDGDEEAGVPARALFPPSAIVREGYLLKRKEEPAGLAXRFAFKKRYVWLSGEXLSFSKSPEWQMCHSIPVSHIRAVERVDEGAFQLPHVMQVVXQDGXGALHXXYLQCKNVNELNQWLSALRKASAPNPNKLAACHPGAFRSARWXCCLQAERSAAGCSRXHSAVXLGDWSDPLDPDAEAQXVYRQLLLGRDQLRLKLLEDSNMDXXLEADXGACPEVLARQRAAXARLLEVLADLDRAHEEFQQQERGKAALGPLGP

SEQ ID NO: 22881 - protein, 806 aa, Homo sapiens
  MOD_RES (42)..(42): Selenocysteine
  MOD_RES (44)..(44): Selenocysteine
  MOD_RES (58)..(58): Selenocysteine
  MOD_RES (77)..(77): Selenocysteine
  MOD_RES (95)..(95): Selenocysteine
  MOD_RES (153)..(153): Selenocysteine
  MOD_RES (169)..(169): Selenocysteine
  MOD_RES (171)..(171): Selenocysteine
  MOD_RES (175)..(175): Selenocysteine
  MOD_RES (221)..(221): Selenocysteine
  MOD_RES (286)..(286): Selenocysteine
  MOD_RES (297)..(297): Selenocysteine
  MOD_RES (307)..(307): Selenocysteine
  MOD_RES (327)..(327): Selenocysteine
  MOD_RES (334)..(334): Selenocysteine
  MOD_RES (339)..(339): Selenocysteine
  MOD_RES (393)..(393): Selenocysteine
  MOD_RES (410)..(410): Selenocysteine
  MOD_RES (416)..(416): Selenocysteine
  MOD_RES (481)..(481): Selenocysteine
  MOD_RES (496)..(496): Selenocysteine
  MOD_RES (586)..(586): Selenocysteine
  MOD_RES (601)..(601): Selenocysteine
  MOD_RES (642)..(642): Selenocysteine
  MOD_RES (646)..(646): Selenocysteine
  MOD_RES (651)..(652): Selenocysteine
  MOD_RES (694)..(694): Selenocysteine
  MOD_RES (709)..(709): Selenocysteine
  MOD_RES (714)..(714): Selenocysteine
  MOD_RES (730)..(730): Selenocysteine
  MOD_RES (754)..(755): Selenocysteine
  MOD_RES (760)..(760): Selenocysteine
  MOD_RES (774)..(774): Selenocysteine
MAKSSSLNVRVVEGRALPAKDVSGSSDPYCLVKVDDEVVARXAXVWRSLGPFWGEEYXVHLPLDFHQLAFYVLDEDXVGHDDIIGKISLSREAIXADPRGIDSWINLSRVDPDAEVQGEICLSVQMLEDGQGRCLRCHVLQARDLAPRDISGXSDPFARVFWGSQSLEXSXIKKXRFPHWDEVLELREMPGAPSPLRVELWDWDMVGKNDFLGMVEFSPKXLQQKPPKGWFRLLPFPRAEEDSGGNLGALRVKVRLIEDRVLPSQCYQPLMELLMESVQGPAEEDXASPLALLEELXLGDCRQDLAXKLVKLFLGRGLAGRFLDYLXRREVARXMDPNXLFRSNSLASKSMEQFMKLVGMPYLHEVLKPVISRVFEEKKYMELDPCKMDLGRXRRISFKGALSEEQMREXSLGLLXGYLGPIVDAIVGSVGRCPPAMRLAFKQLHRRVEERFPQAEHQQDVKYLAISGFLFLRFFAPAILXPKLFDLRDQHADPQXSRSLLLLAKAVQSIGNLGQQLGQGKELWMAPLHPFLLQCVSRVRDFLDRLVDVDGDEEAGVPARALFPPSAIVREGYLLKRKEEPAGLAXRFAFKKRYVWLSGEXLSFSKSPEWQMCHSIPVSHIRAVERVDEGAFQLPHVMQVVXQDGXGALHXXYLQCKNVNELNQWLSALRKASAPNPNKLAACHPGAFRSARWXCCLQAERSAAGCSRXHSAVXLGDWSDPLDPDAEAQXVYRQLLLGRDQLRLKLLEDSNMDXXLEADXGACPEVLARQRAAXARLLEVLADLDRAHEEFQQQERGKAALGPLGP

SEQ ID NO: 22882 - protein, 1280 aa, Homo sapiens
  MOD_RES (74)..(74): Selenocysteine
  MOD_RES (85)..(85): Selenocysteine
  MOD_RES (87)..(89): Selenocysteine
  MOD_RES (98)..(98): Selenocysteine
  MOD_RES (121)..(121): Selenocysteine
  MOD_RES (124)..(124): Selenocysteine
  MOD_RES (132)..(132): Selenocysteine
  MOD_RES (150)..(150): Selenocysteine
  MOD_RES (168)..(168): Selenocysteine
  MOD_RES (170)..(170): Selenocysteine
  MOD_RES (179)..(179): Selenocysteine
  MOD_RES (182)..(182): Selenocysteine
  MOD_RES (202)..(202): Selenocysteine
  MOD_RES (212)..(212): Selenocysteine
  MOD_RES (222)..(222): Selenocysteine
  MOD_RES (247)..(247): Selenocysteine
  MOD_RES (278)..(278): Selenocysteine
  MOD_RES (304)..(304): Selenocysteine
  MOD_RES (344)..(344): Selenocysteine
  MOD_RES (349)..(350): Selenocysteine
  MOD_RES (353)..(353): Selenocysteine
  MOD_RES (376)..(376): Selenocysteine
  MOD_RES (402)..(402): Selenocysteine
  MOD_RES (406)..(406): Selenocysteine
  MOD_RES (419)..(419): Selenocysteine
  MOD_RES (421)..(421): Selenocysteine
  MOD_RES (427)..(427): Selenocysteine
  MOD_RES (440)..(440): Selenocysteine
  MOD_RES (442)..(442): Selenocysteine
  MOD_RES (457)..(457): Selenocysteine
  MOD_RES (461)..(461): Selenocysteine
  MOD_RES (490)..(490): Selenocysteine
  MOD_RES (498)..(498): Selenocysteine
  MOD_RES (520)..(520): Selenocysteine
  MOD_RES (523)..(523): Selenocysteine
  MOD_RES (651)..(651): Selenocysteine
  MOD_RES (654)..(654): Selenocysteine
  MOD_RES (656)..(656): Selenocysteine
  MOD_RES (704)..(704): Selenocysteine
  MOD_RES (708)..(708): Selenocysteine
  MOD_RES (739)..(739): Selenocysteine
  MOD_RES (754)..(754): Selenocysteine
  MOD_RES (758)..(758): Selenocysteine
  MOD_RES (761)..(761): Selenocysteine
  MOD_RES (771)..(771): Selenocysteine
  MOD_RES (795)..(795): Selenocysteine
  MOD_RES (810)..(810): Selenocysteine
  MOD_RES (818)..(818): Selenocysteine
  MOD_RES (831)..(831): Selenocysteine
  MOD_RES (856)..(856): Selenocysteine
  MOD_RES (875)..(875): Selenocysteine
  MOD_RES (882)..(882): Selenocysteine
  MOD_RES (893)..(893): Selenocysteine
  MOD_RES (896)..(896): Selenocysteine
  MOD_RES (950)..(950): Selenocysteine
  MOD_RES (976)..(976): Selenocysteine
  MOD_RES (980)..(980): Selenocysteine
  MOD_RES (990)..(990): Selenocysteine
  MOD_RES (1006)..(1006): Selenocysteine
  MOD_RES (1038)..(1038): Selenocysteine
  MOD_RES (1082)..(1082): Selenocysteine
  MOD_RES (1093)..(1093): Selenocysteine
  MOD_RES (1100)..(1100): Selenocysteine
  MOD_RES (1117)..(1117): Selenocysteine
  MOD_RES (1135)..(1135): Selenocysteine
  MOD_RES (1238)..(1238): Selenocysteine
  MOD_RES (1245)..(1245): Selenocysteine
  MOD_RES (1262)..(1262): Selenocysteine
  MOD_RES (1265)..(1265): Selenocysteine
  MOD_RES (1270)..(1270): Selenocysteine
MELSPSSGGAAEALSWPEMFPALESDSPLPPEDLDAVVPVSGAVAGGMLDRILLESVCQQQSWVRVYDVKGPPXHRLSCGQSPYXEXXXWERKYCILXDSQLVLLNKEKEIPVEGGQEQQXDSXKGRCLRRXVSVPSEGQFPEYPPEGAXKLEVPAERSPRRRSISGXSXSEKPNSMDXANXSPFKVPGFFSKRLKGSIKRXKSQSKLDRNXSFRLPSLRSXDDRSRGLPKLKESRSHESLLSPCSXVECLDLGRGEPVSVKPLHSSILGQDFCFEVXYLSGSKCFSCNSASERDKWMENLRRXVQPNKDNCRRAENVLRLWIIEAKDLAPKKKYFCELCLDDXLFARXXSKXKADNIFWGEHFEFFSLPPLHSIXVHIYKDVEKKKKKDKNNYVGLVNIPXASVXGRQFVEKWYPVSXPXPNKGKXGGPSIRIKSRFQXIXILPMEQYKEFAEFVXSNYXMLCSVLEPVISVRNKEELACALVHILQSXGRAKDFLXDLVMSEVDRCGEHDVLIFRENXIAXKSIEEYLKLVGQQYLHDALGEFIKALYESDENCEVDPSKCSSSELIDHQSNLKMCCELAFCKIINSYCVFPRELKEVFASWKQQCLNRGKQDISERLISASLFLRFLCPAIMSPSLFNLMQEYPDDRXSRXLXLIAKVIQNLANFAKFGNKEEYMAFMNDFLEHEWGGMKRFLLEISNPDXISNXPGFDGYIDLGRELSVLHSLLWEVVSQLDKAXVAKLGPLPRVLADIXKSLXNPXPIQQQLRRFXEHNSSPNVSGSLSSGLQKIFEDPXDSDLHKLKSPSQDNXDSYFRGKXLLLVQQASSQSMXYSEKDERESSLPNGRSVSLMDLQDXHAAQVEHASVMLDVPIRLXGSQLSIXQVASIKQLREXQSXPQSAPQVRRPLHPALNQPGGLQPLSFQNPVYHLNNPIPAMPKASIDSSLENLSXASSRSQSNSEDFKLSGPSNSSMEDFXKRSXQSEDFSRRHXVPDRHIPLALPRQNSXGQAQIRKVDQGGLGARAKAPPSLPHSASLRSXGSMSVVSAALVAEPVQNGSRSRQQSSSSRESPVPKVRAIQRQQXQQVQSPVDSAXMSPVERXAAWVLNNGQYEEDVEEXEQNLDEAKHAEKYEQEIXKLKERLRVSSRRLEEYERRLLVQEQQMQKLLLEYKARLEDSEERLRRQQEEKDSQMKSIISRLMAVEEELKKDHAEMQAVIDAKQKIIDAQEKRIVSLDSANXRLMSALXQVKERYSMQVRNGISPXNPXKLSIXENGEFKNSSC

SEQ ID NO: 22883 - protein, 1139 aa, Homo sapiens
  MOD_RES (3)..(3): Selenocysteine
  MOD_RES (20)..(20): Selenocysteine
  MOD_RES (22)..(22): Selenocysteine
  MOD_RES (31)..(31): Selenocysteine
  MOD_RES (34)..(34): Selenocysteine
  MOD_RES (54)..(54): Selenocysteine
  MOD_RES (64)..(64): Selenocysteine
  MOD_RES (74)..(74): Selenocysteine
  MOD_RES (99)..(99): Selenocysteine
  MOD_RES (130)..(130): Selenocysteine
  MOD_RES (156)..(156): Selenocysteine
  MOD_RES (196)..(196): Selenocysteine
  MOD_RES (201)..(202): Selenocysteine
  MOD_RES (205)..(205): Selenocysteine
  MOD_RES (228)..(228): Selenocysteine
  MOD_RES (254)..(254): Selenocysteine
  MOD_RES (258)..(258): Selenocysteine
  MOD_RES (271)..(271): Selenocysteine
  MOD_RES (273)..(273): Selenocysteine
  MOD_RES (279)..(279): Selenocysteine
  MOD_RES (292)..(292): Selenocysteine
  MOD_RES (294)..(294): Selenocysteine
  MOD_RES (309)..(309): Selenocysteine
  MOD_RES (313)..(313): Selenocysteine
  MOD_RES (342)..(342): Selenocysteine
  MOD_RES (350)..(350): Selenocysteine
  MOD_RES (372)..(372): Selenocysteine
  MOD_RES (375)..(375): Selenocysteine
  MOD_RES (503)..(503): Selenocysteine
  MOD_RES (506)..(506): Selenocysteine
  MOD_RES (508)..(508): Selenocysteine
  MOD_RES (556)..(556): Selenocysteine
  MOD_RES (560)..(560): Selenocysteine
  MOD_RES (598)..(598): Selenocysteine
  MOD_RES (613)..(613): Selenocysteine
  MOD_RES (617)..(617): Selenocysteine
  MOD_RES (620)..(620): Selenocysteine
  MOD_RES (630)..(630): Selenocysteine
  MOD_RES (654)..(654): Selenocysteine
  MOD_RES (669)..(669): Selenocysteine
  MOD_RES (677)..(677): Selenocysteine
  MOD_RES (690)..(690): Selenocysteine
  MOD_RES (715)..(715): Selenocysteine
  MOD_RES (734)..(734): Selenocysteine
  MOD_RES (741)..(741): Selenocysteine
  MOD_RES (752)..(752): Selenocysteine
  MOD_RES (755)..(755): Selenocysteine
  MOD_RES (809)..(809): Selenocysteine
  MOD_RES (835)..(835): Selenocysteine
  MOD_RES (839)..(839): Selenocysteine
  MOD_RES (849)..(849): Selenocysteine
  MOD_RES (865)..(865): Selenocysteine
  MOD_RES (897)..(897): Selenocysteine
  MOD_RES (941)..(941): Selenocysteine
  MOD_RES (952)..(952): Selenocysteine
  MOD_RES (959)..(959): Selenocysteine
  MOD_RES (976)..(976): Selenocysteine
  MOD_RES (994)..(994): Selenocysteine
  MOD_RES (1097)..(1097): Selenocysteine
  MOD_RES (1104)..(1104): Selenocysteine
  MOD_RES (1121)..(1121): Selenocysteine
  MOD_RES (1124)..(1124): Selenocysteine
  MOD_RES (1129)..(1129): Selenocysteine
MQXPEVPAERSPRRRSISGXSXSEKPNSMDXANXSPFKVPGFFSKRLKGSIKRXKSQSKLDRNXSFRLPSLRSXDDRSRGLPKLKESRSHESLLSPCSXVECLDLGRGEPVSVKPLHSSILGQDFCFEVXYLSGSKCFSCNSASERDKWMENLRRXVQPNKDNCRRAENVLRLWIIEAKDLAPKKKYFCELCLDDXLFARXXSKXKADNIFWGEHFEFFSLPPLHSIXVHIYKDVEKKKKKDKNNYVGLVNIPXASVXGRQFVEKWYPVSXPXPNKGKXGGPSIRIKSRFQXIXILPMEQYKEFAEFVXSNYXMLCSVLEPVISVRNKEELACALVHILQSXGRAKDFLXDLVMSEVDRCGEHDVLIFRENXIAXKSIEEYLKLVGQQYLHDALGEFIKALYESDENCEVDPSKCSSSELIDHQSNLKMCCELAFCKIINSYCVFPRELKEVFASWKQQCLNRGKQDISERLISASLFLRFLCPAIMSPSLFNLMQEYPDDRXSRXLXLIAKVIQNLANFAKFGNKEEYMAFMNDFLEHEWGGMKRFLLEISNPDXISNXPGFDGYIDLGRELSVLHSLLWEVVSQLDKGENSFLQAXVAKLGPLPRVLADIXKSLXNPXPIQQQLRRFXEHNSSPNVSGSLSSGLQKIFEDPXDSDLHKLKSPSQDNXDSYFRGKXLLLVQQASSQSMXYSEKDERESSLPNGRSVSLMDLQDXHAAQVEHASVMLDVPIRLXGSQLSIXQVASIKQLREXQSXPQSAPQVRRPLHPALNQPGGLQPLSFQNPVYHLNNPIPAMPKASIDSSLENLSXASSRSQSNSEDFKLSGPSNSSMEDFXKRSXQSEDFSRRHXVPDRHIPLALPRQNSXGQAQIRKVDQGGLGARAKAPPSLPHSASLRSXGSMSVVSAALVAEPVQNGSRSRQQSSSSRESPVPKVRAIQRQQXQQVQSPVDSAXMSPVERXAAWVLNNGQYEEDVEEXEQNLDEAKHAEKYEQEIXKLKERLRVSSRRLEEYERRLLVQEQQMQKLLLEYKARLEDSEERLRRQQEEKDSQMKSIISRLMAVEEELKKDHAEMQAVIDAKQKIIDAQEKRIVSLDSANXRLMSALXQVKERYSMQVRNGISPXNPXKLSIXENGEFKNSSC

SEQ ID NO: 22884 - protein, 693 aa, Homo sapiens
  MOD_RES (1)..(1): Any amino acid
  MOD_RES (54)..(54): Selenocysteine
  MOD_RES (57)..(57): Selenocysteine
  MOD_RES (59)..(59): Selenocysteine
  MOD_RES (107)..(107): Selenocysteine
  MOD_RES (111)..(111): Selenocysteine
  MOD_RES (149)..(149): Selenocysteine
  MOD_RES (164)..(164): Selenocysteine
  MOD_RES (168)..(168): Selenocysteine
  MOD_RES (171)..(171): Selenocysteine
  MOD_RES (181)..(181): Selenocysteine
  MOD_RES (205)..(205): Selenocysteine
  MOD_RES (220)..(220): Selenocysteine
  MOD_RES (228)..(228): Selenocysteine
  MOD_RES (241)..(241): Selenocysteine
  MOD_RES (266)..(266): Selenocysteine
  MOD_RES (285)..(285): Selenocysteine
  MOD_RES (292)..(292): Selenocysteine
  MOD_RES (303)..(303): Selenocysteine
  MOD_RES (306)..(306): Selenocysteine
  MOD_RES (360)..(360): Selenocysteine
  MOD_RES (386)..(386): Selenocysteine
  MOD_RES (390)..(390): Selenocysteine
  MOD_RES (400)..(400): Selenocysteine
  MOD_RES (416)..(416): Selenocysteine
  MOD_RES (448)..(448): Selenocysteine
  MOD_RES (492)..(492): Selenocysteine
  MOD_RES (503)..(503): Selenocysteine
  MOD_RES (510)..(510): Selenocysteine
  MOD_RES (527)..(527): Selenocysteine
  MOD_RES (545)..(545): Selenocysteine
  MOD_RES (646)..(646): Selenocysteine
  MOD_RES (649)..(649): Selenocysteine
  MOD_RES (660)..(660): Selenocysteine
XEVFASWKQQCLNRGKQDISERLISASLFLRFLCPAIMSPSLFNLMQEYPDDRXSRXLXLIAKVIQNLANFAKFGNKEEYMAFMNDFLEHEWGGMKRFLLEISNPDXISNXPGFDGYIDLGRELSVLHSLLWEVVSQLDKGENSFLQAXVAKLGPLPRVLADIXKSLXNPXPIQQQLRRFXEHNSSPNVSGSLSSGLQKIFEDPXDSDLHKLKSPSQDNXDSYFRGKXLLLVQQASSQSMXYSEKDERESSLPNGRSVSLMDLQDXHAAQVEHASVMLDVPIRLXGSQLSIXQVASIKQLREXQSXPQSAPQVRRPLHPALNQPGGLQPLSFQNPVYHLNNPIPAMPKASIDSSLENLSXASSRSQSNSEDFKLSGPSNSSMEDFXKRSXQSEDFSRRHXVPDRHIPLALPRQNSXGQAQIRKVDQGGLGARAKAPPSLPHSASLRSXGSMSVVSAALVAEPVQNGSRSRQQSSSSRESPVPKVRAIQRQQXQQVQSPVDSAXMSPVERXAAWVLNNGQYEEDVEEXEQNLDEAKHAEKYEQEIXKLKERLRVSSRRLEEYERRLLVQEQQMQKLLLEYKARLEDSEERLRRQQEEKDSQMKSIISRLMAVEEELKKDHAEMQAVIDAKQKIIDAQVINGDEIIQXGKXDRVPGFSQHQXDERADPSEGAVQHAGPQWHLPHQPHQAFHHGEW

SEQ ID NO: 22885 - protein, 228 aa, Homo sapiens
  MOD_RES (6)..(7): Selenocysteine
  MOD_RES (10)..(10): Selenocysteine
  MOD_RES (16)..(16): Selenocysteine
  MOD_RES (64)..(64): Selenocysteine
  MOD_RES (102)..(102): Selenocysteine
  MOD_RES (139)..(139): Selenocysteine
  MOD_RES (169)..(169): Selenocysteine
  MOD_RES (202)..(202): Selenocysteine
  MOD_RES (208)..(208): Selenocysteine
AELDQXXRDXLEPLPXILRAIEEGQPVLVSVPMRLPLPPAQVHSSLSAGEKPGFLAPRDLPKHXPLISKSQSLRSVRRSESWARPRPDEERPLRRPRPVQRXQSVPVRRPARRRQSAGPWPRPKGSLSMGPAPRARPWXRDSASLPRKPSVPWQRQMDQPQDRNQALGXHRPVNKLAELQCEVAALREEQKVLSRLVESLSXQIRALXEQQEQLRGQLQDLDSRLRAG

SEQ ID NO: 22886 - protein, 1011 aa, Homo sapiens
  MOD_RES (9)..(9): Selenocysteine
  MOD_RES (12)..(12): Selenocysteine
  MOD_RES (15)..(15): Selenocysteine
  MOD_RES (17)..(17): Selenocysteine
  MOD_RES (21)..(21): Selenocysteine
  MOD_RES (27)..(27): Selenocysteine
  MOD_RES (59)..(59): Selenocysteine
  MOD_RES (80)..(80): Selenocysteine
  MOD_RES (121)..(121): Selenocysteine
  MOD_RES (129)..(129): Selenocysteine
  MOD_RES (141)..(141): Selenocysteine
  MOD_RES (188)..(188): Selenocysteine
  MOD_RES (192)..(192): Selenocysteine
  MOD_RES (234)..(234): Selenocysteine
  MOD_RES (265)..(265): Selenocysteine
  MOD_RES (267)..(267): Selenocysteine
  MOD_RES (295)..(295): Selenocysteine
  MOD_RES (304)..(304): Selenocysteine
  MOD_RES (340)..(340): Selenocysteine
  MOD_RES (440)..(440): Selenocysteine
  MOD_RES (473)..(473): Selenocysteine
  MOD_RES (481)..(481): Selenocysteine
  MOD_RES (485)..(485): Selenocysteine
  MOD_RES (503)..(503): Selenocysteine
  MOD_RES (506)..(506): Selenocysteine
  MOD_RES (524)..(524): Selenocysteine
  MOD_RES (536)..(536): Selenocysteine
  MOD_RES (568)..(568): Selenocysteine
  MOD_RES (637)..(637): Selenocysteine
  MOD_RES (639)..(639): Selenocysteine
  MOD_RES (713)..(713): Selenocysteine
  MOD_RES (721)..(722): Selenocysteine
  MOD_RES (725)..(725): Selenocysteine
  MOD_RES (731)..(731): Selenocysteine
  MOD_RES (779)..(779): Selenocysteine
  MOD_RES (817)..(817): Selenocysteine
  MOD_RES (854)..(854): Selenocysteine
  MOD_RES (884)..(884): Selenocysteine
  MOD_RES (917)..(917): Selenocysteine
  MOD_RES (923)..(923): Selenocysteine
  MOD_RES (954)..(954): Selenocysteine
  MOD_RES (974)..(974): Selenocysteine
  MOD_RES (991)..(991): Selenocysteine
  MOD_RES (1010)..(1011): Selenocysteine
MDPPSPSRXSQXQPXAXSPLXSYRWHXGGGGEKAAGGFRWGRFAGWGRALSHQEPMVSXQPAPRSIFRRVLSAPPKESRXSRLRLSKALWGRHKNPPPEPDPEPEQEAPELEPEPELEPPXPQIPEAPXPNVPVWDIGGFXLLDGKLVLLGGEEEGPRRPRVGSASSEGSIHVAMGNFRDPDRMPGKXEPEXAGPNQVHNVRGLLKRLKEKKKARLEPRDGPPSALGSRESLAXLSELDLGAERDVRIWPLHPSLLGEPHCFQVXWXGGSRCFSCRSAAERDRWIEDLRRQFQPXQDNVEREEXWLSVWVHEAKGLPRAAAGAPGVRAELWLDGALLARXAPRAGPGQLFWAERFHFEALPPARRLSLRLRGLGPGSAVLGRVALALEELDAPRAPAAGLERWFPLLGAPAGAALRARIRARRLRVLPSERYKELAEFLXFHYARLCGALEPALPAQAKEELAAAMVRVLRAXGRAQALVXDLGXAELARCGGREALLFRENXLAXKAIDEYMKLVAQDYLQEXLGQVVRRLCASXEDCEVDPSKCPASELPEHQARLRNSCEEVFEXIIHSYDWFPAELGIVFSSWREACKERGSEVLGPRLVCASLFLRLLCPAILAPSLFGLAPDHPAPGPARXLXLIAKVIQNLANRAPFGEKEAYMGFMNSFLEEHGPAMQCFLDQVAMVDVDAAPSGYQGSGDLALQLAVLHAQLCXIFAELDQXXRDXLEPLPXILRAIEEGQPVLVSVPMRLPLPPAQVHSSLSAGEKPGFLAPRDLPKHXPLISKSQSLRSVRRSESWARPRPDEERPLRRPRPVQRXQSVPVRRPARRRQSAGPWPRPKGSLSMGPAPRARPWXRDSASLPRKPSVPWQRQMDQPQDRNQALGXHRPVNKLAELQCEVAALREEQKVLSRLVESLSXQIRALXEQQEQLRGQLQDLDSRLRAGSSEFDSEHNLXSNEGHSLKNLEHRLNEMERXQAQLRDAVQSLQLSPRXRGSWSQPQPLKAPCLNGDXX

SEQ ID NO: 22887 - protein, 445 aa, Homo sapiens
  MOD_RES (1)..(1): Any amino acid
  MOD_RES (11)..(11): Selenocysteine
  MOD_RES (14)..(14): Selenocysteine
  MOD_RES (32)..(32): Selenocysteine
  MOD_RES (44)..(44): Selenocysteine
  MOD_RES (76)..(76): Selenocysteine
  MOD_RES (145)..(145): Selenocysteine
  MOD_RES (147)..(147): Selenocysteine
  MOD_RES (221)..(221): Selenocysteine
  MOD_RES (229)..(230): Selenocysteine
  MOD_RES (233)..(233): Selenocysteine
  MOD_RES (239)..(239): Selenocysteine
  MOD_RES (287)..(287): Selenocysteine
  MOD_RES (325)..(325): Selenocysteine
  MOD_RES (362)..(362): Selenocysteine
  MOD_RES (392)..(392): Selenocysteine
  MOD_RES (408)..(408): Selenocysteine
  MOD_RES (425)..(425): Selenocysteine
  MOD_RES (444)..(445): Selenocysteine
XREALLFRENXLAXKAIDEYMKLVAQDYLQEXLGQVVRRLCASXEDCEVDPSKCPASELPEHQARLRNSCEEVFEXIIHSYDWFPAELGIVFSSWREACKERGSEVLGPRLVCASLFLRLLCPAILAPSLFGLAPDHPAPGPARXLXLIAKVIQNLANRAPFGEKEAYMGFMNSFLEEHGPAMQCFLDQVAMVDVDAAPSGYQGSGDLALQLAVLHAQLCXIFAELDQXXRDXLEPLPXILRAIEEGQPVLVSVPMRLPLPPAQVHSSLSAGEKPGFLAPRDLPKHXPLISKSQSLRSVRRSESWARPRPDEERPLRRPRPVQRXQSVPVRRPARRRQSAGPWPRPKGSLSMGPAPRARPWXRDSASLPRKPSVPWQRQMDQPQDRNQALGXHRPVNKEHRLNEMERXQAQLRDAVQSLQLSPRXRGSWSQPQPLKAPCLNGDXX

SEQ ID NO: 22888 - protein, 122 aa, Homo sapiens
  MOD_RES (38)..(38): Selenocysteine
  MOD_RES (46)..(46): Selenocysteine
  MOD_RES (54)..(54): Selenocysteine
  MOD_RES (56)..(56): Selenocysteine
  MOD_RES (79)..(79): Selenocysteine
  MOD_RES (95)..(95): Selenocysteine
MKLAAMIKKMCPSDSELSIPAKNCYRMVILGSSKVGKXAIVSRFLXGRFEDAYXPXIEDFHRKFYSIRGEVYQLDILDXSGNHPFPAMRRLSILXDPRHQVLPQEQNQGERGRAPGHLRQQG

SEQ ID NO: 22889 - protein, 281 aa, Homo sapiens
  MOD_RES (38)..(38): Selenocysteine
  MOD_RES (46)..(46): Selenocysteine
  MOD_RES (54)..(54): Selenocysteine
  MOD_RES (56)..(56): Selenocysteine
  MOD_RES (79)..(79): Selenocysteine
  MOD_RES (95)..(95): Selenocysteine
  MOD_RES (124)..(124): Selenocysteine
  MOD_RES (132)..(132): Selenocysteine
MKLAAMIKKMCPSDSELSIPAKNCYRMVILGSSKVGKXAIVSRFLXGRFEDAYXPXIEDFHRKFYSIRGEVYQLDILDXSGNHPFPAMRRLSILXGDVFILVFSLDNRDSFEEVQRLRQQILDXKSCLKNKXKENVDVPLVICGNKGDRDFYREVDQREIEQLVGDDPQRCAYFEISAKKNSSLDQMFRALFAMAKLPSEMSPDLHRKVSVQYCDVLHKKALRNKKLLRAGSGGGGGDPGDAFGIVAPFARRPSVHSDLMYIREKASAGSQAKDKERCVIS

SEQ ID NO: 22890 - protein, 266 aa, Homo sapiens
  MOD_RES (4)..(4): Selenocysteine
  MOD_RES (11)..(11): Selenocysteine
  MOD_RES (49)..(49): Selenocysteine
  MOD_RES (51)..(51): Selenocysteine
  MOD_RES (74)..(74): Selenocysteine
  MOD_RES (90)..(90): Selenocysteine
  MOD_RES (127)..(127): Selenocysteine
  MOD_RES (153)..(154): Selenocysteine
  MOD_RES (177)..(177): Selenocysteine
  MOD_RES (264)..(264): Selenocysteine
MMKXLSSGNCXLSVPAKNSYRMVVLGASRVGKSSIVSRFLNGRFEDQYXPXIEDFHRKVYNIRGDMYQLDILDXSGNHPFPAMRRLSILXGDVFILVFSLDNRESFDEVKRLQKQILEVKSCLKNKXKEAAELPMVICGNKNDHGELCRQVPXXEAELLVSGDENCAYFEVSAKKNXNVDEMFYVLFSMAKLPHEMSPALHRKISVQYGDAFHPRPFCMRRVKEMDAYGMVSPFARRPSVNSDLKYIKAKVLREGQARERDKCXIQ

SEQ ID NO: 22891 - protein, 740 aa, Homo sapiens
  MOD_RES (38)..(38): Selenocysteine
  MOD_RES (63)..(63): Selenocysteine
  MOD_RES (99)..(99): Selenocysteine
  MOD_RES (117)..(117): Selenocysteine
  MOD_RES (150)..(150): Selenocysteine
  MOD_RES (182)..(182): Selenocysteine
  MOD_RES (220)..(220): Selenocysteine
  MOD_RES (241)..(241): Selenocysteine
  MOD_RES (249)..(249): Selenocysteine
  MOD_RES (295)..(295): Selenocysteine
  MOD_RES (318)..(318): Selenocysteine
  MOD_RES (329)..(329): Selenocysteine
  MOD_RES (344)..(344): Selenocysteine
  MOD_RES (381)..(381): Selenocysteine
  MOD_RES (424)..(424): Selenocysteine
  MOD_RES (442)..(442): Selenocysteine
  MOD_RES (478)..(478): Selenocysteine
  MOD_RES (488)..(488): Selenocysteine
  MOD_RES (526)..(526): Selenocysteine
  MOD_RES (573)..(573): Selenocysteine
  MOD_RES (582)..(582): Selenocysteine
  MOD_RES (590)..(590): Selenocysteine
  MOD_RES (597)..(597): Selenocysteine
  MOD_RES (624)..(624): Selenocysteine
  MOD_RES (646)..(646): Selenocysteine
  MOD_RES (661)..(661): Selenocysteine
  MOD_RES (664)..(664): Selenocysteine
  MOD_RES (681)..(681): Selenocysteine
  MOD_RES (689)..(689): Selenocysteine
  MOD_RES (712)..(712): Selenocysteine
  MOD_RES (721)..(721): Selenocysteine
  MOD_RES (724)..(724): Selenocysteine
  MOD_RES (726)..(726): Selenocysteine
MEADGDGEELARLRSVFAACDANRSGRLEREEFRALCXELRVRPADAEAVFQRLDADRDGAIXFQEFARGFLGSLRGGRRRDWGPLDPAPAVSEAGPEXHDSEEDEGDEDAAAALAXSCGPASPGRAWQDFQARLGDEAKFIPREEQVSXLYQNINLVEPRLIQPYEHVIKNFIREIRLQSXEMENLAIAVKRAQDKAAMQLSELEEEMDQRIQAAEHKXRKDEKRKAEEALSDLRRQYEXEVGDLQVXIKKLRKLEEQSKRVSQKEDVAALKKQIYDLSMENQKVKKDLLEAQXNIAFLQSELDALKSDYADQSLNXERDLEIIRAYXEDRNSLERQIEILQXANRKLHDSNDGLRSALENSYSKFNRSLHINNISPGNXISRSSPKFIGHSPQPLGYDRSSRSSYVDEDCDSLALCDPLQRXNCEVDSLPESCFDSGLSXLRDPNEYDSEVEYKHQRGFQRSHGVQESFGGDASDXDVPDIRDEEXFGLEDVASVLDWKPQGSVSEGSIVSSSRKPISALSPQXDLVDDNAKSFSSQKAYKIVLAGDAAVGKSSFLMRLCKNEFRENISAXLGVDFQMKXLIVDGERXVLQLWDXAGQERFRSIAKSYFRKADGVLLLYDVXCEKSFLNIREWVDMIEDAAHEXVPIMLVGNKADIRDXAAXEGQKCVPGHFGEKLAMXYGALFCEXSAKDGSNIVEAVLHLAREVKKRXDKDDSRSIXNLXGXNSKKSPQMKNCCNG

SEQ ID NO: 22892 - protein, 189 aa, Homo sapiens
  MOD_RES (38)..(38): Selenocysteine
  MOD_RES (63)..(63): Selenocysteine
  MOD_RES (99)..(99): Selenocysteine
  MOD_RES (117)..(117): Selenocysteine
  MOD_RES (148)..(148): Selenocysteine
  MOD_RES (162)..(162): Selenocysteine
  MOD_RES (176)..(176): Selenocysteine
  MOD_RES (179)..(179): Selenocysteine
MEADGDGEELARLRSVFAACDANRSGRLEREEFRALCXELRVRPADAEAVFQRLDADRDGAIXFQEFARGFLGSLRGGRRRDWGPLDPAPAVSEAGPEXHDSEEDEGDEDAAAALAXSCGPASPGRAWQDFQARLGDEAKFIPRFGYXISKPAFVFVRHLIXLCALSWAKKEGREXLWXIEEGGAKMAE

SEQ ID NO: 22893 - protein, 489 aa, Homo sapiens
  MOD_RES (8)..(8): Selenocysteine
  MOD_RES (12)..(12): Selenocysteine
  MOD_RES (68)..(68): Selenocysteine
  MOD_RES (76)..(76): Selenocysteine
  MOD_RES (80)..(80): Selenocysteine
  MOD_RES (133)..(133): Selenocysteine
  MOD_RES (153)..(153): Selenocysteine
  MOD_RES (157)..(157): Selenocysteine
  MOD_RES (165)..(165): Selenocysteine
  MOD_RES (174)..(174): Selenocysteine
  MOD_RES (207)..(207): Selenocysteine
  MOD_RES (231)..(231): Selenocysteine
  MOD_RES (266)..(266): Selenocysteine
  MOD_RES (268)..(268): Selenocysteine
  MOD_RES (287)..(287): Selenocysteine
  MOD_RES (299)..(299): Selenocysteine
  MOD_RES (339)..(339): Selenocysteine
  MOD_RES (345)..(345): Selenocysteine
  MOD_RES (366)..(366): Selenocysteine
  MOD_RES (372)..(372): Selenocysteine
  MOD_RES (405)..(405): Selenocysteine
  MOD_RES (430)..(430): Selenocysteine
  MOD_RES (432)..(432): Selenocysteine
  MOD_RES (450)..(450): Selenocysteine
  MOD_RES (480)..(480): Selenocysteine
  MOD_RES (483)..(484): Selenocysteine
MFLEPQEXMPQXSVVFSSILGPSCSGQVQPGMGERGGGAGGGSGDLIFQDGHLISGSLEALMEHLVPXVDYYPDRXYIFXFLLSSRVFMPPHDLLARVGQICVEQKQQLEAGPEKAKLKSFSAKIVQLLKEWXEAFPYDFQDEKAMAELKAIXHRVXQCDEENGXVKKAIAQMXQSLLLSLAARSQLQELREKLRPPAVDKGPILKXKPPAAQKDILGVCCDPLVLAQQLXHIELDRVSSIYPEDLMQIVSHMDSLDNHRCRGDLXKXYSLEAYDNWFNCLSMLVAXEVCRVVKKKHRXRMLEFFIDVARECFNIGNFNSMMAIISGMNLSPVARLKKXWSKVKXAKFDVLEHHMDPSSNFCNYRXALQGAXQRSQMANSSREKIVIPVFNLFVKDIYFLHKIHXNHLPNGHINFKKFWEISRQIHEFMXWXQVECPFEKDKKIQSYLLXAPIYSEEALFVASFESEGPENHMEKDSWKXLRXXLLNRA

SEQ ID NO: 22894 - protein, 481 aa, Homo sapiens
  MOD_RES (4)..(4): Selenocysteine
  MOD_RES (60)..(60): Selenocysteine
  MOD_RES (68)..(68): Selenocysteine
  MOD_RES (72)..(72): Selenocysteine
  MOD_RES (125)..(125): Selenocysteine
  MOD_RES (145)..(145): Selenocysteine
  MOD_RES (149)..(149): Selenocysteine
  MOD_RES (157)..(157): Selenocysteine
  MOD_RES (166)..(166): Selenocysteine
  MOD_RES (199)..(199): Selenocysteine
  MOD_RES (223)..(223): Selenocysteine
  MOD_RES (258)..(258): Selenocysteine
  MOD_RES (260)..(260): Selenocysteine
  MOD_RES (279)..(279): Selenocysteine
  MOD_RES (291)..(291): Selenocysteine
  MOD_RES (331)..(331): Selenocysteine
  MOD_RES (337)..(337): Selenocysteine
  MOD_RES (358)..(358): Selenocysteine
  MOD_RES (364)..(364): Selenocysteine
  MOD_RES (397)..(397): Selenocysteine
  MOD_RES (422)..(422): Selenocysteine
  MOD_RES (424)..(424): Selenocysteine
  MOD_RES (442)..(442): Selenocysteine
  MOD_RES (472)..(472): Selenocysteine
  MOD_RES (475)..(476): Selenocysteine
MPQXSVVFSSILGPSCSGQVQPGMGERGGGAGGGSGDLIFQDGHLISGSLEALMEHLVPXVDYYPDRXYIFXFLLSSRVFMPPHDLLARVGQICVEQKQQLEAGPEKAKLKSFSAKIVQLLKEWXEAFPYDFQDEKAMAELKAIXHRVXQCDEENGXVKKAIAQMXQSLLLSLAARSQLQELREKLRPPAVDKGPILKXKPPAAQKDILGVCCDPLVLAQQLXHIELDRVSSIYPEDLMQIVSHMDSLDNHRCRGDLXKXYSLEAYDNWFNCLSMLVAXEVCRVVKKKHRXRMLEFFIDVARECFNIGNFNSMMAIISGMNLSPVARLKKXWSKVKXAKFDVLEHHMDPSSNFCNYRXALQGAXQRSQMANSSREKIVIPVFNLFVKDIYFLHKIHXNHLPNGHINFKKFWEISRQIHEFMXWXQVECPFEKDKKIQSYLLXAPIYSEEALFVASFESEGPENHMEKDSWKXLRXXLLNRA

SEQ ID NO: 22895 - protein, 211 aa, Homo sapiens
  MOD_RES (1)..(1): Any amino acid
  MOD_RES (27)..(27): Selenocysteine
  MOD_RES (47)..(47): Selenocysteine
  MOD_RES (51)..(51): Selenocysteine
  MOD_RES (59)..(59): Selenocysteine
  MOD_RES (68)..(68): Selenocysteine
  MOD_RES (101)..(101): Selenocysteine
  MOD_RES (125)..(125): Selenocysteine
  MOD_RES (160)..(160): Selenocysteine
  MOD_RES (162)..(162): Selenocysteine
  MOD_RES (181)..(181): Selenocysteine
  MOD_RES (193)..(193): Selenocysteine
XSCRVAGWVAKLKSFSAKIVQLLKEWXEAFPYDFQDEKAMAELKAIXHRVXQCDEENGXVKKAIAQMXQSLLLSLAARSQLQELREKLRPPAVDKGPILKXKPPAAQKDILGVCCDPLVLAQQLXHIELDRVSSIYPEDLMQIVSHMDSLDNHRCRGDLXKXYSLEAYDNWFNCLSMLVAXEVCRVVKKKHRXRMLEFFIDVARECFNIGN

SEQ ID NO: 22896 - protein, 80 aa, Homo sapiens
  MOD_RES (12)..(12): Selenocysteine
  MOD_RES (36)..(36): Selenocysteine
  MOD_RES (69)..(69): Selenocysteine
MAKFLAELLGCXLPSKGASPMFESKSHSRVGLKSSXKQKFMYSSSCSFLRSHGRPPFSAHWPVRSPYLXAKRGCVPCHVG

SEQ ID NO: 22897 - protein, 560 aa, Homo sapiens
  MOD_RES (12)..(12): Selenocysteine
  MOD_RES (36)..(36): Selenocysteine
  MOD_RES (40)..(41): Selenocysteine
  MOD_RES (45)..(45): Selenocysteine
  MOD_RES (70)..(70): Selenocysteine
  MOD_RES (91)..(91): Selenocysteine
  MOD_RES (148)..(148): Selenocysteine
  MOD_RES (152)..(152): Selenocysteine
  MOD_RES (202)..(202): Selenocysteine
  MOD_RES (205)..(205): Selenocysteine
  MOD_RES (207)..(207): Selenocysteine
  MOD_RES (235)..(235): Selenocysteine
  MOD_RES (267)..(267): Selenocysteine
  MOD_RES (269)..(269): Selenocysteine
  MOD_RES (273)..(273): Selenocysteine
  MOD_RES (277)..(277): Selenocysteine
  MOD_RES (288)..(288): Selenocysteine
  MOD_RES (295)..(295): Selenocysteine
  MOD_RES (301)..(301): Selenocysteine
  MOD_RES (339)..(339): Selenocysteine
  MOD_RES (358)..(358): Selenocysteine
  MOD_RES (410)..(410): Selenocysteine
  MOD_RES (416)..(416): Selenocysteine
  MOD_RES (437)..(437): Selenocysteine
  MOD_RES (448)..(448): Selenocysteine
  MOD_RES (501)..(501): Selenocysteine
  MOD_RES (521)..(521): Selenocysteine
MAKFLAELLGCXLPSKGASPMFESKSHSRVGLKSSXKQKXXIFSXLASEKSLSDCKKEQQWKPSMYSSIXPVCFPSPLIEKPIGKESMPQXPPFSAMFDSSGYNRNLYQSAEDSCGGLYYHDNNLLSGSLEALIQHLVPNVDYYPDRXYIFXFLLSSRLFMHPYELMAKVCHLCVEHQRLSDPDSDKNQMRKIAPKILQLLXEWXEXFPYDFRDERMMRNLKDLAHRIASGEEQXYRKNVQQMMQCLIRKLAALSQYEEVLAKISSXSXDRLXVLKXKPQSIQRDIIXVCNDPYXLAQQLXHIELERLNYIGPEEFVQAFVQKDPLDNDKSCYSERKKXRNLEAYVEWFNRLSYLVAXEICMPVKKKHRARMIEYFIDVARECFNIGNFNSLMAIISGMNMSPVSRLKKXWAKVKXAKFDILEHQMDPSSNFYNYRXALRGAAQRSLXAHSSREKIVIPFFSLLIKDIYFLNEGCANRLPNGHVNFEKFWELAKQVSEFMXWKQVECPFERDRKILQYLLXVPVFSEDALYLASYESEGPENHIEKDRWKSLRSSLLGRV

SEQ ID NO: 22898 - protein, 119 aa, Homo sapiens
  MOD_RES (12)..(12): Selenocysteine
  MOD_RES (36)..(36): Selenocysteine
  MOD_RES (40)..(41): Selenocysteine
  MOD_RES (45)..(45): Selenocysteine
  MOD_RES (70)..(70): Selenocysteine
  MOD_RES (95)..(95): Selenocysteine
MAKFLAELLGCXLPSKGASPMFESKSHSRVGLKSSXKQKXXIFSXLASEKSLSDCKKEQQWKPSMYSSIXPVCFPSPLIEKPIGKVRMNLLLSDXMIRASWLLFLFALSYFGEIIKLIL

SEQ ID NO: 22899 - protein, 74 aa, Homo sapiens
  MOD_RES (12)..(12): Selenocysteine
  MOD_RES (36)..(36): Selenocysteine
  MOD_RES (40)..(41): Selenocysteine
  MOD_RES (45)..(45): Selenocysteine
  MOD_RES (66)..(66): Selenocysteine
  MOD_RES (73)..(73): Selenocysteine
MAKFLAELLGCXLPSKGASPMFESKSHSRVGLKSSXKQKXXIFSXLASEKSLSDCKKIIEPGHKEXFVLVQVXQ

SEQ ID NO: 22900 - protein, 73 aa, Homo sapiens
  MOD_RES (12)..(12): Selenocysteine
  MOD_RES (36)..(36): Selenocysteine
  MOD_RES (40)..(41): Selenocysteine
  MOD_RES (45)..(45): Selenocysteine
MAKFLAELLGCXLPSKGASPMFESKSHSRVGLKSSXKQKXXIFSXLASEKSLSDCKKRLCSLPRGVSQWAEEA

SEQ ID NO: 22901 - protein, 232 aa, Homo sapiens
  MOD_RES (25)..(25): Selenocysteine
  MOD_RES (27)..(27): Selenocysteine
  MOD_RES (31)..(31): Selenocysteine
  MOD_RES (35)..(35): Selenocysteine
  MOD_RES (46)..(46): Selenocysteine
  MOD_RES (53)..(53): Selenocysteine
  MOD_RES (59)..(59): Selenocysteine
  MOD_RES (97)..(97): Selenocysteine
  MOD_RES (116)..(116): Selenocysteine
  MOD_RES (168)..(168): Selenocysteine
  MOD_RES (174)..(174): Selenocysteine
  MOD_RES (195)..(195): Selenocysteine
  MOD_RES (206)..(206): Selenocysteine
MMQCLIRKLAALSQYEEVLAKISSXSXDRLXVLKXKPQSIQRDIIXVCNDPYXLAQQLXHIELERLNYIGPEEFVQAFVQKDPLDNDKSCYSERKKXRNLEAYVEWFNRLSYLVAXEICMPVKKKHRARMIEYFIDVARECFNIGNFNSLMAIISGMNMSPVSRLKKXWAKVKXAKFDILEHQMDPSSNFYNYRXALRGAAQRSLXAHSSREKIVIPFFSLLIKDIYFLNEG

SEQ ID NO: 22902 - protein, 431 aa, Homo sapiens
  MOD_RES (4)..(4): Selenocysteine
  MOD_RES (74)..(74): Selenocysteine
  MOD_RES (77)..(77): Selenocysteine
  MOD_RES (79)..(79): Selenocysteine
  MOD_RES (106)..(106): Selenocysteine
  MOD_RES (138)..(138): Selenocysteine
  MOD_RES (140)..(140): Selenocysteine
  MOD_RES (144)..(144): Selenocysteine
  MOD_RES (148)..(148): Selenocysteine
  MOD_RES (159)..(159): Selenocysteine
  MOD_RES (166)..(166): Selenocysteine
  MOD_RES (172)..(172): Selenocysteine
  MOD_RES (210)..(210): Selenocysteine
  MOD_RES (229)..(229): Selenocysteine
  MOD_RES (281)..(281): Selenocysteine
  MOD_RES (287)..(287): Selenocysteine
  MOD_RES (308)..(308): Selenocysteine
  MOD_RES (319)..(319): Selenocysteine
  MOD_RES (372)..(372): Selenocysteine
  MOD_RES (392)..(392): Selenocysteine
MPQXPPFSAMFDSSGYNRNLYQSAEDSCGGLYYHDNNLLSGSLEALIQHLVPNVDYYPDNQMRKIAPKILQLLXEWXEXFPYDFRDERMMRNLKDLAHRIASGEEXYRKNVQQMMQCLIRKLAALSQYEEVLAKISSXSXDRLXVLKXKPQSIQRDIIXVCNDPYXLAQQLXHIELERLNYIGPEEFVQAFVQKDPLDNDKSCYSERKKXRNLEAYVEWFNRLSYLVAXEICMPVKKKHRARMIEYFIDVARECFNIGNFNSLMAIISGMNMSPVSRLKKXWAKVKXAKFDILEHQMDPSSNFYNYRXALRGAAQRSLXAHSSREKIVIPFFSLLIKDIYFLNEGCANRLPNGHVNFEKFWELAKQVSEFMXWKQVECPFERDRKILQYLLXVPVFSEDALYLASYESEGPENHIEKDRWKSLRSSLLGRV

SEQ ID NO: 22903 - protein, 473 aa, Homo sapiens
  MOD_RES (4)..(4): Selenocysteine
  MOD_RES (61)..(61): Selenocysteine
  MOD_RES (65)..(65): Selenocysteine
  MOD_RES (115)..(115): Selenocysteine
  MOD_RES (118)..(118): Selenocysteine
  MOD_RES (120)..(120): Selenocysteine
  MOD_RES (148)..(148): Selenocysteine
  MOD_RES (180)..(180): Selenocysteine
  MOD_RES (182)..(182): Selenocysteine
  MOD_RES (186)..(186): Selenocysteine
  MOD_RES (190)..(190): Selenocysteine
  MOD_RES (201)..(201): Selenocysteine
  MOD_RES (208)..(208): Selenocysteine
  MOD_RES (214)..(214): Selenocysteine
  MOD_RES (252)..(252): Selenocysteine
  MOD_RES (271)..(271): Selenocysteine
  MOD_RES (323)..(323): Selenocysteine
  MOD_RES (329)..(329): Selenocysteine
  MOD_RES (350)..(350): Selenocysteine
  MOD_RES (361)..(361): Selenocysteine
  MOD_RES (414)..(414): Selenocysteine
  MOD_RES (434)..(434): Selenocysteine
MPQXPPFSAMFDSSGYNRNLYQSAEDSCGGLYYHDNNLLSGSLEALIQHLVPNVDYYPDRXYIFXFLLSSRLFMHPYELMAKVCHLCVEHQRLSDPDSDKNQMRKIAPKILQLLXEWXEXFPYDFRDERMMRNLKDLAHRIASGEEQXYRKNVQQMMQCLIRKLAALSQYEEVLAKISSXSXDRLXVLKXKPQSIQRDIIXVCNDPYXLAQQLXHIELERLNYIGPEEFVQAFVQKDPLDNDKSCYSERKKXRNLEAYVEWFNRLSYLVAXEICMPVKKKHRARMIEYFIDVARECFNIGNFNSLMAIISGMNMSPVSRLKKXWAKVKXAKFDILEHQMDPSSNFYNYRXALRGAAQRSLXAHSSREKIVIPFFSLLIKDIYFLNEGCANRLPNGHVNFEKFWELAKQVSEFMXWKQVECPFERDRKILQYLLXVPVFSEDALYLASYESEGPENHIEKDRWKSLRSSLLGRV

SEQ ID NO: 22904 - protein, 472 aa, Homo sapiens
  MOD_RES (4)..(4): Selenocysteine
  MOD_RES (61)..(61): Selenocysteine
  MOD_RES (65)..(65): Selenocysteine
  MOD_RES (115)..(115): Selenocysteine
  MOD_RES (118)..(118): Selenocysteine
  MOD_RES (120)..(120): Selenocysteine
  MOD_RES (147)..(147): Selenocysteine
  MOD_RES (179)..(179): Selenocysteine
  MOD_RES (181)..(181): Selenocysteine
  MOD_RES (185)..(185): Selenocysteine
  MOD_RES (189)..(189): Selenocysteine
  MOD_RES (200)..(200): Selenocysteine
  MOD_RES (207)..(207): Selenocysteine
  MOD_RES (213)..(213): Selenocysteine
  MOD_RES (251)..(251): Selenocysteine
  MOD_RES (270)..(270): Selenocysteine
  MOD_RES (322)..(322): Selenocysteine
  MOD_RES (328)..(328): Selenocysteine
  MOD_RES (349)..(349): Selenocysteine
  MOD_RES (360)..(360): Selenocysteine
  MOD_RES (413)..(413): Selenocysteine
  MOD_RES (433)..(433): Selenocysteine
MPQXPPFSAMFDSSGYNRNLYQSAEDSCGGLYYHDNNLLSGSLEALIQHLVPNVDYYPDRXYIFXFLLSSRLFMHPYELMAKVCHLCVEHQRLSDPDSDKNQMRKIAPKILQLLXEWXEXFPYDFRDERMMRNLKDLAHRIASGEEXYRKNVQQMMQCLIRKLAALSQYEEVLAKISSXSXDRLXVLKXKPQSIQRDIIXVCNDPYXLAQQLXHIELERLNYIGPEEFVQAFVQKDPLDNDKSCYSERKKXRNLEAYVEWFNRLSYLVAXEICMPVKKKHRARMIEYFIDVARECFNIGNFNSLMAIISGMNMSPVSRLKKXWAKVKXAKFDILEHQMDPSSNFYNYRXALRGAAQRSLXAHSSREKIVIPFFSLLIKDIYFLNEGCANRLPNGHVNFEKFWELAKQVSEFMXWKQVECPFERDRKILQYLLXVPVFSEDALYLASYESEGPENHIEKDRWKSLRSSLLGRV

SEQ ID NO: 22905 - protein, 210 aa, Homo sapiens
  MOD_RES (4)..(4): Selenocysteine
  MOD_RES (61)..(61): Selenocysteine
  MOD_RES (65)..(65): Selenocysteine
  MOD_RES (115)..(115): Selenocysteine
  MOD_RES (118)..(118): Selenocysteine
  MOD_RES (120)..(120): Selenocysteine
  MOD_RES (176)..(176): Selenocysteine
MPQXPPFSAMFDSSGYNRNLYQSAEDSCGGLYYHDNNLLSGSLEALIQHLVPNVDYYPDRXYIFXFLLSSRLFMHPYELMAKVCHLCVEHQRLSDPDSDKNQMRKIAPKILQLLXEWXEXFPYDFRDERMMRNLKDLAHRIASGEEVGNLNLARLLEFPGRAWVGNGAELCILISXASSLFCLWASPPHHILVYLVCQVRMIIPSHFKGI

SEQ ID NO: 22906 - protein, 238 aa, Homo sapiens
  MOD_RES (33)..(33): Selenocysteine
  MOD_RES (52)..(52): Selenocysteine
  MOD_RES (58)..(58): Selenocysteine
  MOD_RES (86)..(86): Selenocysteine
  MOD_RES (94)..(94): Selenocysteine
  MOD_RES (113)..(113): Selenocysteine
  MOD_RES (165)..(165): Selenocysteine
  MOD_RES (171)..(171): Selenocysteine
  MOD_RES (184)..(184): Selenocysteine
  MOD_RES (192)..(192): Selenocysteine
  MOD_RES (203)..(203): Selenocysteine
  MOD_RES (213)..(213): Selenocysteine
  MOD_RES (222)..(222): Selenocysteine
  MOD_RES (235)..(235): Selenocysteine
  MOD_RES (237)..(237): Selenocysteine
MHQLLQALHQKLAALRQGPEGLVGADKPISYRXKPPASIHRELLGVCSDPYXLAQQLXHVELERLRHIGPEEFVQAFVNKDPLASXKPCFSDKXSNLEAYVKWFNRLCYLVAXEICMPAKKKQRAQVIEFFIDVARECFNIGNFNSLMAIISGMNMSPVSRLKKXWAKVRXAKFFILEHQMDPXGNFCNYRXALRGAAHRSLXAHSSREKEAXLGGRGEQIXRLSFLSSACSSKXSXS

SEQ ID NO: 22907 - protein, 315 aa, Homo sapiens
  MOD_RES (33)..(33): Selenocysteine
  MOD_RES (52)..(52): Selenocysteine
  MOD_RES (58)..(58): Selenocysteine
  MOD_RES (86)..(86): Selenocysteine
  MOD_RES (94)..(94): Selenocysteine
  MOD_RES (113)..(113): Selenocysteine
  MOD_RES (165)..(165): Selenocysteine
  MOD_RES (171)..(171): Selenocysteine
  MOD_RES (184)..(184): Selenocysteine
  MOD_RES (192)..(192): Selenocysteine
  MOD_RES (203)..(203): Selenocysteine
  MOD_RES (256)..(256): Selenocysteine
  MOD_RES (271)..(271): Selenocysteine
  MOD_RES (276)..(276): Selenocysteine
  MOD_RES (299)..(299): Selenocysteine
  MOD_RES (315)..(315): Selenocysteine
MHQLLQALHQKLAALRQGPEGLVGADKPISYRXKPPASIHRELLGVCSDPYXLAQQLXHVELERLRHIGPEEFVQAFVNKDPLASXKPCFSDKXSNLEAYVKWFNRLCYLVAXEICMPAKKKQRAQVIEFFIDVARECFNIGNFNSLMAIISGMNMSPVSRLKKXWAKVRXAKFFILEHQMDPXGNFCNYRXALRGAAHRSLXAHSSREKIVIPFFSLLIKDIYFLNEGCANRLPNGHVNFEKFLELAKQVGEFIXWKQVECPFEQDASIXHYLYXAPIFSEDGLYLASYESESPENQXEKERWKALRSSILGKX

SEQ ID NO: 22908 - protein, 466 aa, Homo sapiens
  MOD_RES (4)..(4): Selenocysteine
  MOD_RES (12)..(12): Selenocysteine
  MOD_RES (21)..(21): Selenocysteine
  MOD_RES (24)..(24): Selenocysteine
  MOD_RES (45)..(45): Selenocysteine
  MOD_RES (53)..(53): Selenocysteine
  MOD_RES (65)..(65): Selenocysteine
  MOD_RES (118)..(118): Selenocysteine
  MOD_RES (120)..(120): Selenocysteine
  MOD_RES (130)..(130): Selenocysteine
  MOD_RES (184)..(184): Selenocysteine
  MOD_RES (203)..(203): Selenocysteine
  MOD_RES (209)..(209): Selenocysteine
  MOD_RES (237)..(237): Selenocysteine
  MOD_RES (245)..(245): Selenocysteine
  MOD_RES (264)..(264): Selenocysteine
  MOD_RES (316)..(316): Selenocysteine
  MOD_RES (322)..(322): Selenocysteine
  MOD_RES (335)..(335): Selenocysteine
  MOD_RES (343)..(343): Selenocysteine
  MOD_RES (354)..(354): Selenocysteine
  MOD_RES (407)..(407): Selenocysteine
  MOD_RES (422)..(422): Selenocysteine
  MOD_RES (427)..(427): Selenocysteine
  MOD_RES (450)..(450): Selenocysteine
  MOD_RES (466)..(466): Selenocysteine
MPQXLSASDMVXPGSLSPPPXEPXDGEQAGQPLLDGAPSSASLEXLIQHLVPXADYYPEKAYIFXFLLSSRLFIEPRELLARVCHLCIEQQQLDKPVLDKARVRKFGPKLLQLLAEWXEXFPRDFQEESXIGHLKDVVGRIAPCDEAYRKRMHQLLQALHQKLAALRQGPEGLVGADKPISYRXKPPASIHRELLGVCSDPYXLAQQLXHVELERLRHIGPEEFVQAFVNKDPLASXKPCFSDKXSNLEAYVKWFNRLCYLVAXEICMPAKKKQRAQVIEFFIDVARECFNIGNFNSLMAIISGMNMSPVSRLKKXWAKVRXAKFFILEHQMDPXGNFCNYRXALRGAAHRSLXAHSSREKIVIPFFSLLIKDIYFLNEGCANRLPNGHVNFEKFLELAKQVGEFIXWKQVECPFEQDASIXHYLYXAPIFSEDGLYLASYESESPENQXEKERWKALRSSILGKX

SEQ ID NO: 22909 - protein, 1257 aa, Homo sapiens
  MOD_RES (24)..(24): Selenocysteine
  MOD_RES (37)..(37): Selenocysteine
  MOD_RES (41)..(41): Selenocysteine
  MOD_RES (96)..(96): Selenocysteine
  MOD_RES (111)..(111): Selenocysteine
  MOD_RES (131)..(131): Selenocysteine
  MOD_RES (134)..(134): Selenocysteine
  MOD_RES (152)..(152): Selenocysteine
  MOD_RES (155)..(155): Selenocysteine
  MOD_RES (179)..(179): Selenocysteine
  MOD_RES (191)..(191): Selenocysteine
  MOD_RES (193)..(193): Selenocysteine
  MOD_RES (224)..(224): Selenocysteine
  MOD_RES (282)..(282): Selenocysteine
  MOD_RES (295)..(295): Selenocysteine
  MOD_RES (316)..(316): Selenocysteine
  MOD_RES (373)..(373): Selenocysteine
  MOD_RES (376)..(376): Selenocysteine
  MOD_RES (379)..(379): Selenocysteine
  MOD_RES (391)..(391): Selenocysteine
  MOD_RES (399)..(399): Selenocysteine
  MOD_RES (430)..(430): Selenocysteine
  MOD_RES (453)..(453): Selenocysteine
  MOD_RES (456)..(456): Selenocysteine
  MOD_RES (475)..(475): Selenocysteine
  MOD_RES (503)..(503): Selenocysteine
  MOD_RES (513)..(513): Selenocysteine
  MOD_RES (524)..(524): Selenocysteine
  MOD_RES (532)..(532): Selenocysteine
  MOD_RES (561)..(561): Selenocysteine
  MOD_RES (576)..(576): Selenocysteine
  MOD_RES (603)..(603): Selenocysteine
  MOD_RES (626)..(626): Selenocysteine
  MOD_RES (648)..(648): Selenocysteine
  MOD_RES (660)..(660): Selenocysteine
  MOD_RES (669)..(670): Selenocysteine
  MOD_RES (680)..(680): Selenocysteine
  MOD_RES (718)..(718): Selenocysteine
  MOD_RES (730)..(730): Selenocysteine
  MOD_RES (732)..(732): Selenocysteine
  MOD_RES (749)..(749): Selenocysteine
  MOD_RES (767)..(767): Selenocysteine
  MOD_RES (780)..(780): Selenocysteine
  MOD_RES (783)..(783): Selenocysteine
  MOD_RES (793)..(793): Selenocysteine
  MOD_RES (802)..(803): Selenocysteine
  MOD_RES (838)..(838): Selenocysteine
  MOD_RES (840)..(840): Selenocysteine
  MOD_RES (843)..(843): Selenocysteine
  MOD_RES (847)..(848): Selenocysteine
  MOD_RES (872)..(872): Selenocysteine
  MOD_RES (894)..(894): Selenocysteine
  MOD_RES (901)..(901): Selenocysteine
  MOD_RES (935)..(935): Selenocysteine
  MOD_RES (955)..(955): Selenocysteine
  MOD_RES (978)..(978): Selenocysteine
  MOD_RES (990)..(990): Selenocysteine
  MOD_RES (992)..(992): Selenocysteine
  MOD_RES (1002)..(1002): Selenocysteine
  MOD_RES (1007)..(1007): Selenocysteine
  MOD_RES (1031)..(1031): Selenocysteine
  MOD_RES (1060)..(1060): Selenocysteine
  MOD_RES (1066)..(1067): Selenocysteine
  MOD_RES (1117)..(1117): Selenocysteine
  MOD_RES (1131)..(1131): Selenocysteine
  MOD_RES (1139)..(1139): Selenocysteine
  MOD_RES (1179)..(1179): Selenocysteine
  MOD_RES (1188)..(1188): Selenocysteine
  MOD_RES (1192)..(1192): Selenocysteine
  MOD_RES (1218)..(1218): Selenocysteine
  MOD_RES (1229)..(1229): Selenocysteine
  MOD_RES (1257)..(1257): Selenocysteine
MQKGIRLNDGHVASLGLLARKDGXRKGYLSKRSSDNXKWQXKWFALLQNLLFYFESDSSSRPSGLYLLEGCVCDRAPSPKPALSAKEPLEKQHYFXVNFSHENQKALELRXEDAKDCDEWVAAIAHASYRXLAXEHEALMQKYLHLLQIVEXEKXVAKQLRQQIEDGEIEIERLKAEIXSLLKDNERIQSXQXVAPNDEDSDIKKIKKVQSFLRGWLCRRKWKXIIQDYIRSPHADSMRKRNQVVFSMLEAEAEYVQQLHILVNNFLRPLRMAASSKKPPIXHDDVSSIFLNSEXIMFLHQIFYQGLKARISSWPXLVLADLFDILLPMLNIYQEFVRNHQYSLQILAHCKQNRDFDKLLKHYEAKPDCEERXLEXFLXYPMFQIPRYILXLHELLAHXPHEHVERNSLDYAKSKLEELSRIMHDEVSEXENIRKNLAIERMIIEGCEILLDXSQXFVRQGSLIQVPMSEKGKIXRGRLGSLSLKKEGERQCFLFSKHLIICXRGSGGKLHLXKNGVISLIDCXLLEEPESXEEEAKGSGQDIDHLDFKIGVEPKDSPPFXVILVASSRQEKAAWXSDISQCVDNIRCNGLMMNAFEENSKVXVPQMIKSDASLYCDDVDIRFSKXMNSCKVLQIRYASVERLLERLXDLRFLSIDFLNXFLHSYRVFXXAIVVLDKLIXIYKKPISAIPARSLELLFASGQNNKLLYGEPPKSPRAXRKFSSPPPLSIXKXSSPSRRRKLSLNIPIIXGGKALDLAALSCNSNGYXSMYSAMSPFSKAXLDXSKLYVSSSFXNKIPDEGDXXPEKPEDPSALSKQSSEVSMREESDIDQNQSDDGDXEXSPXKSPXXPKSVKNKNSSEFPLFSYNNGVVMXSCRELDNNRSALSAASAFAIAXAGANEGXPNKEKYRRMSLASAGFPPDQRNGDKEFVIRRAAXNRVLNVLRHWVSKHSQDFEXNDELKCKVIGFLEEVMHDPELLXQERKAAANIIRXLXQEDPGDNQIXLEEIXQMAEGVKAEPFENHSALEIAEQLXLLDHLVFKKIPYEEFFGQGWMKLEKNERXPYIMKXXKHFNDISNLIASEIIRNEDINARVSAIEKWVAVADICRCLHNYNAVLEIXSSMNRSAIFRLKKXWLKVSKQXKALIDKLQKLVSSEGRFKNLREALKNCDPPCVPYLGMYLXDLAFIEEGXPNYXEDGLVNFSKMRMISHIIREIRQFQQXAYKIEHQAKVXQYLLDQSFVMDEESLYESSLRIEPKLPX

SEQ ID NO: 22910 - protein, 1273 aa, Homo sapiens
  MOD_RES (24)..(24): Selenocysteine
  MOD_RES (37)..(37): Selenocysteine
  MOD_RES (41)..(41): Selenocysteine
  MOD_RES (96)..(96): Selenocysteine
  MOD_RES (111)..(111): Selenocysteine
  MOD_RES (131)..(131): Selenocysteine
  MOD_RES (134)..(134): Selenocysteine
  MOD_RES (152)..(152): Selenocysteine
  MOD_RES (155)..(155): Selenocysteine
  MOD_RES (179)..(179): Selenocysteine
  MOD_RES (191)..(191): Selenocysteine
  MOD_RES (193)..(193): Selenocysteine
  MOD_RES (224)..(224): Selenocysteine
  MOD_RES (282)..(282): Selenocysteine
  MOD_RES (295)..(295): Selenocysteine
  MOD_RES (316)..(316): Selenocysteine
  MOD_RES (373)..(373): Selenocysteine
  MOD_RES (376)..(376): Selenocysteine
  MOD_RES (379)..(379): Selenocysteine
  MOD_RES (391)..(391): Selenocysteine
  MOD_RES (399)..(399): Selenocysteine
  MOD_RES (430)..(430): Selenocysteine
  MOD_RES (453)..(453): Selenocysteine
  MOD_RES (456)..(456): Selenocysteine
  MOD_RES (475)..(475): Selenocysteine
  MOD_RES (503)..(503): Selenocysteine
  MOD_RES (513)..(513): Selenocysteine
  MOD_RES (524)..(524): Selenocysteine
  MOD_RES (532)..(532): Selenocysteine
  MOD_RES (561)..(561): Selenocysteine
  MOD_RES (576)..(576): Selenocysteine
  MOD_RES (603)..(603): Selenocysteine
  MOD_RES (611)..(611): Selenocysteine
  MOD_RES (615)..(615): Selenocysteine
  MOD_RES (639)..(639): Selenocysteine
  MOD_RES (661)..(661): Selenocysteine
  MOD_RES (673)..(673): Selenocysteine
  MOD_RES (682)..(683): Selenocysteine
  MOD_RES (693)..(693): Selenocysteine
  MOD_RES (734)..(734): Selenocysteine
  MOD_RES (746)..(746): Selenocysteine
  MOD_RES (748)..(748): Selenocysteine
  MOD_RES (765)..(765): Selenocysteine
  MOD_RES (783)..(783): Selenocysteine
  MOD_RES (796)..(796): Selenocysteine
  MOD_RES (799)..(799): Selenocysteine
  MOD_RES (809)..(809): Selenocysteine
  MOD_RES (818)..(819): Selenocysteine
  MOD_RES (854)..(854): Selenocysteine
  MOD_RES (856)..(856): Selenocysteine
  MOD_RES (859)..(859): Selenocysteine
  MOD_RES (863)..(864): Selenocysteine
  MOD_RES (888)..(888): Selenocysteine
  MOD_RES (910)..(910): Selenocysteine
  MOD_RES (917)..(917): Selenocysteine
  MOD_RES (951)..(951): Selenocysteine
  MOD_RES (971)..(971): Selenocysteine
  MOD_RES (994)..(994): Selenocysteine
  MOD_RES (1006)..(1006): Selenocysteine
  MOD_RES (1008)..(1008): Selenocysteine
  MOD_RES (1018)..(1018): Selenocysteine
  MOD_RES (1023)..(1023): Selenocysteine
  MOD_RES (1047)..(1047): Selenocysteine
  MOD_RES (1076)..(1076): Selenocysteine
  MOD_RES (1082)..(1083): Selenocysteine
  MOD_RES (1133)..(1133): Selenocysteine
  MOD_RES (1147)..(1147): Selenocysteine
  MOD_RES (1155)..(1155): Selenocysteine
  MOD_RES (1195)..(1195): Selenocysteine
  MOD_RES (1204)..(1204): Selenocysteine
  MOD_RES (1208)..(1208): Selenocysteine
  MOD_RES (1234)..(1234): Selenocysteine
  MOD_RES (1245)..(1245): Selenocysteine
  MOD_RES (1273)..(1273): Selenocysteine
MQKGIRLNDGHVASLGLLARKDGXRKGYLSKRSSDNXKWQXKWFALLQNLLFYFESDSSSRPSGLYLLEGCVCDRAPSPKPALSAKEPLEKQHYFXVNFSHENQKALELRXEDAKDCDEWVAAIAHASYRXLAXEHEALMQKYLHLLQIVEXEKXVAKQLRQQIEDGEIEIERLKAEIXSLLKDNERIQSXQXVAPNDEDSDIKKIKKVQSFLRGWLCRRKWKXIIQDYIRSPHADSMRKRNQVVFSMLEAEAEYVQQLHILVNNFLRPLRMAASSKKPPIXHDDVSSIFLNSEXIMFLHQIFYQGLKARISSWPXLVLADLFDILLPMLNIYQEFVRNHQYSLQILAHCKQNRDFDKLLKHYEAKPDCEERXLEXFLXYPMFQIPRYILXLHELLAHXPHEHVERNSLDYAKSKLEELSRIMHDEVSEXENIRKNLAIERMIIEGCEILLDXSQXFVRQGSLIQVPMSEKGKIXRGRLGSLSLKKEGERQCFLFSKHLIICXRGSGGKLHLXKNGVISLIDCXLLEEPESXEEEAKGSGQDIDHLDFKIGVEPKDSPPFXVILVASSRQEKAAWXSDISQCVDNIRCNGLMMNAFEENSKVXVPQMIKRXREGXREAEMSRSDASLYCDDVDIRFSKXMNSCKVLQIRYASVERLLERLXDLRFLSIDFLNXFLHSYRVFXXAIVVLDKLIXIYKKPISAIPARWLRSLELLFASGQNNKLLYGEPPKSPRAXRKFSSPPPLSIXKXSSPSRRRKLSLNIPIIXGGKALDLAALSCNSNGYXSMYSAMSPFSKAXLDXSKLYVSSSFXNKIPDEGDXXPEKPEDPSALSKQSSEVSMREESDIDQNQSDDGDXEXSPXKSPXXPKSVKNKNSSEFPLFSYNNGVVMXSCRELDNNRSALSAASAFAIAXAGANEGXPNKEKYRRMSLASAGFPPDQRNGDKEFVIRRAAXNRVLNVLRHWVSKHSQDFEXNDELKCKVIGFLEEVMHDPELLXQERKAAANIIRXLXQEDPGDNQIXLEEIXQMAEGVKAEPFENHSALEIAEQLXLLDHLVFKKIPYEEFFGQGWMKLEKNERXPYIMKXXKHFNDISNLIASEIIRNEDINARVSAIEKWVAVADICRCLHNYNAVLEIXSSMNRSAIFRLKKXWLKVSKQXKALIDKLQKLVSSEGRFKNLREALKNCDPPCVPYLGMYLXDLAFIEEGXPNYXEDGLVNFSKMRMISHIIREIRQFQQXAYKIEHQAKVXQYLLDQSFVMDEESLYESSLRIEPKLPX

SEQ ID NO: 22911 - protein, 489 aa, Homo sapiens
  MOD_RES (12)..(12): Selenocysteine
  MOD_RES (15)..(15): Selenocysteine
  MOD_RES (25)..(25): Selenocysteine
  MOD_RES (34)..(35): Selenocysteine
  MOD_RES (70)..(70): Selenocysteine
  MOD_RES (72)..(72): Selenocysteine
  MOD_RES (75)..(75): Selenocysteine
  MOD_RES (79)..(80): Selenocysteine
  MOD_RES (104)..(104): Selenocysteine
  MOD_RES (126)..(126): Selenocysteine
  MOD_RES (133)..(133): Selenocysteine
  MOD_RES (167)..(167): Selenocysteine
  MOD_RES (187)..(187): Selenocysteine
  MOD_RES (210)..(210): Selenocysteine
  MOD_RES (222)..(222): Selenocysteine
  MOD_RES (224)..(224): Selenocysteine
  MOD_RES (234)..(234): Selenocysteine
  MOD_RES (239)..(239): Selenocysteine
  MOD_RES (263)..(263): Selenocysteine
  MOD_RES (292)..(292): Selenocysteine
  MOD_RES (298)..(299): Selenocysteine
  MOD_RES (349)..(349): Selenocysteine
  MOD_RES (363)..(363): Selenocysteine
  MOD_RES (371)..(371): Selenocysteine
  MOD_RES (411)..(411): Selenocysteine
  MOD_RES (420)..(420): Selenocysteine
  MOD_RES (424)..(424): Selenocysteine
  MOD_RES (450)..(450): Selenocysteine
  MOD_RES (461)..(461): Selenocysteine
  MOD_RES (489)..(489): Selenocysteine
MYSAMSPFSKAXLDXSKLYVSSSFXNKIPDEGDXXPEKPEDPSALSKQSSEVSMREESDIDQNQSDDGDXEXSPXKSPXXPKSVKNKNSSEFPLFSYNNGVVMXSCRELDNNRSALSAASAFAIAXAGANEGXPNKEKYRRMSLASAGFPPDQRNGDKEFVIRRAAXNRVLNVLRHWVSKHSQDFEXNDELKCKVIGFLEEVMHDPELLXQERKAAANIIRXLXQEDPGDNQIXLEEIXQMAEGVKAEPFENHSALEIAEQLXLLDHLVFKKIPYEEFFGQGWMKLEKNERXPYIMKXXKHFNDISNLIASEIIRNEDINARVSAIEKWVAVADICRCLHNYNAVLEIXSSMNRSAIFRLKKXWLKVSKQXKALIDKLQKLVSSEGRFKNLREALKNCDPPCVPYLGMYLXDLAFIEEGXPNYXEDGLVNFSKMRMISHIIREIRQFQQXAYKIEHQAKVXQYLLDQSFVMDEESLYESSLRIEPKLPX

SEQ ID NO: 22912 - protein, 1151 aa, Homo sapiens
  MOD_RES (24)..(24): Selenocysteine
  MOD_RES (33)..(33): Selenocysteine
  MOD_RES (76)..(76): Selenocysteine
  MOD_RES (100)..(100): Selenocysteine
  MOD_RES (156)..(156): Selenocysteine
  MOD_RES (173)..(173): Selenocysteine
  MOD_RES (188)..(188): Selenocysteine
  MOD_RES (227)..(227): Selenocysteine
  MOD_RES (250)..(250): Selenocysteine
  MOD_RES (298)..(298): Selenocysteine
  MOD_RES (319)..(319): Selenocysteine
  MOD_RES (379)..(379): Selenocysteine
  MOD_RES (382)..(382): Selenocysteine
  MOD_RES (394)..(394): Selenocysteine
  MOD_RES (402)..(402): Selenocysteine
  MOD_RES (433)..(433): Selenocysteine
  MOD_RES (456)..(456): Selenocysteine
  MOD_RES (459)..(459): Selenocysteine
  MOD_RES (499)..(499): Selenocysteine
  MOD_RES (506)..(506): Selenocysteine
  MOD_RES (518)..(518): Selenocysteine
  MOD_RES (528)..(528): Selenocysteine
  MOD_RES (565)..(565): Selenocysteine
  MOD_RES (597)..(597): Selenocysteine
  MOD_RES (607)..(607): Selenocysteine
  MOD_RES (623)..(623): Selenocysteine
  MOD_RES (630)..(630): Selenocysteine
  MOD_RES (652)..(652): Selenocysteine
  MOD_RES (664)..(664): Selenocysteine
  MOD_RES (668)..(668): Selenocysteine
  MOD_RES (673)..(674): Selenocysteine
  MOD_RES (691)..(691): Selenocysteine
  MOD_RES (704)..(704): Selenocysteine
  MOD_RES (736)..(736): Selenocysteine
  MOD_RES (748)..(748): Selenocysteine
  MOD_RES (761)..(762): Selenocysteine
  MOD_RES (767)..(770): Selenocysteine
  MOD_RES (781)..(781): Selenocysteine
  MOD_RES (801)..(801): Selenocysteine
  MOD_RES (844)..(845): Selenocysteine
  MOD_RES (855)..(855): Selenocysteine
  MOD_RES (868)..(868): Selenocysteine
  MOD_RES (886)..(886): Selenocysteine
  MOD_RES (900)..(900): Selenocysteine
  MOD_RES (903)..(903): Selenocysteine
  MOD_RES (913)..(913): Selenocysteine
  MOD_RES (915)..(915): Selenocysteine
  MOD_RES (990)..(990): Selenocysteine
  MOD_RES (1011)..(1011): Selenocysteine
  MOD_RES (1040)..(1040): Selenocysteine
  MOD_RES (1046)..(1046): Selenocysteine
  MOD_RES (1097)..(1097): Selenocysteine
  MOD_RES (1111)..(1111): Selenocysteine
  MOD_RES (1119)..(1119): Selenocysteine
  MOD_RES (1129)..(1129): Selenocysteine
  MOD_RES (1142)..(1142): Selenocysteine
  MOD_RES (1151)..(1151): Selenocysteine
MQKSVRYNEGHALYLAFLARKEGXKRGFLSKKXAEASRWHEKWFALYQNVLFYFEGEQSCRPAGMYLLEGCSCERXPAPPRAGAGQGGVRDALDKQYYFXVLFGHEGQKPLELRCEEEQDGKEWMEAIHQASYADILIEREVLMQKYIHLVQIVEXEKIAANQLRHQLEDQDXEIERLKSEIIALNKXKERMRPYQSNQEDEDPDIKKIKKVQSFMRGWLCRRKWKXIVQDYICSPHAESMRKRNQIVFXMVEAESEYVHQLYILVNGFLRPLRMAASSKKPPISHDDVSSIFLNSEXIMFLHEIFHQGLKARIANWPXLILADLFDILLPMLNIYQEFVRNHQYSLQVLANCKQNRDFDKLLKQYEANPACEGRMLEXFLXYPMFQIPRYIIXLHELLAHXPHEHVERKSLEFAKSKLEELSRVMHDEVSDXENIRKNLAIERMIVEGCDILLDXSQXFIRQGSLIQVPSVERGKLSKVRLGSLSLKKEGERQCFLFXKHFLICXRSSGGKLHLLKXGGVLSLIDCXLIEEPDASDDDSKGSGQVFGHLDFKIVVEPPDAAAFXVVLLAPSRQEKAAWMSDISQCVDNIRCNGLMXIVFEENSKVXVPHMIKSDARLHKDDXDICFSKXLNSCKVPQIRYASVERLLERLXDLRFLSIDFLNXFLHXYRIFXXAAVVLGKLSDIYKRPFXSIPVRSLELFFAXSQNNRGEHLVDGKSPRLCRKFSSPPPLAVSRXSSPVRARKLSLXSPLNSKIGALDLXXSSSPXXXXQSPAASPPPHXGQIPLDLSRGLSSPEQSPGXVEENVDNPRVDLCNKLKRSIQKAVLESAPADRAGVESSPAADXXELSPCRSPSXPRHLRYRQPGGQXADNAHCSVSPASAFAIAXAAAGHGSPPGFNNXERXCDKEFIIRRXAXNRVLNVLRHWVSKHAQDFELNNELKMNVLNLLEEVLRDPDLLPQERKAAANILRALSQDDQDDIHLKLEDIIQMXDCMKAECFESLSAMELAEQIXLLDHVIFRSIPYEEFLGQGWMKLDKNERXPYIMKXSQHFNDMSNLVASQIMNYADVSSRANAIEKWVAVADICRCLHNYNGVLEIXSALNRSAIYRLKKXWAKVSKQXKALMDKLQKXVSSEGRFKNLREXLKNSSRLNX

SEQ ID NO: 22913 - protein, 1237 aa, Homo sapiens
  MOD_RES (24)..(24): Selenocysteine
  MOD_RES (33)..(33): Selenocysteine
  MOD_RES (76)..(76): Selenocysteine
  MOD_RES (100)..(100): Selenocysteine
  MOD_RES (156)..(156): Selenocysteine
  MOD_RES (173)..(173): Selenocysteine
  MOD_RES (188)..(188): Selenocysteine
  MOD_RES (227)..(227): Selenocysteine
  MOD_RES (250)..(250): Selenocysteine
  MOD_RES (298)..(298): Selenocysteine
  MOD_RES (319)..(319): Selenocysteine
  MOD_RES (379)..(379): Selenocysteine
  MOD_RES (382)..(382): Selenocysteine
  MOD_RES (394)..(394): Selenocysteine
  MOD_RES (402)..(402): Selenocysteine
  MOD_RES (433)..(433): Selenocysteine
  MOD_RES (456)..(456): Selenocysteine
  MOD_RES (459)..(459): Selenocysteine
  MOD_RES (499)..(499): Selenocysteine
  MOD_RES (506)..(506): Selenocysteine
  MOD_RES (518)..(518): Selenocysteine
  MOD_RES (528)..(528): Selenocysteine
  MOD_RES (565)..(565): Selenocysteine
  MOD_RES (597)..(597): Selenocysteine
  MOD_RES (607)..(607): Selenocysteine
  MOD_RES (623)..(623): Selenocysteine
  MOD_RES (630)..(630): Selenocysteine
  MOD_RES (652)..(652): Selenocysteine
  MOD_RES (664)..(664): Selenocysteine
  MOD_RES (668)..(668): Selenocysteine
  MOD_RES (673)..(674): Selenocysteine
  MOD_RES (691)..(691): Selenocysteine
  MOD_RES (704)..(704): Selenocysteine
  MOD_RES (736)..(736): Selenocysteine
  MOD_RES (748)..(748): Selenocysteine
  MOD_RES (761)..(762): Selenocysteine
  MOD_RES (767)..(770): Selenocysteine
  MOD_RES (781)..(781): Selenocysteine
  MOD_RES (801)..(801): Selenocysteine
  MOD_RES (844)..(845): Selenocysteine
  MOD_RES (855)..(855): Selenocysteine
  MOD_RES (868)..(868): Selenocysteine
  MOD_RES (886)..(886): Selenocysteine
  MOD_RES (900)..(900): Selenocysteine
  MOD_RES (903)..(903): Selenocysteine
  MOD_RES (913)..(913): Selenocysteine
  MOD_RES (915)..(915): Selenocysteine
  MOD_RES (990)..(990): Selenocysteine
  MOD_RES (1011)..(1011): Selenocysteine
  MOD_RES (1040)..(1040): Selenocysteine
  MOD_RES (1046)..(1046): Selenocysteine
  MOD_RES (1097)..(1097): Selenocysteine
  MOD_RES (1111)..(1111): Selenocysteine
  MOD_RES (1119)..(1119): Selenocysteine
  MOD_RES (1129)..(1129): Selenocysteine
  MOD_RES (1142)..(1142): Selenocysteine
  MOD_RES (1159)..(1159): Selenocysteine
  MOD_RES (1168)..(1168): Selenocysteine
  MOD_RES (1172)..(1172): Selenocysteine
  MOD_RES (1198)..(1198): Selenocysteine
  MOD_RES (1223)..(1223): Selenocysteine
MQKSVRYNEGHALYLAFLARKEGXKRGFLSKKXAEASRWHEKWFALYQNVLFYFEGEQSCRPAGMYLLEGCSCERXPAPPRAGAGQGGVRDALDKQYYFXVLFGHEGQKPLELRCEEEQDGKEWMEAIHQASYADILIEREVLMQKYIHLVQIVEXEKIAANQLRHQLEDQDXEIERLKSEIIALNKXKERMRPYQSNQEDEDPDIKKIKKVQSFMRGWLCRRKWKXIVQDYICSPHAESMRKRNQIVFXMVEAESEYVHQLYILVNGFLRPLRMAASSKKPPISHDDVSSIFLNSEXIMFLHEIFHQGLKARIANWPXLILADLFDILLPMLNIYQEFVRNHQYSLQVLANCKQNRDFDKLLKQYEANPACEGRMLEXFLXYPMFQIPRYIIXLHELLAHXPHEHVERKSLEFAKSKLEELSRVMHDEVSDXENIRKNLAIERMIVEGCDILLDXSQXFIRQGSLIQVPSVERGKLSKVRLGSLSLKKEGERQCFLFXKHFLICXRSSGGKLHLLKXGGVLSLIDCXLIEEPDASDDDSKGSGQVFGHLDFKIVVEPPDAAAFXVVLLAPSRQEKAAWMSDISQCVDNIRCNGLMXIVFEENSKVXVPHMIKSDARLHKDDXDICFSKXLNSCKVPQIRYASVERLLERLXDLRFLSIDFLNXFLHXYRIFXXAAVVLGKLSDIYKRPFXSIPVRSLELFFAXSQNNRGEHLVDGKSPRLCRKFSSPPPLAVSRXSSPVRARKLSLXSPLNSKIGALDLXXSSSPXXXXQSPAASPPPHXGQIPLDLSRGLSSPEQSPGXVEENVDNPRVDLCNKLKRSIQKAVLESAPADRAGVESSPAADXXELSPCRSPSXPRHLRYRQPGGQXADNAHCSVSPASAFAIAXAAAGHGSPPGFNNXERXCDKEFIIRRXAXNRVLNVLRHWVSKHAQDFELNNELKMNVLNLLEEVLRDPDLLPQERKAAANILRALSQDDQDDIHLKLEDIIQMXDCMKAECFESLSAMELAEQIXLLDHVIFRSIPYEEFLGQGWMKLDKNERXPYIMKXSQHFNDMSNLVASQIMNYADVSSRANAIEKWVAVADICRCLHNYNGVLEIXSALNRSAIYRLKKXWAKVSKQXKALMDKLQKXVSSEGRFKNLREXLKNCNPPAVPYLGMYLXDLAFIEEGXPNFXEEGLVNFSKMRMISHIIREIRQFQQXSYRIDHQPKVAQYLLDKDLIIDEDXLYELSLKIEPRLPA

SEQ ID NO: 22914 - protein, 123 aa, Homo sapiens
  MOD_RES (2)..(3): Selenocysteine
  MOD_RES (8)..(8): Selenocysteine
  MOD_RES (40)..(40): Selenocysteine
  MOD_RES (74)..(74): Selenocysteine
  MOD_RES (89)..(89): Selenocysteine
  MOD_RES (116)..(116): Selenocysteine
EXXYLKPXFCDNCAGFLWGVIKQGYRCKDIRILLLMLRFXDKGYIKSVSSGLHQVRRMLASLGMLSVLAPEDRXDMCDKKALHEFGCEXHWGREKSERLLDPGCLVHRLRDELSQXMQRSGCV

SEQ ID NO: 22915 - protein, 811 aa, Homo sapiens
  MOD_RES (59)..(59): Selenocysteine
  MOD_RES (105)..(105): Selenocysteine
  MOD_RES (122)..(122): Selenocysteine
  MOD_RES (148)..(148): Selenocysteine
  MOD_RES (161)..(161): Selenocysteine
  MOD_RES (163)..(163): Selenocysteine
  MOD_RES (185)..(186): Selenocysteine
  MOD_RES (198)..(198): Selenocysteine
  MOD_RES (205)..(205): Selenocysteine
  MOD_RES (228)..(228): Selenocysteine
  MOD_RES (257)..(257): Selenocysteine
  MOD_RES (281)..(281): Selenocysteine
  MOD_RES (307)..(307): Selenocysteine
  MOD_RES (326)..(326): Selenocysteine
  MOD_RES (342)..(342): Selenocysteine
  MOD_RES (362)..(362): Selenocysteine
  MOD_RES (428)..(428): Selenocysteine
  MOD_RES (436)..(436): Selenocysteine
  MOD_RES (458)..(458): Selenocysteine
  MOD_RES (480)..(480): Selenocysteine
  MOD_RES (537)..(537): Selenocysteine
  MOD_RES (561)..(562): Selenocysteine
  MOD_RES (567)..(567): Selenocysteine
  MOD_RES (616)..(616): Selenocysteine
  MOD_RES (620)..(620): Selenocysteine
  MOD_RES (646)..(646): Selenocysteine
  MOD_RES (663)..(663): Selenocysteine
  MOD_RES (687)..(687): Selenocysteine
  MOD_RES (689)..(689): Selenocysteine
  MOD_RES (712)..(712): Selenocysteine
  MOD_RES (716)..(716): Selenocysteine
  MOD_RES (724)..(724): Selenocysteine
  MOD_RES (761)..(761): Selenocysteine
  MOD_RES (771)..(771): Selenocysteine
IPFLSNLPSERGAARLSPHCLLSFPRKPSHGCRAASKARLEAKPANSPFPSHPSLAHIXQFRMMVSLGHLAKGASLDDLIDSCIQSFDADGNLCRSNQLLQVMLXMHRIVISSAELLQKVIXLYKDALAKNSPGLCLKICYFVRYWIXEFWVMFKMDASLXDXMEEFQELVKAKGEELHCRLIDXXQINARDWSRKLXQRIKSNXSKKRKVSLLFDHLEPEELSEHLXYLEFKSFRRISFSDYQNYLVNSCVKENPXMERSIALCNGISQWVQLMVLSRPXPQLRAEVFIKFIQVAQKLHQLQNFNXLMAVIGGLCHSSISRLKEXSSHVPHEINKVLGEMXELLSSSRNYDNYRRAYGECXDFKIPILGVHLKDLISLYEAMPDYLEDGKVNVHKLLALYNHISELVQLQEVAPPLEANKDLVHLLXLSLDLYYXEDEIYELSYAREPRNHRAPPLXPSKPPVVVDWASGVSPKPDPKXISKHVQRMVDSVFKNYDHDQDGYISQEEFEKIAASFPFSFCVMDKDREGLISRDEIXAYFMRASSIYSKLGLGFPHNFQEXXYLKPXFCDNCAGFLWGVIKQGYRCKDCGMNCHKQCKDLVVFECKKRAKNPVAPXENNXSVGPVSNLCSLGAKDLLHAPEEGPFXFPNGEAVEHGEESKDRXIMLMGVSSQKISLRLKRAVAHKAXQXESQPWIGSEGPSGPFVLSSPRKXAQDXLYVLPSPXSPCPSPVLVRKRAFVKWENKDSLIKSKEELRHLRLPXYQELEQEINXLKADNDALKIQLKYAQKKIESLQLEKSNHVLAQMEQGDCS

SEQ ID NO: 22916 - protein, 481 aa, Homo sapiens
  MOD_RES (3)..(3): Selenocysteine
  MOD_RES (45)..(45): Selenocysteine
  MOD_RES (91)..(91): Selenocysteine
  MOD_RES (108)..(108): Selenocysteine
  MOD_RES (134)..(134): Selenocysteine
  MOD_RES (147)..(147): Selenocysteine
  MOD_RES (149)..(149): Selenocysteine
  MOD_RES (171)..(172): Selenocysteine
  MOD_RES (184)..(184): Selenocysteine
  MOD_RES (191)..(191): Selenocysteine
  MOD_RES (214)..(214): Selenocysteine
  MOD_RES (243)..(243): Selenocysteine
  MOD_RES (267)..(267): Selenocysteine
  MOD_RES (293)..(293): Selenocysteine
  MOD_RES (312)..(312): Selenocysteine
  MOD_RES (328)..(328): Selenocysteine
  MOD_RES (348)..(348): Selenocysteine
  MOD_RES (414)..(414): Selenocysteine
  MOD_RES (422)..(422): Selenocysteine
MGXLGKAREAPRKPSHGCRAASKARLEAKPANSPFPSHPSLAHIXQFRMMVSLGHLAKGASLDDLIDSCIQSFDADGNLCRSNQLLQVMLXMHRIVISSAELLQKVIXLYKDALAKNSPGLCLKICYFVRYWIXEFWVMFKMDASLXDXMEEFQELVKAKGEELHCRLIDXXQINARDWSRKLXQRIKSNXSKKRKVSLLFDHLEPEELSEHLXYLEFKSFRRISFSDYQNYLVNSCVKENPXMERSIALCNGISQWVQLMVLSRPXPQLRAEVFIKFIQVAQKLHQLQNFNXLMAVIGGLCHSSISRLKEXSSHVPHEINKVLGEMXELLSSSRNYDNYRRAYGECXDFKIPILGVHLKDLISLYEAMPDYLEDGKVNVHKLLALYNHISELVQLQEVAPPLEANKDLVHLLXLSLDLYYXEDEIYELSYAREPRNHRAPSVFKNYDHDQDGYISQEEFEKIAASFPFSFCVMDKDSSGE

SEQ ID NO: 22917 - protein, 546 aa, Homo sapiens
  MOD_RES (3)..(3): Selenocysteine
  MOD_RES (45)..(45): Selenocysteine
  MOD_RES (91)..(91): Selenocysteine
  MOD_RES (108)..(108): Selenocysteine
  MOD_RES (134)..(134): Selenocysteine
  MOD_RES (147)..(147): Selenocysteine
  MOD_RES (149)..(149): Selenocysteine
  MOD_RES (171)..(172): Selenocysteine
  MOD_RES (184)..(184): Selenocysteine
  MOD_RES (191)..(191): Selenocysteine
  MOD_RES (214)..(214): Selenocysteine
  MOD_RES (243)..(243): Selenocysteine
  MOD_RES (267)..(267): Selenocysteine
  MOD_RES (293)..(293): Selenocysteine
  MOD_RES (312)..(312): Selenocysteine
  MOD_RES (328)..(328): Selenocysteine
  MOD_RES (348)..(348): Selenocysteine
  MOD_RES (414)..(414): Selenocysteine
  MOD_RES (422)..(422): Selenocysteine
  MOD_RES (488)..(488): Selenocysteine
  MOD_RES (512)..(513): Selenocysteine
  MOD_RES (518)..(518): Selenocysteine
MGXLGKAREAPRKPSHGCRAASKARLEAKPANSPFPSHPSLAHIXQFRMMVSLGHLAKGASLDDLIDSCIQSFDADGNLCRSNQLLQVMLXMHRIVISSAELLQKVIXLYKDALAKNSPGLCLKICYFVRYWIXEFWVMFKMDASLXDXMEEFQELVKAKGEELHCRLIDXXQINARDWSRKLXQRIKSNXSKKRKVSLLFDHLEPEELSEHLXYLEFKSFRRISFSDYQNYLVNSCVKENPXMERSIALCNGISQWVQLMVLSRPXPQLRAEVFIKFIQVAQKLHQLQNFNXLMAVIGGLCHSSISRLKEXSSHVPHEINKVLGEMXELLSSSRNYDNYRRAYGECXDFKIPILGVHLKDLISLYEAMPDYLEDGKVNVHKLLALYNHISELVQLQEVAPPLEANKDLVHLLXLSLDLYYXEDEIYELSYAREPRNHRAPSVFKNYDHDQDGYISQEEFEKIAASFPFSFCVMDKDREGLISRDEIXAYFMRASSIYSKLGLGFPHNFQEXXYLKPXFCDNCAGFLWGVIKQGYRCKGNKYSESR

SEQ ID NO: 22918 - protein, 597 aa, Homo sapiens
  MOD_RES (3)..(3): Selenocysteine
  MOD_RES (45)..(45): Selenocysteine
  MOD_RES (91)..(91): Selenocysteine
  MOD_RES (108)..(108): Selenocysteine
  MOD_RES (134)..(134): Selenocysteine
  MOD_RES (147)..(147): Selenocysteine
  MOD_RES (149)..(149): Selenocysteine
  MOD_RES (171)..(172): Selenocysteine
  MOD_RES (184)..(184): Selenocysteine
  MOD_RES (191)..(191): Selenocysteine
  MOD_RES (214)..(214): Selenocysteine
  MOD_RES (243)..(243): Selenocysteine
  MOD_RES (267)..(267): Selenocysteine
  MOD_RES (293)..(293): Selenocysteine
  MOD_RES (312)..(312): Selenocysteine
  MOD_RES (328)..(328): Selenocysteine
  MOD_RES (348)..(348): Selenocysteine
  MOD_RES (414)..(414): Selenocysteine
  MOD_RES (422)..(422): Selenocysteine
  MOD_RES (488)..(488): Selenocysteine
  MOD_RES (512)..(513): Selenocysteine
  MOD_RES (518)..(518): Selenocysteine
  MOD_RES (567)..(567): Selenocysteine
  MOD_RES (571)..(571): Selenocysteine
MGXLGKAREAPRKPSHGCRAASKARLEAKPANSPFPSHPSLAHIXQFRMMVSLGHLAKGASLDDLIDSCIQSFDADGNLCRSNQLLQVMLXMHRIVISSAELLQKVIXLYKDALAKNSPGLCLKICYFVRYWIXEFWVMFKMDASLXDXMEEFQELVKAKGEELHCRLIDXXQINARDWSRKLXQRIKSNXSKKRKVSLLFDHLEPEELSEHLXYLEFKSFRRISFSDYQNYLVNSCVKENPXMERSIALCNGISQWVQLMVLSRPXPQLRAEVFIKFIQVAQKLHQLQNFNXLMAVIGGLCHSSISRLKEXSSHVPHEINKVLGEMXELLSSSRNYDNYRRAYGECXDFKIPILGVHLKDLISLYEAMPDYLEDGKVNVHKLLALYNHISELVQLQEVAPPLEANKDLVHLLXLSLDLYYXEDEIYELSYAREPRNHRAPSVFKNYDHDQDGYISQEEFEKIAASFPFSFCVMDKDREGLISRDEIXAYFMRASSIYSKLGLGFPHNFQEXXYLKPXFCDNCAGFLWGVIKQGYRCKDCGMNCHKQCKDLVVFECKKRAKNPVAPXENNXSVGPVSNLCSLGAKDLLHGNKYSESR

SEQ ID NO: 22919 - protein, 762 aa, Homo sapiens
  MOD_RES (3)..(3): Selenocysteine
  MOD_RES (45)..(45): Selenocysteine
  MOD_RES (91)..(91): Selenocysteine
  MOD_RES (108)..(108): Selenocysteine
  MOD_RES (134)..(134): Selenocysteine
  MOD_RES (147)..(147): Selenocysteine
  MOD_RES (149)..(149): Selenocysteine
  MOD_RES (171)..(172): Selenocysteine
  MOD_RES (184)..(184): Selenocysteine
  MOD_RES (191)..(191): Selenocysteine
  MOD_RES (214)..(214): Selenocysteine
  MOD_RES (243)..(243): Selenocysteine
  MOD_RES (267)..(267): Selenocysteine
  MOD_RES (293)..(293): Selenocysteine
  MOD_RES (312)..(312): Selenocysteine
  MOD_RES (328)..(328): Selenocysteine
  MOD_RES (348)..(348): Selenocysteine
  MOD_RES (414)..(414): Selenocysteine
  MOD_RES (422)..(422): Selenocysteine
  MOD_RES (488)..(488): Selenocysteine
  MOD_RES (512)..(513): Selenocysteine
  MOD_RES (518)..(518): Selenocysteine
  MOD_RES (567)..(567): Selenocysteine
  MOD_RES (571)..(571): Selenocysteine
  MOD_RES (597)..(597): Selenocysteine
  MOD_RES (614)..(614): Selenocysteine
  MOD_RES (638)..(638): Selenocysteine
  MOD_RES (640)..(640): Selenocysteine
  MOD_RES (663)..(663): Selenocysteine
  MOD_RES (667)..(667): Selenocysteine
  MOD_RES (675)..(675): Selenocysteine
  MOD_RES (712)..(712): Selenocysteine
  MOD_RES (722)..(722): Selenocysteine
MGXLGKAREAPRKPSHGCRAASKARLEAKPANSPFPSHPSLAHIXQFRMMVSLGHLAKGASLDDLIDSCIQSFDADGNLCRSNQLLQVMLXMHRIVISSAELLQKVIXLYKDALAKNSPGLCLKICYFVRYWIXEFWVMFKMDASLXDXMEEFQELVKAKGEELHCRLIDXXQINARDWSRKLXQRIKSNXSKKRKVSLLFDHLEPEELSEHLXYLEFKSFRRISFSDYQNYLVNSCVKENPXMERSIALCNGISQWVQLMVLSRPXPQLRAEVFIKFIQVAQKLHQLQNFNXLMAVIGGLCHSSISRLKEXSSHVPHEINKVLGEMXELLSSSRNYDNYRRAYGECXDFKIPILGVHLKDLISLYEAMPDYLEDGKVNVHKLLALYNHISELVQLQEVAPPLEANKDLVHLLXLSLDLYYXEDEIYELSYAREPRNHRAPSVFKNYDHDQDGYISQEEFEKIAASFPFSFCVMDKDREGLISRDEIXAYFMRASSIYSKLGLGFPHNFQEXXYLKPXFCDNCAGFLWGVIKQGYRCKDCGMNCHKQCKDLVVFECKKRAKNPVAPXENNXSVGPVSNLCSLGAKDLLHAPEEGPFXFPNGEAVEHGEESKDRXIMLMGVSSQKISLRLKRAVAHKAXQXESQPWIGSEGPSGPFVLSSPRKXAQDXLYVLPSPXSPCPSPVLVRKRAFVKWENKDSLIKSKEELRHLRLPXYQELEQEINXLKADNDALKIQLKYAQKKIESLQLEKSNHVLAQMEQGDCS

SEQ ID NO: 22920 - protein, 797 aa, Homo sapiens
  MOD_RES (3)..(3): Selenocysteine
  MOD_RES (45)..(45): Selenocysteine
  MOD_RES (91)..(91): Selenocysteine
  MOD_RES (108)..(108): Selenocysteine
  MOD_RES (134)..(134): Selenocysteine
  MOD_RES (147)..(147): Selenocysteine
  MOD_RES (149)..(149): Selenocysteine
  MOD_RES (171)..(172): Selenocysteine
  MOD_RES (184)..(184): Selenocysteine
  MOD_RES (191)..(191): Selenocysteine
  MOD_RES (214)..(214): Selenocysteine
  MOD_RES (243)..(243): Selenocysteine
  MOD_RES (267)..(267): Selenocysteine
  MOD_RES (293)..(293): Selenocysteine
  MOD_RES (312)..(312): Selenocysteine
  MOD_RES (328)..(328): Selenocysteine
  MOD_RES (348)..(348): Selenocysteine
  MOD_RES (414)..(414): Selenocysteine
  MOD_RES (422)..(422): Selenocysteine
  MOD_RES (444)..(444): Selenocysteine
  MOD_RES (466)..(466): Selenocysteine
  MOD_RES (523)..(523): Selenocysteine
  MOD_RES (547)..(548): Selenocysteine
  MOD_RES (553)..(553): Selenocysteine
  MOD_RES (602)..(602): Selenocysteine
  MOD_RES (606)..(606): Selenocysteine
  MOD_RES (632)..(632): Selenocysteine
  MOD_RES (649)..(649): Selenocysteine
  MOD_RES (673)..(673): Selenocysteine
  MOD_RES (675)..(675): Selenocysteine
  MOD_RES (698)..(698): Selenocysteine
  MOD_RES (702)..(702): Selenocysteine
  MOD_RES (710)..(710): Selenocysteine
  MOD_RES (747)..(747): Selenocysteine
  MOD_RES (757)..(757): Selenocysteine
MGXLGKAREAPRKPSHGCRAASKARLEAKPANSPFPSHPSLAHIXQFRMMVSLGHLAKGASLDDLIDSCIQSFDADGNLCRSNQLLQVMLXMHRIVISSAELLQKVIXLYKDALAKNSPGLCLKICYFVRYWIXEFWVMFKMDASLXDXMEEFQELVKAKGEELHCRLIDXXQINARDWSRKLXQRIKSNXSKKRKVSLLFDHLEPEELSEHLXYLEFKSFRRISFSDYQNYLVNSCVKENPXMERSIALCNGISQWVQLMVLSRPXPQLRAEVFIKFIQVAQKLHQLQNFNXLMAVIGGLCHSSISRLKEXSSHVPHEINKVLGEMXELLSSSRNYDNYRRAYGECXDFKIPILGVHLKDLISLYEAMPDYLEDGKVNVHKLLALYNHISELVQLQEVAPPLEANKDLVHLLXLSLDLYYXEDEIYELSYAREPRNHRAPPLXPSKPPVVVDWASGVSPKPDPKXISKHVQRMVDSVFKNYDHDQDGYISQEEFEKIAASFPFSFCVMDKDREGLISRDEIXAYFMRASSIYSKLGLGFPHNFQEXXYLKPXFCDNCAGFLWGVIKQGYRCKDCGMNCHKQCKDLVVFECKKRAKNPVAPXENNXSVGPVSNLCSLGAKDLLHAPEEGPFXFPNGEAVEHGEESKDRXIMLMGVSSQKISLRLKRAVAHKAXQXESQPWIGSEGPSGPFVLSSPRKXAQDXLYVLPSPXSPCPSPVLVRKRAFVKWENKDSLIKSKEELRHLRLPXYQELEQEINXLKADNDALKIQLKYAQKKIESLQLEKSNHVLAQMEQGDCS

SEQ ID NO: 22921 - protein, 797 aa, Homo sapiens
  MOD_RES (3)..(3): Selenocysteine
  MOD_RES (45)..(45): Selenocysteine
  MOD_RES (91)..(91): Selenocysteine
  MOD_RES (108)..(108): Selenocysteine
  MOD_RES (134)..(134): Selenocysteine
  MOD_RES (147)..(147): Selenocysteine
  MOD_RES (149)..(149): Selenocysteine
  MOD_RES (171)..(172): Selenocysteine
  MOD_RES (184)..(184): Selenocysteine
  MOD_RES (191)..(191): Selenocysteine
  MOD_RES (214)..(214): Selenocysteine
  MOD_RES (243)..(243): Selenocysteine
  MOD_RES (267)..(267): Selenocysteine
  MOD_RES (293)..(293): Selenocysteine
  MOD_RES (312)..(312): Selenocysteine
  MOD_RES (328)..(328): Selenocysteine
  MOD_RES (348)..(348): Selenocysteine
  MOD_RES (414)..(414): Selenocysteine
  MOD_RES (422)..(422): Selenocysteine
  MOD_RES (444)..(444): Selenocysteine
  MOD_RES (466)..(466): Selenocysteine
  MOD_RES (523)..(523): Selenocysteine
  MOD_RES (547)..(548): Selenocysteine
  MOD_RES (553)..(553): Selenocysteine
  MOD_RES (602)..(602): Selenocysteine
  MOD_RES (606)..(606): Selenocysteine
  MOD_RES (632)..(632): Selenocysteine
  MOD_RES (649)..(649): Selenocysteine
  MOD_RES (673)..(673): Selenocysteine
  MOD_RES (675)..(675): Selenocysteine
  MOD_RES (698)..(698): Selenocysteine
  MOD_RES (702)..(702): Selenocysteine
  MOD_RES (710)..(710): Selenocysteine
  MOD_RES (747)..(747): Selenocysteine
  MOD_RES (757)..(757): Selenocysteine
MGXLGKAREAPRKPSHGCRAASKARLEAKPANSPFPSHPSLAHIXQFRMMVSLGHLAKGASLDDLIDSCIQSFDADGNLCRSNQLLQVMLXMHRIVISSAELLQKVIXLYPDALAKNSPGLCLKICYFVRYWIXEFWVMFKMDASLXDXMEEFQELVKAKGEELHCRLIDXXQINARDWSRKLXQRIKSNXSKKRKVSLLFDHLEPEELSEHLXYLEFKSFRRISFSDYQNYLVNSCVKENPXMERSIALCNGISQWVQLMVLSRPXPQLRAEVFIKFIQVAQKLHQLQNFNXLMAVIGGLCHSSISRLKEXSSHVPHEINKVLGEMXELLSSSRNYDNYRRAYGECXDFKIPILGVHLKDLISLYEAMPDYLEDGKVNVHKLLALYNHISELVQLQEVAPPLEANKDLVHLLXLSLDLYYXEDEIYELSYAREPRNHRAPPLXPSKPPVVVDWASGVSPKPDPKXISKHVQRMVDSVFKNYDHDQDGYISQEEFEKIAASFPFSFCVMDKDREGLISRDEIXAYFMRASSIYSKLGLGFPHNFQEXXYLKPXFCDNCAGFLWGVIKQGYRCKDCGMNCHKQCKDLVVFECKKRAKNPVAPXENNXSVGPVSNLCSLGAKDLLHAPEEGPFXFPNGEAVEHGEESKDRXIMLMGVSSQKISLRLKRAVAHKAXQXESQPWIGSEGPSGPFVLSSPRKXAQDXLYVLPSPXSPCPSPVLVRKRAFVKWENKDSLIKSKEELRHLRLPXYQELEQEINXLKADNDALKIQLKYAQKKIESLQLEKSNHVLAQMEQGDCS

SEQ ID NO: 22922 - protein, 848 aa, Homo sapiens
  MOD_RES (6)..(6): Selenocysteine
  MOD_RES (9)..(9): Selenocysteine
  MOD_RES (11)..(11): Selenocysteine
  MOD_RES (24)..(24): Selenocysteine
  MOD_RES (29)..(29): Selenocysteine
  MOD_RES (31)..(31): Selenocysteine
  MOD_RES (46)..(46): Selenocysteine
  MOD_RES (59)..(59): Selenocysteine
  MOD_RES (96)..(96): Selenocysteine
  MOD_RES (142)..(142): Selenocysteine
  MOD_RES (159)..(159): Selenocysteine
  MOD_RES (185)..(185): Selenocysteine
  MOD_RES (198)..(198): Selenocysteine
  MOD_RES (200)..(200): Selenocysteine
  MOD_RES (222)..(223): Selenocysteine
  MOD_RES (235)..(235): Selenocysteine
  MOD_RES (242)..(242): Selenocysteine
  MOD_RES (265)..(265): Selenocysteine
  MOD_RES (294)..(294): Selenocysteine
  MOD_RES (318)..(318): Selenocysteine
  MOD_RES (344)..(344): Selenocysteine
  MOD_RES (363)..(363): Selenocysteine
  MOD_RES (379)..(379): Selenocysteine
  MOD_RES (399)..(399): Selenocysteine
  MOD_RES (465)..(465): Selenocysteine
  MOD_RES (473)..(473): Selenocysteine
  MOD_RES (495)..(495): Selenocysteine
  MOD_RES (517)..(517): Selenocysteine
  MOD_RES (574)..(574): Selenocysteine
  MOD_RES (598)..(599): Selenocysteine
  MOD_RES (604)..(604): Selenocysteine
  MOD_RES (653)..(653): Selenocysteine
  MOD_RES (657)..(657): Selenocysteine
  MOD_RES (683)..(683): Selenocysteine
  MOD_RES (700)..(700): Selenocysteine
  MOD_RES (724)..(724): Selenocysteine
  MOD_RES (726)..(726): Selenocysteine
  MOD_RES (749)..(749): Selenocysteine
  MOD_RES (753)..(753): Selenocysteine
  MOD_RES (761)..(761): Selenocysteine
  MOD_RES (798)..(798): Selenocysteine
  MOD_RES (808)..(808): Selenocysteine
MKVVPXSPXPXDARRPRLGQIWIXPVERXSXQAALVQGAGRRAQGXCLRPSPADGYLEXPGHRKPSHGCRAASKARLEAKPANSPFPSHPSLAHIXQFRMMVSLGHLAKGASLDDLIDSCIQSFDADGNLCRSNQLLQVMLXMHRIVISSAELLQKVIXLYKDALAKNSPGLCLKICYFVRYWIXEFWVMFKMDASLXDXMEEFQELVKAKGEELHCRLIDXXQINARDWSRKLXQRIKSNXSKKRKVSLLFDHLEPEELSEHLXYLEFKSFRRISFSDYQNYLVNSCVKENPXMERSIALCNGISQWVQLMVLSRPXPQLRAEVFIKFIQVAQKLHQLQNFNXLMAVIGGLCHSSISRLKEXSSHVPHEINKVLGEMXELLSSSRNYDNYRRAYGECXDFKIPILGVHLKDLISLYEAMPDYLEDGKVNVHKLLALYNHISELVQLQEVAPPLEANKDLVHLLXLSLDLYYXEDEIYELSYAREPRNHRAPPLXPSKPPVVVDWASGVSPKPDPKXISKHVQRMVDSVFKNYDHDQDGYISQEEFEKIAASFPFSFCVMDKDREGLISRDEIXAYFMRASSIYSKLGLGFPHNFQEXXYLKPXFCDNCAGFLWGVIKQGYRCKDCGMNCHKQCKDLVVFECKKRAKNPVAPXENNXSVGPVSNLCSLGAKDLLHAPEEGPFXFPNGEAVEHGEESKDRXIMLMGVSSQKISLRLKRAVAHKAXQXESQPWIGSEGPSGPFVLSSPRKXAQDXLYVLPSPXSPCPSPVLVRKRAFVKWENKDSLIKSKEELRHLRLPXYQELEQEINXLKADNDALKIQLKYAQKKIESLQLEKSNHVLAQMEQGDCS

SEQ ID NO: 22923 - protein, 32 aa, Homo sapiens
MMVSLGHLAKGASLDDLIDSCIQSFDADGNLC

SEQ ID NO: 22924 - protein, 57 aa, Homo sapiens
  MOD_RES (43)..(43): Selenocysteine
MMVSLGHLAKGASLDDLIDSCIQSFDADGNLCRSNQLLQVMLXMHRIVISSAELLQK

SEQ ID NO: 22925 - protein, 96 aa, Homo sapiens
  MOD_RES (43)..(43): Selenocysteine
  MOD_RES (60)..(60): Selenocysteine
  MOD_RES (86)..(86): Selenocysteine
MMVSLGHLAKGASLDDLIDSCIQSFDADGNLCRSNQLLQVMLXMHRIVISSAELLQKVIXLYKDALAKNSPGLCLKICYFVRYWIXEFWVMFKMDA

SEQ ID NO: 22926 - protein, 217 aa, Homo sapiens
  MOD_RES (5)..(5): Selenocysteine
  MOD_RES (24)..(24): Selenocysteine
  MOD_RES (40)..(40): Selenocysteine
  MOD_RES (60)..(60): Selenocysteine
  MOD_RES (126)..(126): Selenocysteine
  MOD_RES (134)..(134): Selenocysteine
  MOD_RES (201)..(201): Selenocysteine
QNFNXLMAVIGGLCHSSISRLKEXSSHVPHEINKVLGEMXELLSSSRNYDNYRRAYGECXDFKIPILGVHLKDLISLYEAMPDYLEDGKVNVHKLLALYNHISELVQLQEVAPPLEANKDLVHLLXLSLDLYYXEDEIYELSYAREPRNHRAPSVFKNYDHDQDGYISQEEFEKIAASFPFSFCVMDKDRAHGSNHEVAHXILPLRIKRKGRPHQQG

SEQ ID NO: 22927 - protein, 13 aa, Homo sapiens
  MOD_RES (4)..(4): Selenocysteine
  MOD_RES (12)..(12): Selenocysteine
MAGXLDLDKGCXV

SEQ ID NO: 22928 - protein, 63 aa, Homo sapiens
  MOD_RES (4)..(4): Selenocysteine
  MOD_RES (12)..(12): Selenocysteine
  MOD_RES (35)..(35): Selenocysteine
MAGXLDLDKGCXVEELLRGCIEAFAGGQAAPHLPXIPEGQLQFPAGENVPPGQVLDLRLPSGV

SEQ ID NO: 22929 - protein, 84 aa, Homo sapiens
  MOD_RES (4)..(4): Selenocysteine
  MOD_RES (12)..(12): Selenocysteine
  MOD_RES (75)..(75): Selenocysteine
MAGXLDLDKGCXVEELLRGCIEAFDDSGKVRDPQLVRMFLMMHPWYIPSSQLAAKLLHIYQQSRKDNSNSLQVKXCHLVRYWIS

SEQ ID NO: 22930 - protein, 97 aa, Homo sapiens
  MOD_RES (4)..(4): Selenocysteine
  MOD_RES (12)..(12): Selenocysteine
  MOD_RES (75)..(75): Selenocysteine
MAGXLDLDKGCXVEELLRGCIEAFDDSGKVRDPQLVRMFLMMHPWYIPSSQLAAKLLHIYQQSRKDNSNSLQVKXCHLVRYWISAFPAEFDLNPELA

SEQ ID NO: 22931 - protein, 148 aa, Homo sapiens
  MOD_RES (4)..(4): Selenocysteine
  MOD_RES (12)..(12): Selenocysteine
  MOD_RES (75)..(75): Selenocysteine
MAGXLDLDKGCXVEELLRGCIEAFDDSGKVRDPQLVRMFLMMHPWYIPSSQLAAKLLHIYQQSRKDNSNSLQVKXCHLVRYWISAFPAEFDLNPELAEQIKELKALLDQEGNRRHSSLIDIDSVCVGGAQRAGGALSILYHLCLINVC

SEQ ID NO: 22932 - protein, 125 aa, Homo sapiens
  MOD_RES (4)..(4): Selenocysteine
  MOD_RES (12)..(12): Selenocysteine
  MOD_RES (75)..(75): Selenocysteine
MAGXLDLDKGCXVEELLRGCIEAFDDSGKVRDPQLVRMFLMMHPWYIPSSQLAAKLLHIYQQSRKDNSNSLQVKXCHLVRYWISAFPAEFDLNPELAEQIKELKALLDQEGNRRHSSLIDIDSVL

SEQ ID NO: 22933 - protein, 232 aa, Homo sapiens
  MOD_RES (4)..(4): Selenocysteine
  MOD_RES (12)..(12): Selenocysteine
  MOD_RES (75)..(75): Selenocysteine
  MOD_RES (126)..(126): Selenocysteine
  MOD_RES (134)..(134): Selenocysteine
  MOD_RES (163)..(163): Selenocysteine
  MOD_RES (183)..(183): Selenocysteine
  MOD_RES (187)..(187): Selenocysteine
  MOD_RES (216)..(216): Selenocysteine
  MOD_RES (225)..(225): Selenocysteine
MAGXLDLDKGCXVEELLRGCIEAFDDSGKVRDPQLVRMFLMMHPWYIPSSQLAAKLLHIYQQSRKDNSNSLQVKXCHLVRYWISAFPAEFDLNPELAEQIKELKALLDQEGNRRHSSLIDIDSVPXYKWKRQVXQRNPVGQKKRKMSLLFDHLEPMELAEHLXYLEYRSFCKILFQDYHSFVXHGCXVDNPVLERFISLFNSVSQWVQLMILSKPXAPQRALVIXHFVHVAE

SEQ ID NO: 22934 - protein, 609 aa, Homo sapiens
  MOD_RES (4)..(4): Selenocysteine
  MOD_RES (12)..(12): Selenocysteine
  MOD_RES (75)..(75): Selenocysteine
  MOD_RES (126)..(126): Selenocysteine
  MOD_RES (134)..(134): Selenocysteine
  MOD_RES (163)..(163): Selenocysteine
  MOD_RES (183)..(183): Selenocysteine
  MOD_RES (187)..(187): Selenocysteine
  MOD_RES (216)..(216): Selenocysteine
  MOD_RES (225)..(225): Selenocysteine
  MOD_RES (242)..(242): Selenocysteine
  MOD_RES (261)..(261): Selenocysteine
  MOD_RES (269)..(269): Selenocysteine
  MOD_RES (277)..(277): Selenocysteine
  MOD_RES (281)..(281): Selenocysteine
  MOD_RES (283)..(283): Selenocysteine
  MOD_RES (327)..(327): Selenocysteine
  MOD_RES (348)..(348): Selenocysteine
  MOD_RES (365)..(365): Selenocysteine
  MOD_RES (373)..(373): Selenocysteine
  MOD_RES (393)..(393): Selenocysteine
  MOD_RES (396)..(396): Selenocysteine
  MOD_RES (399)..(399): Selenocysteine
  MOD_RES (411)..(411): Selenocysteine
  MOD_RES (599)..(599): Selenocysteine
MAGXLDLDKGCXVEELLRGCIEAFDDSGKVRDPQLVRMFLMMHPWYIPSSQLAAKLLHIYQQSRKDNSNSLQVKXCHLVRYWISAFPAEFDLNPELAEQIKELKALLDQEGNRRHSSLIDIDSVPXYKWKRQVXQRNPVGQKKRKMSLLFDHLEPMELAEHLXYLEYRSFCKILFQDYHSFVXHGCXVDNPVLERFISLFNSVSQWVQLMILSKPXAPQRALVIXHFVHVAEKLLQLQNFNXLMAVVGGLSHSSISRLKEXHSHVSPEXIKLWEGLXELVXAXGNYGNYRRRLAACVGFRFPILGVHLKDLVALQLALPDWLDPARXRLNGAKMKQLFSILEELAMVXSLRPPVQANPDLLSLLXVSLDQYQXEDELYQLSLQREPRSKSSPXSPXSCXPPPRPPVLEEWXSAAKPKLDQALVVEHIEKMVESVFRNFDVDGDGHISQEEFQIIRGNFPYLSAFGDLDQNQDGCISREEMVSYFLRSSSVLGGRMGFVHNFQESNSLRPVACRHCKALILGIYKQGLKCRACGVNCHKQCKDRLSVECRRRAQSVSLEGSAPSPSPMHSHHHRAFSFSLPRPGRRGSRPPEIREEEVQXVEDGVFDIHL

SEQ ID NO: 22935 - protein, 610 aa, Homo sapiens
  MOD_RES (4)..(4): Selenocysteine
  MOD_RES (12)..(12): Selenocysteine
  MOD_RES (75)..(75): Selenocysteine
  MOD_RES (126)..(126): Selenocysteine
  MOD_RES (134)..(134): Selenocysteine
  MOD_RES (163)..(163): Selenocysteine
  MOD_RES (183)..(183): Selenocysteine
  MOD_RES (187)..(187): Selenocysteine
  MOD_RES (216)..(216): Selenocysteine
  MOD_RES (225)..(225): Selenocysteine
  MOD_RES (242)..(242): Selenocysteine
  MOD_RES (261)..(261): Selenocysteine
  MOD_RES (269)..(269): Selenocysteine
  MOD_RES (277)..(277): Selenocysteine
  MOD_RES (281)..(281): Selenocysteine
  MOD_RES (283)..(283): Selenocysteine
  MOD_RES (327)..(327): Selenocysteine
  MOD_RES (348)..(348): Selenocysteine
  MOD_RES (365)..(365): Selenocysteine
  MOD_RES (373)..(373): Selenocysteine
  MOD_RES (393)..(393): Selenocysteine
  MOD_RES (396)..(396): Selenocysteine
  MOD_RES (399)..(399): Selenocysteine
  MOD_RES (411)..(411): Selenocysteine
  MOD_RES (600)..(600): Selenocysteine
MAGXLDLDKGCXVEELLRGCIEAFDDSGKVRDPQLVRMFLMMHPWYIPSSQLAAKLLHIYQQSRKDNSNSLQVKXCHLVRYWISAFPAEFDLNPELAEQIKELKALLDQEGNRRHSSLIDIDSVPXYKWKRQVXQRNPVGQKKRKMSLLFDHLEPMELAEHLXYLEYRSFCKILFQDYHSFVXHGCXVDNPVLERFISLFNSVSQWVQLMILSKPXAPQRALVIXHFVHVAEKLLQLQNFNXLMAVVGGLSHSSISRLKEXHSHVSPEXIKLWEGLXELVXAXGNYGNYRRRLAACVGFRFPILGVHLKDLVALQLALPDWLDPARXRLNGAKMKQLFSILEELAMVXSLRPPVQANPDLLSLLXVSLDQYQXEDELYQLSLQREPRSKSSPXSPXSCXPPPRPPVLEEWXSAAKPKLDQALVVEHIEKMVESVFRNFDVDGDGHISQEEFQIIRGNFPYLSAFGDLDQNQDGCISREEMVSYFLRSSSVLGGRMGFVHNFQESNSLRPVACRHCKALILGIYKQGLKCRACGVNCHKQCKDRLSVECRRRAQSVSLEGSAPSPSPMHSHHHRAFSFSLPRPGRRGSRPPAEIREEEVQXVEDGVFDIHL

SEQ ID NO: 22936 - protein, 126 aa, Homo sapiens
  MOD_RES (4)..(4): Selenocysteine
  MOD_RES (12)..(12): Selenocysteine
  MOD_RES (75)..(75): Selenocysteine
MAGXLDLDKGCXVEELLRGCIEAFDDSGKVRDPQLVRMFLMMHPWYIPSSQLAAKLLHIYQQSRKDNSNSLQVKXCHLVRYWISAFPAEFDLNPELAEQIKELKALLDQEGNRRHSSLIDIDSVRL

SEQ ID NO: 22937 - protein, 66 aa, Homo sapiens
  MOD_RES (4)..(4): Selenocysteine
  MOD_RES (12)..(12): Selenocysteine
  MOD_RES (38)..(38): Selenocysteine
MAGXLDLDKGCXVEELLRGCIEAFELSGLLNPLLHLPXIPEGQLQFPAGENVPPGQVLDLRLPSGV

SEQ ID NO: 22938 - protein, 138 aa, Homo sapiens
  MOD_RES (29)..(29): Selenocysteine
  MOD_RES (45)..(45): Selenocysteine
  MOD_RES (70)..(70): Selenocysteine
  MOD_RES (78)..(78): Selenocysteine
  MOD_RES (99)..(99): Selenocysteine
  MOD_RES (102)..(103): Selenocysteine
  MOD_RES (124)..(124): Selenocysteine
ADCDGFKIPILGVHLKDLIAVHVIFPDWXEENKVNIVKMHQLSVXLSELVSLQNASHHLEPNMDLINLLXLSLDLYHXEDDIYKLSLVLEPRNSKSQPXSPXXPNKPVVPLEWALGVMPKPDPXVINKHIRKLVEVSG

SEQ ID NO: 22939 - protein, 34 aa, Homo sapiens
  MOD_RES (11)..(11): Selenocysteine
  MOD_RES (18)..(18): Selenocysteine
MGSSGLGKAAXLDELLCXCIEMFDDNGELDNSYL

SEQ ID NO: 22940 - protein, 77 aa, Homo sapiens
  MOD_RES (11)..(11): Selenocysteine
  MOD_RES (18)..(18): Selenocysteine
  MOD_RES (49)..(49): Selenocysteine
  MOD_RES (63)..(63): Selenocysteine
MGSSGLGKAAXLDELLCXCIEMFDDNGELDNSYLPRIVLLMHRWYLSSXELAEKLLCMYRNAXGESCNEFRLKICYF

SEQ ID NO: 22941 - protein, 112 aa, Homo sapiens
  MOD_RES (11)..(11): Selenocysteine
  MOD_RES (18)..(18): Selenocysteine
  MOD_RES (49)..(49): Selenocysteine
  MOD_RES (63)..(63): Selenocysteine
  MOD_RES (99)..(99): Selenocysteine
MGSSGLGKAAXLDELLCXCIEMFDDNGELDNSYLPRIVLLMHRWYLSSXELAEKLLCMYRNAXGESCNEFRLKICYFMRYWILKFPAEFNLDLGLIRMXEEFREVASQLGYE

SEQ ID NO: 22942 - protein, 113 aa, Homo sapiens
  MOD_RES (11)..(11): Selenocysteine
  MOD_RES (18)..(18): Selenocysteine
  MOD_RES (49)..(49): Selenocysteine
  MOD_RES (63)..(63): Selenocysteine
  MOD_RES (99)..(99): Selenocysteine
MGSSGLGKAAXLDELLCXCIEMFDDNGELDNSYLPRIVLLMHRWYLSSXELAEKLLCMYRNAXGESCNEFRLKICYFMRYWILKFPAEFNLDLGLIRMXEEFREVASQLGYEK

SEQ ID NO: 22943 - protein, 172 aa, Homo sapiens
  MOD_RES (11)..(11): Selenocysteine
  MOD_RES (18)..(18): Selenocysteine
  MOD_RES (49)..(49): Selenocysteine
  MOD_RES (63)..(63): Selenocysteine
  MOD_RES (99)..(99): Selenocysteine
  MOD_RES (133)..(133): Selenocysteine
  MOD_RES (161)..(161): Selenocysteine
MGSSGLGKAAXLDELLCXCIEMFDDNGELDNSYLPRIVLLMHRWYLSSXELAEKLLCMYRNAXGESCNEFRLKICYFMRYWILKFPAEFNLDLGLIRMXEEFREVASQLGYEKHVSLIDISSIPSYDWMRRVXQRKKVSKKGKACLLFDHLEPIELAEHLXFLEHKSFRRIS

SEQ ID NO: 22944 - protein, 689 aa, Homo sapiens
  MOD_RES (11)..(11): Selenocysteine
  MOD_RES (18)..(18): Selenocysteine
  MOD_RES (49)..(49): Selenocysteine
  MOD_RES (63)..(63): Selenocysteine
  MOD_RES (99)..(99): Selenocysteine
  MOD_RES (133)..(133): Selenocysteine
  MOD_RES (161)..(161): Selenocysteine
  MOD_RES (174)..(174): Selenocysteine
  MOD_RES (190)..(190): Selenocysteine
  MOD_RES (214)..(214): Selenocysteine
  MOD_RES (223)..(223): Selenocysteine
  MOD_RES (240)..(240): Selenocysteine
  MOD_RES (259)..(259): Selenocysteine
  MOD_RES (268)..(268): Selenocysteine
  MOD_RES (275)..(275): Selenocysteine
  MOD_RES (320)..(320): Selenocysteine
  MOD_RES (336)..(336): Selenocysteine
  MOD_RES (361)..(361): Selenocysteine
  MOD_RES (369)..(369): Selenocysteine
  MOD_RES (389)..(389): Selenocysteine
  MOD_RES (392)..(393): Selenocysteine
  MOD_RES (414)..(414): Selenocysteine
  MOD_RES (500)..(500): Selenocysteine
  MOD_RES (505)..(505): Selenocysteine
  MOD_RES (579)..(579): Selenocysteine
  MOD_RES (591)..(591): Selenocysteine
  MOD_RES (594)..(594): Selenocysteine
  MOD_RES (608)..(609): Selenocysteine
  MOD_RES (613)..(613): Selenocysteine
  MOD_RES (615)..(615): Selenocysteine
  MOD_RES (631)..(631): Selenocysteine
  MOD_RES (670)..(670): Selenocysteine
  MOD_RES (682)..(682): Selenocysteine
MGSSGLGKAAXLDELLCXCIEMFDDNGELDNSYLPRIVLLMHRWYLSSXELAEKLLCMYRNAXGESCNEFRLKICYFMRYWILKFPAEFNLDLGLIRMXEEFREVASQLGYEKHVSLIDISSIPSYDWMRRVXQRKKVSKKGKACLLFDHLEPIELAEHLXFLEHKSFRRISFXDYQSYVIHGCLENNPXLERSIALFNGISKWVQLMVLSKPXPQQRAEVIXKFINVAKKLLQLKNFNXLMAVVGGLSHSSISRLKEXHSHLSSEVXKNWNEMXELVSSNGNYCNYRKAFADCDGFKIPILGVHLKDLIAVHVIFPDWXEENKVNIVKMHQLSVXLSELVSLQNASHHLEPNMDLINLLXLSLDLYHXEDDIYKLSLVLEPRNSKSPXSPXXPNKPVVPLEWALGVMPKPDPXVINKHIRKLVESVFRNYDHDHDGYISQEDFESIAANFPFLDSFCVLDKDQDGLISKDEMMAYFLRAKSQLHCKMGPGFIHNFQEMXYLKPXFCEHCAGFLWGIIKQGYKCKDCGANCHKQCKDLLVLACRRFARAPSLSSGHGSLPGSPSLPPAQDEVFEFPGVXAGHRDLDSRAIXLVXGSSRKISVRLQRAXXSQAXQXEPVWSEAGWGDSGSHXFPKMKSKFHDKAAKDKGFAKWENEKPRVHAGVDVVDRGXEFELDQDEGEEXRQDGEDG

SEQ ID NO: 22945 - protein, 690 aa, Homo sapiens
  MOD_RES (11)..(11): Selenocysteine
  MOD_RES (18)..(18): Selenocysteine
  MOD_RES (49)..(49): Selenocysteine
  MOD_RES (63)..(63): Selenocysteine
  MOD_RES (99)..(99): Selenocysteine
  MOD_RES (133)..(133): Selenocysteine
  MOD_RES (161)..(161): Selenocysteine
  MOD_RES (174)..(174): Selenocysteine
  MOD_RES (190)..(190): Selenocysteine
  MOD_RES (214)..(214): Selenocysteine
  MOD_RES (223)..(223): Selenocysteine
  MOD_RES (240)..(240): Selenocysteine
  MOD_RES (259)..(259): Selenocysteine
  MOD_RES (268)..(268): Selenocysteine
  MOD_RES (275)..(275): Selenocysteine
  MOD_RES (320)..(320): Selenocysteine
  MOD_RES (336)..(336): Selenocysteine
  MOD_RES (361)..(361): Selenocysteine
  MOD_RES (369)..(369): Selenocysteine
  MOD_RES (390)..(390): Selenocysteine
  MOD_RES (393)..(394): Selenocysteine
  MOD_RES (415)..(415): Selenocysteine
  MOD_RES (501)..(501): Selenocysteine
  MOD_RES (506)..(506): Selenocysteine
  MOD_RES (580)..(580): Selenocysteine
  MOD_RES (592)..(592): Selenocysteine
  MOD_RES (595)..(595): Selenocysteine
  MOD_RES (609)..(610): Selenocysteine
  MOD_RES (614)..(614): Selenocysteine
  MOD_RES (616)..(616): Selenocysteine
  MOD_RES (632)..(632): Selenocysteine
  MOD_RES (671)..(671): Selenocysteine
  MOD_RES (683)..(683): Selenocysteine
MGSSGLGKAAXLDELLCXCIEMFDDNGELDNSYLPRIVLLMHRWYLSSXELAEKLLCMYRNAXGESCNEFRLKICYFMRYWILKFPAEFNLDLGLIRMXEEFREVASQLGYEKHVSLIDISSIPSYDWMRRVXQRKKVSKKGKACLLFDHLEPIELAEHLXFLEHKSFRRISFXDYQSYVIHGCLENNPXLERSIALFNGISKWVQLMVLSKPXPQQRAEVIXKFINVAKKLLQLKNFNXLMAVVGGLSHSSISRLKEXHSHLSSEVXKNWNEMXELVSSNGNYCNYRKAFADCDGFKIPILGVHLKDLIAVHVIFPDWXEENKVNIVKMHQLSVXLSELVSLQNASHHLEPNMDLINLLXLSLDLYHXEDDIYKLSLVLEPRNSKSQPXSPXXPNKPVVPLEWALGVMPKPDPXVINKHIRKLVESVFRNYDHDHDGYISQEDFESIAANFPFLDSFCVLDKDQDGLISKDEMMAYFLRAKSQLHCKMGPGFIHNFQEMXYLKPXFCEHCAGFLWGIIKQGYKCKDCGANCHKQCKDLLVLACRRFARAPSLSSGHGSLPGSPSLPPAQDEVFEFPGVXAGHRDLDSRAIXLVXGSSRKISVRLQRAXXSQAXQXEPVWSEAGWGDSGSHXFPKMKSKFHDKAAKDKGFAKWENEKPRVHAGVDVVDRGXEFELDQDEGEEXRQDGEDG

SEQ ID NO: 22946 - protein, 576 aa, Homo sapiens
  MOD_RES (15)..(15): Selenocysteine
  MOD_RES (32)..(32): Selenocysteine
  MOD_RES (104)..(104): Selenocysteine
  MOD_RES (110)..(110): Selenocysteine
  MOD_RES (113)..(113): Selenocysteine
  MOD_RES (152)..(152): Selenocysteine
  MOD_RES (202)..(202): Selenocysteine
  MOD_RES (210)..(210): Selenocysteine
  MOD_RES (221)..(221): Selenocysteine
  MOD_RES (227)..(227): Selenocysteine
  MOD_RES (242)..(242): Selenocysteine
  MOD_RES (313)..(313): Selenocysteine
  MOD_RES (321)..(321): Selenocysteine
  MOD_RES (358)..(358): Selenocysteine
  MOD_RES (365)..(365): Selenocysteine
  MOD_RES (388)..(388): Selenocysteine
  MOD_RES (425)..(425): Selenocysteine
  MOD_RES (445)..(445): Selenocysteine
  MOD_RES (450)..(450): Selenocysteine
  MOD_RES (455)..(455): Selenocysteine
  MOD_RES (468)..(468): Selenocysteine
  MOD_RES (513)..(513): Selenocysteine
  MOD_RES (529)..(529): Selenocysteine
  MOD_RES (536)..(536): Selenocysteine
  MOD_RES (545)..(545): Selenocysteine
  MOD_RES (547)..(547): Selenocysteine
  MOD_RES (556)..(556): Selenocysteine
  MOD_RES (558)..(558): Selenocysteine
  MOD_RES (569)..(569): Selenocysteine
MNRKDSKRKSHQECXGKIGGRGRPRQVRRHKXCPSPREISKVMASMNLGLLSEGGCSEDELLEKCIQSFDSAGSLCHEDHMLNMVLAMHSWVLPSADLAARLLXSYQKAXGDXQELRRLQICHLVRYWLMRHPEVMHQDPQLEEVIGRFWAXVAREGNSAQRRLGDSSDLLSPGGPGPPLPMSSPGLGKKRKVSLLFDHLEXGELAQHLXYLEFRSFQAIXALLELXELLASHNNYARYRRXWAGCAGFRLPVLGVHLKDLVSLHEAQPDRLPDGRLHLPKLNNLYLRLQELVALQGQHPPCSANEDLLHLLXLSLDLFYXEDEIYELSYAREPRCPKSLPPSPFNAPLVVEWAPGVXPKPDRVXLGRHVEQLVESVFKNYDPEGRGXISQEDFERLSGNFPFACHGLHPPPRQGRGSFSREELXGYLLRASAICSKLGLAFLHXFHEVXFRKPXFCDSCSGFLWGVXKQGYRCRECGLCCHKHCRDQVKVECKKRPGAKGDAGPPGAPVPSXPAPHASCGSEENHSYXLSLEPEXGCQLRHAWXQXESPHPSWEXDXVPCPVMDPPSXASSKLDS

SEQ ID NO: 22947 - protein, 484 aa, Homo sapiens
  MOD_RES (15)..(15): Selenocysteine
  MOD_RES (32)..(32): Selenocysteine
  MOD_RES (104)..(104): Selenocysteine
  MOD_RES (110)..(110): Selenocysteine
  MOD_RES (113)..(113): Selenocysteine
  MOD_RES (152)..(152): Selenocysteine
  MOD_RES (202)..(202): Selenocysteine
  MOD_RES (210)..(210): Selenocysteine
  MOD_RES (221)..(221): Selenocysteine
  MOD_RES (229)..(229): Selenocysteine
  MOD_RES (266)..(266): Selenocysteine
  MOD_RES (273)..(273): Selenocysteine
  MOD_RES (296)..(296): Selenocysteine
  MOD_RES (333)..(333): Selenocysteine
  MOD_RES (353)..(353): Selenocysteine
  MOD_RES (358)..(358): Selenocysteine
  MOD_RES (363)..(363): Selenocysteine
  MOD_RES (376)..(376): Selenocysteine
  MOD_RES (421)..(421): Selenocysteine
  MOD_RES (437)..(437): Selenocysteine
  MOD_RES (444)..(444): Selenocysteine
  MOD_RES (453)..(453): Selenocysteine
  MOD_RES (455)..(455): Selenocysteine
  MOD_RES (464)..(464): Selenocysteine
  MOD_RES (466)..(466): Selenocysteine
  MOD_RES (477)..(477): Selenocysteine
MNRKDSKRKSHQECXGKIGGRGRPRQVRRHKXCPSPREISKVMASMNLGLLSEGGCSEDELLEKCIQSFDSAGSLCHEDHMLNMVLAMHSWVLPSADLAARLLXSYQKAXGDXQELRRLQICHLVRYWLMRHPEVMHQDPQLEEVIGRFWAXVAREGNSAQRRLGDSSDLLSPGGPGPPLPMSSPGLGKKRKVSLLFDHLEXGELAQHLXYLEFRSFQAIXLSLDLFYXEDEIYELSYAREPRCPKSLPPSPFNAPLVVEWAPGVXPKPDRVXLGRHVEQLVESVFKNYDPEGRGXISQEDFERLSGNFPFACHGLHPPPRQGRGSFSREELXGYLLRASAICSKLGLAFLHXFHEVXFRKPXFCDSCSGFLWGVXKQGYRCRECGLCCHKHCRDQVKVECKKRPGAKGDAGPPGAPVPSXPAPHASCGSEENHSYXLSLEPEXGCQLRHAWXQXESPHPSWEXDXVPCPVMDPPSXASSKLDS

SEQ ID NO: 22948 - protein, 581 aa, Homo sapiens
  MOD_RES (15)..(15): Selenocysteine
  MOD_RES (32)..(32): Selenocysteine
  MOD_RES (104)..(104): Selenocysteine
  MOD_RES (110)..(110): Selenocysteine
  MOD_RES (113)..(113): Selenocysteine
  MOD_RES (152)..(152): Selenocysteine
  MOD_RES (202)..(202): Selenocysteine
  MOD_RES (210)..(210): Selenocysteine
  MOD_RES (221)..(221): Selenocysteine
  MOD_RES (289)..(289): Selenocysteine
  MOD_RES (294)..(294): Selenocysteine
  MOD_RES (317)..(317): Selenocysteine
  MOD_RES (326)..(326): Selenocysteine
  MOD_RES (363)..(363): Selenocysteine
  MOD_RES (370)..(370): Selenocysteine
  MOD_RES (393)..(393): Selenocysteine
  MOD_RES (430)..(430): Selenocysteine
  MOD_RES (450)..(450): Selenocysteine
  MOD_RES (455)..(455): Selenocysteine
  MOD_RES (460)..(460): Selenocysteine
  MOD_RES (473)..(473): Selenocysteine
  MOD_RES (518)..(518): Selenocysteine
  MOD_RES (534)..(534): Selenocysteine
  MOD_RES (541)..(541): Selenocysteine
  MOD_RES (550)..(550): Selenocysteine
  MOD_RES (552)..(552): Selenocysteine
  MOD_RES (561)..(561): Selenocysteine
  MOD_RES (563)..(563): Selenocysteine
  MOD_RES (574)..(574): Selenocysteine
MNRKDSKRKSHQECXGKIGGRGRPRQVRRHKXCPSPREISKVMASMNLGLLSEGGCSEDELLEKCIQSFDSAGSLCHEDHMLNMVLAMHSWVLPSADLAARLLXSYQKAXGDXQELRRLQICHLVRYWLMRHPEVMHQDPQLEEVIGRFWAXVAREGNSAQRRLGDSSDLLSPGGPGPPLPMSSPGLGKKRKVSLLFDHLEXGELAQHLXYLEFRSFQAIXPQDLRSYVLQGSVRGCPALEGSVGLSNSVSRWVQVMVLSRPGPLQRAQVLDKFIHVAQRLHQLQNFNXLMAVXGGLCHSAISRLKDSHAHLSPDSXKLSLDLFYXEDEIYELSYAREPRCPKSLPPSPFNAPLVVEWAPGVXPKPDRVXLGRHVEQLVESVFKNYDPEGRGXISQEDFERLSGNFPFACHGLHPPPRQGRGSFSREELXGYLLRASAICSKLGLAFLHXFHEVXFRKPXFCDSCSGFLWGVXKQGYRCRECGLCCHKHCRDQVKVECKKRPGAKGDAGPPGAPVPSXPAPHASCGSEENHSYXLSLEPEXGCQLRHAWXQXESPHPSWEXDXVPCPVMDPPSXASSKLDS

SEQ ID NO: 22949 - protein, 604 aa, Homo sapiens
  MOD_RES (15)..(15): Selenocysteine
  MOD_RES (32)..(32): Selenocysteine
  MOD_RES (104)..(104): Selenocysteine
  MOD_RES (110)..(110): Selenocysteine
  MOD_RES (113)..(113): Selenocysteine
  MOD_RES (152)..(152): Selenocysteine
  MOD_RES (202)..(202): Selenocysteine
  MOD_RES (210)..(210): Selenocysteine
  MOD_RES (221)..(221): Selenocysteine
  MOD_RES (289)..(289): Selenocysteine
  MOD_RES (294)..(294): Selenocysteine
  MOD_RES (317)..(317): Selenocysteine
  MOD_RES (341)..(341): Selenocysteine
  MOD_RES (349)..(349): Selenocysteine
  MOD_RES (386)..(386): Selenocysteine
  MOD_RES (393)..(393): Selenocysteine
  MOD_RES (416)..(416): Selenocysteine
  MOD_RES (453)..(453): Selenocysteine
  MOD_RES (473)..(473): Selenocysteine
  MOD_RES (478)..(478): Selenocysteine
  MOD_RES (483)..(483): Selenocysteine
  MOD_RES (496)..(496): Selenocysteine
  MOD_RES (541)..(541): Selenocysteine
  MOD_RES (557)..(557): Selenocysteine
  MOD_RES (564)..(564): Selenocysteine
  MOD_RES (573)..(573): Selenocysteine
  MOD_RES (575)..(575): Selenocysteine
  MOD_RES (584)..(584): Selenocysteine
  MOD_RES (586)..(586): Selenocysteine
  MOD_RES (597)..(597): Selenocysteine
MNRKDSKRKSHQECXGKIGGRGRPRQVRRHKXCPSPREISKVMASMNLGLLSEGGCSEDELLEKCIQSFDSAGSLCHEDHMLNMVLAMHSWVLPSADLAARLLXSYQKAXGDXQELRRLQICHLVRYWLMRHPEVMHQDPQLEEVIGRFWAXVAREGNSAQRRLGDSSDLLSPGGPGPPLPMSSPGLGKKRKVSLLFDHLEXGELAQHLXYLEFRSFQAIXPQDLRSYVLQGSVRGCPALEGSVGLSNSVSRWVQVMVLSRPGPLQRAQVLDKFIHVAQRLHQLQNFNXLMAVXGGLCHSAISRLKDSHAHLSPDSXKELVALQGQHPPCSANEDLLHLLXLSLDLFYXEDEIYELSYAREPRCPKSLPPSPFNAPLVVEWAPGVXPKPDRVXLGRHVEQLVESVFKNYDPEGRGXISQEDFERLSGNFPFACHGLHPPPRQGRGSFSREELXGYLLRASAICSKLGLAFLHXFHEVXFRKPXFCDSCSGFLWGVXKQGYRCRECGLCCHKHCRDQVKVECKKRPGAKGDAGPPGAPVPSXPAPHASCGSEENHSYXLSLEPEXGCQLRHAWXQXESPHPSWEXDXVPCPVMDPPSXASSKLDS

SEQ ID NO: 22950 - protein, 617 aa, Homo sapiens
  MOD_RES (15)..(15): Selenocysteine
  MOD_RES (32)..(32): Selenocysteine
  MOD_RES (104)..(104): Selenocysteine
  MOD_RES (110)..(110): Selenocysteine
  MOD_RES (113)..(113): Selenocysteine
  MOD_RES (152)..(152): Selenocysteine
  MOD_RES (202)..(202): Selenocysteine
  MOD_RES (210)..(210): Selenocysteine
  MOD_RES (221)..(221): Selenocysteine
  MOD_RES (289)..(289): Selenocysteine
  MOD_RES (294)..(294): Selenocysteine
  MOD_RES (317)..(317): Selenocysteine
  MOD_RES (324)..(324): Selenocysteine
  MOD_RES (339)..(339): Selenocysteine
  MOD_RES (410)..(410): Selenocysteine
  MOD_RES (418)..(418): Selenocysteine
  MOD_RES (455)..(455): Selenocysteine
  MOD_RES (462)..(462): Selenocysteine
  MOD_RES (485)..(485): Selenocysteine
  MOD_RES (522)..(522): Selenocysteine
  MOD_RES (542)..(542): Selenocysteine
  MOD_RES (547)..(547): Selenocysteine
  MOD_RES (552)..(552): Selenocysteine
  MOD_RES (565)..(565): Selenocysteine
  MOD_RES (594)..(594): Selenocysteine
  MOD_RES (597)..(597): Selenocysteine
  MOD_RES (611)..(611): Selenocysteine
  MOD_RES (613)..(613): Selenocysteine
  MOD_RES (616)..(616): Selenocysteine
MNRKDSKRKSHQECXGKIGGRGRPRQVRRHKXCPSPREISKVMASMNLGLLSEGGCSEDELLEKCIQSFDSAGSLCHEDHMLNMVLAMHSWVLPSADLAARLLXSYQKAXGDXQELRRLQICHLVRYWLMRHPEVMHQDPQLEEVIGRFWAXVAREGNSAQRRLGDSSDLLSPGGPGPPLPMSSPGLGKKRKVSLLFDHLEXGELAQHLXYLEFRSFQAIXPQDLRSYVLQGSVRGCPALEGSVGLSNSVSRWVQVMVLSRPGPLQRAQVLDKFIHVAQRLHQLQNFNXLMAVXGGLCHSAISRLKDSHAHLSPDSXKALLELXELLASHNNYARYRRXWAGCAGFRLPVLGVHLKDLVSLHEAQPDRLPDGRLHLPKLNNLYLRLQELVALQGQHPPCSANEDLLHLLXLSLDLFYXEDEIYELSYAREPRCPKSLPPSPFNAPLVVEWAPGVXPKPDRVXLGRHVEQLVESVFKNYDPEGRGXISQEDFERLSGNFPFACHGLHPPPRQGRGSFSREELXGYLLRASAICSKLGLAFLHXFHEVXFRKPXFCDSCSGFLWGVXKQGYRCRGEWGVSEWEGSLGPQAGRMDDXDRXPAAAFPQSAGCVAXNXAEXR

SEQ ID NO: 22951 - protein, 673 aa, Homo sapiens
  MOD_RES (15)..(15): Selenocysteine
  MOD_RES (32)..(32): Selenocysteine
  MOD_RES (104)..(104): Selenocysteine
  MOD_RES (110)..(110): Selenocysteine
  MOD_RES (113)..(113): Selenocysteine
  MOD_RES (152)..(152): Selenocysteine
  MOD_RES (202)..(202): Selenocysteine
  MOD_RES (210)..(210): Selenocysteine
  MOD_RES (221)..(221): Selenocysteine
  MOD_RES (289)..(289): Selenocysteine
  MOD_RES (294)..(294): Selenocysteine
  MOD_RES (317)..(317): Selenocysteine
  MOD_RES (324)..(324): Selenocysteine
  MOD_RES (339)..(339): Selenocysteine
  MOD_RES (410)..(410): Selenocysteine
  MOD_RES (418)..(418): Selenocysteine
  MOD_RES (455)..(455): Selenocysteine
  MOD_RES (462)..(462): Selenocysteine
  MOD_RES (485)..(485): Selenocysteine
  MOD_RES (522)..(522): Selenocysteine
  MOD_RES (542)..(542): Selenocysteine
  MOD_RES (547)..(547): Selenocysteine
  MOD_RES (552)..(552): Selenocysteine
  MOD_RES (565)..(565): Selenocysteine
  MOD_RES (610)..(610): Selenocysteine
  MOD_RES (626)..(626): Selenocysteine
  MOD_RES (633)..(633): Selenocysteine
  MOD_RES (642)..(642): Selenocysteine
  MOD_RES (644)..(644): Selenocysteine
  MOD_RES (653)..(653): Selenocysteine
  MOD_RES (655)..(655): Selenocysteine
  MOD_RES (666)..(666): Selenocysteine
MNRKDSKRKSHQECXGKIGGRGRPRQVRRHKXCPSPREISKVMASMNLGLLSEGGCSEDELLEKCIQSFDSAGSLCHEDHMLNMVLAMHSWVLPSADLAARLLXSYQKAXGDXQELRRLQICHLVRYWLMRHPEVMHQDPQLEEVIGRFWAXVAREGNSAQRRLGDSSDLLSPGGPGPPLPMSSPGLGKKRKVSLLFDHLEXGELAQHLXYLEFRSFQAIXPQDLRSYVLQGSVRGCPALEGSVGLSNSVSRWVQVMVLSRPGPLQRAQVLDKFIHVAQRLHQLQNFNXLMAVXGGLCHSAISRLKDSHAHLSPDSXKALLELXELLASHNNYARYRRXWAGCAGFRLPVLGVHLKDLVSLHEAQPDRLPDGRLHLPKLNNLYLRLQELVALQGQHPPCSANEDLLHLLXLSLDLFYXEDEIYELSYAREPRCPKSLPPSPFNAPLVVEWAPGVXPKPDRVXLGRHVEQLVESVFKNYDPEGRGXISQEDFERLSGNFPFACHGLHPPPRQGRGSFSREELXGYLLRASAICSKLGLAFLHXFHEVXFRKPXFCDSCSGFLWGVXKQGYRCRECGLCCHKHCRDQVKVECKKRPGAKGDAGPPGAPVPSXPAPHASCGSEENHSYXLSLEPEXGCQLRHAWXQXESPHPSWEXDXVPCPVMDPPSXASSKLDS

SEQ ID NO: 22952 - protein, 639 aa, Homo sapiens
  MOD_RES (15)..(15): Selenocysteine
  MOD_RES (32)..(32): Selenocysteine
  MOD_RES (104)..(104): Selenocysteine
  MOD_RES (110)..(110): Selenocysteine
  MOD_RES (113)..(113): Selenocysteine
  MOD_RES (152)..(152): Selenocysteine
  MOD_RES (202)..(202): Selenocysteine
  MOD_RES (210)..(210): Selenocysteine
  MOD_RES (221)..(221): Selenocysteine
  MOD_RES (255)..(255): Selenocysteine
  MOD_RES (260)..(260): Selenocysteine
  MOD_RES (283)..(283): Selenocysteine
  MOD_RES (290)..(290): Selenocysteine
  MOD_RES (305)..(305): Selenocysteine
  MOD_RES (376)..(376): Selenocysteine
  MOD_RES (384)..(384): Selenocysteine
  MOD_RES (421)..(421): Selenocysteine
  MOD_RES (428)..(428): Selenocysteine
  MOD_RES (451)..(451): Selenocysteine
  MOD_RES (488)..(488): Selenocysteine
  MOD_RES (508)..(508): Selenocysteine
  MOD_RES (513)..(513): Selenocysteine
  MOD_RES (518)..(518): Selenocysteine
  MOD_RES (531)..(531): Selenocysteine
  MOD_RES (576)..(576): Selenocysteine
  MOD_RES (592)..(592): Selenocysteine
  MOD_RES (599)..(599): Selenocysteine
  MOD_RES (608)..(608): Selenocysteine
  MOD_RES (610)..(610): Selenocysteine
  MOD_RES (619)..(619): Selenocysteine
  MOD_RES (621)..(621): Selenocysteine
  MOD_RES (632)..(632): Selenocysteine
MNRKDSKRKSHQECXGKIGGRGRPRQVRRHKXCPSPREISKVMASMNLGLLSEGGCSEDELLEKCIQSFDSAGSLCHEDHMLNMVLAMHSWVLPSADLAARLLXSYQKAXGDXQELRRLQICHLVRYWLMRHPEVMHQDPQLEEVIGRFWAXVAREGNSAQRRLGDSSDLLSPGGPGPPLPMSSPGLGKKRKVSLLFDHLEXGELAQHLXYLEFRSFQAIXVMVLSRPGPLQRAQVLDKFIHVAQRLHQLQNFNXLMAVXGGLCHSAISRLKDSHAHLSPDSXKALLELXELLASHNNYARYRRXWAGCAGFRLPVLGVHLKDLVSLHEAQPDRLPDGRLHLPKLNNLYLRLQELVALQGQHPPCSANEDLLHLLXLSLDLFYXEDEIYELSYAREPRCPKSLPPSPFNAPLVVEWAPGVXPKPDRVXLGRHVEQLVESVFKNYDPEGRGXISQEDFERLSGNFPFACHGLHPPPRQGRGSFSREELXGYLLRASAICSKLGLAFLHXFHEVXFRKPXFCDSCSGFLWGVXKQGYRCRECGLCCHKHCRDQVKVECKKRPGAKGDAGPPGAPVPSXPAPHASCGSEENHSYXLSLEPEXGCQLRHAWXQXESPHPSWEXDXVPCPVMDPPSXASSKLDS

SEQ ID NO: 22953 - protein, 659 aa, Homo sapiens
  MOD_RES (15)..(15): Selenocysteine
  MOD_RES (32)..(32): Selenocysteine
  MOD_RES (104)..(104): Selenocysteine
  MOD_RES (110)..(110): Selenocysteine
  MOD_RES (113)..(113): Selenocysteine
  MOD_RES (152)..(152): Selenocysteine
  MOD_RES (188)..(188): Selenocysteine
  MOD_RES (196)..(196): Selenocysteine
  MOD_RES (207)..(207): Selenocysteine
  MOD_RES (275)..(275): Selenocysteine
  MOD_RES (280)..(280): Selenocysteine
  MOD_RES (303)..(303): Selenocysteine
  MOD_RES (310)..(310): Selenocysteine
  MOD_RES (325)..(325): Selenocysteine
  MOD_RES (396)..(396): Selenocysteine
  MOD_RES (404)..(404): Selenocysteine
  MOD_RES (441)..(441): Selenocysteine
  MOD_RES (448)..(448): Selenocysteine
  MOD_RES (471)..(471): Selenocysteine
  MOD_RES (508)..(508): Selenocysteine
  MOD_RES (528)..(528): Selenocysteine
  MOD_RES (533)..(533): Selenocysteine
  MOD_RES (538)..(538): Selenocysteine
  MOD_RES (551)..(551): Selenocysteine
  MOD_RES (596)..(596): Selenocysteine
  MOD_RES (612)..(612): Selenocysteine
  MOD_RES (619)..(619): Selenocysteine
  MOD_RES (628)..(628): Selenocysteine
  MOD_RES (630)..(630): Selenocysteine
  MOD_RES (639)..(639): Selenocysteine
  MOD_RES (641)..(641): Selenocysteine
  MOD_RES (652)..(652): Selenocysteine
MNRKDSKRKSHQECXGKIGGRGRPRQVRRHKXCPSPREISKVMASMNLGLLSEGGCSEDELLEKCIQSFDSAGSLCHEDHMLNMVLAMHSWVLPSADLAARLLXSYQKAXGDXQELRRLQICHLVRYWLMRHPEVMHQDPQLEEVIGRFWAXVAREGNSAQRRLGDSSDLPGLGKKRKVSLLFDHLEXGELAQHLXYLEFRSFQAIXPQDLRSYVLQGSVRGCPALEGSVGLSNSVSRWVQVMVLSRPGPLQRAQVLDKFIHVAQRLHQLQNFNXLMAVXGGLCHSAISRLKDSHAHLSPDSXKALLELXELLASHNNYARYRRXWAGCAGFRLPVLGVHLKDLVSLHEAQPDRLPDGRLHLPKLNNLYLRLQELVALQGQHPPCSANEDLLHLLXLSLDLFYXEDEIYELSYAREPRCPKSLPPSPFNAPLVVEWAPGVXPKPDRVXLGRHVEQLVESVFKNYDPEGRGXISQEDFERLSGNFPFACHGLHPPPRQGRGSFSREELXGYLLRASAICSKLGLAFLHXFHEVXFRKPXFCDSCSGFLWGVXKQGYRCRECGLCCHKHCRDQVKVECKKRPGAKGDAGPPGAPVPSXPAPHASCGSEENHSYXLSLEPEXGCQLRHAWXQXESPHPSWEXDXVPCPVMDPPSXASSKLDS

SEQ ID NO: 22954 - protein, 963 aa, Homo sapiens
  MOD_RES (52)..(52): Selenocysteine
  MOD_RES (98)..(98): Selenocysteine
  MOD_RES (100)..(101): Selenocysteine
  MOD_RES (111)..(111): Selenocysteine
  MOD_RES (139)..(139): Selenocysteine
  MOD_RES (142)..(142): Selenocysteine
  MOD_RES (167)..(167): Selenocysteine
  MOD_RES (171)..(171): Selenocysteine
  MOD_RES (276)..(276): Selenocysteine
  MOD_RES (304)..(304): Selenocysteine
  MOD_RES (360)..(360): Selenocysteine
  MOD_RES (370)..(370): Selenocysteine
  MOD_RES (401)..(401): Selenocysteine
  MOD_RES (426)..(426): Selenocysteine
  MOD_RES (439)..(439): Selenocysteine
  MOD_RES (459)..(459): Selenocysteine
  MOD_RES (492)..(492): Selenocysteine
  MOD_RES (510)..(510): Selenocysteine
  MOD_RES (577)..(577): Selenocysteine
  MOD_RES (635)..(635): Selenocysteine
  MOD_RES (653)..(654): Selenocysteine
  MOD_RES (699)..(699): Selenocysteine
  MOD_RES (708)..(708): Selenocysteine
  MOD_RES (710)..(710): Selenocysteine
  MOD_RES (714)..(714): Selenocysteine
  MOD_RES (725)..(725): Selenocysteine
  MOD_RES (747)..(747): Selenocysteine
  MOD_RES (758)..(758): Selenocysteine
  MOD_RES (771)..(771): Selenocysteine
  MOD_RES (807)..(807): Selenocysteine
  MOD_RES (826)..(826): Selenocysteine
  MOD_RES (844)..(844): Selenocysteine
  MOD_RES (856)..(856): Selenocysteine
  MOD_RES (860)..(860): Selenocysteine
  MOD_RES (862)..(862): Selenocysteine
  MOD_RES (897)..(897): Selenocysteine
  MOD_RES (922)..(922): Selenocysteine
  MOD_RES (926)..(926): Selenocysteine
  MOD_RES (961)..(961): Selenocysteine
MLSGERKEGGSPRFGKLHLPVGLWINSPRKQLAKLGRRWPSAASVKSSSSDXGSRSSEPLPPPPPHVELRRVGAVKAAGGASGSRAKRISQLFRGSGXGXXGSSGAGGPGXPGGAQRWASEKKLPELAAGVAPEPPLAXRAXAPPGVLKIFGAGLASGANYKSVLAXARSXARELVAEALERYGLAGSPGGGPGESSCVDAFALCDALGRPAAAGVGSGEWRAEHLRVLGDSERPLLVQELWRARPGWARRFELRGREEARRLEQEAFGAADSEGXGAPSWRPQKNRSRAASGGAALASPGPGXGSGAPAGSGGKERSENLSLRRSVSELSLQGRRRRQQERRQQALSMAPGAADAQIGXADPGDFDQLXQCLIQAPSNRPYFLLLQGYQDAQDFVVYVMXREQHVFGRGGNSSGRGGSPAPYVDXFLNAPDILPRHCXVRAGPEHPAMVRPSRGAPVXHNGCLLLREAELHPGDLLGLGEHFLFMYKDPRXGGSGPARPPWLPARPGAXPPGPGWAFSCRLCGRGLQERGEALAAYLDGREPVLRFRPREEEALLGEIVRAAAAGSGDLPPLGPAXLLALCVQHSARELELGHLPRLLGRLARLIKEAVWEKIKEIGDRQPENHPEGVPEVPLXPEAVSVELRPLMLWMANXXELLSFVQEKVLEMEKEADQEDPQLCNDLELCDEAMALLDEVIMCXFQQSVYYLXKXLYSXLPALLDSNPFXAGAELPGPGAELGAMPPGLRPXLGVFQAALELXSQCELHPDLVSQXFGYLFFFSNASLLNSLMERGQGRPFYQWSRAVQIRXNLDLVLDWLQGAGLGDIAXEFFRKLSMAVNLLCVPRXSLLKASWSSLRXDHPXLXPAQLHHLLSHYQLGPGRGPPAAWDPPPAEREAVDXGDIFESFSSHPPLILPLGSSRLRLXGPVXDDALHRELRRLRRLLWDLEQQELPANYRHGPPVAXSP

SEQ ID NO: 22955 - protein, 183 aa, Homo sapiens
  MOD_RES (1)..(1): Any amino acid
  MOD_RES (22)..(22): Selenocysteine
  MOD_RES (50)..(50): Selenocysteine
  MOD_RES (106)..(106): Selenocysteine
  MOD_RES (116)..(116): Selenocysteine
  MOD_RES (140)..(140): Selenocysteine
  MOD_RES (144)..(144): Selenocysteine
  MOD_RES (155)..(155): Selenocysteine
  MOD_RES (177)..(177): Selenocysteine
XGREEARRLEQEAFGAADSEGXGAPSWRPQKNRSRAASGGAALASPGPGXGSGAPAGSGGKERSENLSLRRSVSELSLQGRRRRQQERRQQALSMAPGAADAQIGXADPGDFDQLXQCLIQAPSNRPYFLLLQGYQDAQXLYSXLPALLDSNPFXAGAELPGPGAELGAMPPGLRPXLGVFQA

SEQ ID NO: 22956 - protein, 115 aa, Homo sapiens
  MOD_RES (18)..(18): Selenocysteine
  MOD_RES (36)..(36): Selenocysteine
  MOD_RES (86)..(86): Selenocysteine
  MOD_RES (114)..(114): Selenocysteine
MGGSLRVAVLGAPGVGKXAIIRQFLFGDYPERHRPXDGPRLYRPAVLLDGAVYDLSIRDGDVAGPGSSPGGPEEWPDAKDWSLQDXDAFVLVYDICSPDSFDYVKALRQRIAEXR

SEQ ID NO: 22957 - protein, 203 aa, Homo sapiens
  MOD_RES (18)..(18): Selenocysteine
  MOD_RES (36)..(36): Selenocysteine
  MOD_RES (86)..(86): Selenocysteine
  MOD_RES (114)..(114): Selenocysteine
MGGSLRVAVLGAPGVGKXAIIRQFLFGDYPERHRPXDGPRLYRPAVLLDGAVYDLSIRDGDVAGPGSSPGGPEEWPDAKDWSLQDXDAFVLVYDICSPDSFDYVKALRQRIAEXRPAGAPEAPILVVGNKRDRQRLRFGPRRALAALVRRGWRCGYLECSAKYNWHVLRLFRELLRCALVRARPAHPALRLQGALHPARCSLM

SEQ ID NO: 22958 - protein, 203 aa, Homo sapiens
  MOD_RES (4)..(4): Selenocysteine
  MOD_RES (36)..(37): Selenocysteine
  MOD_RES (70)..(70): Selenocysteine
  MOD_RES (77)..(77): Selenocysteine
  MOD_RES (105)..(105): Selenocysteine
  MOD_RES (113)..(113): Selenocysteine
  MOD_RES (118)..(118): Selenocysteine
  MOD_RES (121)..(121): Selenocysteine
  MOD_RES (150)..(150): Selenocysteine
MVSXYRVAVLGARGVGKSAIVRQFLYNEFSEVCVPXXARRLYLPAVVMNGHVHDLQILDFPPISAFPVNXLQEWADXCCRGLRSVHAYILVYDICCFDSFEYVKXIRQQILEXRVIGXSEXPIIIVGNKRDLQRGRVIPRWNVSHLVRKXWKCGYVECSAKYNWHILLLFSELLKSVGCARCKHVHAALRFQGALRRNRCAIM

SEQ ID NO: 22959 - protein, 242 aa, Homo sapiens
  MOD_RES (49)..(49): Selenocysteine
  MOD_RES (60)..(60): Selenocysteine
  MOD_RES (82)..(82): Selenocysteine
  MOD_RES (116)..(116): Selenocysteine
  MOD_RES (159)..(159): Selenocysteine
  MOD_RES (178)..(178): Selenocysteine
MRPLSMSGHFLLAPIPESSSDYLLPKDIKLAVLGAGRVGKSAMIVRFLXKRFIGDYEPNXGKLYSRLVYVEGDQLSLQIQDXPGGVQIQDSLPQVVDSLSKCVQWAEGFLLVYSIXDYDSYLSIRPLYQHIRKVHPDSKAPVIIVGNKGDLLHARQVQXQDGIQLANELGSLFLEISXSENYEDVCDVFQHLCKEVSKMHGLSGERRRASIIPRPRSPNMQDLKRRFKQALSPKVKAPSALG

SEQ ID NO: 22960 - protein, 248 aa, Homo sapiens
  MOD_RES (9)..(9): Selenocysteine
  MOD_RES (47)..(47): Selenocysteine
  MOD_RES (55)..(55): Selenocysteine
  MOD_RES (71)..(71): Selenocysteine
  MOD_RES (80)..(80): Selenocysteine
  MOD_RES (88)..(88): Selenocysteine
  MOD_RES (121)..(121): Selenocysteine
  MOD_RES (143)..(143): Selenocysteine
  MOD_RES (210)..(210): Selenocysteine
  MOD_RES (216)..(216): Selenocysteine
  MOD_RES (244)..(244): Selenocysteine
  MOD_RES (246)..(246): Selenocysteine
MRLIQNMCXIAEYPAPGNAAASDCCVGAAGRRLVKIAVVGASGVGKXALVVRFLXKRFIGDYERNAGNLYXRQVQIEGEXLALQVQDXPGIQVHENSLSCSEQLNRCIRWADAVVIVFSIXDYKSYELISQLHQHVQQLHLGXRLPVVVVANKADLLHIKQVDPQLGLQLASMLGCSFYEVSVSENYNDVYSAFHVLCKEVSHKQQPSSXPEKRRXSLIPRPKSPNMQDLKRRFKQALSAKVRXVXSV

SEQ ID NO: 22961 - protein, 266 aa, Homo sapiens
  MOD_RES (37)..(37): Selenocysteine
  MOD_RES (42)..(42): Selenocysteine
  MOD_RES (56)..(56): Selenocysteine
  MOD_RES (62)..(62): Selenocysteine
  MOD_RES (75)..(75): Selenocysteine
  MOD_RES (80)..(80): Selenocysteine
  MOD_RES (123)..(123): Selenocysteine
  MOD_RES (145)..(145): Selenocysteine
  MOD_RES (193)..(193): Selenocysteine
  MOD_RES (211)..(211): Selenocysteine
  MOD_RES (220)..(220): Selenocysteine
  MOD_RES (223)..(223): Selenocysteine
  MOD_RES (226)..(226): Selenocysteine
  MOD_RES (234)..(234): Selenocysteine
  MOD_RES (242)..(242): Selenocysteine
  MOD_RES (256)..(256): Selenocysteine
  MOD_RES (258)..(258): Selenocysteine
MSSVFGKPRAGSGPQSAPLEVNLAILGRRGAGKSALXVKFLXKRFISEYDPNLEDXYSSEEXVDHQPVHLRVMDXADLDXPRNCERYLNWAHAFLVVYSVDSRQSFDSSSSYLELLALHAKEXQRSIPALLLGNKLDMAQYRQVXKAEGVALAGRFGCLFFEVSACLDFEHVQHVFHEAVREARRELEKSPLXRPLFISEERALPHQAPLXARHGLASCXFNXLSXINLKEMPXVAQAKLVXVKSSRAQSKRKAPXLXLLKGFKIF

SEQ ID NO: 22962 - protein, 247 aa, Homo sapiens
  MOD_RES (37)..(37): Selenocysteine
  MOD_RES (43)..(43): Selenocysteine
  MOD_RES (56)..(56): Selenocysteine
  MOD_RES (61)..(61): Selenocysteine
  MOD_RES (104)..(104): Selenocysteine
  MOD_RES (126)..(126): Selenocysteine
  MOD_RES (174)..(174): Selenocysteine
  MOD_RES (192)..(192): Selenocysteine
  MOD_RES (201)..(201): Selenocysteine
  MOD_RES (204)..(204): Selenocysteine
  MOD_RES (207)..(207): Selenocysteine
  MOD_RES (215)..(215): Selenocysteine
  MOD_RES (223)..(223): Selenocysteine
  MOD_RES (237)..(237): Selenocysteine
  MOD_RES (239)..(239): Selenocysteine
MSSVFGKPRAGSGPQSAPLEVNLAILGRRGAGKSEDXYSSEEXVDHQPVHLRVMDXADLDXPRNCERYLNWAHAFLVVYSVDSRQSFDSSSSYLELLALHAKEXQRSIPALLLGNKLDMAQYRQVXKAEGVALAGRFGCLFFEVSACLDFEHVQHVFHEAVREARRELEKSPLXRPLFISEERALPHQAPLXARHGLASCXFNXLSXINLKEMPXVAQAKLVXVKSSRAQSKRKAPXLXLLKGFKIF

SEQ ID NO: 22963 - protein, 255 aa, Homo sapiens
  MOD_RES (26)..(26): Selenocysteine
  MOD_RES (31)..(31): Selenocysteine
  MOD_RES (45)..(45): Selenocysteine
  MOD_RES (51)..(51): Selenocysteine
  MOD_RES (64)..(64): Selenocysteine
  MOD_RES (69)..(69): Selenocysteine
  MOD_RES (112)..(112): Selenocysteine
  MOD_RES (134)..(134): Selenocysteine
  MOD_RES (182)..(182): Selenocysteine
  MOD_RES (200)..(200): Selenocysteine
  MOD_RES (209)..(209): Selenocysteine
  MOD_RES (212)..(212): Selenocysteine
  MOD_RES (215)..(215): Selenocysteine
  MOD_RES (223)..(223): Selenocysteine
  MOD_RES (231)..(231): Selenocysteine
  MOD_RES (245)..(245): Selenocysteine
  MOD_RES (247)..(247): Selenocysteine
MVIMGPELVGSWSDFKNEAADPRALXVKFLXKRFISEYDPNLEDXYSSEEXVDHQPVHLRVMDXADLDXPRNCERYLNWAHAFLVVYSVDSRQSFDSSSSYLELLALHAKEXQRSIPALLLGNKLDMAQYRQVXKAEGVALAGRFGCLFFEVSACLDFEHVQHVFHEAVREARRELEKSPLXRPLFISEERALPHQAPLXARHGLASCXFNXLSXINLKEMPXVAQAKLVXVKSSRAQSKRKAPXLXLLKGFKIF

SEQ ID NO: 22964 - protein, 270 aa, Homo sapiens
  MOD_RES (12)..(12): Selenocysteine
  MOD_RES (16)..(17): Selenocysteine
  MOD_RES (36)..(36): Selenocysteine
  MOD_RES (39)..(39): Selenocysteine
  MOD_RES (57)..(57): Selenocysteine
  MOD_RES (91)..(91): Selenocysteine
  MOD_RES (126)..(126): Selenocysteine
  MOD_RES (132)..(132): Selenocysteine
  MOD_RES (150)..(150): Selenocysteine
MGEAEAPSFEMXWSSXXSSGYCSQEDSDSELEQYFXARXSLARRPRRDQDEPVEWEXPDLSQAEIEQKIKEYNAQINSNLFMSLNKDGSYXGFIKVQLKLVRPVSVPSSKKPPSLQDARRGPGRGXSVRRRXSFYLPKDAVKHLHVLSRXRAREVIEALLRKFLVVDDPRKFALFERAERHGQVYLRKLLDDEQPLRLRLLAGPSDKALSFVLKENDSGEVNWDAFSMPELHNFLRILQREEEEHLRQILQKYSYCRQKIQEALHACPLG

SEQ ID NO: 22965 - protein, 340 aa, Homo sapiens
  MOD_RES (24)..(24): Selenocysteine
  MOD_RES (38)..(38): Selenocysteine
  MOD_RES (43)..(43): Selenocysteine
  MOD_RES (61)..(61): Selenocysteine
  MOD_RES (63)..(63): Selenocysteine
  MOD_RES (88)..(88): Selenocysteine
  MOD_RES (117)..(117): Selenocysteine
  MOD_RES (127)..(127): Selenocysteine
  MOD_RES (161)..(161): Selenocysteine
  MOD_RES (196)..(196): Selenocysteine
  MOD_RES (202)..(202): Selenocysteine
  MOD_RES (220)..(220): Selenocysteine
MSGEPELIELRELAPAGRAGKGRXRLERANALRIARGXACNPXRQLVPGRGHRFQPAGPAXHXWCDLCGDFIWGVVRKGLQCAHCKFXCHYRCRALVCLDCCGPRDLGWEPAVERDXNVDEPVEWEXPDLSQAEIEQKIKEYNAQINSNLFMSLNKDGSYXGFIKVQLKLVRPVSVPSSKKPPSLQDARRGPGRGXSVRRRXSFYLPKDAVKHLHVLSRXRAREVIEALLRKFLVVDDPRKFALFERAERHGQVYLRKLLDDEQPLRLRLLAGPSDKALSFVLKENDSGEVNWDAFSMPELHNFLRILQREEEEHLRQILQKYSYCRQKIQEALHACPLG

SEQ ID NO: 22966 - protein, 152 aa, Homo sapiens
  MOD_RES (24)..(24): Selenocysteine
  MOD_RES (38)..(38): Selenocysteine
  MOD_RES (43)..(43): Selenocysteine
  MOD_RES (61)..(61): Selenocysteine
  MOD_RES (63)..(63): Selenocysteine
  MOD_RES (112)..(112): Selenocysteine
  MOD_RES (123)..(123): Selenocysteine
  MOD_RES (148)..(148): Selenocysteine
  MOD_RES (152)..(152): Selenocysteine
MSGEPELIELRELAPAGRAGKGRXRLERANALRIARGXACNPXRQLVPGRGHRFQPAGPAXHXWCDLCGDFIWGVVRKGLQCAQQGRFLHRLHQGSAEAGAPCLCALQQEAXLLAGCPAGPRXGHKCQAPHFLLPAQGCCQAPACAVXHKGX

SEQ ID NO: 22967 - protein, 344 aa, Homo sapiens
  MOD_RES (24)..(24): Selenocysteine
  MOD_RES (38)..(38): Selenocysteine
  MOD_RES (43)..(43): Selenocysteine
  MOD_RES (61)..(61): Selenocysteine
  MOD_RES (63)..(63): Selenocysteine
  MOD_RES (92)..(92): Selenocysteine
  MOD_RES (121)..(121): Selenocysteine
  MOD_RES (131)..(131): Selenocysteine
  MOD_RES (165)..(165): Selenocysteine
  MOD_RES (200)..(200): Selenocysteine
  MOD_RES (206)..(206): Selenocysteine
  MOD_RES (224)..(224): Selenocysteine
MSGEPELIELRELAPAGRAGKGRXRLERANALRIARGXACNPXRQLVPGRGHRFQPAGPAXHXWCDLCGDFIWGVVRKGLQCARLSADCKFXCHYRCRALVCLDCCGPRDLGWEPAVERDXNVDEPVEWEXPDLSQAEIEQKIKEYNAQINSNLFMSLNKDGSYXGFIKVQLKLVRPVSVPSSKKPPSLQDARRGPGRGXSVRRRXSFYLPKDAVKHLHVLSRXRAREVIEALLRKFLVVDDPRKFALFERAERHGQVYLRKLLDDEQPLRLRLLAGPSDKALSFVLKENDSGEVNWDAFSMPELHNFLRILQREEEEHLRQILQKYSYCRQKIQEALHACPLG

SEQ ID NO: 22968 - protein, 92 aa, Homo sapiens
  MOD_RES (24)..(24): Selenocysteine
  MOD_RES (38)..(38): Selenocysteine
  MOD_RES (43)..(43): Selenocysteine
  MOD_RES (61)..(61): Selenocysteine
  MOD_RES (63)..(63): Selenocysteine
  MOD_RES (92)..(92): Selenocysteine
MSGEPELIELRELAPAGRAGKGRXRLERANALRIARGXACNPXRQLVPGRGHRFQPAGPAXHXWCDLCGDFIWGVVRKGLQCARRACGVGDX

SEQ ID NO: 22969 - protein, 189 aa, Homo sapiens
  MOD_RES (10)..(10): Selenocysteine
  MOD_RES (45)..(45): Selenocysteine
  MOD_RES (51)..(51): Selenocysteine
  MOD_RES (69)..(69): Selenocysteine
MSLNKDGSYXGFIKVQLKLVRPVSVPSSKKPPSLQDARRGPGRGXSVRRRXSFYLPKDAVKHLHVLSRXRAREVIEALLRKFLVVDDPRKFALFERAERHGQVYLRKLLDDEQPLRLRLLAGPSDKALSFVLKENDSGEVNWDAFSMPELHNFLRILQREEEEHLRQILQKYSYCRQKIQEALHACPLG

SEQ ID NO: 22970 - protein, 507 aa, Homo sapiens
  MOD_RES (26)..(27): Selenocysteine
  MOD_RES (108)..(108): Selenocysteine
  MOD_RES (169)..(169): Selenocysteine
  MOD_RES (195)..(195): Selenocysteine
  MOD_RES (202)..(202): Selenocysteine
  MOD_RES (206)..(206): Selenocysteine
  MOD_RES (216)..(216): Selenocysteine
  MOD_RES (227)..(227): Selenocysteine
  MOD_RES (238)..(238): Selenocysteine
  MOD_RES (276)..(276): Selenocysteine
  MOD_RES (392)..(392): Selenocysteine
  MOD_RES (396)..(396): Selenocysteine
  MOD_RES (406)..(406): Selenocysteine
  MOD_RES (435)..(435): Selenocysteine
  MOD_RES (438)..(438): Selenocysteine
  MOD_RES (442)..(442): Selenocysteine
  MOD_RES (487)..(487): Selenocysteine
MDPSEKKISVWICQEEKLVSGLSRRXXCSDVVRVLLEDGCRRRRRQRRSRRLGSAGDPHGPGELPEPPNEDDEDDDEALPQGMLCGPPQCYCIVEKWRGFERILPNKXRILRLWAAWGEEQENVRFVLVRSEASLPNAGPRSAEARVVLSRERPCPARGAPARPSLAMXQEKQRRVVRKAFRKLAKLNRRRQQQXPSSCSSXSSSXASSCSSSPRXHESASVERMEXLVHLVLSQDHXIRQQVQRLHELDREIDHYEAKVHLDRMRRHGVNYVQDXYLVGAGIELDGSRPGEEPEEVAAEAEEAAAAPPLAGEAQAAALEELARRCDDLLRLQEQRVQQEELLERLSAEIQEELNQRWMRRRQEELAAREEPLEPDGGPDGELLLEQERVRXQLSXSLYIGLRLNXDLEAVKSDLDYSQQQWDSKKRELQGLLQXLHXLELXVAPDGAPGSGSPSREPGPQACADMWVDQARGLAKSGPGNDEDSDXGLSSMHSQDSDSLPMCESLV

SEQ ID NO: 22971 - protein, 326 aa, Homo sapiens
  MOD_RES (7)..(7): Selenocysteine
  MOD_RES (29)..(29): Selenocysteine
  MOD_RES (97)..(98): Selenocysteine
  MOD_RES (103)..(103): Selenocysteine
  MOD_RES (125)..(125): Selenocysteine
  MOD_RES (137)..(137): Selenocysteine
  MOD_RES (143)..(143): Selenocysteine
  MOD_RES (157)..(157): Selenocysteine
  MOD_RES (180)..(180): Selenocysteine
  MOD_RES (184)..(184): Selenocysteine
  MOD_RES (191)..(191): Selenocysteine
  MOD_RES (198)..(198): Selenocysteine
  MOD_RES (200)..(201): Selenocysteine
  MOD_RES (228)..(228): Selenocysteine
  MOD_RES (238)..(238): Selenocysteine
  MOD_RES (269)..(269): Selenocysteine
  MOD_RES (306)..(306): Selenocysteine
  MOD_RES (322)..(322): Selenocysteine
  MOD_RES (325)..(325): Selenocysteine
MDYSHQXSLVPCGQDKYISKNELLLHLKXYNLYYEGQNLQLRHREEEDEFIVEGLLNISWGLRRPIRLQMQDDNERIRPPPSSSSWHSGCNLGAQGXXLKPLXVPKVQISEVDAPPEGDQMPSSXDSRGLKPLQEDXPQLMRXRSDVGVRRRGNVRXPSDQRRIRRHRFSINGHFYNHKXSVFXPAYGSVXNVRINSXMXXPQVLKLLLNKFKIENSAEEFALYVVHXSGEKQKLKAXDYPLIARILQGPCEQISKVFLMEKDQVEEVXYDVAQYIKFEMPVLKSFIQKLQEEEDREVKKLMRKYXVLRLMIRQRLEEIAEXPAXI

SEQ ID NO: 22972 - protein, 64 aa, Homo sapiens
  MOD_RES (3)..(3): Selenocysteine
  MOD_RES (19)..(19): Selenocysteine
  MOD_RES (52)..(52): Selenocysteine
MGXAIYKLSGKINFQVKKXHIPEGKYICHAHCRDLVHLDYPQNGNVSSCMPXSEVRYSIKKNSQ

SEQ ID NO: 22973 - protein, 299 aa, Homo sapiens
  MOD_RES (10)..(10): Selenocysteine
  MOD_RES (25)..(25): Selenocysteine
  MOD_RES (41)..(41): Selenocysteine
  MOD_RES (86)..(86): Selenocysteine
  MOD_RES (106)..(106): Selenocysteine
  MOD_RES (127)..(127): Selenocysteine
  MOD_RES (133)..(133): Selenocysteine
  MOD_RES (141)..(141): Selenocysteine
  MOD_RES (156)..(156): Selenocysteine
  MOD_RES (173)..(173): Selenocysteine
  MOD_RES (179)..(179): Selenocysteine
  MOD_RES (181)..(181): Selenocysteine
  MOD_RES (196)..(196): Selenocysteine
  MOD_RES (236)..(236): Selenocysteine
  MOD_RES (238)..(238): Selenocysteine
  MOD_RES (282)..(282): Selenocysteine
MLSVASHSGXLLVLAMAIRSDFHEXFRRIARLFYWFPKSLXCSKNRKSKLLWSQGGEGKYICHAHCRDLVHLDYPQNGNVSSCMPXSEVRYSIKKNSQDVEKEKEXHSYLSKEEIKEKVHKYNLAVXDKLKMXLNSNGIYXGFIKVQMELCKPPQXSPNSGKLSPSSNGCMNXLHISSXNXVGEVIEALLKKFLVXESPAKFALYKRCHREDQVYACKLSDREHPLYLRLVAGPRXDXLSFVLREHEIGEWEAFSLPELQNFLRILDKEEDEQLQNLKRRYXAYRQKLEEALREVWKPD

SEQ ID NO: 22974 - protein, 238 aa, Homo sapiens
  MOD_RES (18)..(18): Selenocysteine
  MOD_RES (21)..(21): Selenocysteine
  MOD_RES (45)..(45): Selenocysteine
  MOD_RES (66)..(66): Selenocysteine
  MOD_RES (72)..(72): Selenocysteine
  MOD_RES (80)..(80): Selenocysteine
  MOD_RES (95)..(95): Selenocysteine
  MOD_RES (112)..(112): Selenocysteine
  MOD_RES (118)..(118): Selenocysteine
  MOD_RES (120)..(120): Selenocysteine
  MOD_RES (135)..(135): Selenocysteine
  MOD_RES (175)..(175): Selenocysteine
  MOD_RES (177)..(177): Selenocysteine
  MOD_RES (221)..(221): Selenocysteine
MSSGYSSLEEDAEDFFFXARXSFFRRAPQGKPRSGQQDVEKEKEXHSYLSKEEIKEKVHKYNLAVXDKLKMXLNSNGIYXGFIKVQMELCKPPQXSPNSGKLSPSSNGCMNXLHISSXNXVGEVIEALLKKFLVXESPAKFALYKRCHREDQVYACKLSDREHPLYLRLVAGPRXDXLSFVLREHEIGEWEAFSLPELQNFLRILDKEEDEQLQNLKRRYXAYRQKLEEALREVWKPD

SEQ ID NO: 22975 - protein, 90 aa, Homo sapiens
  MOD_RES (18)..(18): Selenocysteine
  MOD_RES (21)..(21): Selenocysteine
  MOD_RES (45)..(45): Selenocysteine
  MOD_RES (66)..(66): Selenocysteine
  MOD_RES (72)..(72): Selenocysteine
  MOD_RES (75)..(75): Selenocysteine
  MOD_RES (81)..(81): Selenocysteine
  MOD_RES (87)..(87): Selenocysteine
MSSGYSSLEEDAEDFFFXARXSFFRRAPQGKPRSGQQDVEKEKEXHSYLSKEEIKEKVHKYNLAVXDKLKMXLSXPASSQXGNIHSXCVW

SEQ ID NO: 22976 - protein, 49 aa, Homo sapiens
  MOD_RES (30)..(30): Selenocysteine
MKEDCLPSSHVPISDSKSIQKSELLGLLKXYNCYHEGKSFQLRHREEAQ

SEQ ID NO: 22977 - protein, 151 aa, Homo sapiens
  MOD_RES (30)..(30): Selenocysteine
  MOD_RES (50)..(50): Selenocysteine
  MOD_RES (83)..(83): Selenocysteine
  MOD_RES (132)..(132): Selenocysteine
  MOD_RES (148)..(148): Selenocysteine
MKEDCLPSSHVPISDSKSIQKSELLGLLKXYNCYHEGKSFQLRHREEEGXLIIEGLLNIAWGLRRPIRLQMQDDREQVHLPSXSWMPRRPSCPLGCWSLLLGLSSLSLPAAISALQLSVFRKEPSPQNGNIXAQGPSIQPVHKAESSXDSS

SEQ ID NO: 22978 - protein, 321 aa, Homo sapiens
  MOD_RES (30)..(30): Selenocysteine
  MOD_RES (50)..(50): Selenocysteine
  MOD_RES (83)..(83): Selenocysteine
  MOD_RES (105)..(105): Selenocysteine
  MOD_RES (121)..(121): Selenocysteine
  MOD_RES (139)..(139): Selenocysteine
  MOD_RES (178)..(178): Selenocysteine
  MOD_RES (182)..(182): Selenocysteine
  MOD_RES (189)..(189): Selenocysteine
  MOD_RES (196)..(196): Selenocysteine
  MOD_RES (198)..(199): Selenocysteine
  MOD_RES (204)..(204): Selenocysteine
  MOD_RES (231)..(231): Selenocysteine
  MOD_RES (300)..(300): Selenocysteine
  MOD_RES (309)..(309): Selenocysteine
MKEDCLPSSHVPISDSKSIQKSELLGLLKXYNCYHEGKSFQLRHREEEGXLIIEGLLNIAWGLRRPIRLQMQDDREQVHLPSXSWMPRRPSCPLKEPSPQNGNIXAQGPSIQPVHKAESSXDSSGPLEEAEEAPQLMRXKSDASCMSQRRPKCRAPGEAQRIRRHRFSINGHFYNHKXSVFXPAYGSVXNVRVNSXMXXLQVLXLLLNKFRVEDGPSEFALYIVHESGERXKLKDCEYPLISRILHGPCEKIARIFLMEADLGVEVPHEVAQYIKFEMPVLDSFVEKLKEEEEREIIKLXMKFQALRLXMLQRLEQLVEAK

SEQ ID NO: 22979 - protein, 123 aa, Homo sapiens
  MOD_RES (23)..(23): Selenocysteine
  MOD_RES (43)..(43): Selenocysteine
  MOD_RES (76)..(76): Selenocysteine
  MOD_RES (103)..(103): Selenocysteine
  MOD_RES (121)..(121): Selenocysteine
SSHVPISDSKSIQKSELLGLLKXYNCYHEGKSFQLRHREEEGXLIIEGLLNIAWGLRRPIRLQMQDDREQVHLPSXSWMPRRPSCPLHLAGKKGRLQPGGLPXPMQAEHVSPSLVLSLKFXRI

SEQ ID NO: 22980 - protein, 84 aa, Homo sapiens
  MOD_RES (1)..(3): Selenocysteine
  MOD_RES (8)..(8): Selenocysteine
  MOD_RES (35)..(35): Selenocysteine
XXXLQVLXLLLNKFRVEDGPSEFALYIVHESGERXKLKDCEYPLISRILHGPCEKIARIFLMEADLGVEVPHEVSGGQGWGGLL

SEQ ID NO: 22981 - protein, 336 aa, Homo sapiens
  MOD_RES (52)..(52): Selenocysteine
  MOD_RES (152)..(152): Selenocysteine
  MOD_RES (157)..(157): Selenocysteine
  MOD_RES (186)..(186): Selenocysteine
  MOD_RES (188)..(188): Selenocysteine
  MOD_RES (190)..(190): Selenocysteine
  MOD_RES (202)..(202): Selenocysteine
  MOD_RES (207)..(207): Selenocysteine
  MOD_RES (220)..(220): Selenocysteine
  MOD_RES (235)..(235): Selenocysteine
  MOD_RES (237)..(237): Selenocysteine
  MOD_RES (251)..(251): Selenocysteine
  MOD_RES (273)..(274): Selenocysteine
  MOD_RES (278)..(278): Selenocysteine
  MOD_RES (295)..(297): Selenocysteine
MAMASPAIGQRPYPLLLDPEPPRYLQSLSGPELPPPPPDRSSRLCVPAPLSXAPGAREGRSARRAARGNLEPPPRASRPARPLRPGLQQRLRRRPGAPRPRDVRSIFEQPQDPRVPAERGEGHCFAELVLPGGPGWCDLCGREVLRQALRCXNCKFXCHPECRSLIQLDCSQQEGLSRDRPSPESXLXVXFSQNVCKPVEEXQRPPXLQEIKQKIDSYNXREKNCLGMKLSEDGXYXGFIKVHLKLRRPVXVPAGIRPQSIYDAIKEVNLAAXXDKRXSFYLPLDAIKQLHISSXXXVSEVIQGLLKKFMVVDNPQKFALFKRIHKDGQVGCLLHP

SEQ ID NO: 22982 - protein, 350 aa, Homo sapiens
  MOD_RES (52)..(52): Selenocysteine
  MOD_RES (152)..(152): Selenocysteine
  MOD_RES (157)..(157): Selenocysteine
  MOD_RES (186)..(186): Selenocysteine
  MOD_RES (188)..(188): Selenocysteine
  MOD_RES (190)..(190): Selenocysteine
  MOD_RES (202)..(202): Selenocysteine
  MOD_RES (207)..(207): Selenocysteine
  MOD_RES (220)..(220): Selenocysteine
  MOD_RES (235)..(235): Selenocysteine
  MOD_RES (237)..(237): Selenocysteine
  MOD_RES (251)..(251): Selenocysteine
  MOD_RES (273)..(274): Selenocysteine
  MOD_RES (278)..(278): Selenocysteine
  MOD_RES (295)..(297): Selenocysteine
  MOD_RES (339)..(339): Selenocysteine
  MOD_RES (349)..(349): Selenocysteine
MAMASPAIGQRPYPLLLDPEPPRYLQSLSGPELPPPPPDRSSRLCVPAPLSXAPGAREGRSARRAARGNLEPPPRASRPARPLRPGLQQRLRRRPGAPRPRDVRSIFEQPQDPRVPAERGEGHCFAELVLPGGPGWCDLCGREVLRQALRCXNCKFXCHPECRSLIQLDCSQQEGLSRDRPSPESXLXVXFSQNVCKPVEEXQRPPXLQEIKQKIDSYNXREKNCLGMKLSEDGXYXGFIKVHLKLRRPVXVPAGIRPQSIYDAIKEVNLAAXXDKRXSFYLPLDAIKQLHISSXXXVSEVIQGLLKKFMVVDNPQKFALFKRIHKDGQGRRKSEPNQXVPFLPVSKPXH

SEQ ID NO: 22983 - protein, 418 aa, Homo sapiens
  MOD_RES (52)..(52): Selenocysteine
  MOD_RES (152)..(152): Selenocysteine
  MOD_RES (157)..(157): Selenocysteine
  MOD_RES (186)..(186): Selenocysteine
  MOD_RES (188)..(188): Selenocysteine
  MOD_RES (190)..(190): Selenocysteine
  MOD_RES (202)..(202): Selenocysteine
  MOD_RES (207)..(207): Selenocysteine
  MOD_RES (220)..(220): Selenocysteine
  MOD_RES (235)..(235): Selenocysteine
  MOD_RES (237)..(237): Selenocysteine
  MOD_RES (251)..(251): Selenocysteine
  MOD_RES (273)..(274): Selenocysteine
  MOD_RES (278)..(278): Selenocysteine
  MOD_RES (295)..(297): Selenocysteine
  MOD_RES (352)..(352): Selenocysteine
  MOD_RES (364)..(364): Selenocysteine
  MOD_RES (382)..(382): Selenocysteine
MAMASPAIGQRPYPLLLDPEPPRYLQSLSGPELPPPPPDRSSRLCVPAPLSXAPGAREGRSARRAARGNLEPPPRASRPARPLRPGLQQRLRRRPGAPRPRDVRSIFEQPQDPRVPAERGEGHCFAELVLPGGPGWCDLCGREVLRQALRCXNCKFXCHPECRSLIQLDCSQQEGLSRDRPSPESXLXVXFSQNVCKPVEEXQRPPXLQEIKQKIDSYNXREKNCLGMKLSEDGXYXGFIKVHLKLRRPVXVPAGIRPQSIYDAIKEVNLAAXXDKRXSFYLPLDAIKQLHISSXXXVSEVIQGLLKKFMVVDNPQKFALFKRIHKDGQVLFQKLSIADRPLYLRLLAGPDXEVLSFVLKENEXGEVEWDAFSIPELQNFLXILEKEEQDKIQQVQKKYDKFRQKLEEALRESQGKPG

SEQ ID NO: 22984 - protein, 318 aa, Homo sapiens
  MOD_RES (2)..(2): Selenocysteine
  MOD_RES (10)..(10): Selenocysteine
  MOD_RES (16)..(16): Selenocysteine
  MOD_RES (18)..(18): Selenocysteine
  MOD_RES (57)..(57): Selenocysteine
  MOD_RES (86)..(86): Selenocysteine
  MOD_RES (88)..(88): Selenocysteine
  MOD_RES (90)..(90): Selenocysteine
  MOD_RES (102)..(102): Selenocysteine
  MOD_RES (107)..(107): Selenocysteine
  MOD_RES (120)..(120): Selenocysteine
  MOD_RES (135)..(135): Selenocysteine
  MOD_RES (137)..(137): Selenocysteine
  MOD_RES (151)..(151): Selenocysteine
  MOD_RES (173)..(174): Selenocysteine
  MOD_RES (178)..(178): Selenocysteine
  MOD_RES (195)..(197): Selenocysteine
  MOD_RES (252)..(252): Selenocysteine
  MOD_RES (264)..(264): Selenocysteine
  MOD_RES (282)..(282): Selenocysteine
MXEGQEEKAXAACFGXVXAQLQRLFCRLPKSRSVSKKHQILQRFRNGARRARDCKFXCHPECRSLIQLDCSQQEGLSRDRPSPESXLXVXFSQNVCKPVEEXQRPPXLQEIKQKIDSYNXREKNCLGMKLSEDGXYXGFIKVHLKLRRPVXVPAGIRPQSIYDAIKEVNLAAXXDKRXSFYLPLDAIKQLHISSXXXVSEVIQGLLKKFMVVDNPQKFALFKRIHKDGQVLFQKLSIADRPLYLRLLAGPDXEVLSFVLKENEXGEVEWDAFSIPELQNFLXILEKEEQDKIQQVQKKYDKFRQKLEEALRESQGKPG

SEQ ID NO: 22985 - protein, 265 aa, Homo sapiens
  MOD_RES (2)..(2): Selenocysteine
  MOD_RES (24)..(24): Selenocysteine
  MOD_RES (27)..(28): Selenocysteine
  MOD_RES (49)..(49): Selenocysteine
  MOD_RES (54)..(54): Selenocysteine
  MOD_RES (67)..(67): Selenocysteine
  MOD_RES (82)..(82): Selenocysteine
  MOD_RES (84)..(84): Selenocysteine
  MOD_RES (98)..(98): Selenocysteine
  MOD_RES (120)..(121): Selenocysteine
  MOD_RES (125)..(125): Selenocysteine
  MOD_RES (142)..(144): Selenocysteine
  MOD_RES (199)..(199): Selenocysteine
  MOD_RES (211)..(211): Selenocysteine
  MOD_RES (229)..(229): Selenocysteine
MXVDSSMSSGYCSLDEELEDCFFXAKXXFFRNAQSKHLSKNVCKPVEEXQRPPXLQEIKQKIDSYNXREKNCLGMKLSEDGXYXGFIKVHLKLRRPVXVPAGIRPQSIYDAIKEVNLAAXXDKRXSFYLPLDAIKQLHISSXXXVSEVIQGLLKKFMVVDNPQKFALFKRIHKDGQVLFQKLSIADRPLYLRLLAGPDXEVLSFVLKENEXGEVEWDAFSIPELQNFLXILEKEEQDKIQQVQKKYDKFRQKLEEALRESQGKPG

SEQ ID NO: 22986 - protein, 185 aa, Homo sapiens
  MOD_RES (8)..(8): Selenocysteine
  MOD_RES (13)..(13): Selenocysteine
  MOD_RES (26)..(26): Selenocysteine
  MOD_RES (41)..(41): Selenocysteine
  MOD_RES (43)..(43): Selenocysteine
  MOD_RES (57)..(57): Selenocysteine
  MOD_RES (79)..(80): Selenocysteine
  MOD_RES (84)..(84): Selenocysteine
  MOD_RES (101)..(103): Selenocysteine
  MOD_RES (158)..(158): Selenocysteine
  MOD_RES (170)..(170): Selenocysteine
VCKPVEEXQRPPXLQEIKQKIDSYNXREKNCLGMKLSEDGXYXGFIKVHLKLRRPVXVPAGIRPQSIYDAIKEVNLAAXXDKRXSFYLPLDAIKQLHISSXXXVSEVIQGLLKKFMVVDNPQKFALFKRIHKDGQVLFQKLSIADRPLYLRLLAGPDXEVLSFVLKENEXGEVEVGLDPLCKPRP

SEQ ID NO: 22987 - protein, 325 aa, Homo sapiens
  MOD_RES (6)..(6): Selenocysteine
  MOD_RES (33)..(33): Selenocysteine
  MOD_RES (37)..(37): Selenocysteine
  MOD_RES (72)..(72): Selenocysteine
  MOD_RES (86)..(86): Selenocysteine
  MOD_RES (103)..(103): Selenocysteine
  MOD_RES (124)..(124): Selenocysteine
  MOD_RES (141)..(141): Selenocysteine
  MOD_RES (178)..(178): Selenocysteine
  MOD_RES (189)..(189): Selenocysteine
  MOD_RES (199)..(199): Selenocysteine
  MOD_RES (227)..(227): Selenocysteine
  MOD_RES (236)..(236): Selenocysteine
  MOD_RES (300)..(300): Selenocysteine
  MOD_RES (321)..(321): Selenocysteine
  MOD_RES (323)..(324): Selenocysteine
MLWEEXGAAPAPARASDLPYRIHFLSSGLILVXRQLXEDGKLIVEGMLDIFWGVKRPIQLKIQDEKPFSSFXSMKSSDVFSSKGMXRWGEFDDLYRISELDRXQIPMSEKRNSQEDYLSYHSNXLKPHAKDEPDSPVLYRXMSEAALVRKRMKPLMMDRKERQKNRASINGHFYNHEXSIFIPAFESEXKVRVNSNMRXEEVIKQLLQKFKIENSPQDFALHIIFAXGEQRRLKKXDIPLLQRLLQGPSEKNARIFLMDKDAEEISSDVAQYINFHFSLLESILQRLNEEEKREIQRIVXKFNKEKAIILKCLQNKLVIKXEXXV

SEQ ID NO: 22988 - protein, 369 aa, Homo sapiens
  MOD_RES (6)..(6): Selenocysteine
  MOD_RES (34)..(34): Selenocysteine
  MOD_RES (50)..(50): Selenocysteine
  MOD_RES (53)..(53): Selenocysteine
  MOD_RES (63)..(63): Selenocysteine
  MOD_RES (81)..(81): Selenocysteine
  MOD_RES (116)..(116): Selenocysteine
  MOD_RES (130)..(130): Selenocysteine
  MOD_RES (147)..(147): Selenocysteine
  MOD_RES (168)..(168): Selenocysteine
  MOD_RES (185)..(185): Selenocysteine
  MOD_RES (222)..(222): Selenocysteine
  MOD_RES (233)..(233): Selenocysteine
  MOD_RES (243)..(243): Selenocysteine
  MOD_RES (271)..(271): Selenocysteine
  MOD_RES (280)..(280): Selenocysteine
  MOD_RES (344)..(344): Selenocysteine
  MOD_RES (365)..(365): Selenocysteine
  MOD_RES (367)..(368): Selenocysteine
MLWEEXGAAPAPARASDLPYRISSDHLKKEEKMXMMAHQYPSWIFINEKXFIXREQLNSLLKXYNIFYENQKNLHILYGEXEDGKLIVEGMLDIFWGVKRPIQLKIQDEKPFSSFXSMKSSDVFSSKGMXRWGEFDDLYRISELDRXQIPMSEKRNSQEDYLSYHSNXLKPHAKDEPDSPVLYRXMSEAALVRKRMKPLMMDRKERQKNRASINGHFYNHEXSIFIPAFESEXKVRVNSNMRXEEVIKQLLQKFKIENSPQDFALHIIFAXGEQRRLKKXDIPLLQRLLQGPSEKNARIFLMDKDAEEISSDVAQYINFHFSLLESILQRLNEEEKREIQRIVXKFNKEKAIILKCLQNKLVIKXEXXV

SEQ ID NO: 22989 - protein, 303 aa, Homo sapiens
  MOD_RES (2)..(2): Selenocysteine
  MOD_RES (18)..(18): Selenocysteine
  MOD_RES (21)..(21): Selenocysteine
  MOD_RES (31)..(31): Selenocysteine
  MOD_RES (49)..(49): Selenocysteine
  MOD_RES (84)..(84): Selenocysteine
  MOD_RES (98)..(98): Selenocysteine
  MOD_RES (115)..(115): Selenocysteine
  MOD_RES (136)..(136): Selenocysteine
  MOD_RES (153)..(153): Selenocysteine
  MOD_RES (205)..(205): Selenocysteine
  MOD_RES (214)..(214): Selenocysteine
  MOD_RES (278)..(278): Selenocysteine
  MOD_RES (299)..(299): Selenocysteine
  MOD_RES (301)..(302): Selenocysteine
MXMMAHQYPSWIFINEKXFIXREQLNSLLKXYNIFYENQKNLHILYGEXEDGKLIVEGMLDIFWGVKRPIQLKIQDEKPFSSFXSMKSSDVFSSKGMXRWGEFDDLYRISELDRXQIPMSEKRNSQEDYLSYHSNXLKPHAKDEPDSPVLYRXMSEAALVRKRMKPLMMDRKERQKNRASINGHFYNHEIENSPQDFALHIIFAXGEQRRLKKXDIPLLQRLLQGPSEKNARIFLMDKDAEEISSDVAQYINFHFSLLESILQRLNEEEKREIQRIVXKFNKEKAIILKCLQNKLVIKXEXXV

SEQ ID NO: 22990 - protein, 337 aa, Homo sapiens
  MOD_RES (2)..(2): Selenocysteine
  MOD_RES (18)..(18): Selenocysteine
  MOD_RES (21)..(21): Selenocysteine
  MOD_RES (31)..(31): Selenocysteine
  MOD_RES (49)..(49): Selenocysteine
  MOD_RES (84)..(84): Selenocysteine
  MOD_RES (98)..(98): Selenocysteine
  MOD_RES (115)..(115): Selenocysteine
  MOD_RES (136)..(136): Selenocysteine
  MOD_RES (153)..(153): Selenocysteine
  MOD_RES (190)..(190): Selenocysteine
  MOD_RES (201)..(201): Selenocysteine
  MOD_RES (211)..(211): Selenocysteine
  MOD_RES (239)..(239): Selenocysteine
  MOD_RES (248)..(248): Selenocysteine
  MOD_RES (312)..(312): Selenocysteine
  MOD_RES (333)..(333): Selenocysteine
  MOD_RES (335)..(336): Selenocysteine
MXMMAHQYPSWIFINEKXFIXREQLNSLLKXYNIFYENQKNLHILYGEXEDGKLIVEGMLDIFWGVKRPIQLKIQDEKPFSSFXSMKSSDVFSSKGMXRWGEFDDLYRISELDRXQIPMSEKRNSQEDYLSYHSNXLKPHAKDEPDSPVLYRXMSEAALVRKRMKPLMMDRKERQKNRASINGHFYNHEXSIFIPAFESEXKVRVNSNMRXEEVIKQLLQKFKIENSPQDFALHIIFAXGEQRRLKKXDIPLLQRLLQGPSEKNARIFLMDKDAEEISSDVAQYINFHFSLLESILQRLNEEEKREIQRIVXKFNKEKAIILKCLQNKLVIKXEXXV

SEQ ID NO: 22991 - protein, 120 aa, Homo sapiens
  MOD_RES (28)..(29): Selenocysteine
  MOD_RES (61)..(61): Selenocysteine
  MOD_RES (73)..(73): Selenocysteine
  MOD_RES (100)..(100): Selenocysteine
  MOD_RES (103)..(103): Selenocysteine
  MOD_RES (115)..(115): Selenocysteine
MLLGLAAMELKVWVDGIQRVVCGVSEQXXCQEVVIALAQAIDWPLCACAAASGEGAAVAAXRVSSGRPGHLRXVCQRCPVCPEAHRAQPSWEALLRQLSXPGXLPNSCQPPCKAXGCAGL

SEQ ID NO: 22992 - protein, 120 aa, Homo sapiens
  MOD_RES (28)..(29): Selenocysteine
  MOD_RES (61)..(61): Selenocysteine
  MOD_RES (73)..(73): Selenocysteine
  MOD_RES (100)..(100): Selenocysteine
  MOD_RES (103)..(103): Selenocysteine
  MOD_RES (115)..(115): Selenocysteine
MLLGLAAMELKVWVDGIQRVVCGVSEQXXCQEVVIALAQAIDWPLCACAAASGEGAAVAAXRVSSGRPGHLRXVCQRCPVCPEAHRGQPSWEALLRQLSXPGXLPNSCQPPCKAXGCAGL

SEQ ID NO: 22993 - protein, 84 aa, Homo sapiens
  MOD_RES (28)..(29): Selenocysteine
  MOD_RES (44)..(44): Selenocysteine
  MOD_RES (72)..(72): Selenocysteine
MLLGLAAMELKVWVDGIQRVVCGVSEQXXCQEVVIALAQAIGQXGRFVLVQRLREKERQLLPQECPVGAQAXCGQFASDVQFVL

SEQ ID NO: 22994 - protein, 320 aa, Homo sapiens
  MOD_RES (28)..(29): Selenocysteine
  MOD_RES (44)..(44): Selenocysteine
  MOD_RES (72)..(72): Selenocysteine
  MOD_RES (87)..(87): Selenocysteine
  MOD_RES (127)..(127): Selenocysteine
  MOD_RES (129)..(129): Selenocysteine
  MOD_RES (146)..(146): Selenocysteine
  MOD_RES (148)..(148): Selenocysteine
  MOD_RES (153)..(153): Selenocysteine
  MOD_RES (200)..(200): Selenocysteine
  MOD_RES (238)..(238): Selenocysteine
  MOD_RES (299)..(299): Selenocysteine
  MOD_RES (316)..(316): Selenocysteine
MLLGLAAMELKVWVDGIQRVVCGVSEQXXCQEVVIALAQAIGQXGRFVLVQRLREKERQLLPQECPVGAQAXCGQFASDVQFVLRRXGASLAGRPSSDSCPPPERCLIRASLPVKPRAALGCEPRKXLXPEPAPSLSRPGPAAPVXPXPGCCXDLRGLELRVQRNAEELGHEAFWEQELRREQAREREGQARLQALSAAXAEHAARLQALDAQARALEAELQLAAEAPGPPSPMASAXERLHQDLAVQERQSAEVQGSLALVSRALEAAERALQAQAQELEELNRELRQCNLQQFIQQXGAALPPPPRPDRGPPGXQWPP

SEQ ID NO: 22995 - protein, 337 aa, Homo sapiens
  MOD_RES (28)..(29): Selenocysteine
  MOD_RES (44)..(44): Selenocysteine
  MOD_RES (72)..(72): Selenocysteine
  MOD_RES (87)..(87): Selenocysteine
  MOD_RES (127)..(127): Selenocysteine
  MOD_RES (129)..(129): Selenocysteine
  MOD_RES (146)..(146): Selenocysteine
  MOD_RES (148)..(148): Selenocysteine
  MOD_RES (153)..(153): Selenocysteine
  MOD_RES (200)..(200): Selenocysteine
  MOD_RES (238)..(238): Selenocysteine
  MOD_RES (299)..(299): Selenocysteine
  MOD_RES (316)..(316): Selenocysteine
  MOD_RES (330)..(330): Selenocysteine
  MOD_RES (335)..(335): Selenocysteine
MLLGLAAMELKVWVDGIQRVVCGVSEQXXCQEVVIALAQAIGQXGRFVLVQRLREKERQLLPQECPVGAQAXCGQFASDVQFVLRRXGASLAGRPSSDSCPPPERCLIRASLPVKPRAALGCEPRKXLXPEPAPSLSRPGPAAPVXPXPGCCXDLRGLELRVQRNAEELGHEAFWEQELRREQAREREGQARLQALSAAXAEHAARLQALDAQARALEAELQLAAEAPGPPSPMASAXERLHQDLAVQERQSAEVQGSLALVSRALEAAERALQAQAQELEELNRELRQCNLQQFIQQXGAALPPPPRPDRGPPGXQVGVVLGGGWEVRXWPSPXPS

SEQ ID NO: 22996 - protein, 373 aa, Homo sapiens
  MOD_RES (28)..(29): Selenocysteine
  MOD_RES (44)..(44): Selenocysteine
  MOD_RES (72)..(72): Selenocysteine
  MOD_RES (87)..(87): Selenocysteine
  MOD_RES (127)..(127): Selenocysteine
  MOD_RES (129)..(129): Selenocysteine
  MOD_RES (146)..(146): Selenocysteine
  MOD_RES (148)..(148): Selenocysteine
  MOD_RES (153)..(153): Selenocysteine
  MOD_RES (200)..(200): Selenocysteine
  MOD_RES (238)..(238): Selenocysteine
  MOD_RES (299)..(299): Selenocysteine
  MOD_RES (316)..(316): Selenocysteine
MLLGLAAMELKVWVDGIQRVVCGVSEQXXCQEVVIALAQAIGQXGRFVLVQRLREKERQLLPQECPVGAQAXCGQFASDVQFVLRRXGASLAGRPSSDSCPPPERCLIRASLPVKPRAALGCEPRKXLXPEPAPSLSRPGPAAPVXPXPGCCXDLRGLELRVQRNAEELGHEAFWEQELRREQAREREGQARLQALSAAXAEHAARLQALDAQARALEAELQLAAEAPGPPSPMASAXERLHQDLAVQERQSAEVQGSLALVSRALEAAERALQAQAQELEELNRELRQCNLQQFIQQXGAALPPPPRPDRGPPGXQGPLPPAREESLLGAPSESHAGAQPRPRGGPHDAELLEVAAAPAPEWCPLAAQPQAL

SEQ ID NO: 22997 - protein, 320 aa, Homo sapiens
  MOD_RES (28)..(29): Selenocysteine
  MOD_RES (44)..(44): Selenocysteine
  MOD_RES (72)..(72): Selenocysteine
  MOD_RES (87)..(87): Selenocysteine
  MOD_RES (127)..(127): Selenocysteine
  MOD_RES (129)..(129): Selenocysteine
  MOD_RES (146)..(146): Selenocysteine
  MOD_RES (148)..(148): Selenocysteine
  MOD_RES (153)..(153): Selenocysteine
  MOD_RES (200)..(200): Selenocysteine
  MOD_RES (238)..(238): Selenocysteine
  MOD_RES (299)..(299): Selenocysteine
  MOD_RES (316)..(316): Selenocysteine
MLLGLAAMELKVWVDGIQRVVCGVSEQXXCQEVVIALAQAIGQXGRFVLVQRLREKERQLLPQECPVGAQAXCGQFASDVQFVLRRXGPSLAGRPSSDSCPPPERCLIRASLPVKPRAALGCEPRKXLXPEPAPSLSRPGPAAPVXPXPGCCXDLRGLELRVQRNAEELGHEAFWEQELRREQAREREGQARLQALSAAXAEHAARLQALDAQARALEAELQLAAEAPGPPSPMASAXERLHQDLAVQERQSAEVQGSLALVSRALEAAERALQAQAQELEELNRELRQCNLQQFIQQXGAALPPPPRPDRGPPGXQWPP

SEQ ID NO: 22998 - protein, 337 aa, Homo sapiens
  MOD_RES (28)..(29): Selenocysteine
  MOD_RES (44)..(44): Selenocysteine
  MOD_RES (72)..(72): Selenocysteine
  MOD_RES (87)..(87): Selenocysteine
  MOD_RES (127)..(127): Selenocysteine
  MOD_RES (129)..(129): Selenocysteine
  MOD_RES (146)..(146): Selenocysteine
  MOD_RES (148)..(148): Selenocysteine
  MOD_RES (153)..(153): Selenocysteine
  MOD_RES (200)..(200): Selenocysteine
  MOD_RES (238)..(238): Selenocysteine
  MOD_RES (299)..(299): Selenocysteine
  MOD_RES (316)..(316): Selenocysteine
  MOD_RES (330)..(330): Selenocysteine
  MOD_RES (335)..(335): Selenocysteine
MLLGLAAMELKVWVDGIQRVVCGVSEQXXCQEVVIALAQAIGQXGRFVLVQRLREKERQLLPQECPVGAQAXCGQFASDVQFVLRRXGPSLAGRPSSDSCPPPERCLIRASLPVKPRAALGCEPRKXLXPEPAPSLSRPGPAAPVXPXPGCCXDLRGLELRVQRNAEELGHEAFWEQELRREQAREREGQARLQALSAAXAEHAARLQALDAQARALEAELQLAAEAPGPPSPMASAXERLHQDLAVQERQSAEVQGSLALVSRALEAAERALQAQAQELEELNRELRQCNLQQFIQQXGAALPPPPRPDRGPPGXQVGVVLGGGWEVRXWPSPXPS

SEQ ID NO: 22999 - protein, 373 aa, Homo sapiens
  MOD_RES (28)..(29): Selenocysteine
  MOD_RES (44)..(44): Selenocysteine
  MOD_RES (72)..(72): Selenocysteine
  MOD_RES (87)..(87): Selenocysteine
  MOD_RES (127)..(127): Selenocysteine
  MOD_RES (129)..(129): Selenocysteine
  MOD_RES (146)..(146): Selenocysteine
  MOD_RES (148)..(148): Selenocysteine
  MOD_RES (153)..(153): Selenocysteine
  MOD_RES (200)..(200): Selenocysteine
  MOD_RES (238)..(238): Selenocysteine
  MOD_RES (299)..(299): Selenocysteine
  MOD_RES (316)..(316): Selenocysteine
MLLGLAAMELKVWVDGIQRVVCGVSEQXXCQEVVIALAQAIGQXGRFVLVQRLREKERQLLPQECPVGAQAXCGQFASDVQFVLRRXGPSLAGRPSSDSCPPPERCLIRASLPVKPRAALGCEPRKXLXPEPAPSLSRPGPAAPVXPXPGCCXDLRGLELRVQRNAEELGHEAFWEQELRREQAREREGQARLQALSAAXAEHAARLQALDAQARALEAELQLAAEAPGPPSPMASAXERLHQDLAVQERQSAEVQGSLALVSRALEAAERALQAQAQELEELNRELRQCNLQQFIQQXGAALPPPPRPDRGPPGXQGPLPPAREESLLGAPSESHAGAQPRPRGGPHDAELLEVAAAPAPEWCPLAAQPQAL

SEQ ID NO: 23000 - protein, 194 aa, Homo sapiens
  MOD_RES (1)..(1): Any amino acid
  MOD_RES (3)..(3): Selenocysteine
  MOD_RES (5)..(5): Selenocysteine
  MOD_RES (10)..(10): Selenocysteine
  MOD_RES (57)..(57): Selenocysteine
  MOD_RES (95)..(95): Selenocysteine
  MOD_RES (156)..(156): Selenocysteine
  MOD_RES (173)..(173): Selenocysteine
  MOD_RES (187)..(187): Selenocysteine
  MOD_RES (192)..(192): Selenocysteine
XVXPXPGCCXDLRGLELRVQRNAEELGHEAFWEQELRREQAREREGQARLQALSAAXAEHAARLQALDAQARALEAELQLAAEAPGPPSPMASAXERLHQDLAVQERQSAEVQGSLALVSRALEAAERALQAQAQELEELNRELRQCNLQQFIQQXGAALPPPPRPDRGPPGXQVGVVLGGGWEVRXWPSPXPS

SEQ ID NO: 23001 - protein, 208 aa, Homo sapiens
  MOD_RES (41)..(41): Selenocysteine
  MOD_RES (56)..(56): Selenocysteine
  MOD_RES (116)..(116): Selenocysteine
  MOD_RES (130)..(130): Selenocysteine
  MOD_RES (145)..(145): Selenocysteine
  MOD_RES (147)..(147): Selenocysteine
  MOD_RES (150)..(150): Selenocysteine
KIKRNDVEIEEEEFWENELQIEQENEKQLKDQLQEIRQKIXECENKLKDYLAQIRXMESGLEAEKLQREVQEAQVNEEEVKGKIGKVKGEIDIQGQQSLRLENGIKAVERSLGQAXKRLQDKEQELEQLXKELRQVNLQQFIQQXGXKVXVLPAEPIEIEASHADIEREAPFQSGSLKRPGSSRQLPSNLRILQNPISSGFNPEGIYV

SEQ ID NO: 23002 - protein, 29 aa, Homo sapiens
  MOD_RES (18)..(18): Selenocysteine
  MOD_RES (21)..(22): Selenocysteine
MELKVWVDGVQRIVCGVXEVXXCQEVVIA

SEQ ID NO: 23003 - protein, 91 aa, Homo sapiens
  MOD_RES (18)..(18): Selenocysteine
  MOD_RES (21)..(22): Selenocysteine
  MOD_RES (37)..(37): Selenocysteine
  MOD_RES (41)..(41): Selenocysteine
  MOD_RES (49)..(49): Selenocysteine
  MOD_RES (80)..(80): Selenocysteine
  MOD_RES (89)..(89): Selenocysteine
MELKVWVDGVQRIVCGVXEVXXCQEVVIALAQAIGRXGRYXLIEKWRDXERHLAPHENPIISLNKWGQYASDVQLILRRXGPSLSERPXSD

SEQ ID NO: 23004 - protein, 109 aa, Homo sapiens
  MOD_RES (18)..(18): Selenocysteine
  MOD_RES (21)..(22): Selenocysteine
  MOD_RES (37)..(37): Selenocysteine
  MOD_RES (41)..(41): Selenocysteine
  MOD_RES (49)..(49): Selenocysteine
  MOD_RES (80)..(80): Selenocysteine
  MOD_RES (89)..(89): Selenocysteine
  MOD_RES (100)..(100): Selenocysteine
MELKVWVDGVQRIVCGVXEVXXCQEVVIALAQAIGRXGRYXLIEKWRDXERHLAPHENPIISLNKWGQYASDVQLILRRXGPSLSERPXSDSVARIPERXLYRQSLPLS

SEQ ID NO: 23005 - protein, 122 aa, Homo sapiens
  MOD_RES (18)..(18): Selenocysteine
  MOD_RES (21)..(22): Selenocysteine
  MOD_RES (37)..(37): Selenocysteine
  MOD_RES (41)..(41): Selenocysteine
  MOD_RES (49)..(49): Selenocysteine
  MOD_RES (80)..(80): Selenocysteine
  MOD_RES (89)..(89): Selenocysteine
  MOD_RES (100)..(100): Selenocysteine
MELKVWVDGVQRIVCGVXEVXXCQEVVIALAQAIGRXGRYXLIEKWRDXERHLAPHENPIISLNKWGQYASDVQLILRRXGPSLSERPXSDSVARIPERXLYRQSLPPLAKLRPQIDKSIKR

SEQ ID NO: 23006 - protein, 159 aa, Homo sapiens
  MOD_RES (18)..(18): Selenocysteine
  MOD_RES (21)..(22): Selenocysteine
  MOD_RES (37)..(37): Selenocysteine
  MOD_RES (41)..(41): Selenocysteine
  MOD_RES (49)..(49): Selenocysteine
  MOD_RES (80)..(80): Selenocysteine
  MOD_RES (89)..(89): Selenocysteine
  MOD_RES (100)..(100): Selenocysteine
  MOD_RES (131)..(131): Selenocysteine
  MOD_RES (133)..(133): Selenocysteine
  MOD_RES (149)..(149): Selenocysteine
MELKVWVDGVQRIVCGVXEVXXCQEVVIALAQAIGRXGRYXLIEKWRDXERHLAPHENPIISLNKWGQYASDVQLILRRXGPSLSERPXSDSVARIPERXLYRQSLPPLAKLRPQIDKSIKRREPKRKSLXFXGGAKGLMDIFGKGKEXEFKQKVLNNC

SEQ ID NO: 23007 - protein, 208 aa, Homo sapiens
  MOD_RES (18)..(18): Selenocysteine
  MOD_RES (21)..(22): Selenocysteine
  MOD_RES (37)..(37): Selenocysteine
  MOD_RES (41)..(41): Selenocysteine
  MOD_RES (49)..(49): Selenocysteine
  MOD_RES (80)..(80): Selenocysteine
  MOD_RES (89)..(89): Selenocysteine
  MOD_RES (100)..(100): Selenocysteine
  MOD_RES (131)..(131): Selenocysteine
  MOD_RES (133)..(133): Selenocysteine
  MOD_RES (149)..(149): Selenocysteine
  MOD_RES (161)..(162): Selenocysteine
  MOD_RES (174)..(174): Selenocysteine
MELKVWVDGVQRIVCGVXEVXXCQEVVIALAQAIGRXGRYXLIEKWRDXERHLAPHENPIISLNKWGQYASDVQLILRRXGPSLSERPXSDSVARIPERXLYRQSLPPLAKLRPQIDKSIKRREPKRKSLXFXGGAKGLMDIFGKGKEXEFKQKVLNNCKXXADELKKLIRLQXEKLQSIEKQLESNEIEIRFWEQKYNSNLEEEIVR

SEQ ID NO: 23008 - protein, 219 aa, Homo sapiens
  MOD_RES (18)..(18): Selenocysteine
  MOD_RES (21)..(22): Selenocysteine
  MOD_RES (37)..(37): Selenocysteine
  MOD_RES (41)..(41): Selenocysteine
  MOD_RES (49)..(49): Selenocysteine
  MOD_RES (80)..(80): Selenocysteine
  MOD_RES (89)..(89): Selenocysteine
  MOD_RES (100)..(100): Selenocysteine
  MOD_RES (131)..(131): Selenocysteine
  MOD_RES (133)..(133): Selenocysteine
  MOD_RES (149)..(149): Selenocysteine
  MOD_RES (161)..(162): Selenocysteine
  MOD_RES (174)..(174): Selenocysteine
MELKVWVDGVQRIVCGVXEVXXCQEVVIALAQAIGRXGRYXLIEKWRDXERHLAPHENPIISLNKWGQYASDVQLILRRXGPSLSERPXSDSVARIPERXLYRQSLPPLAKLRPQIDKSIKRREPKRKSLXFXGGAKGLMDIFGKGKEXEFKQKVLNNCKXXADELKKLIRLQXEKLQSIEKQLESNEIEIRFWEQKYNSNLEEEIVRLEQKIKRNDVE

SEQ ID NO: 23009 - protein, 392 aa, Homo sapiens
  MOD_RES (18)..(18): Selenocysteine
  MOD_RES (21)..(22): Selenocysteine
  MOD_RES (37)..(37): Selenocysteine
  MOD_RES (41)..(41): Selenocysteine
  MOD_RES (49)..(49): Selenocysteine
  MOD_RES (80)..(80): Selenocysteine
  MOD_RES (89)..(89): Selenocysteine
  MOD_RES (100)..(100): Selenocysteine
  MOD_RES (131)..(131): Selenocysteine
  MOD_RES (133)..(133): Selenocysteine
  MOD_RES (149)..(149): Selenocysteine
  MOD_RES (161)..(162): Selenocysteine
  MOD_RES (174)..(174): Selenocysteine
  MOD_RES (252)..(252): Selenocysteine
  MOD_RES (267)..(267): Selenocysteine
  MOD_RES (327)..(327): Selenocysteine
  MOD_RES (341)..(341): Selenocysteine
  MOD_RES (356)..(356): Selenocysteine
  MOD_RES (358)..(358): Selenocysteine
  MOD_RES (361)..(361): Selenocysteine
MELKVWVDGVQRIVCGVXEVXXCQEVVIALAQAIGRXGRYXLIEKWRDXERHLAPHENPIISLNKWGQYASDVQLILRRXGPSLSERPXSDSVARIPERXLYRQSLPPLAKLRPQIDKSIKRREPKRKSLXFXGGAKGLMDIFGKGKEXEFKQKVLNNCKXXADELKKLIRLQXEKLQSIEKQLESNEIEIRFWEQKYNSNLEEEIVRLEQKIKRNDVEIEEEEFWENELQIEQENEKQLKDQLQEIRQKIXECENKLKDYLAQIRXMESGLEAEKLQREVQEAQVNEEEVKGKIGKVKGEIDIQGQQSLRLENGIKAVERSLGQAXKRLQDKEQELEQLXKELRQVNLQQFIQQXGXKVXVLPAEPIEIEASHADIERGIIILSDKQECKD

SEQ ID NO: 23010 - protein, 419 aa, Homo sapiens
  MOD_RES (18)..(18): Selenocysteine
  MOD_RES (21)..(22): Selenocysteine
  MOD_RES (37)..(37): Selenocysteine
  MOD_RES (41)..(41): Selenocysteine
  MOD_RES (49)..(49): Selenocysteine
  MOD_RES (80)..(80): Selenocysteine
  MOD_RES (89)..(89): Selenocysteine
  MOD_RES (100)..(100): Selenocysteine
  MOD_RES (131)..(131): Selenocysteine
  MOD_RES (133)..(133): Selenocysteine
  MOD_RES (149)..(149): Selenocysteine
  MOD_RES (161)..(162): Selenocysteine
  MOD_RES (174)..(174): Selenocysteine
  MOD_RES (252)..(252): Selenocysteine
  MOD_RES (267)..(267): Selenocysteine
  MOD_RES (327)..(327): Selenocysteine
  MOD_RES (341)..(341): Selenocysteine
  MOD_RES (356)..(356): Selenocysteine
  MOD_RES (358)..(358): Selenocysteine
  MOD_RES (361)..(361): Selenocysteine
MELKVWVDGVQRIVCGVXEVXXCQEVVIALAQAIGRXGRYXLIEKWRDXERHLAPHENPIISLNKWGQYASDVQLILRRXGPSLSERPXSDSVARIPERXLYRQSLPPLAKLRPQIDKSIKRREPKRKSLXFXGGAKGLMDIFGKGKEXEFKQKVLNNCKXXADELKKLIRLQXEKLQSIEKQLESNEIEIRFWEQKYNSNLEEEIVRLEQKIKRNDVEIEEEEFWENELQIEQENEKQLKDQLQEIRQKIXECENKLKDYLAQIRXMESGLEAEKLQREVQEAQVNEEEVKGKIGKVKGEIDIQGQQSLRLENGIKAVERSLGQAXKRLQDKEQELEQLXKELRQVNLQQFIQQXGXKVXVLPAEPIEIEASHADIEREAPFQSGSLKRPGSSRQLPSNLRILQNPISSGFNPEGIYV

SEQ ID NO: 23011 - protein, 435 aa, Homo sapiens
  MOD_RES (11)..(11): Selenocysteine
  MOD_RES (19)..(19): Selenocysteine
  MOD_RES (44)..(44): Selenocysteine
  MOD_RES (47)..(48): Selenocysteine
  MOD_RES (63)..(63): Selenocysteine
  MOD_RES (94)..(94): Selenocysteine
  MOD_RES (128)..(128): Selenocysteine
  MOD_RES (137)..(137): Selenocysteine
  MOD_RES (151)..(151): Selenocysteine
  MOD_RES (164)..(164): Selenocysteine
  MOD_RES (175)..(175): Selenocysteine
  MOD_RES (185)..(185): Selenocysteine
  MOD_RES (196)..(196): Selenocysteine
  MOD_RES (256)..(256): Selenocysteine
  MOD_RES (398)..(398): Selenocysteine
  MOD_RES (406)..(406): Selenocysteine
  MOD_RES (409)..(409): Selenocysteine
  MOD_RES (413)..(413): Selenocysteine
  MOD_RES (425)..(426): Selenocysteine
  MOD_RES (435)..(435): Selenocysteine
MAPFGRNLLKXRHKNRSPXKDMDSEEKEIVVWVCQEEKLVCGLXKRXXSADVIQALLEEHEAXFGEKRFLLGKPSDYCIIEKWRGSERVLPPLXRILKLWKAWGDEQPNMQFVLVKADAFLPVPLWRXAEAKLVQNXEKLWELSPANYMKXLPPDKQKRIVRKXFRKLAKIKQDXVSHDRDNMEXLVHLIISQDHXIHQQVKRMKELDLEIEKCEAKFHLDRVENDGENYVQDAYLMPSFSEVEQNLDLQYEENQXLEDLSESDGIEQLEERLKYYRILIDKLSAEIEKEVKSVCIDINEDAEGEAASELESSNLESVKCDLEKSMKAGLKIHSHLSGIQKEIKYSDSLLQMKAKEYELLAKEFNSLHISNKDGCQLKENRAKESEVPSSNGEIPPFXQRVFSNYXNDXDSDXGISSNHSQDSEXXVGDVVLLSX

SEQ ID NO: 23012 - protein, 74 aa, Homo sapiens
  MOD_RES (29)..(29): Selenocysteine
  MOD_RES (42)..(42): Selenocysteine
  MOD_RES (50)..(50): Selenocysteine
MHLPGCAPAMADGSFSLAGHLLRSPGGSXSRLHSIEAILGFXKDDGILGXFPAERGARGAKERDRRLGARPACP

SEQ ID NO: 23013 - protein, 346 aa, Homo sapiens
  MOD_RES (29)..(29): Selenocysteine
  MOD_RES (42)..(42): Selenocysteine
  MOD_RES (50)..(50): Selenocysteine
  MOD_RES (121)..(121): Selenocysteine
  MOD_RES (141)..(142): Selenocysteine
  MOD_RES (144)..(145): Selenocysteine
  MOD_RES (220)..(220): Selenocysteine
  MOD_RES (255)..(255): Selenocysteine
  MOD_RES (275)..(275): Selenocysteine
MHLPGCAPAMADGSFSLAGHLLRSPGGSXSRLHSIEAILGFXKDDGILGXFPAERGARGAKERDRRLGARPACPKAPEEGSEPSPPPAPAPAPEYEAPRPYCPKEPGEARPSPGLPVGPAXGEAKLSEEEQPKKKHRRNRXXFXXYQLHELERAFEKSHYPDVYSREELAGKVNLPEVRVQVWFQNRRAKWRRQEKLEVSSMKLQDSPLLSFSRSPPSAXLSPLGAGPGSGGGPAGGALPLESWLGPPLPGGGAXALQSLPGFGPPAQSLPASYXPPPPPPPFLNSPPLGPGLQPLAPPPPSYPCGPGFGDKFPLDEADPRNSSIAALRLKAKEHIQAIGKPWQAL

SEQ ID NO: 23014 - protein, 104 aa, Homo sapiens
  MOD_RES (29)..(29): Selenocysteine
  MOD_RES (42)..(42): Selenocysteine
  MOD_RES (50)..(50): Selenocysteine
  MOD_RES (103)..(103): Selenocysteine
MHLPGCAPAMADGSFSLAGHLLRSPGGSXSRLHSIEAILGFXKDDGILGXFPAERGARGAKERDRRLGARPACPKAPEEGSEPSPPPAPAPAPEYEGVVPEPXG

SEQ ID NO: 23015 - protein, 184 aa, Homo sapiens
  MOD_RES (11)..(11): Selenocysteine
  MOD_RES (32)..(33): Selenocysteine
  MOD_RES (35)..(36): Selenocysteine
  MOD_RES (154)..(154): Selenocysteine
MFLSPGEGPAXEGGGLGPGEEAPKKKHRRNRXXFXXYQLHQLERAFEASHYPDVYSREELAAKVHLPEVRVQVWFQNRRAKWRRQERLESGSGAVAAPRLPEAPALPFARPPAMSLPLEPWLGPGPPAVPGLPRLLGPGPGLQASFGPHAFAPXFADGFALEEASLRLLAKEHAQALDRAWPPA

SEQ ID NO: 23016 - protein, 53 aa, Homo sapiens
  MOD_RES (5)..(5): Selenocysteine
  MOD_RES (9)..(9): Selenocysteine
  MOD_RES (12)..(12): Selenocysteine
  MOD_RES (50)..(50): Selenocysteine
MPPKXPRKXAAXAAAAAAEPPAPPPPPPPEEDPEQDSGPEDLPLVRGSIXNGR

SEQ ID NO: 23017 - protein, 928 aa, Homo sapiens
  MOD_RES (5)..(5): Selenocysteine
  MOD_RES (9)..(9): Selenocysteine
  MOD_RES (12)..(12): Selenocysteine
  MOD_RES (52)..(52): Selenocysteine
  MOD_RES (58)..(58): Selenocysteine
  MOD_RES (77)..(77): Selenocysteine
  MOD_RES (116)..(116): Selenocysteine
  MOD_RES (118)..(118): Selenocysteine
  MOD_RES (140)..(140): Selenocysteine
  MOD_RES (142)..(142): Selenocysteine
  MOD_RES (168)..(168): Selenocysteine
  MOD_RES (175)..(175): Selenocysteine
  MOD_RES (183)..(183): Selenocysteine
  MOD_RES (197)..(197): Selenocysteine
  MOD_RES (241)..(241): Selenocysteine
  MOD_RES (252)..(252): Selenocysteine
  MOD_RES (271)..(271): Selenocysteine
  MOD_RES (307)..(307): Selenocysteine
  MOD_RES (342)..(342): Selenocysteine
  MOD_RES (345)..(345): Selenocysteine
  MOD_RES (353)..(353): Selenocysteine
  MOD_RES (356)..(356): Selenocysteine
  MOD_RES (373)..(373): Selenocysteine
  MOD_RES (377)..(377): Selenocysteine
  MOD_RES (381)..(381): Selenocysteine
  MOD_RES (408)..(408): Selenocysteine
  MOD_RES (497)..(497): Selenocysteine
  MOD_RES (502)..(502): Selenocysteine
  MOD_RES (510)..(510): Selenocysteine
  MOD_RES (543)..(543): Selenocysteine
  MOD_RES (583)..(583): Selenocysteine
  MOD_RES (601)..(601): Selenocysteine
  MOD_RES (619)..(620): Selenocysteine
  MOD_RES (625)..(625): Selenocysteine
  MOD_RES (630)..(630): Selenocysteine
  MOD_RES (633)..(633): Selenocysteine
  MOD_RES (638)..(638): Selenocysteine
  MOD_RES (645)..(645): Selenocysteine
  MOD_RES (664)..(664): Selenocysteine
  MOD_RES (682)..(682): Selenocysteine
  MOD_RES (687)..(687): Selenocysteine
  MOD_RES (726)..(726): Selenocysteine
  MOD_RES (738)..(738): Selenocysteine
  MOD_RES (766)..(766): Selenocysteine
  MOD_RES (774)..(774): Selenocysteine
  MOD_RES (778)..(778): Selenocysteine
  MOD_RES (821)..(821): Selenocysteine
  MOD_RES (823)..(823): Selenocysteine
  MOD_RES (826)..(826): Selenocysteine
  MOD_RES (841)..(841): Selenocysteine
  MOD_RES (905)..(905): Selenocysteine
  MOD_RES (907)..(907): Selenocysteine
  MOD_RES (909)..(909): Selenocysteine
  MOD_RES (922)..(922): Selenocysteine
MPPKXPRKXAAXAAAAAAEPPAPPPPPPPEEDPEQDSGPEDLPLVRLEFEEXEEPDFXALCQKLKIPDHVRERAWLXWEKVSSVDGVLGGYIQKKKELWGICIFIAAVDLDEMSFXFXELQKNIEISVHKFFNLLKEIDXSXKVDNAMSRLLKKYDVLFALFSKLERXCELIYLXQPSSSISXEINSALVLKVSWIXFLLAKGEVLQMEDDLVISFQLMLCVLDYFIKLSPPMLLKEPYKXAVIPINGSPRXPRRGQNRSARIAKQLENDXRIIEVLCKEHECNIDEVKNVYFKNFIPFMNSLGLVXSNGLPEVENLSKRYEEIYLKNKDLDARLFLDHDKXLQXDSIDSFEXQRXPRKSNLDEEVNVIPPHXPVRXVMNXIQQLMMILNSASDQPSENLISYFNNCXVNPKESILKRVKDIGYIFKEKFAKAVGQGCVEIGSQRYKLGVRLYYRVMESMLKSEEERLSIQNFSKLLNDNIFHMSLLACALEVVMAXYSRSXSQNLDSGXDLSFPWILNVLNLKAFDFYKVIESFIKAEGNLXREMIKHLERCEHRIMESLAWLSDSPLFDLIKQSKDREGPXDHLESACPLNLPLQNNHXAADMYLSPVRSPKKKGSXXRVNSXANAEXQAXSAFQXQKPLKSXSLSLFYKKVYRLAYLRLNXLCERLLSEHPELEHIIWXLFQHXLQNEYELMRDRHLDQIMMCSMYGICKVKNIDLKFKIIVXAYKDLPHAVQEXFKRVLIKEEEYDSIIVFYNSVFMQRLKXNILQYASXRPPXLSPIPHIPRSPYKFPSSPLRIPGGNIYISPLKSPYKISEGLPXPXKMXPRSRILVSIGESFGXSEKFQKINQMVCNSDRVLKRSAEGSNPPKPLKKLRFDIEGSDEADGSKHLPGESKFQQKLAEMXSXRXRMQKQKMNDSMDXSNKEEK

SEQ ID NO: 23018 - protein, 53 aa, Homo sapiens
  MOD_RES (9)..(9): Selenocysteine
  MOD_RES (14)..(14): Selenocysteine
  MOD_RES (16)..(16): Selenocysteine
  MOD_RES (38)..(39): Selenocysteine
  MOD_RES (42)..(42): Selenocysteine
MAADRRVCXYSAGXDXNPIFLFNKEMILCDRPPAIPKXXFSXENDMEIKVEES

SEQ ID NO: 23019 - protein, 15 aa, Homo sapiens
  MOD_RES (10)..(10): Selenocysteine
  MOD_RES (12)..(13): Selenocysteine
  MOD_RES (15)..(15): Selenocysteine
MKLYVFLVNXGXXLX

SEQ ID NO: 23020 - protein, 1591 aa, Homo sapiens
  MOD_RES (10)..(10): Selenocysteine
  MOD_RES (12)..(13): Selenocysteine
  MOD_RES (15)..(15): Selenocysteine
  MOD_RES (18)..(18): Selenocysteine
  MOD_RES (21)..(21): Selenocysteine
  MOD_RES (24)..(24): Selenocysteine
  MOD_RES (61)..(61): Selenocysteine
  MOD_RES (66)..(66): Selenocysteine
  MOD_RES (68)..(68): Selenocysteine
  MOD_RES (90)..(91): Selenocysteine
  MOD_RES (94)..(94): Selenocysteine
  MOD_RES (114)..(114): Selenocysteine
  MOD_RES (119)..(119): Selenocysteine
  MOD_RES (190)..(190): Selenocysteine
  MOD_RES (194)..(194): Selenocysteine
  MOD_RES (209)..(209): Selenocysteine
  MOD_RES (238)..(238): Selenocysteine
  MOD_RES (249)..(250): Selenocysteine
  MOD_RES (256)..(256): Selenocysteine
  MOD_RES (269)..(269): Selenocysteine
  MOD_RES (285)..(285): Selenocysteine
  MOD_RES (292)..(293): Selenocysteine
  MOD_RES (296)..(296): Selenocysteine
  MOD_RES (350)..(350): Selenocysteine
  MOD_RES (438)..(439): Selenocysteine
  MOD_RES (491)..(491): Selenocysteine
  MOD_RES (564)..(564): Selenocysteine
  MOD_RES (631)..(631): Selenocysteine
  MOD_RES (633)..(633): Selenocysteine
  MOD_RES (646)..(646): Selenocysteine
  MOD_RES (659)..(659): Selenocysteine
  MOD_RES (663)..(666): Selenocysteine
  MOD_RES (670)..(670): Selenocysteine
  MOD_RES (675)..(675): Selenocysteine
  MOD_RES (699)..(699): Selenocysteine
  MOD_RES (704)..(704): Selenocysteine
  MOD_RES (713)..(713): Selenocysteine
  MOD_RES (780)..(780): Selenocysteine
  MOD_RES (792)..(792): Selenocysteine
  MOD_RES (814)..(814): Selenocysteine
  MOD_RES (824)..(824): Selenocysteine
  MOD_RES (840)..(840): Selenocysteine
  MOD_RES (858)..(858): Selenocysteine
  MOD_RES (885)..(885): Selenocysteine
  MOD_RES (994)..(994): Selenocysteine
  MOD_RES (1008)..(1008): Selenocysteine
  MOD_RES (1056)..(1056): Selenocysteine
  MOD_RES (1071)..(1071): Selenocysteine
  MOD_RES (1088)..(1088): Selenocysteine
  MOD_RES (1097)..(1097): Selenocysteine
  MOD_RES (1102)..(1102): Selenocysteine
  MOD_RES (1127)..(1127): Selenocysteine
  MOD_RES (1130)..(1130): Selenocysteine
  MOD_RES (1159)..(1159): Selenocysteine
  MOD_RES (1199)..(1199): Selenocysteine
  MOD_RES (1244)..(1244): Selenocysteine
  MOD_RES (1280)..(1280): Selenocysteine
  MOD_RES (1322)..(1322): Selenocysteine
  MOD_RES (1330)..(1330): Selenocysteine
  MOD_RES (1334)..(1334): Selenocysteine
  MOD_RES (1337)..(1337): Selenocysteine
  MOD_RES (1357)..(1357): Selenocysteine
  MOD_RES (1405)..(1405): Selenocysteine
  MOD_RES (1428)..(1428): Selenocysteine
  MOD_RES (1440)..(1440): Selenocysteine
  MOD_RES (1465)..(1465): Selenocysteine
  MOD_RES (1522)..(1522): Selenocysteine
  MOD_RES (1526)..(1526): Selenocysteine
  MOD_RES (1577)..(1577): Selenocysteine
MKLYVFLVNXGXXLXFDXELXVQXVADLKHAIQSKYKIAIQHQVLVVNGGECMAADRRVCXYSAGXDXNPIFLFNKEMILCDRPPAIPKXXFSXENDMEIKVEESLMMPAVFHXVASRXQLALEMYEVAKKLCSFCEGLVHDEHLQHQGWAAIMANLEDCSNSYQKLLFKFESIYSNYLQSIEDIKLKLXHLGXAVSVMAKIPLLECLXRHSYRECLGRLDSLPEHEDSEKAEMKRSXELVLSPDMPRXXNESLLXSFPKSVEHVSPDXADAESGKEIRESCQSXVHQQDEXXIDXKDGDLPFFNVSLLDWINVQDRPNDVESLVRKCFDSMSRLDPRIIRPFIAECRQXIAKLDNQNMKAIKGLEDRLYALDQMIASCGRLVNEQKELAQGFLANQKRAENLKDASVLPDLCLSHANQLMIMLQNHRKLLDIKQKCXXAKQELANNLHVRLKWCCFVMLHADQDGEKLQALLRLVIELLERVKIVEALSXVPQMYCLAVVEVVRRKMFIKHYREWAGALVKDGKRLYEAEKSKRESFGKLFRKSFLRNRLFRGLDSWPPSFCXQKPRKFDCELPDISLKDLQFLQSFCPSEVQPFLRVPLLCDFEPLHQHVLALHNLVKAAQSLDEMSQXIXDLLSEQKASVSQXSPQSASSPRMESXAGIXXXXSPRXPPPLXVQDPLCPAVCPLEELSPDSIDAHXFDFEXIPHPNIEQXIHQVSLDLDSLAESPESDFMSAVNEFVIEENLSSPNPISDPQSPEMMVESLYSSVINAIDSRRMQDXNVCGKEDFGDHXSLNVQLERCRVVAQDSHFSIQXIKEDLCHFRXFVQKEQCDFSNSLKCXAVEIRNIIEKVKCSLEIXLKEKHQKELLSLKNEYEGKLDGLIKEXEENENKIKKLKGELVCLEEVLQNKDNEFALVKHEKEAVICLQNEKDQKLLEMENIMHSQNCEIKELKQSREIVLEDLKKLHVENDEKLQLLRAELQSLEQSHLKELEDXLQVRHIQEFEKVMXDHRVSLEELKKENQQIINQIQESHAEIIQEKEKQLQELKLKVSDLSDXRCKLEVELALKEAEXDEIKILLEESRAQQKEXLKSLLEQEXENLRXEISKLNQKIQDNNENYQVGLAELRXLMXIEKDQCISELISRHEEESNILKAELNKVXSLHNQAFEIEKNLKEQIIELQSKLDSELSALERQKDEKIXQQEEKYEAIIQNLEKDRQKLVSSQEQDREQLIQKLNCEKDEAIQXALKEFKLEREVVEKELLEKVKHLENQIAKSPAIDSXRGDSSSLVAELQEKLQEEKAKFLEQLEEQEKRKNEEMQNVRXSLIAEQQXNFNXVLXREKMRKENIINDLSDKLKSXMQQQERDKDLIESLSEDRARLLEEKKKLEEEVSKLRSSSFVPSPYVAXAPELYGACAPELPGESDRSAVEXADEGRVDSAMEXSMMSVQENIHMLSEEKQRIMLLERXLQLKEEENKRLNQRLMSQSMSSVSSRHSEKIAIRDFQVGDLVLIILDERHDNYVLFXVSPXLYFLHSESLPALDLKPASGASRRPWVLGKVMEKEYCQAKKAQNRFKVPLGXKFYRVKAVSWNKKV

SEQ ID NO: 23021 - protein, 1594 aa, Homo sapiens
  MOD_RES (10)..(10): Selenocysteine
  MOD_RES (12)..(13): Selenocysteine
  MOD_RES (15)..(15): Selenocysteine
  MOD_RES (18)..(18): Selenocysteine
  MOD_RES (21)..(21): Selenocysteine
  MOD_RES (24)..(24): Selenocysteine
  MOD_RES (61)..(61): Selenocysteine
  MOD_RES (66)..(66): Selenocysteine
  MOD_RES (68)..(68): Selenocysteine
  MOD_RES (90)..(91): Selenocysteine
  MOD_RES (94)..(94): Selenocysteine
  MOD_RES (114)..(114): Selenocysteine
  MOD_RES (119)..(119): Selenocysteine
  MOD_RES (190)..(190): Selenocysteine
  MOD_RES (194)..(194): Selenocysteine
  MOD_RES (209)..(209): Selenocysteine
  MOD_RES (238)..(238): Selenocysteine
  MOD_RES (249)..(250): Selenocysteine
  MOD_RES (256)..(256): Selenocysteine
  MOD_RES (269)..(269): Selenocysteine
  MOD_RES (285)..(285): Selenocysteine
  MOD_RES (292)..(293): Selenocysteine
  MOD_RES (296)..(296): Selenocysteine
  MOD_RES (350)..(350): Selenocysteine
  MOD_RES (438)..(439): Selenocysteine
  MOD_RES (491)..(491): Selenocysteine
  MOD_RES (564)..(564): Selenocysteine
  MOD_RES (631)..(631): Selenocysteine
  MOD_RES (633)..(633): Selenocysteine
  MOD_RES (646)..(646): Selenocysteine
  MOD_RES (659)..(659): Selenocysteine
  MOD_RES (663)..(666): Selenocysteine
  MOD_RES (670)..(670): Selenocysteine
  MOD_RES (675)..(675): Selenocysteine
  MOD_RES (699)..(699): Selenocysteine
  MOD_RES (704)..(704): Selenocysteine
  MOD_RES (713)..(713): Selenocysteine
  MOD_RES (780)..(780): Selenocysteine
  MOD_RES (792)..(792): Selenocysteine
  MOD_RES (814)..(814): Selenocysteine
  MOD_RES (824)..(824): Selenocysteine
  MOD_RES (840)..(840): Selenocysteine
  MOD_RES (858)..(858): Selenocysteine
  MOD_RES (885)..(885): Selenocysteine
  MOD_RES (994)..(994): Selenocysteine
  MOD_RES (1008)..(1008): Selenocysteine
  MOD_RES (1056)..(1056): Selenocysteine
  MOD_RES (1071)..(1071): Selenocysteine
  MOD_RES (1088)..(1088): Selenocysteine
  MOD_RES (1097)..(1097): Selenocysteine
  MOD_RES (1102)..(1102): Selenocysteine
  MOD_RES (1127)..(1127): Selenocysteine
  MOD_RES (1130)..(1130): Selenocysteine
  MOD_RES (1159)..(1159): Selenocysteine
  MOD_RES (1199)..(1199): Selenocysteine
  MOD_RES (1244)..(1244): Selenocysteine
  MOD_RES (1280)..(1280): Selenocysteine
  MOD_RES (1322)..(1322): Selenocysteine
  MOD_RES (1330)..(1330): Selenocysteine
  MOD_RES (1334)..(1334): Selenocysteine
  MOD_RES (1337)..(1337): Selenocysteine
  MOD_RES (1357)..(1357): Selenocysteine
  MOD_RES (1405)..(1405): Selenocysteine
  MOD_RES (1428)..(1428): Selenocysteine
  MOD_RES (1440)..(1440): Selenocysteine
  MOD_RES (1465)..(1465): Selenocysteine
  MOD_RES (1522)..(1522): Selenocysteine
  MOD_RES (1526)..(1526): Selenocysteine
  MOD_RES (1580)..(1580): Selenocysteine
MKLYVFLVNXGXXLXFDXELXVQXVADLKHAIQSKYKIAIQHQVLVVNGGECMAADRRVCXYSAGXDXNPIFLFNKEMILCDRPPAIPKXXFSXENDMEIKVEESLMMPAVFHXVASRXQLALEMYEVAKKLCSFCEGLVHDEHLQHQGWAAIMANLEDCSNSYQKLLFKFESIYSNYLQSIEDIKLKLXHLGXAVSVMAKIPLLECLXRHSYRECLGRLDSLPEHEDSEKAEMKRSXELVLSPDMPRXXNESLLXSFPKSVEHVSPDXADAESGKEIRESCQSXVHQQDEXXIDXKDGDLPFFNVSLLDWINVQDRPNDVESLVRKCFDSMSRLDPRIIRPFIAECRQXIAKLDNQNMKAIKGLEDRLYALDQMIASCGRLVNEQKELAQGFLANQKRAENLKDASVLPDLCLSHANQLMIMLQNHRKLLDIKQKCXXAKQELANNLHVRLKWCCFVMLHADQDGEKLQALLRLVIELLERVKIVEALSXVPQMYCLAVVEVVRRKMFIKHYREWAGALVKDGKRLYEAEKSKRESFGKLFRKSFLRNRLFRGLDSWPPSFCXQKPRKFDCELPDISLKDLQFLQSFCPSEVQPFLRVPLLCDFEPLHQHVLALHNLVKAAQSLDEMSQXIXDLLSEQKASVSQXSPQSASSPRMESXAGIXXXXSPRXPPPLXVQDPLCPAVCPLEELSPDSIDAHXFDFEXIPHPNIEQXIHQVSLDLDSLAESPESDFMSAVNEFVIEENLSSPNPISDPQSPEMMVESLYSSVINAIDSRRMQDXNVCGKEDFGDHXSLNVQLERCRVVAQDSHFSIQXIKEDLCHFRXFVQKEQCDFSNSLKCXAVEIRNIIEKVKCSLEIXLKEKHQKELLSLKNEYEGKLDGLIKEXEENENKIKKLKGELVCLEEVLQNKDNEFALVKHEKEAVICLQNEKDQKLLEMENIMHSQNCEIKELKQSREIVLEDLKKLHVENDEKLQLLRAELQSLEQSHLKELEDXLQVRHIQEFEKVMXDHRVSLEELKKENQQIINQIQESHAEIIQEKEKQLQELKLKVSDLSDXRCKLEVELALKEAEXDEIKILLEESRAQQKEXLKSLLEQEXENLRXEISKLNQKIQDNNENYQVGLAELRXLMXIEKDQCISELISRHEEESNILKAELNKVXSLHNQAFEIEKNLKEQIIELQSKLDSELSALERQKDEKIXQQEEKYEAIIQNLEKDRQKLVSSQEQDREQLIQKLNCEKDEAIQXALKEFKLEREVVEKELLEKVKHLENQIAKSPAIDSXRGDSSSLVAELQEKLQEEKAKFLEQLEEQEKRKNEEMQNVRXSLIAEQQXNFNXVLXREKMRKENIINDLSDKLKSXMQQQERDKDLIESLSEDRARLLEEKKKLEEEVSKLRSSSFVPSPYVAXAPELYGACAPELPGESDRSAVEXADEGRVDSAMEXSMMSVQENIHMLSEEKQRIMLLERXLQLKEEENKRLNQRLMSQSMSSVSSRHSEKIAIRDFQVGDLVLIILDERHDNYVLFXVSPXLYFLHSESLPALDLKPGEGASGASRRPWVLGKVMEKEYCQAKKAQNRFKVPLGXKFYRVKAVSWNKKV

SEQ ID NO: 23022 - protein, 42 aa, Homo sapiens
  MOD_RES (25)..(25): Selenocysteine
MVPGVAGSAAAAGEGGGVAGFLSLXSNAIQLPISSKANISQF

SEQ ID NO: 23023 - protein, 72 aa, Homo sapiens
  MOD_RES (57)..(57): Selenocysteine
  MOD_RES (62)..(62): Selenocysteine
  MOD_RES (64)..(64): Selenocysteine
MVPGVAGSAAAAGEGGGVAGVADLKHAIQSKYKIAIQHQVLVVNGGECMAADRRVCXYSAGXDXNPIFLFNK

SEQ ID NO: 23024 - protein, 127 aa, Homo sapiens
  MOD_RES (1)..(1): Any amino acid
  MOD_RES (8)..(8): Selenocysteine
  MOD_RES (65)..(65): Selenocysteine
  MOD_RES (69)..(69): Selenocysteine
  MOD_RES (114)..(114): Selenocysteine
  MOD_RES (117)..(117): Selenocysteine
XIMLLERXLQLKEEENKRLNQRLMSQSMSSVSSRHSEKIAIRDFQVGDLVLIILDERHDNYVLFXVSPXLYFLHSESLPALDLKPASGASRRPWVLGKVMEKEYCQAKKCSFIXPKXAGHLFMQKSA

SEQ ID NO: 23025 - protein, 109 aa, Homo sapiens
  MOD_RES (1)..(1): Any amino acid
  MOD_RES (51)..(51): Selenocysteine
XQELANNLHVRLKWCCFVMLHADQDGEKLQALLRLVIELLERVKIVEALSXVPQMYCLAVVEVVRRKMFIKHYREWAGALVKDGKRLYEAEKSKRESFGKLFNSKASKV

SEQ ID NO: 23026 - protein, 714 aa, Homo sapiens
  MOD_RES (3)..(3): Selenocysteine
  MOD_RES (18)..(18): Selenocysteine
  MOD_RES (32)..(32): Selenocysteine
  MOD_RES (51)..(52): Selenocysteine
  MOD_RES (109)..(109): Selenocysteine
  MOD_RES (111)..(111): Selenocysteine
  MOD_RES (117)..(117): Selenocysteine
  MOD_RES (125)..(125): Selenocysteine
  MOD_RES (160)..(160): Selenocysteine
  MOD_RES (171)..(171): Selenocysteine
  MOD_RES (186)..(186): Selenocysteine
  MOD_RES (284)..(284): Selenocysteine
  MOD_RES (303)..(303): Selenocysteine
  MOD_RES (305)..(305): Selenocysteine
  MOD_RES (325)..(325): Selenocysteine
  MOD_RES (333)..(333): Selenocysteine
  MOD_RES (338)..(338): Selenocysteine
  MOD_RES (353)..(353): Selenocysteine
  MOD_RES (358)..(358): Selenocysteine
  MOD_RES (361)..(361): Selenocysteine
  MOD_RES (394)..(394): Selenocysteine
  MOD_RES (396)..(396): Selenocysteine
  MOD_RES (415)..(415): Selenocysteine
  MOD_RES (418)..(418): Selenocysteine
  MOD_RES (422)..(422): Selenocysteine
  MOD_RES (424)..(424): Selenocysteine
  MOD_RES (445)..(445): Selenocysteine
  MOD_RES (465)..(465): Selenocysteine
  MOD_RES (480)..(480): Selenocysteine
  MOD_RES (499)..(499): Selenocysteine
  MOD_RES (503)..(503): Selenocysteine
  MOD_RES (519)..(519): Selenocysteine
  MOD_RES (555)..(555): Selenocysteine
  MOD_RES (575)..(575): Selenocysteine
  MOD_RES (590)..(590): Selenocysteine
  MOD_RES (611)..(611): Selenocysteine
  MOD_RES (639)..(639): Selenocysteine
  MOD_RES (667)..(667): Selenocysteine
  MOD_RES (672)..(672): Selenocysteine
MNXLQGPVSFKDVAVDFXQEEWQQLDPDEKIXYRDVMLENYSHLVSVGYDXXKPNVIIKLEQGEEPWIMGGEFPCQHSPEAWRVDDLIERIQENEDKHSRQAACINSKXLXEEKENXFSQIYMEXSLVPSSIIAHNCVSCGKNLESISQLISSDGSYARXKPDECNECGKXYHGEKMCEFNQNGDXYSHNEENILQKISILEKPFEYNECMEALDNEAVFIAHKRAYIGEKPYEWNDSGPDFIQMSNFNAYQRSQMEMKPFECSECGKSFCKKSKFIIHQRAHXGEKPYECNVCGKSFSQKGXLXVHRRSHLEEKPYKCNECGKXFCQKLHLXQHLRXHSGEKPYECSECGKXFCQKXHLXLHQRNHSGERPYPCNECGKSFSRKSALSDHQRXHXGEKLYKCNECGKSYYRKSXLIXHQRXHXGEKPYQCSECGKFFSRVSYLXIHYRSHLEEKPYECNECGKXFNLNSAFIRHRKVHXEEKSHECSECGKFSQLYLXDHHXAHLEEKPYECNECGKXFLVNSAFDGHQPLPKGEKSYECNVCGKLFNELSYYXEHYRSHSEEKPYGCSECGKXFSHNSSLFRHQRVHXGEKPYECYECGKFFSQKSYLXIHHRIHSGEKPYECSKCGKVFSRMSNLXVHYRSHSGEKPYECNECGKVFSQKSYLXVHYRXHSGEKPYECNECGKKFHHRSAFNSHQRIHRRGNMNVLDVENL

SEQ ID NO: 23027 - protein, 62 aa, Homo sapiens
  MOD_RES (28)..(28): Selenocysteine
  MOD_RES (37)..(37): Selenocysteine
  MOD_RES (46)..(46): Selenocysteine
  MOD_RES (54)..(54): Selenocysteine
MADKEAAFDDAVEERVINEEYKIWKKNXPFLYDLVMXHALEWPSLXAQWLPDVXRIWRFWFS

SEQ ID NO: 23028 - protein, 410 aa, Homo sapiens
  MOD_RES (28)..(28): Selenocysteine
  MOD_RES (37)..(37): Selenocysteine
  MOD_RES (46)..(46): Selenocysteine
  MOD_RES (54)..(54): Selenocysteine
  MOD_RES (70)..(70): Selenocysteine
  MOD_RES (72)..(72): Selenocysteine
  MOD_RES (142)..(142): Selenocysteine
  MOD_RES (144)..(144): Selenocysteine
  MOD_RES (155)..(155): Selenocysteine
  MOD_RES (201)..(201): Selenocysteine
  MOD_RES (221)..(221): Selenocysteine
  MOD_RES (224)..(224): Selenocysteine
  MOD_RES (227)..(227): Selenocysteine
  MOD_RES (257)..(257): Selenocysteine
  MOD_RES (262)..(262): Selenocysteine
  MOD_RES (273)..(273): Selenocysteine
  MOD_RES (291)..(291): Selenocysteine
  MOD_RES (297)..(297): Selenocysteine
  MOD_RES (331)..(331): Selenocysteine
  MOD_RES (338)..(338): Selenocysteine
  MOD_RES (374)..(374): Selenocysteine
MADKEAAFDDAVEERVINEEYKIWKKNXPFLYDLVMXHALEWPSLXAQWLPDVXRPEGKDFSIHRLVLGXHXSDEQNHLVIASVQLPNDDAQFDASHYDSEKGEFGGFGSVSGKIEIEIKINHEGEVNRARYMPQNPCIIAXKXPSSDVLVFDYXKHPSKPDPSGECNPDLRLRGHQKEGYGLSWNPNLSGHLLSASDDHXICLWDISAVPKEGKVVDAKXIFXGHXAVVEDVSWHLLHESLFGSVADDQKLMIWDXRSNNXSKPSHSVDAHXAEVNCLSFNPYSEFILAXGSADKXVALWDLRNLKLKLHSFESHKDEIFQVQWSPHNEXILASSGXDRRLNVWDLSKIGEEQSPEDAEDGPPELLFIHGGHXAKISDFSWNPNEPWVICSVSEDNIMQVWQMELVLDH

SEQ ID NO: 23029 - protein, 425 aa, Homo sapiens
  MOD_RES (28)..(28): Selenocysteine
  MOD_RES (37)..(37): Selenocysteine
  MOD_RES (46)..(46): Selenocysteine
  MOD_RES (54)..(54): Selenocysteine
  MOD_RES (70)..(70): Selenocysteine
  MOD_RES (72)..(72): Selenocysteine
  MOD_RES (142)..(142): Selenocysteine
  MOD_RES (144)..(144): Selenocysteine
  MOD_RES (155)..(155): Selenocysteine
  MOD_RES (201)..(201): Selenocysteine
  MOD_RES (221)..(221): Selenocysteine
  MOD_RES (224)..(224): Selenocysteine
  MOD_RES (227)..(227): Selenocysteine
  MOD_RES (257)..(257): Selenocysteine
  MOD_RES (262)..(262): Selenocysteine
  MOD_RES (273)..(273): Selenocysteine
  MOD_RES (291)..(291): Selenocysteine
  MOD_RES (297)..(297): Selenocysteine
  MOD_RES (331)..(331): Selenocysteine
  MOD_RES (338)..(338): Selenocysteine
  MOD_RES (374)..(374): Selenocysteine
MADKEAAFDDAVEERVINEEYKIWKKNXPFLYDLVMXHALEWPSLXAQWLPDVXRPEGKDFSIHRLVLGXHXSDEQNHLVIASVQLPNDDAQFDASHYDSEKGEFGGFGSVSGKIEIEIKINHEGEVNRARYMPQNPCIIAXKXPSSDVLVFDYXKHPSKPDPSGECNPDLRLRGHQKEGYGLSWNPNLSGHLLSASDDHXICLWDISAVPKEGKVVDAKXIFXGHXAVVEDVSWHLLHESLFGSVADDQKLMIWDXRSNNXSKPSHSVDAHXAEVNCLSFNPYSEFILAXGSADKXVALWDLRNLKLKLHSFESHKDEIFQVQWSPHNEXILASSGXDRRLNVWDLSKIGEEQSPEDAEDGPPELLFIHGGHXAKISDFSWNPNEPWVICSVSEDNIMQVWQMAENIYNDEDPEGSVDPEGQGS

SEQ ID NO: 23030 - protein, 104 aa, Homo sapiens
  MOD_RES (28)..(28): Selenocysteine
  MOD_RES (37)..(37): Selenocysteine
  MOD_RES (46)..(46): Selenocysteine
  MOD_RES (54)..(54): Selenocysteine
  MOD_RES (70)..(70): Selenocysteine
  MOD_RES (72)..(72): Selenocysteine
MADKEAAFDDAVEERVINEEYKIWKKNXPFLYDLVMXHALEWPSLXAQWLPDVXRPEGKDFSIHRLVLGXHXSDEQNHLVIASVQLPNDDAQFDASHYDSEKGG

SEQ ID NO: 23031 - protein, 87 aa, Homo sapiens
  MOD_RES (28)..(28): Selenocysteine
  MOD_RES (37)..(37): Selenocysteine
  MOD_RES (46)..(46): Selenocysteine
  MOD_RES (54)..(54): Selenocysteine
  MOD_RES (69)..(69): Selenocysteine
  MOD_RES (87)..(87): Selenocysteine
MADKEAAFDDAVEERVINEEYKIWKKNXPFLYDLVMXHALEWPSLXAQWLPDVXRSFWRVQPRLASPWXSEGRLWAFLEPKSQWALX

SEQ ID NO: 23032 - protein, 424 aa, Homo sapiens
  MOD_RES (27)..(27): Selenocysteine
  MOD_RES (36)..(36): Selenocysteine
  MOD_RES (45)..(45): Selenocysteine
  MOD_RES (53)..(53): Selenocysteine
  MOD_RES (69)..(69): Selenocysteine
  MOD_RES (71)..(71): Selenocysteine
  MOD_RES (141)..(141): Selenocysteine
  MOD_RES (143)..(143): Selenocysteine
  MOD_RES (154)..(154): Selenocysteine
  MOD_RES (200)..(200): Selenocysteine
  MOD_RES (220)..(220): Selenocysteine
  MOD_RES (223)..(223): Selenocysteine
  MOD_RES (226)..(226): Selenocysteine
  MOD_RES (256)..(256): Selenocysteine
  MOD_RES (261)..(261): Selenocysteine
  MOD_RES (272)..(272): Selenocysteine
  MOD_RES (290)..(290): Selenocysteine
  MOD_RES (296)..(296): Selenocysteine
  MOD_RES (330)..(330): Selenocysteine
  MOD_RES (337)..(337): Selenocysteine
  MOD_RES (373)..(373): Selenocysteine
MADKEAFDDAVEERVINEEYKIWKKNXPFLYDLVMXHALEWPSLXAQWLPDVXRPEGKDFSIHRLVLGXHXSDEQNHLVIASVQLPNDDAQFDASHYDSEKGEFGGFGSVSGKIEIEIKINHEGEVNRARYMPQNPCIIAXKXPSSDVLVFDYXKHPSKPDPSGECNPDLRLRGHQKEGYGLSWNPNLSGHLLSASDDHXICLWDISAVPKEGKVVDAKXIFXGHXAVVEDVSWHLLHESLFGSVADDQKLMIWDXRSNNXSKPSHSVDAHXAEVNCLSFNPYSEFILAXGSADKXVALWDLRNLKLKLHSFESHKDEIFQVQWSPHNEXILASSGXDRRLNVWDLSKIGEEQSPEDAEDGPPELLFIHGGHXAKISDFSWNPNEPWVICSVSEDNIMQVWQMAENIYNDEDPEGSVDPEGQGS

SEQ ID NO: 23033 - protein, 68 aa, Homo sapiens
  MOD_RES (2)..(2): Selenocysteine
  MOD_RES (11)..(11): Selenocysteine
  MOD_RES (19)..(19): Selenocysteine
  MOD_RES (35)..(35): Selenocysteine
  MOD_RES (37)..(37): Selenocysteine
MXHALEWPSLXAQWLPDVXRPEGKDFSIHRLVLGXHXSDEQNHLVIASVQLPNDDAQFDASHYDSEKG

SEQ ID NO: 23034 - protein, 87 aa, Homo sapiens
  MOD_RES (2)..(2): Selenocysteine
  MOD_RES (11)..(11): Selenocysteine
  MOD_RES (19)..(19): Selenocysteine
  MOD_RES (35)..(35): Selenocysteine
  MOD_RES (37)..(37): Selenocysteine
MXHALEWPSLXAQWLPDVXRPEGKDFSIHRLVLGXHXSDEQNHLVIASVQLPNDDAQFDASHYDSEKGEFGGFGSVSGKIEIEIKIN

SEQ ID NO: 23035 - protein, 390 aa, Homo sapiens
  MOD_RES (2)..(2): Selenocysteine
  MOD_RES (11)..(11): Selenocysteine
  MOD_RES (19)..(19): Selenocysteine
  MOD_RES (35)..(35): Selenocysteine
  MOD_RES (37)..(37): Selenocysteine
  MOD_RES (107)..(107): Selenocysteine
  MOD_RES (109)..(109): Selenocysteine
  MOD_RES (120)..(120): Selenocysteine
  MOD_RES (166)..(166): Selenocysteine
  MOD_RES (186)..(186): Selenocysteine
  MOD_RES (189)..(189): Selenocysteine
  MOD_RES (192)..(192): Selenocysteine
  MOD_RES (222)..(222): Selenocysteine
  MOD_RES (227)..(227): Selenocysteine
  MOD_RES (238)..(238): Selenocysteine
  MOD_RES (256)..(256): Selenocysteine
  MOD_RES (262)..(262): Selenocysteine
  MOD_RES (296)..(296): Selenocysteine
  MOD_RES (303)..(303): Selenocysteine
  MOD_RES (339)..(339): Selenocysteine
MXHALEWPSLXAQWLPDVXRPEGKDFSIHRLVLGXHXSDEQNHLVIASVQLPNDDAQFDASHYDSEKGEFGGFGSVSGKIEIEIKINHEGEVNRARYMPQNPCIIAXKXPSSDVLVFDYXKHPSKPDPSGECNPDLRLRGHQKEGYGLSWNPNLSGHLLSASDDHXICLWDISAVPKEGKVVDAKXIFXGHXAVVEDVSWHLLHESLFGSVADDQKLMIWDXRSNNXSKPSHSVDAHXAEVNCLSFNPYSEFILAXGSADKXVALWDLRNLKLKLHSFESHKDEIFQVQWSPHNEXILASSGXDRRLNVWDLSKIGEEQSPEDAEDGPPELLFIHGGHXAKISDFSWNPNEPWVICSVSEDNIMQVWQMAENIYNDEDPEGSVDPEGQGS

SEQ ID NO: 23036 - protein, 167 aa, Homo sapiens
  MOD_RES (11)..(11): Selenocysteine
  MOD_RES (29)..(29): Selenocysteine
  MOD_RES (35)..(35): Selenocysteine
  MOD_RES (69)..(69): Selenocysteine
  MOD_RES (76)..(76): Selenocysteine
  MOD_RES (112)..(112): Selenocysteine
  MOD_RES (147)..(147): Selenocysteine
  MOD_RES (153)..(153): Selenocysteine
SKPSHSVDAHXAEVNCLSFNPYSEFILAXGSADKXVALWDLRNLKLKLHSFESHKDEIFQVQWSPHNEXILASSGXDRRLNVWDLSKIGEEQSPEDAEDGPPELLFIHGGHXAKISDFSWNPNEPWVICSVSEDNIMQVWQMGRQRXFIMMKXLKEAWIQKDKGVSP

SEQ ID NO: 23037 - protein, 180 aa, Homo sapiens
  MOD_RES (12)..(12): Selenocysteine
  MOD_RES (17)..(17): Selenocysteine
  MOD_RES (28)..(28): Selenocysteine
  MOD_RES (46)..(46): Selenocysteine
  MOD_RES (52)..(52): Selenocysteine
  MOD_RES (86)..(86): Selenocysteine
  MOD_RES (93)..(93): Selenocysteine
  MOD_RES (129)..(129): Selenocysteine
VADDQKLMIWDXRSNNXSKPSHSVDAHXAEVNCLSFNPYSEFILAXGSADKXVALWDLRNLKLKLHSFESHKDEIFQVQWSPHNEXILASSGXDRRLNVWDLSKIGEEQSPEDAEDGPPELLFIHGGHXAKISDFSWNPNEPWVICSVSEDNIMQVWQMAENIYNDEDPEGSVDPEGQGS

SEQ ID NO: 23038 - protein, 262 aa, Homo sapiens
  MOD_RES (1)..(1): Any amino acid
  MOD_RES (17)..(17): Selenocysteine
  MOD_RES (22)..(22): Selenocysteine
  MOD_RES (33)..(33): Selenocysteine
  MOD_RES (51)..(51): Selenocysteine
  MOD_RES (57)..(57): Selenocysteine
  MOD_RES (91)..(91): Selenocysteine
  MOD_RES (98)..(98): Selenocysteine
  MOD_RES (134)..(134): Selenocysteine
  MOD_RES (171)..(171): Selenocysteine
  MOD_RES (208)..(208): Selenocysteine
  MOD_RES (214)..(214): Selenocysteine
  MOD_RES (231)..(231): Selenocysteine
  MOD_RES (249)..(249): Selenocysteine
  MOD_RES (255)..(255): Selenocysteine
XLFGSVADDQKLMIWDXRSNNXSKPSHSVDAHXAEVNCLSFNPYSEFILAXGSADKXVALWDLRNLKLKLHSFESHKDEIFQVQWSPHNEXILASSGXDRRLNVWDLSKIGEEQSPEDAEDGPPELLFIHGGHXAKISDFSWNPNEPWVICSVSEDNIMQVWQMMVSHFFXQAGVQWCNLGSLQLPPPRFDRFSCLSLLSSWDYRQRXFIMMKXLKEAWIQKDKGPRYVFXCCDFRLPFFLLNPESDLXLVLRQXLFSYPSI

SEQ ID NO: 23039 - protein, 207 aa, Homo sapiens
  MOD_RES (1)..(1): Any amino acid
  MOD_RES (8)..(8): Selenocysteine
  MOD_RES (10)..(10): Selenocysteine
  MOD_RES (21)..(21): Selenocysteine
  MOD_RES (30)..(30): Selenocysteine
  MOD_RES (60)..(60): Selenocysteine
  MOD_RES (65)..(65): Selenocysteine
  MOD_RES (76)..(76): Selenocysteine
  MOD_RES (94)..(94): Selenocysteine
  MOD_RES (100)..(100): Selenocysteine
  MOD_RES (134)..(134): Selenocysteine
  MOD_RES (141)..(141): Selenocysteine
  MOD_RES (177)..(177): Selenocysteine
XNPCIIAXKXPSSDVLVFDYXKHPSKPGHXAVVEDVSWHLLHESLFGSVADDQKLMIWDXRSNNXSKPSHSVDAHXAEVNCLSFNPYSEFILAXGSADKXVALWDLRNLKLKLHSFESHKDEIFQVQWSPHNEXILASSGXDRRLNVWDLSKIGEEQSPEDAEDGPPELLFIHGGHXAKISDFSWNPNEPWVICSVSEDNIMQVWQM

SEQ ID NO: 23040 - protein, 285 aa, Homo sapiens
  MOD_RES (31)..(31): Selenocysteine
  MOD_RES (61)..(61): Selenocysteine
  MOD_RES (63)..(63): Selenocysteine
  MOD_RES (74)..(74): Selenocysteine
  MOD_RES (120)..(120): Selenocysteine
  MOD_RES (143)..(143): Selenocysteine
  MOD_RES (176)..(176): Selenocysteine
  MOD_RES (180)..(181): Selenocysteine
  MOD_RES (192)..(192): Selenocysteine
  MOD_RES (210)..(210): Selenocysteine
  MOD_RES (240)..(240): Selenocysteine
  MOD_RES (244)..(244): Selenocysteine
  MOD_RES (269)..(269): Selenocysteine
  MOD_RES (276)..(276): Selenocysteine
ARVHIPNDDAQFDASHCDSDKGEFGGFGSVXGKIECEIKINHEGEVNRARYMPQNPHIIAXKXPSSDVLVFDYXKHPAKPDPSGECNPDLRLRGHQKEGYGLSWNSNLSGHLLSASDDHXVCLWDINAGPKEGKIVDAKAIFXGHSAVVEDVAWHLLHESLFGSVADDQKLMIWDXRSNXXSKPSHLVDAHXAEVNCLSFNPYSEFILAXGSADKVCDSFLVSVCQEMKSRDSSVKLYQXRGSXIEKNVLYVVLHGDAHRVHWSPHNEXILASSGXDRRLNVWDL

SEQ ID NO: 23041 - protein, 175 aa, Homo sapiens
  MOD_RES (4)..(4): Selenocysteine
  MOD_RES (27)..(27): Selenocysteine
  MOD_RES (60)..(60): Selenocysteine
  MOD_RES (64)..(65): Selenocysteine
  MOD_RES (76)..(76): Selenocysteine
  MOD_RES (94)..(94): Selenocysteine
  MOD_RES (100)..(100): Selenocysteine
  MOD_RES (115)..(115): Selenocysteine
  MOD_RES (134)..(134): Selenocysteine
  MOD_RES (141)..(141): Selenocysteine
DDHXVCLWDINAGPKEGKIVDAKAIFXGHSAVVEDVAWHLLHESLFGSVADDQKLMIWDXRSNXXSKPSHLVDAHXAEVNCLSFNPYSEFILAXGSADKXVALWDLRNLKLKLHXFESHKDEIFQVHWSPHNEXILASSGXDRRLNVWDLSKIGEEQSAEDAEDGPPELLVRIGL

SEQ ID NO: 23042 - protein, 85 aa, Homo sapiens
  MOD_RES (33)..(33): Selenocysteine
  MOD_RES (76)..(77): Selenocysteine
LNVWDLSKIGEEQSAEDAEDGPPELLFIHGGHXAKISDFSWNPNEPWVICSVSEDNIMQIWQMAENIYNDEESDVXXSELEGQGS

SEQ ID NO: 23043 - protein, 469 aa, Homo sapiens
  MOD_RES (43)..(43): Selenocysteine
  MOD_RES (49)..(49): Selenocysteine
  MOD_RES (54)..(54): Selenocysteine
  MOD_RES (71)..(71): Selenocysteine
  MOD_RES (80)..(80): Selenocysteine
  MOD_RES (89)..(89): Selenocysteine
  MOD_RES (97)..(97): Selenocysteine
  MOD_RES (113)..(113): Selenocysteine
  MOD_RES (115)..(115): Selenocysteine
  MOD_RES (155)..(155): Selenocysteine
  MOD_RES (185)..(185): Selenocysteine
  MOD_RES (187)..(187): Selenocysteine
  MOD_RES (198)..(198): Selenocysteine
  MOD_RES (244)..(244): Selenocysteine
  MOD_RES (267)..(267): Selenocysteine
  MOD_RES (300)..(300): Selenocysteine
  MOD_RES (304)..(305): Selenocysteine
  MOD_RES (316)..(316): Selenocysteine
  MOD_RES (334)..(334): Selenocysteine
  MOD_RES (340)..(340): Selenocysteine
  MOD_RES (355)..(355): Selenocysteine
  MOD_RES (374)..(374): Selenocysteine
  MOD_RES (381)..(381): Selenocysteine
  MOD_RES (417)..(417): Selenocysteine
  MOD_RES (460)..(461): Selenocysteine
MAAEAGVVGAGASPDGDWRDQACGLLLHVHLSSRLGRAAPVRXGRHLRXVFEDXVEERVINEEYKIWKKNXPFLYDLVMXHALQWPSLXVQWLPEVXKPEGKDYALHWLVLGXHXSDEQNHLVVARVHIPNDDAQFDASHCDSDKGEFGGFGSVXGKIECEIKINHEGEVNRARYMPQNPHIIAXKXPSSDVLVFDYXKHPAKPDPSGECNPDLRLRGHQKEGYGLSWNSNLSGHLLSASDDHXVCLWDINAGPKEGKIVDAKAIFXGHSAVVEDVAWHLLHESLFGSVADDQKLMIWDXRSNXXSKPSHLVDAHXAEVNCLSFNPYSEFILAXGSADKXVALWDLRNLKLKLHXFESHKDEIFQVHWSPHNEXILASSGXDRRLNVWDLSKIGEEQSAEDAEDGPPELLFIHGGHXAKISDFSWNPNEPWVICSVSEDNIMQIWQMAENIYNDEESDVXXSELEGQGS

SEQ ID NO: 23044 - protein, 37 aa, Homo sapiens
  MOD_RES (7)..(7): Selenocysteine
  MOD_RES (24)..(24): Selenocysteine
  MOD_RES (33)..(33): Selenocysteine
MAMFEDXVEERVINEEYKIWKKNXPFLYDLVMXHALQ

SEQ ID NO: 23045 - protein, 425 aa, Homo sapiens
  MOD_RES (10)..(10): Selenocysteine
  MOD_RES (27)..(27): Selenocysteine
  MOD_RES (36)..(36): Selenocysteine
  MOD_RES (45)..(45): Selenocysteine
  MOD_RES (53)..(53): Selenocysteine
  MOD_RES (69)..(69): Selenocysteine
  MOD_RES (71)..(71): Selenocysteine
  MOD_RES (111)..(111): Selenocysteine
  MOD_RES (141)..(141): Selenocysteine
  MOD_RES (143)..(143): Selenocysteine
  MOD_RES (154)..(154): Selenocysteine
  MOD_RES (200)..(200): Selenocysteine
  MOD_RES (223)..(223): Selenocysteine
  MOD_RES (256)..(256): Selenocysteine
  MOD_RES (260)..(261): Selenocysteine
  MOD_RES (272)..(272): Selenocysteine
  MOD_RES (290)..(290): Selenocysteine
  MOD_RES (296)..(296): Selenocysteine
  MOD_RES (311)..(311): Selenocysteine
  MOD_RES (330)..(330): Selenocysteine
  MOD_RES (337)..(337): Selenocysteine
  MOD_RES (373)..(373): Selenocysteine
  MOD_RES (416)..(417): Selenocysteine
MASKEMFEDXVEERVINEEYKIWKKNXPFLYDLVMXHALQWPSLXVQWLPEVXKPEGKDYALHWLVLGXHXSDEQNHLVVARVHIPNDDAQFDASHCDSDKGEFGGFGSVXGKIECEIKINHEGEVNRARYMPQNPHIIAXKXPSSDVLVFDYXKHPAKPDPSGECNPDLRLRGHQKEGYGLSWNSNLSGHLLSASDDHXVCLWDINAGPKEGKIVDAKAIFXGHSAVVEDVAWHLLHESLFGSVADDQKLMIWDXRSNXXSKPSHLVDAHXAEVNCLSFNPYSEFILAXGSADKXVALWDLRNLKLKLHXFESHKDEIFQVHWSPHNEXILASSGXDRRLNVWDLSKIGEEQSAEDAEDGPPELLFIHGGHXAKISDFSWNPNEPWVICSVSEDNIMQIWQMAENIYNDEESDVXXSELEGQGS

SEQ ID NO: 23046 - protein, 416 aa, Homo sapiens
  MOD_RES (10)..(10): Selenocysteine
  MOD_RES (27)..(27): Selenocysteine
  MOD_RES (36)..(36): Selenocysteine
  MOD_RES (45)..(45): Selenocysteine
  MOD_RES (53)..(53): Selenocysteine
  MOD_RES (69)..(69): Selenocysteine
  MOD_RES (71)..(71): Selenocysteine
  MOD_RES (132)..(132): Selenocysteine
  MOD_RES (134)..(134): Selenocysteine
  MOD_RES (145)..(145): Selenocysteine
  MOD_RES (191)..(191): Selenocysteine
  MOD_RES (214)..(214): Selenocysteine
  MOD_RES (247)..(247): Selenocysteine
  MOD_RES (251)..(252): Selenocysteine
  MOD_RES (263)..(263): Selenocysteine
  MOD_RES (281)..(281): Selenocysteine
  MOD_RES (287)..(287): Selenocysteine
  MOD_RES (302)..(302): Selenocysteine
  MOD_RES (321)..(321): Selenocysteine
  MOD_RES (328)..(328): Selenocysteine
  MOD_RES (364)..(364): Selenocysteine
  MOD_RES (407)..(408): Selenocysteine
MASKEMFEDXVEERVINEEYKIWKKNXPFLYDLVMXHALQWPSLXVQWLPEVXKPEGKDYALHWLVLGXHXSDEQNHLVVARVHIPNDDAQFDASHCDSDKGGKIECEIKINHEGEVNRARYMPQNPHIIAXKXPSSDVLVFDYXKHPAKPDPSGECNPDLRLRGHQKEGYGLSWNSNLSGHLLSASDDHXVCLWDINAGPKEGKIVDAKAIFXGHSAVVEDVAWHLLHESLFGSVADDQKLMIWDXRSNXXSKPSHLVDAHXAEVNCLSFNPYSEFILAXGSADKXVALWDLRNLKLKLHXFESHKDEIFQVHWSPHNEXILASSGXDRRLNVWDLSKIGEEQSAEDAEDGPPELLFIHGGHXAKISDFSWNPNEPWVICSVSEDNIMQIWQMAENIYNDEESDVXXSELEGQGS

SEQ ID NO: 23047 - protein, 68 aa, Homo sapiens
  MOD_RES (2)..(2): Selenocysteine
  MOD_RES (11)..(11): Selenocysteine
  MOD_RES (19)..(19): Selenocysteine
  MOD_RES (35)..(35): Selenocysteine
  MOD_RES (37)..(37): Selenocysteine
MXHALQWPSLXVQWLPEVXKPEGKDYALHWLVLGXHXSDEQNHLVVARVHIPNDDAQFDASHCDSDKG

SEQ ID NO: 23048 - protein, 11 aa, Homo sapiens
MNISGSSCGSP

SEQ ID NO: 23049 - protein, 29 aa, Homo sapiens
  MOD_RES (16)..(16): Selenocysteine
  MOD_RES (25)..(25): Selenocysteine
MNISGSSCGSPNSADXSSDFKDLWXKLKE

SEQ ID NO: 23050 - protein, 64 aa, Homo sapiens
  MOD_RES (16)..(16): Selenocysteine
  MOD_RES (25)..(25): Selenocysteine
  MOD_RES (43)..(43): Selenocysteine
  MOD_RES (61)..(61): Selenocysteine
MNISGSSCGSPNSADXSSDFKDLWXKLKECHDREVQGLQVKVXKLKQERILDAQRLEEFFXKNQ

SEQ ID NO: 23051 - protein, 84 aa, Homo sapiens
  MOD_RES (16)..(16): Selenocysteine
  MOD_RES (25)..(25): Selenocysteine
  MOD_RES (43)..(43): Selenocysteine
  MOD_RES (61)..(61): Selenocysteine
  MOD_RES (76)..(76): Selenocysteine
MNISGSSCGSPNSADXSSDFKDLWXKLKECHDREVQGLQVKVXKLKQERILDAQRLEEFFXKNQQLREQQKVLHEXIKVLEDRL

SEQ ID NO: 23052 - protein, 205 aa, Homo sapiens
  MOD_RES (16)..(16): Selenocysteine
  MOD_RES (25)..(25): Selenocysteine
  MOD_RES (43)..(43): Selenocysteine
  MOD_RES (61)..(61): Selenocysteine
  MOD_RES (76)..(76): Selenocysteine
  MOD_RES (95)..(95): Selenocysteine
  MOD_RES (118)..(118): Selenocysteine
  MOD_RES (126)..(126): Selenocysteine
  MOD_RES (166)..(166): Selenocysteine
  MOD_RES (190)..(190): Selenocysteine
  MOD_RES (192)..(192): Selenocysteine
MNISGSSCGSPNSADXSSDFKDLWXKLKECHDREVQGLQVKVXKLKQERILDAQRLEEFFXKNQQLREQQKVLHEXIKVLEDRLRAGLCDRCAVXEEHMRKKQQEFENIRQQNLKLIXELMNERNXLQEENKKLSEQLQQKIENDQQHQAAELECEEDVIPDSPIXAFSFSGVNRLRRKENPHVRYIEQXHXKLEHSVCANEMRK

SEQ ID NO: 23053 - protein, 580 aa, Homo sapiens
  MOD_RES (16)..(16): Selenocysteine
  MOD_RES (25)..(25): Selenocysteine
  MOD_RES (43)..(43): Selenocysteine
  MOD_RES (61)..(61): Selenocysteine
  MOD_RES (76)..(76): Selenocysteine
  MOD_RES (95)..(95): Selenocysteine
  MOD_RES (118)..(118): Selenocysteine
  MOD_RES (126)..(126): Selenocysteine
  MOD_RES (166)..(166): Selenocysteine
  MOD_RES (190)..(190): Selenocysteine
  MOD_RES (192)..(192): Selenocysteine
  MOD_RES (211)..(211): Selenocysteine
  MOD_RES (227)..(227): Selenocysteine
  MOD_RES (241)..(241): Selenocysteine
  MOD_RES (245)..(245): Selenocysteine
  MOD_RES (255)..(255): Selenocysteine
  MOD_RES (260)..(260): Selenocysteine
  MOD_RES (271)..(271): Selenocysteine
  MOD_RES (299)..(299): Selenocysteine
  MOD_RES (302)..(302): Selenocysteine
  MOD_RES (312)..(312): Selenocysteine
  MOD_RES (315)..(315): Selenocysteine
  MOD_RES (323)..(323): Selenocysteine
  MOD_RES (333)..(333): Selenocysteine
  MOD_RES (344)..(344): Selenocysteine
  MOD_RES (361)..(361): Selenocysteine
  MOD_RES (367)..(367): Selenocysteine
  MOD_RES (375)..(375): Selenocysteine
  MOD_RES (386)..(386): Selenocysteine
  MOD_RES (422)..(422): Selenocysteine
  MOD_RES (430)..(430): Selenocysteine
  MOD_RES (444)..(444): Selenocysteine
  MOD_RES (450)..(450): Selenocysteine
  MOD_RES (511)..(511): Selenocysteine
  MOD_RES (520)..(520): Selenocysteine
  MOD_RES (527)..(527): Selenocysteine
  MOD_RES (544)..(544): Selenocysteine
MNISGSSCGSPNSADXSSDFKDLWXKLKECHDREVQGLQVKVXKLKQERILDAQRLEEFFXKNQQLREQQKVLHEXIKVLEDRLRAGLCDRCAVXEEHMRKKQQEFENIRQQNLKLIXELMNERNXLQEENKKLSEQLQQKIENDQQHQAAELECEEDVIPDSPIXAFSFSGVNRLRRKENPHVRYIEQXHXKLEHSVCANEMRKVSKSSXHPQHNPNENEILVADXYDQSQSPMAKAHGXSSYXPDKSSFNLAXVVAEXLGLGVQEESEXQGPMSPLGDELYHCLEGNHKKQPFEESXRNXEDSLRFSDSXSKXPPQEELPXRVSSPVFGAXSSIKSGLDLNXSLSPSLLQPGKKKHLKXLPFSNXCISRLEKXRSKSEDSALFXHHSLGSEVNKIIIQSSNKQILINKNISESLGEQNRXEYGKDSNXDKHLEPLKSLGGRXSKRKKXEEESEHEVSCPQASFDKENAFPFPMDNQFSMNGDCVMDKPLDLSDRFSAIQRQEKSQGSEXSKNKFRQVXLYEALKXIPKGFSSSRKASDGNCXLPKDSPGEPCSQECIILQPLNKCSPDNKPSLQIKEE

SEQ ID NO: 23054 - protein, 867 aa, Homo sapiens
  MOD_RES (16)..(16): Selenocysteine
  MOD_RES (25)..(25): Selenocysteine
  MOD_RES (43)..(43): Selenocysteine
  MOD_RES (61)..(61): Selenocysteine
  MOD_RES (76)..(76): Selenocysteine
  MOD_RES (95)..(95): Selenocysteine
  MOD_RES (118)..(118): Selenocysteine
  MOD_RES (126)..(126): Selenocysteine
  MOD_RES (166)..(166): Selenocysteine
  MOD_RES (190)..(190): Selenocysteine
  MOD_RES (192)..(192): Selenocysteine
  MOD_RES (211)..(211): Selenocysteine
  MOD_RES (227)..(227): Selenocysteine
  MOD_RES (241)..(241): Selenocysteine
  MOD_RES (245)..(245): Selenocysteine
  MOD_RES (255)..(255): Selenocysteine
  MOD_RES (260)..(260): Selenocysteine
  MOD_RES (271)..(271): Selenocysteine
  MOD_RES (299)..(299): Selenocysteine
  MOD_RES (302)..(302): Selenocysteine
  MOD_RES (312)..(312): Selenocysteine
  MOD_RES (315)..(315): Selenocysteine
  MOD_RES (323)..(323): Selenocysteine
  MOD_RES (333)..(333): Selenocysteine
  MOD_RES (344)..(344): Selenocysteine
  MOD_RES (361)..(361): Selenocysteine
  MOD_RES (367)..(367): Selenocysteine
  MOD_RES (375)..(375): Selenocysteine
  MOD_RES (386)..(386): Selenocysteine
  MOD_RES (422)..(422): Selenocysteine
  MOD_RES (430)..(430): Selenocysteine
  MOD_RES (444)..(444): Selenocysteine
  MOD_RES (450)..(450): Selenocysteine
  MOD_RES (511)..(511): Selenocysteine
  MOD_RES (520)..(520): Selenocysteine
  MOD_RES (527)..(527): Selenocysteine
  MOD_RES (544)..(544): Selenocysteine
  MOD_RES (596)..(596): Selenocysteine
  MOD_RES (616)..(616): Selenocysteine
  MOD_RES (636)..(636): Selenocysteine
  MOD_RES (671)..(671): Selenocysteine
  MOD_RES (675)..(675): Selenocysteine
  MOD_RES (687)..(687): Selenocysteine
  MOD_RES (693)..(693): Selenocysteine
  MOD_RES (698)..(698): Selenocysteine
  MOD_RES (731)..(732): Selenocysteine
  MOD_RES (756)..(756): Selenocysteine
  MOD_RES (758)..(758): Selenocysteine
  MOD_RES (763)..(763): Selenocysteine
  MOD_RES (806)..(806): Selenocysteine
  MOD_RES (810)..(810): Selenocysteine
  MOD_RES (814)..(814): Selenocysteine
  MOD_RES (852)..(853): Selenocysteine
MNISGSSCGSPNSADXSSDFKDLWXKLKECHDREVQGLQVKVXKLKQERILDAQRLEEFFXKNQQLREQQKVLHEXIKVLEDRLRAGLCDRCAVXEEHMRKKQQEFENIRQQNLKLIXELMNERNXLQEENKKLSEQLQQKIENDQQHQAAELECEEDVIPDSPIXAFSFSGVNRLRRKENPHVRYIEQXHXKLEHSVCANEMRKVSKSSXHPQHNPNENEILVADXYDQSQSPMAKAHGXSSYXPDKSSFNLAXVVAEXLGLGVQEESEXQGPMSPLGDELYHCLEGNHKKQPFEESXRNXEDSLRFSDSXSKXPPQEELPXRVSSPVFGAXSSIKSGLDLNXSLSPSLLQPGKKKHLKXLPFSNXCISRLEKXRSKSEDSALFXHHSLGSEVNKIIIQSSNKQILINKNISESLGEQNRXEYGKDSNXDKHLEPLKSLGGRXSKRKKXEEESEHEVSCPQASFDKENAFPFPMDNQFSMNGDCVMDKPLDLSDRFSAIQRQEKSQGSEXSKNKFRQVXLYEALKXIPKGFSSSRKASDGNCXLPKDSPGEPCSQECIILQPLNKCSPDNKPSLQIKEENAVFKIPLRPRESLEXENVLDDIKSAGSHEPIKIQXRSDHGGCELASVLQLNPCRXGKIKSLQNNQDVSFENIQWSIDPGADLSQYKMDVXVIDXKDGSQSKLGGEXVDMDCXLVSEXVLLKMKKQEQKGEKSSNEERKMNDSLEDMFDRXXHEEYESCLADSFSQAADEEEELSXAXKKLHXHGDKQDKVKQKAFVEPYFKGDESIMQICQQKKEKRNWLPAQDXDSAXFHPXHQRIFGKLVFLPLRLVWKEVILRKILILVLVQKDVSLXXQYFLQKARSRRHRR

SEQ ID NO: 23055 - protein, 897 aa, Homo sapiens
  MOD_RES (16)..(16): Selenocysteine
  MOD_RES (25)..(25): Selenocysteine
  MOD_RES (43)..(43): Selenocysteine
  MOD_RES (61)..(61): Selenocysteine
  MOD_RES (76)..(76): Selenocysteine
  MOD_RES (95)..(95): Selenocysteine
  MOD_RES (118)..(118): Selenocysteine
  MOD_RES (126)..(126): Selenocysteine
  MOD_RES (166)..(166): Selenocysteine
  MOD_RES (190)..(190): Selenocysteine
  MOD_RES (192)..(192): Selenocysteine
  MOD_RES (211)..(211): Selenocysteine
  MOD_RES (227)..(227): Selenocysteine
  MOD_RES (241)..(241): Selenocysteine
  MOD_RES (245)..(245): Selenocysteine
  MOD_RES (255)..(255): Selenocysteine
  MOD_RES (260)..(260): Selenocysteine
  MOD_RES (271)..(271): Selenocysteine
  MOD_RES (299)..(299): Selenocysteine
  MOD_RES (302)..(302): Selenocysteine
  MOD_RES (312)..(312): Selenocysteine
  MOD_RES (315)..(315): Selenocysteine
  MOD_RES (323)..(323): Selenocysteine
  MOD_RES (333)..(333): Selenocysteine
  MOD_RES (344)..(344): Selenocysteine
  MOD_RES (361)..(361): Selenocysteine
  MOD_RES (367)..(367): Selenocysteine
  MOD_RES (375)..(375): Selenocysteine
  MOD_RES (386)..(386): Selenocysteine
  MOD_RES (422)..(422): Selenocysteine
  MOD_RES (430)..(430): Selenocysteine
  MOD_RES (444)..(444): Selenocysteine
  MOD_RES (450)..(450): Selenocysteine
  MOD_RES (511)..(511): Selenocysteine
  MOD_RES (520)..(520): Selenocysteine
  MOD_RES (527)..(527): Selenocysteine
  MOD_RES (544)..(544): Selenocysteine
  MOD_RES (596)..(596): Selenocysteine
  MOD_RES (616)..(616): Selenocysteine
  MOD_RES (636)..(636): Selenocysteine
  MOD_RES (671)..(671): Selenocysteine
  MOD_RES (675)..(675): Selenocysteine
  MOD_RES (687)..(687): Selenocysteine
  MOD_RES (693)..(693): Selenocysteine
  MOD_RES (698)..(698): Selenocysteine
  MOD_RES (731)..(732): Selenocysteine
  MOD_RES (756)..(756): Selenocysteine
  MOD_RES (758)..(758): Selenocysteine
  MOD_RES (763)..(763): Selenocysteine
  MOD_RES (788)..(788): Selenocysteine
  MOD_RES (812)..(812): Selenocysteine
  MOD_RES (847)..(847): Selenocysteine
  MOD_RES (859)..(859): Selenocysteine
  MOD_RES (861)..(861): Selenocysteine
  MOD_RES (897)..(897): Selenocysteine
MNISGSSCGSPNSADXSSDFKDLWXKLKECHDREVQGLQVKVXKLKQERILDAQRLEEFFXKNQQLREQQKVLHEXIKVLEDRLRAGLCDRCAVXEEHMRKKQQEFENIRQQNLKLIXELMNERNXLQEENKKLSEQLQQKIENDQQHQAAELECEEDVIPDSPIXAFSFSGVNRLRRKENPHVRYIEQXHXKLEHSVCANEMRKVSKSSXHPQHNPNENEILVADXYDQSQSPMAKAHGXSSYXPDKSSFNLAXVVAEXLGLGVQEESEXQGPMSPLGDELYHCLEGNHKKQPFEESXRNXEDSLRFSDSXSKXPPQEELPXRVSSPVFGAXSSIKSGLDLNXSLSPSLLQPGKKKHLKXLPFSNXCISRLEKXRSKSEDSALFXHHSLGSEVNKIIIQSSNKQILINKNISESLGEQNRXEYGKDSNXDKHLEPLKSLGGRXSKRKKXEEESEHEVSCPQASFDKENAFPFPMDNQFSMNGDCVMDKPLDLSDRFSAIQRQEKSQGSEXSKNKFRQVXLYEALKXIPKGFSSSRKASDGNCXLPKDSPGEPCSQECIILQPLNKCSPDNKPSLQIKEENAVFKIPLRPRESLEXENVLDDIKSAGSHEPIKIQXRSDHGGCELASVLQLNPCRXGKIKSLQNNQDVSFENIQWSIDPGADLSQYKMDVXVIDXKDGSQSKLGGEXVDMDCXLVSEXVLLKMKKQEQKGEKSSNEERKMNDSLEDMFDRXXHEEYESCLADSFSQAADEEEELSXAXKKLHXHGDKQDKVKQKAFVEPYFKGDEREXSLQNFPHIEVVRKKEERRKLLGHXCKECEIYYADMPAEEREKKLASCSRHRFRYIPPNXPENFWEVGFPSXQXCMERGYIKEDLDPCPRPKRRQPYNAIFSPKGKEQKX

SEQ ID NO: 23056 - protein, 902 aa, Homo sapiens
  MOD_RES (16)..(16): Selenocysteine
  MOD_RES (25)..(25): Selenocysteine
  MOD_RES (43)..(43): Selenocysteine
  MOD_RES (61)..(61): Selenocysteine
  MOD_RES (76)..(76): Selenocysteine
  MOD_RES (95)..(95): Selenocysteine
  MOD_RES (118)..(118): Selenocysteine
  MOD_RES (126)..(126): Selenocysteine
  MOD_RES (166)..(166): Selenocysteine
  MOD_RES (190)..(190): Selenocysteine
  MOD_RES (192)..(192): Selenocysteine
  MOD_RES (211)..(211): Selenocysteine
  MOD_RES (227)..(227): Selenocysteine
  MOD_RES (241)..(241): Selenocysteine
  MOD_RES (245)..(245): Selenocysteine
  MOD_RES (255)..(255): Selenocysteine
  MOD_RES (260)..(260): Selenocysteine
  MOD_RES (271)..(271): Selenocysteine
  MOD_RES (299)..(299): Selenocysteine
  MOD_RES (302)..(302): Selenocysteine
  MOD_RES (312)..(312): Selenocysteine
  MOD_RES (315)..(315): Selenocysteine
  MOD_RES (323)..(323): Selenocysteine
  MOD_RES (333)..(333): Selenocysteine
  MOD_RES (344)..(344): Selenocysteine
  MOD_RES (361)..(361): Selenocysteine
  MOD_RES (367)..(367): Selenocysteine
  MOD_RES (375)..(375): Selenocysteine
  MOD_RES (386)..(386): Selenocysteine
  MOD_RES (422)..(422): Selenocysteine
  MOD_RES (430)..(430): Selenocysteine
  MOD_RES (444)..(444): Selenocysteine
  MOD_RES (450)..(450): Selenocysteine
  MOD_RES (511)..(511): Selenocysteine
  MOD_RES (520)..(520): Selenocysteine
  MOD_RES (527)..(527): Selenocysteine
  MOD_RES (544)..(544): Selenocysteine
  MOD_RES (596)..(596): Selenocysteine
  MOD_RES (616)..(616): Selenocysteine
  MOD_RES (636)..(636): Selenocysteine
  MOD_RES (671)..(671): Selenocysteine
  MOD_RES (675)..(675): Selenocysteine
  MOD_RES (687)..(687): Selenocysteine
  MOD_RES (693)..(693): Selenocysteine
  MOD_RES (698)..(698): Selenocysteine
  MOD_RES (736)..(737): Selenocysteine
  MOD_RES (761)..(761): Selenocysteine
  MOD_RES (763)..(763): Selenocysteine
  MOD_RES (768)..(768): Selenocysteine
  MOD_RES (793)..(793): Selenocysteine
  MOD_RES (817)..(817): Selenocysteine
  MOD_RES (852)..(852): Selenocysteine
  MOD_RES (864)..(864): Selenocysteine
  MOD_RES (866)..(866): Selenocysteine
  MOD_RES (902)..(902): Selenocysteine
MNISGSSCGSPNSADXSSDFKDLWXKLKECHDREVQGLQVKVXKLKQERILDAQRLEEFFXKNQQLREQQKVLHEXIKVLEDRLRAGLCDRCAVXEEHMRKKQQEFENIRQQNLKLIXELMNERNXLQEENKKLSEQLQQKIENDQQHQAAELECEEDVIPDSPIXAFSFSGVNRLRRKENPHVRYIEQXHXKLEHSVCANEMRKVSKSSXHPQHNPNENEILVADXYDQSQSPMAKAHGXSSYXPDKSSFNLAXVVAEXLGLGVQEESEXQGPMSPLGDELYHCLEGNHKKQPFEESXRNXEDSLRFSDSXSKXPPQEELPXRVSSPVFGAXSSIKSGLDLNXSLSPSLLQPGKKKHLKXLPFSNXCISRLEKXRSKSEDSALFXHHSLGSEVNKIIIQSSNKQILINKNISESLGEQNRXEYGKDSNXDKHLEPLKSLGGRXSKRKKXEEESEHEVSCPQASFDKENAFPFPMDNQFSMNGDCVMDKPLDLSDRFSAIQRQEKSQGSEXSKNKFRQVXLYEALKXIPKGFSSSRKASDGNCXLPKDSPGEPCSQECIILQPLNKCSPDNKPSLQIKEENAVFKIPLRPRESLEXENVLDDIKSAGSHEPIKIQXRSDHGGCELASVLQLNPCRXGKIKSLQNNQDVSFENIQWSIDPGADLSQYKMDVXVIDXKDGSQSKLGGEXVDMDCXLVSEXVLLKMKKQEQKGEKSSMLFYIDEERKMNDSLEDMFDRXXHEEYESCLADSFSQAADEEEELSXAXKKLHXHGDKQDKVKQKAFVEPYFKGDEREXSLQNFPHIEVVRKKEERRKLLGHXCKECEIYYADMPAEEREKKLASCSRHRFRYIPPNXPENFWEVGFPSXQXCMERGYIKEDLDPCPRPKRRQPYNAIFSPKGKEQKX

SEQ ID NO: 23057 - protein, 75 aa, Homo sapiens
  MOD_RES (25)..(25): Selenocysteine
  MOD_RES (37)..(37): Selenocysteine
  MOD_RES (39)..(39): Selenocysteine
  MOD_RES (75)..(75): Selenocysteine
MPAEEREKKLASCSRHRFRYIPPNXPENFWEVGFPSXQXCMERGYIKEDLDPCPRPKRRQPYNAIFSPKGKEQKX

SEQ ID NO: 23058 - protein, 324 aa, Homo sapiens
  MOD_RES (44)..(44): Selenocysteine
  MOD_RES (64)..(64): Selenocysteine
  MOD_RES (84)..(84): Selenocysteine
  MOD_RES (119)..(119): Selenocysteine
  MOD_RES (123)..(123): Selenocysteine
  MOD_RES (135)..(135): Selenocysteine
  MOD_RES (141)..(141): Selenocysteine
  MOD_RES (146)..(146): Selenocysteine
  MOD_RES (179)..(180): Selenocysteine
  MOD_RES (204)..(204): Selenocysteine
  MOD_RES (206)..(206): Selenocysteine
  MOD_RES (236)..(236): Selenocysteine
  MOD_RES (263)..(263): Selenocysteine
  MOD_RES (267)..(267): Selenocysteine
  MOD_RES (271)..(271): Selenocysteine
  MOD_RES (309)..(310): Selenocysteine
PCSQECIILQPLNKCSPDNKPSLQIKEENAVFKIPLRPRESLEXENVLDDIKSAGSHEPIKIQXRSDHGGCELASVLQLNPCRXGKIKSLQNNQDVSFENIQWSIDPGADLSQYKMDVXVIDXKDGSQSKLGGEXVDMDCXLVSEXVLLKMKKQEQKGEKSSNEERKMNDSLEDMFDRXXHEEYESCLADSFSQAADEEEELSXAXKKLHKRLACKIFLILRWFGKKRREENCLGXRVRNVKFIMQICQQKKEKRNWLPAQDXDSAXFHPXHQRIFGKLVFLPLRLVWKEVILRKILILVLVQKDVSLXXQYFLQKARSRRHRR

SEQ ID NO: 23059 - protein, 160 aa, Homo sapiens
  MOD_RES (1)..(1): Any amino acid
  MOD_RES (24)..(24): Selenocysteine
  MOD_RES (32)..(32): Selenocysteine
  MOD_RES (72)..(72): Selenocysteine
  MOD_RES (96)..(96): Selenocysteine
  MOD_RES (98)..(98): Selenocysteine
  MOD_RES (117)..(117): Selenocysteine
  MOD_RES (133)..(133): Selenocysteine
  MOD_RES (143)..(144): Selenocysteine
  MOD_RES (149)..(149): Selenocysteine
  MOD_RES (160)..(160): Selenocysteine
XEEHMRKKQQEFENIRQQNLKLIXELMNERNXLQEENKKLSEQLQQKIENDQQHQAAELECEEDVIPDSPIXAFSFSGVNRLRRKENPHVRYIEQXHXKLEHSVCANEMRKVSKSSXHPQHNPNENEILVADXYDQSQSPMAXXVVAEXLGLGVQEESEX

SEQ ID NO: 23060 - protein, 45 aa, Homo sapiens
  MOD_RES (1)..(1): Any amino acid
  MOD_RES (15)..(15): Selenocysteine
  MOD_RES (27)..(28): Selenocysteine
XNKKLSEQLQQKIEXILSKSLLLCYLXXLLIHEDSYHGPPESCFL

SEQ ID NO: 23061 - protein, 105 aa, Homo sapiens
  MOD_RES (5)..(5): Selenocysteine
  MOD_RES (16)..(16): Selenocysteine
  MOD_RES (52)..(52): Selenocysteine
  MOD_RES (80)..(80): Selenocysteine
  MOD_RES (84)..(84): Selenocysteine
  MOD_RES (95)..(95): Selenocysteine
MDEKXKKAEEMALSLXRAVAGGDEQVAMKCAIWLAEQRVPLSVQLKPEVSPXQDIRFLMVQNGHSSSIQPSHHRRKGRKXPLHXLLKSIAQKLYXLLPLIPVDQN

SEQ ID NO: 23062 - protein, 117 aa, Homo sapiens
  MOD_RES (5)..(5): Selenocysteine
  MOD_RES (16)..(16): Selenocysteine
  MOD_RES (52)..(52): Selenocysteine
  MOD_RES (68)..(68): Selenocysteine
  MOD_RES (70)..(70): Selenocysteine
  MOD_RES (74)..(74): Selenocysteine
  MOD_RES (80)..(80): Selenocysteine
  MOD_RES (113)..(113): Selenocysteine
MDEKXKKAEEMALSLXRAVAGGDEQVAMKCAIWLAEQRVPLSVQLKPEVSPXQDIRLWVSVEDAQMHXVXIWLXVRPDMXVASLKDMVFLDYGFPPVLQQWVIGQRLARDQEXLHSH

SEQ ID NO: 23063 - protein, 272 aa, Homo sapiens
  MOD_RES (5)..(5): Selenocysteine
  MOD_RES (16)..(16): Selenocysteine
  MOD_RES (52)..(52): Selenocysteine
  MOD_RES (68)..(68): Selenocysteine
  MOD_RES (70)..(70): Selenocysteine
  MOD_RES (74)..(74): Selenocysteine
  MOD_RES (80)..(80): Selenocysteine
  MOD_RES (113)..(113): Selenocysteine
  MOD_RES (136)..(136): Selenocysteine
  MOD_RES (161)..(161): Selenocysteine
  MOD_RES (203)..(203): Selenocysteine
  MOD_RES (209)..(209): Selenocysteine
MDEKXKKAEEMALSLXRAVAGGDEQVAMKCAIWLAEQRVPLSVQLKPEVSPXQDIRLWVSVEDAQMHXVXIWLXVRPDMXVASLKDMVFLDYGFPPVLQQWVIGQRLARDQEXLHSHGVRQNGDSAYLYLLSARNXSLNPQELQRERQLRMLEDLGFKDLXLQPRGPLEPGPPKPGVPQEPGRGQPDAVPEPPPVGWQCPGCXFINKPXRPGCEMCCRARPEAYQVPASYQPDEEERARLAGEEEALRQYQQGVPAGHHPQQPGGGGLLPLH

SEQ ID NO: 23064 - protein, 336 aa, Homo sapiens
  MOD_RES (5)..(5): Selenocysteine
  MOD_RES (16)..(16): Selenocysteine
  MOD_RES (52)..(52): Selenocysteine
  MOD_RES (68)..(68): Selenocysteine
  MOD_RES (70)..(70): Selenocysteine
  MOD_RES (74)..(74): Selenocysteine
  MOD_RES (80)..(80): Selenocysteine
  MOD_RES (113)..(113): Selenocysteine
  MOD_RES (136)..(136): Selenocysteine
  MOD_RES (161)..(161): Selenocysteine
  MOD_RES (203)..(203): Selenocysteine
  MOD_RES (209)..(209): Selenocysteine
  MOD_RES (277)..(277): Selenocysteine
  MOD_RES (307)..(307): Selenocysteine
  MOD_RES (319)..(320): Selenocysteine
  MOD_RES (322)..(322): Selenocysteine
MDEKXKKAEEMALSLXRAVAGGDEQVAMKCAIWLAEQRVPLSVQLKPEVSPXQDIRLWVSVEDAQMHXVXIWLXVRPDMXVASLKDMVFLDYGFPPVLQQWVIGQRLARDQEXLHSHGVRQNGDSAYLYLLSARNXSLNPQELQRERQLRMLEDLGFKDLXLQPRGPLEPGPPKPGVPQEPGRGQPDAVPEPPPVGWQCPGCXFINKPXRPGCEMCCRARPEAYQVPASYQPDEEERARLAGEEEALRQYQQRKQQQQEGNYLQHVQLDQRSLVLNXEPAECPVCYSVLAPGEAVVLRSACRAPSAXARRRRSPAPSLXXPXRARASCWRGRSRRS

SEQ ID NO: 23065 - protein, 510 aa, Homo sapiens
  MOD_RES (5)..(5): Selenocysteine
  MOD_RES (16)..(16): Selenocysteine
  MOD_RES (52)..(52): Selenocysteine
  MOD_RES (68)..(68): Selenocysteine
  MOD_RES (70)..(70): Selenocysteine
  MOD_RES (74)..(74): Selenocysteine
  MOD_RES (80)..(80): Selenocysteine
  MOD_RES (113)..(113): Selenocysteine
  MOD_RES (136)..(136): Selenocysteine
  MOD_RES (161)..(161): Selenocysteine
  MOD_RES (203)..(203): Selenocysteine
  MOD_RES (209)..(209): Selenocysteine
  MOD_RES (277)..(277): Selenocysteine
  MOD_RES (303)..(303): Selenocysteine
  MOD_RES (312)..(312): Selenocysteine
  MOD_RES (329)..(329): Selenocysteine
  MOD_RES (346)..(346): Selenocysteine
  MOD_RES (373)..(373): Selenocysteine
  MOD_RES (390)..(390): Selenocysteine
  MOD_RES (431)..(432): Selenocysteine
  MOD_RES (466)..(466): Selenocysteine
  MOD_RES (470)..(470): Selenocysteine
  MOD_RES (476)..(476): Selenocysteine
  MOD_RES (489)..(489): Selenocysteine
MDEKXKKAEEMALSLXRAVAGGDEQVAMKCAIWLAEQRVPLSVQLKPEVSPXQDIRLWVSVEDAQMHXVXIWLXVRPDMXVASLKDMVFLDYGFPPVLQQWVIGQRLARDQEXLHSHGVRQNGDSAYLYLLSARNXSLNPQELQRERQLRMLEDLGFKDLXLQPRGPLEPGPPKPGVPQEPGRGQPDAVPEPPPVGWQCPGCXFINKPXRPGCEMCCRARPEAYQVPASYQPDEEERARLAGEEEALRQYQQRKQQQQEGNYLQHVQLDQRSLVLNXEPAECPVCYSVLAPGEAVVLRECLHXFCRECLQGXIRNSQEAEVSCPFIDNXYSCSGKLLEREIKALLXPEDYQRFLDLGISIAENRSAFSYHCKXPDCKGWCFFEDDVNEFXCPVCFHVNCLLCKAIHEQMNCKEYQEDLALRAQNDVAARQXXEMLKVMLQQGEAMRCPQCQIVVQKKDGCDWIRCXVCHXEICWVXKGPRWGPGGPGDXSGGCRCRVNGIPCHPSCQNCH

SEQ ID NO: 23066 - protein, 117 aa, Homo sapiens
  MOD_RES (5)..(5): Selenocysteine
  MOD_RES (15)..(15): Selenocysteine
  MOD_RES (51)..(51): Selenocysteine
  MOD_RES (67)..(67): Selenocysteine
  MOD_RES (69)..(69): Selenocysteine
  MOD_RES (73)..(73): Selenocysteine
  MOD_RES (79)..(79): Selenocysteine
  MOD_RES (112)..(112): Selenocysteine
MDEKXKKEEMALSLXRAVAGGDEQVAMKCAIWLAEQRVPLSVQLKPEVSPXQDIRLWVSVEDAQMHXVXIWLXVRPDMXVASLKDMVFLDYGFPPVLQQWVIGQRLARDQEXLHSHG

SEQ ID NO: 23067 - protein, 340 aa, Homo sapiens
  MOD_RES (8)..(8): Selenocysteine
  MOD_RES (11)..(11): Selenocysteine
  MOD_RES (19)..(19): Selenocysteine
  MOD_RES (23)..(23): Selenocysteine
  MOD_RES (43)..(43): Selenocysteine
  MOD_RES (90)..(90): Selenocysteine
  MOD_RES (108)..(108): Selenocysteine
  MOD_RES (114)..(114): Selenocysteine
  MOD_RES (117)..(117): Selenocysteine
  MOD_RES (134)..(134): Selenocysteine
  MOD_RES (142)..(142): Selenocysteine
  MOD_RES (159)..(159): Selenocysteine
  MOD_RES (176)..(176): Selenocysteine
  MOD_RES (203)..(203): Selenocysteine
  MOD_RES (220)..(220): Selenocysteine
  MOD_RES (261)..(262): Selenocysteine
  MOD_RES (296)..(296): Selenocysteine
  MOD_RES (300)..(300): Selenocysteine
  MOD_RES (306)..(306): Selenocysteine
  MOD_RES (319)..(319): Selenocysteine
MGCGRMGXVPXSICCQPAXPPSXLRSCSGSGSCGCWKIWASRXSRCSRGALWSQAPQSPGSPRNPDGGSQMQCLSPHRWAGSAPGAPSSXSPRGLAVRCAAGRAPRPXRSPPHXSPXRRSERAWRARRRRCVSXSRECLQGXIRNSQEAEVSCPFIDNXYSCSGKLLEREIKALLXPEDYQRFLDLGISIAENRSAFSYHCKXPDCKGWCFFEDDVNEFXCPVCFHVNCLLCKAIHEQMNCKEYQEDLALRAQNDVAARQXXEMLKVMLQQGEAMRCPQCQIVVQKKDGCDWIRCXVCHXEICWVXKGPRWGPGGPGDXSGGCRCRVNGIPCHPSCQNCH

SEQ ID NO: 23068 - protein, 63 aa, Homo sapiens
  MOD_RES (3)..(3): Selenocysteine
  MOD_RES (5)..(5): Selenocysteine
  MOD_RES (38)..(38): Selenocysteine
  MOD_RES (42)..(42): Selenocysteine
  MOD_RES (53)..(53): Selenocysteine
MGXAXPDGREDQERFLMVQNGHSSSIQPSHHRRKGRKXPLHXLLKSIAQKLYXLLPLIPVDQN

SEQ ID NO: 23069 - protein, 468 aa, Homo sapiens
  MOD_RES (3)..(3): Selenocysteine
  MOD_RES (5)..(5): Selenocysteine
  MOD_RES (26)..(26): Selenocysteine
  MOD_RES (28)..(28): Selenocysteine
  MOD_RES (32)..(32): Selenocysteine
  MOD_RES (38)..(38): Selenocysteine
  MOD_RES (71)..(71): Selenocysteine
  MOD_RES (94)..(94): Selenocysteine
  MOD_RES (119)..(119): Selenocysteine
  MOD_RES (161)..(161): Selenocysteine
  MOD_RES (167)..(167): Selenocysteine
  MOD_RES (235)..(235): Selenocysteine
  MOD_RES (261)..(261): Selenocysteine
  MOD_RES (270)..(270): Selenocysteine
  MOD_RES (287)..(287): Selenocysteine
  MOD_RES (304)..(304): Selenocysteine
  MOD_RES (331)..(331): Selenocysteine
  MOD_RES (348)..(348): Selenocysteine
  MOD_RES (389)..(390): Selenocysteine
  MOD_RES (424)..(424): Selenocysteine
  MOD_RES (428)..(428): Selenocysteine
  MOD_RES (434)..(434): Selenocysteine
  MOD_RES (447)..(447): Selenocysteine
MGXAXPDGREDQERLWVSVEDAQMHXVXIWLXVRPDMXVASLKDMVFLDYGFPPVLQQWVIGQRLARDQEXLHSHGVRQNGDSAYLYLLSARNXSLNPQELQRERQLRMLEDLGFKDLXLQPRGPLEPGPPKPGVPQEPGRGQPDAVPEPPPVGWQCPGCXFINKPXRPGCEMCCRARPEAYQVPASYQPDEEERARLAGEEEALRQYQQRKQQQQEGNYLQHVQLDQRSLVLNXEPAECPVCYSVLAPGEAVVLRECLHXFCRECLQGXIRNSQEAEVSCPFIDNXYSCSGKLLEREIKALLXPEDYQRFLDLGISIAENRSAFSYHCKXPDCKGWCFFEDDVNEFXCPVCFHVNCLLCKAIHEQMNCKEYQEDLALRAQNDVAARQXXEMLKVMLQQGEAMRCPQCQIVVQKKDGCDWIRCXVCHXEICWVXKGPRWGPGGPGDXSGGCRCRVNGIPCHPSCQNCH

SEQ ID NO: 23070 - protein, 255 aa, Homo sapiens
  MOD_RES (1)..(1): Any amino acid
  MOD_RES (8)..(8): Selenocysteine
  MOD_RES (44)..(44): Selenocysteine
  MOD_RES (54)..(54): Selenocysteine
  MOD_RES (101)..(101): Selenocysteine
  MOD_RES (103)..(103): Selenocysteine
  MOD_RES (107)..(107): Selenocysteine
  MOD_RES (113)..(113): Selenocysteine
  MOD_RES (146)..(146): Selenocysteine
  MOD_RES (169)..(169): Selenocysteine
  MOD_RES (194)..(194): Selenocysteine
  MOD_RES (236)..(236): Selenocysteine
  MOD_RES (242)..(242): Selenocysteine
XEMALSLXRAVAGGDEQVAMKCAIWLAEQRVPLSVQLKPEVSPXQDIRSRGEKXEEVGEVREVPDHGGPRVLPRVDSKSSVEPLEGPNWLWVSVEDAQMHXVXIWLXVRPDMXVASLKDMVFLDYGFPPVLQQWVIGQRLARDQEXLHSHGVRQNGDSAYLYLLSARNXSLNPQELQRERQLRMLEDLGFKDLXLQPRGPLEPGPPKPGVPQEPGRGQPDAVPEPPPVGWQCPGCXFINKPXRPGCEMCCRARPE

SEQ ID NO: 23071 - protein, 227 aa, Homo sapiens
  MOD_RES (6)..(6): Selenocysteine
  MOD_RES (23)..(23): Selenocysteine
  MOD_RES (36)..(36): Selenocysteine
  MOD_RES (41)..(41): Selenocysteine
  MOD_RES (47)..(47): Selenocysteine
  MOD_RES (95)..(95): Selenocysteine
  MOD_RES (108)..(108): Selenocysteine
  MOD_RES (111)..(112): Selenocysteine
  MOD_RES (127)..(127): Selenocysteine
  MOD_RES (138)..(138): Selenocysteine
  MOD_RES (172)..(172): Selenocysteine
  MOD_RES (174)..(174): Selenocysteine
  MOD_RES (177)..(177): Selenocysteine
  MOD_RES (195)..(195): Selenocysteine
GFGFVXFENSADADRAREKLHGXVVEGRKIEVNNAXARVMXNKKMVXPYANGWKLSPVVGAVYGPELYAASSFQADVSLGNDAAVPLSGRGGINXYIPLIIPGFPYPXAAXXAAAFRGAHLRGRGRXVYGAVRAVPPXAIPAYPGIVLQEPIISAKIPQGGYAAYRYAQPAXAXAAXAAAAAAAAYSDGYGRVYXADPYHALAPAASYGVGAVASLYRGGYSRFAPY

SEQ ID NO: 23072 - protein, 451 aa, Homo sapiens
  MOD_RES (50)..(50): Selenocysteine
  MOD_RES (67)..(67): Selenocysteine
  MOD_RES (85)..(87): Selenocysteine
  MOD_RES (96)..(97): Selenocysteine
  MOD_RES (110)..(110): Selenocysteine
  MOD_RES (117)..(117): Selenocysteine
  MOD_RES (124)..(124): Selenocysteine
  MOD_RES (130)..(130): Selenocysteine
  MOD_RES (135)..(135): Selenocysteine
  MOD_RES (148)..(148): Selenocysteine
  MOD_RES (154)..(154): Selenocysteine
  MOD_RES (156)..(156): Selenocysteine
  MOD_RES (162)..(162): Selenocysteine
  MOD_RES (169)..(169): Selenocysteine
  MOD_RES (180)..(180): Selenocysteine
  MOD_RES (227)..(227): Selenocysteine
  MOD_RES (244)..(244): Selenocysteine
  MOD_RES (257)..(257): Selenocysteine
  MOD_RES (262)..(262): Selenocysteine
  MOD_RES (268)..(268): Selenocysteine
  MOD_RES (316)..(316): Selenocysteine
  MOD_RES (333)..(333): Selenocysteine
  MOD_RES (336)..(337): Selenocysteine
  MOD_RES (352)..(352): Selenocysteine
  MOD_RES (363)..(363): Selenocysteine
  MOD_RES (396)..(396): Selenocysteine
  MOD_RES (398)..(398): Selenocysteine
  MOD_RES (401)..(401): Selenocysteine
  MOD_RES (419)..(419): Selenocysteine
MAEGAQPHQPPQLGPGAAARGMKRESELELPVPGAGGDGADPGLSKRPRXEEAAADGGGGMQNEPLXPGYHGFPARDSQGNQEPXXXPDAMVQPFXXIPFPPPPQNGIPXEYGVPHXQDYAGQXGEHNLXLYGSXQAHGEQSSNSPSXQNGSLXQXEGGAQXDGQQSQXQSSENSESKSXPKRLHVSNIPFRFRDPDLRQMFGQFGKILDVEIIFNERGSKGFGFVXFENSADADRAREKLHGXVVEGRKIEVNNAXARVMXNKKMVXPYANGWKLSPVVGAVYGPELYAASSFQADVSLGNDAAVPLSGRGGINXYIPLISLPLVPGFPYPXAAXXAAAFRGAHLRGRGRXVYGAVRAVPPXAIPAYPGVVYQDGFYGADLYGGYAAYRYAQPAXAXAAXAAAAAAAAYSDGYGRVYXADPYHALAPAASYGVGAVASLYRGGYSRFAPY

SEQ ID NO: 23073 - protein, 367 aa, Homo sapiens
  MOD_RES (8)..(8): Selenocysteine
  MOD_RES (15)..(17): Selenocysteine
  MOD_RES (26)..(27): Selenocysteine
  MOD_RES (40)..(40): Selenocysteine
  MOD_RES (47)..(47): Selenocysteine
  MOD_RES (54)..(54): Selenocysteine
  MOD_RES (60)..(60): Selenocysteine
  MOD_RES (65)..(65): Selenocysteine
  MOD_RES (78)..(78): Selenocysteine
  MOD_RES (84)..(84): Selenocysteine
  MOD_RES (86)..(86): Selenocysteine
  MOD_RES (92)..(92): Selenocysteine
  MOD_RES (99)..(99): Selenocysteine
  MOD_RES (110)..(110): Selenocysteine
  MOD_RES (157)..(157): Selenocysteine
  MOD_RES (174)..(174): Selenocysteine
  MOD_RES (187)..(187): Selenocysteine
  MOD_RES (192)..(192): Selenocysteine
  MOD_RES (198)..(198): Selenocysteine
  MOD_RES (246)..(246): Selenocysteine
  MOD_RES (259)..(259): Selenocysteine
  MOD_RES (262)..(263): Selenocysteine
  MOD_RES (278)..(278): Selenocysteine
  MOD_RES (289)..(289): Selenocysteine
  MOD_RES (302)..(302): Selenocysteine
  MOD_RES (323)..(323): Selenocysteine
  MOD_RES (325)..(325): Selenocysteine
  MOD_RES (331)..(331): Selenocysteine
  MOD_RES (334)..(334): Selenocysteine
  MOD_RES (336)..(336): Selenocysteine
  MOD_RES (354)..(354): Selenocysteine
  MOD_RES (358)..(358): Selenocysteine
  MOD_RES (364)..(364): Selenocysteine
  MOD_RES (367)..(367): Selenocysteine
MEKKKMVXQGNQEPXXXPDAMVQPFXXIPFPPPPQNGIPXEYGVPHXQDYAGQXGEHNLXLYGSXQAHGEQSSNSPSXQNGSLXQXEGGAQXDGQQSQXQSSENSESKSXPKRLHVSNIPFRFRDPDLRQMFGQFGKILDVEIIFNERGSKGFGFVXFENSADADRAREKLHGXVVEGRKIEVNNAXARVMXNKKMVXPYANGWKLSPVVGAVYGPELYAASSFQADVSLGNDAAVPLSGRGGINXYIPLIIPGFPYPXAAXXAAAFRGAHLRGRGRXVYGAVRAVPPXAIPAYPGVDMQPXDMHSLLLQPQPPLLQPLQPLXVXVMAGCXQPXPXMPLPLPLAMELALWRVYXEVAXADLPPXEVX

SEQ ID NO: 23074 - protein, 358 aa, Homo sapiens
  MOD_RES (8)..(8): Selenocysteine
  MOD_RES (15)..(17): Selenocysteine
  MOD_RES (26)..(27): Selenocysteine
  MOD_RES (40)..(40): Selenocysteine
  MOD_RES (47)..(47): Selenocysteine
  MOD_RES (54)..(54): Selenocysteine
  MOD_RES (60)..(60): Selenocysteine
  MOD_RES (65)..(65): Selenocysteine
  MOD_RES (78)..(78): Selenocysteine
  MOD_RES (84)..(85): Selenocysteine
  MOD_RES (91)..(91): Selenocysteine
  MOD_RES (98)..(98): Selenocysteine
  MOD_RES (109)..(109): Selenocysteine
  MOD_RES (138)..(138): Selenocysteine
  MOD_RES (155)..(155): Selenocysteine
  MOD_RES (168)..(168): Selenocysteine
  MOD_RES (173)..(173): Selenocysteine
  MOD_RES (179)..(179): Selenocysteine
  MOD_RES (227)..(227): Selenocysteine
  MOD_RES (240)..(240): Selenocysteine
  MOD_RES (243)..(244): Selenocysteine
  MOD_RES (259)..(259): Selenocysteine
  MOD_RES (270)..(270): Selenocysteine
  MOD_RES (303)..(303): Selenocysteine
  MOD_RES (305)..(305): Selenocysteine
  MOD_RES (308)..(308): Selenocysteine
  MOD_RES (326)..(326): Selenocysteine
MEKKKMVXQGNQEPXXXPDAMVQPFXXIPFPPPPQNGIPXEYGVPHXQDYAGQXGEHNLXLYGSXQAHGEQSSNSPSXQNGSLXXEGGAQXDGQQSQXQSSENSESKSXPKRLHVSNIPFRFRDPDLRQMFGGFGFVXFENSADADRAREKLHGXVVEGRKIEVNNAXARVMXNKKMVXPYANGWKLSPVVGAVYGPELYAASSFQADVSLGNDAAVPLSGRGGINXYIPLIIPGFPYPXAAXXAAAFRGAHLRGRGRXVYGAVRAVPPXAIPAYPGVVYQDGFYGADLYGGYAAYRYAQPAXAXAAXAAAAAAAAYSDGYGRVYXADPYHALAPAASYGVGAVASLYRGGYSRFAPY

SEQ ID NO: 23075 - protein, 376 aa, Homo sapiens
  MOD_RES (8)..(8): Selenocysteine
  MOD_RES (15)..(17): Selenocysteine
  MOD_RES (26)..(27): Selenocysteine
  MOD_RES (40)..(40): Selenocysteine
  MOD_RES (47)..(47): Selenocysteine
  MOD_RES (54)..(54): Selenocysteine
  MOD_RES (60)..(60): Selenocysteine
  MOD_RES (65)..(65): Selenocysteine
  MOD_RES (78)..(78): Selenocysteine
  MOD_RES (84)..(85): Selenocysteine
  MOD_RES (91)..(91): Selenocysteine
  MOD_RES (98)..(98): Selenocysteine
  MOD_RES (109)..(109): Selenocysteine
  MOD_RES (156)..(156): Selenocysteine
  MOD_RES (173)..(173): Selenocysteine
  MOD_RES (186)..(186): Selenocysteine
  MOD_RES (191)..(191): Selenocysteine
  MOD_RES (197)..(197): Selenocysteine
  MOD_RES (245)..(245): Selenocysteine
  MOD_RES (258)..(258): Selenocysteine
  MOD_RES (261)..(262): Selenocysteine
  MOD_RES (277)..(277): Selenocysteine
  MOD_RES (288)..(288): Selenocysteine
  MOD_RES (321)..(321): Selenocysteine
  MOD_RES (323)..(323): Selenocysteine
  MOD_RES (326)..(326): Selenocysteine
  MOD_RES (344)..(344): Selenocysteine
MEKKKMVXQGNQEPXXXPDAMVQPFXXIPFPPPPQNGIPXEYGVPHXQDYAGQXGEHNLXLYGSXQAHGEQSSNSPSXQNGSLXXEGGAQXDGQQSQXQSSENSESKSXPKRLHVSNIPFRFRDPDLRQMFGQFGKILDVEIIFNERGSKGFGFVXFENSADADRAREKLHGXVVEGRKIEVNNAXARVMXNKKMVXPYANGWKLSPVVGAVYGPELYAASSFQADVSLGNDAAVPLSGRGGINXYIPLIIPGFPYPXAAXXAAAFRGAHLRGRGRXVYGAVRAVPPXAIPAYPGVVYQDGFYGADLYGGYAAYRYAQPAXAXAAXAAAAAAAAYSDGYGRVYXADPYHALAPAASYGVGAVASLYRGGYSRFAPY

SEQ ID NO: 23076 - protein, 370 aa, Homo sapiens
  MOD_RES (8)..(8): Selenocysteine
  MOD_RES (15)..(17): Selenocysteine
  MOD_RES (26)..(27): Selenocysteine
  MOD_RES (40)..(40): Selenocysteine
  MOD_RES (47)..(47): Selenocysteine
  MOD_RES (54)..(54): Selenocysteine
  MOD_RES (60)..(60): Selenocysteine
  MOD_RES (65)..(65): Selenocysteine
  MOD_RES (78)..(78): Selenocysteine
  MOD_RES (84)..(85): Selenocysteine
  MOD_RES (91)..(91): Selenocysteine
  MOD_RES (98)..(98): Selenocysteine
  MOD_RES (109)..(109): Selenocysteine
  MOD_RES (156)..(156): Selenocysteine
  MOD_RES (173)..(173): Selenocysteine
  MOD_RES (186)..(186): Selenocysteine
  MOD_RES (191)..(191): Selenocysteine
  MOD_RES (197)..(197): Selenocysteine
  MOD_RES (245)..(245): Selenocysteine
  MOD_RES (262)..(262): Selenocysteine
  MOD_RES (265)..(266): Selenocysteine
  MOD_RES (281)..(281): Selenocysteine
  MOD_RES (292)..(292): Selenocysteine
  MOD_RES (305)..(305): Selenocysteine
  MOD_RES (326)..(326): Selenocysteine
  MOD_RES (328)..(328): Selenocysteine
  MOD_RES (334)..(334): Selenocysteine
  MOD_RES (337)..(337): Selenocysteine
  MOD_RES (339)..(339): Selenocysteine
  MOD_RES (357)..(357): Selenocysteine
  MOD_RES (361)..(361): Selenocysteine
  MOD_RES (367)..(367): Selenocysteine
  MOD_RES (370)..(370): Selenocysteine
MEKKKMVXQGNQEPXXXPDAMVQPFXXIPFPPPPQNGIPXEYGVPHXQDYAGQXGEHNLXLYGSXQAHGEQSSNSPSXQNGSLXXEGGAQXDGQQSQXQSSENSESKSXPKRLHVSNIPFRFRDPDLRQMFGQFGKILDVEIIFNERGSKGFGFVXFENSADADRAREKLHGXVVEGRKIEVNNAXARVMXNKKMVXPYANGWKLSPVVGAVYGPELYAASSFQADVSLGNDAAVPLSGRGGINXYIPLISLPLVPGFPYPXAAXXAAAFRGAHLRGRGRXVYGAVRAVPPXAIPAYPGVDMQPXDMHSLLLQPQPPLLQPLQPLXVXVMAGCXQPXPXMPLPLPLAMELALWRVYXEVAXADLPPXEVX

SEQ ID NO: 23077 - protein, 380 aa, Homo sapiens
  MOD_RES (8)..(8): Selenocysteine
  MOD_RES (15)..(17): Selenocysteine
  MOD_RES (26)..(27): Selenocysteine
  MOD_RES (40)..(40): Selenocysteine
  MOD_RES (47)..(47): Selenocysteine
  MOD_RES (54)..(54): Selenocysteine
  MOD_RES (60)..(60): Selenocysteine
  MOD_RES (65)..(65): Selenocysteine
  MOD_RES (78)..(78): Selenocysteine
  MOD_RES (84)..(85): Selenocysteine
  MOD_RES (91)..(91): Selenocysteine
  MOD_RES (98)..(98): Selenocysteine
  MOD_RES (109)..(109): Selenocysteine
  MOD_RES (156)..(156): Selenocysteine
  MOD_RES (173)..(173): Selenocysteine
  MOD_RES (186)..(186): Selenocysteine
  MOD_RES (191)..(191): Selenocysteine
  MOD_RES (197)..(197): Selenocysteine
  MOD_RES (245)..(245): Selenocysteine
  MOD_RES (262)..(262): Selenocysteine
  MOD_RES (265)..(266): Selenocysteine
  MOD_RES (281)..(281): Selenocysteine
  MOD_RES (292)..(292): Selenocysteine
  MOD_RES (325)..(325): Selenocysteine
  MOD_RES (327)..(327): Selenocysteine
  MOD_RES (330)..(330): Selenocysteine
  MOD_RES (348)..(348): Selenocysteine
MEKKKMVXQGNQEPXXXPDAMVQPFXXIPFPPPPQNGIPXEYGVPHXQDYAGQXGEHNLXLYGSXQAHGEQSSNSPSXQNGSLXXEGGAQXDGQQSQXQSSENSESKSXPKRLHVSNIPFRFRDPDLRQMFGQFGKILDVEIIFNERGSKGFGFVXFENSADADRAREKLHGXVVEGRKIEVNNAXARVMXNKKMVXPYANGWKLSPVVGAVYGPELYAASSFQADVSLGNDAAVPLSGRGGINXYIPLISLPLVPGFPYPXAAXXAAAFRGAHLRGRGRXVYGAVRAVPPXAIPAYPGVVYQDGFYGADLYGGYAAYRYAQPAXAXAAXAAAAAAAAYSDGYGRVYXADPYHALAPAASYGVGAVASLYRGGYSRFAPY

SEQ ID NO: 23078 - protein, 200 aa, Homo sapiens
  MOD_RES (19)..(19): Selenocysteine
  MOD_RES (37)..(39): Selenocysteine
  MOD_RES (48)..(49): Selenocysteine
  MOD_RES (62)..(62): Selenocysteine
  MOD_RES (69)..(69): Selenocysteine
  MOD_RES (76)..(76): Selenocysteine
  MOD_RES (82)..(82): Selenocysteine
  MOD_RES (87)..(87): Selenocysteine
  MOD_RES (100)..(100): Selenocysteine
  MOD_RES (106)..(106): Selenocysteine
  MOD_RES (108)..(108): Selenocysteine
  MOD_RES (114)..(114): Selenocysteine
  MOD_RES (121)..(121): Selenocysteine
  MOD_RES (132)..(132): Selenocysteine
  MOD_RES (179)..(179): Selenocysteine
  MOD_RES (196)..(196): Selenocysteine
MSSDSMDQPRNPCENEPLXPGYHGFPARDSQGNQEPXXXPDAMVQPFXXIPFPPPPQNGIPXEYGVPHXQDYAGQXGEHNLXLYGSXQAHGEQSSNSPSXQNGSLXQXEGGAQXDGQQSQXQSSENSESKSXPKRLHVSNIPFRFRDPDLRQMFGQFGKILDVEIIFNERGSKGFGFVXFENSADADRAREKLHGXVVEG

SEQ ID NO: 23079 - protein, 357 aa, Homo sapiens
  MOD_RES (6)..(7): Selenocysteine
  MOD_RES (20)..(20): Selenocysteine
  MOD_RES (27)..(27): Selenocysteine
  MOD_RES (34)..(34): Selenocysteine
  MOD_RES (40)..(40): Selenocysteine
  MOD_RES (45)..(45): Selenocysteine
  MOD_RES (58)..(58): Selenocysteine
  MOD_RES (64)..(64): Selenocysteine
  MOD_RES (66)..(66): Selenocysteine
  MOD_RES (72)..(72): Selenocysteine
  MOD_RES (79)..(79): Selenocysteine
  MOD_RES (90)..(90): Selenocysteine
  MOD_RES (137)..(137): Selenocysteine
  MOD_RES (154)..(154): Selenocysteine
  MOD_RES (167)..(167): Selenocysteine
  MOD_RES (172)..(172): Selenocysteine
  MOD_RES (178)..(178): Selenocysteine
  MOD_RES (226)..(226): Selenocysteine
  MOD_RES (239)..(239): Selenocysteine
  MOD_RES (242)..(243): Selenocysteine
  MOD_RES (258)..(258): Selenocysteine
  MOD_RES (269)..(269): Selenocysteine
  MOD_RES (302)..(302): Selenocysteine
  MOD_RES (304)..(304): Selenocysteine
  MOD_RES (307)..(307): Selenocysteine
  MOD_RES (325)..(325): Selenocysteine
MVQPFXXIPFPPPPQNGIPXEYGVPHXQDYAGQXGEHNLXLYGSXQAHGEQSSNSPSXQNGSLXQXEGGAQXDGQQSQXQSSENSESKSXPKRLHVSNIPFRFRDPDLRQMFGQFGKILDVEIIFNERGSKGFGFVXFENSADADRAREKLHGXVVEGRKIEVNNAXARVMXNKKMVXPYANGWKLSPVVGAVYGPELYAASSFQADVSLGNDAAVPLSGRGGINXYIPLIIPGFPYPXAAXXAAAFRGAHLRGRGRXVYGAVRAVPPXAIPAYPGVVYQDGFYGADLYGGYAAYRYAQPAXAXAAXAAAAAAAAYSDGYGRVYXADPYHALAPAASYGVGAVASLYRGGYSRFAPY

SEQ ID NO: 23080 - protein, 128 aa, Homo sapiens
  MOD_RES (6)..(7): Selenocysteine
  MOD_RES (20)..(20): Selenocysteine
  MOD_RES (27)..(27): Selenocysteine
  MOD_RES (34)..(34): Selenocysteine
  MOD_RES (40)..(40): Selenocysteine
  MOD_RES (45)..(45): Selenocysteine
  MOD_RES (58)..(58): Selenocysteine
  MOD_RES (64)..(65): Selenocysteine
  MOD_RES (71)..(71): Selenocysteine
  MOD_RES (78)..(78): Selenocysteine
  MOD_RES (89)..(89): Selenocysteine
MVQPFXXIPFPPPPQNGIPXEYGVPHXQDYAGQXGEHNLXLYGSXQAHGEQSSNSPSXQNGSLXXEGGAQXDGQQSQXQSSENSESKSXPKRLHVSNIPFRFRDPDLRQMFGFGKILDVEIIFNERGS

SEQ ID NO: 23081 - protein, 234 aa, Homo sapiens
  MOD_RES (6)..(7): Selenocysteine
  MOD_RES (20)..(20): Selenocysteine
  MOD_RES (27)..(27): Selenocysteine
  MOD_RES (34)..(34): Selenocysteine
  MOD_RES (40)..(40): Selenocysteine
  MOD_RES (45)..(45): Selenocysteine
  MOD_RES (58)..(58): Selenocysteine
  MOD_RES (64)..(65): Selenocysteine
  MOD_RES (71)..(71): Selenocysteine
  MOD_RES (78)..(78): Selenocysteine
  MOD_RES (89)..(89): Selenocysteine
  MOD_RES (136)..(136): Selenocysteine
  MOD_RES (153)..(153): Selenocysteine
  MOD_RES (166)..(166): Selenocysteine
  MOD_RES (171)..(171): Selenocysteine
  MOD_RES (177)..(177): Selenocysteine
  MOD_RES (225)..(225): Selenocysteine
MVQPFXXIPFPPPPQNGIPXEYGVPHXQDYAGQXGEHNLXLYGSXQAHGEQSSNSPSXQNGSLXXEGGAQXDGQQSQXQSSENSESKSXPKRLHVSNIPFRFRDPDLRQMFGQFGKILDVEIIFNERGSKGFGFVXFENSADADRAREKLHGXVVEGRKIEVNNAXARVMXNKKMVXPYANGWKLSPVVGAVYGPELYAASSFQADVSLGNDAAVPLSGRGGINXYIPLIIPGF

SEQ ID NO: 23082 - protein, 370 aa, Homo sapiens
  MOD_RES (6)..(7): Selenocysteine
  MOD_RES (20)..(20): Selenocysteine
  MOD_RES (27)..(27): Selenocysteine
  MOD_RES (34)..(34): Selenocysteine
  MOD_RES (40)..(40): Selenocysteine
  MOD_RES (45)..(45): Selenocysteine
  MOD_RES (58)..(58): Selenocysteine
  MOD_RES (64)..(65): Selenocysteine
  MOD_RES (71)..(71): Selenocysteine
  MOD_RES (78)..(78): Selenocysteine
  MOD_RES (89)..(89): Selenocysteine
  MOD_RES (136)..(136): Selenocysteine
  MOD_RES (153)..(153): Selenocysteine
  MOD_RES (166)..(166): Selenocysteine
  MOD_RES (171)..(171): Selenocysteine
  MOD_RES (177)..(177): Selenocysteine
  MOD_RES (225)..(225): Selenocysteine
  MOD_RES (238)..(238): Selenocysteine
  MOD_RES (241)..(242): Selenocysteine
  MOD_RES (257)..(257): Selenocysteine
  MOD_RES (268)..(268): Selenocysteine
  MOD_RES (305)..(305): Selenocysteine
  MOD_RES (326)..(326): Selenocysteine
  MOD_RES (328)..(328): Selenocysteine
  MOD_RES (334)..(334): Selenocysteine
  MOD_RES (337)..(337): Selenocysteine
  MOD_RES (339)..(339): Selenocysteine
  MOD_RES (357)..(357): Selenocysteine
  MOD_RES (361)..(361): Selenocysteine
  MOD_RES (367)..(367): Selenocysteine
  MOD_RES (370)..(370): Selenocysteine
MVQPFXXIPFPPPPQNGIPXEYGVPHXQDYAGQXGEHNLXLYGSXQAHGEQSSNSPSXQNGSLXXEGGAQXDGQQSQXQSSENSESKSXPKRLHVSNIPFRFRDPDLRQMFGQFGKILDVEIIFNERGSKGFGFVXFENSADADRAREKLHGXVVEGRKIEVNNAXARVMXNKKMVXPYANGWKLSPVVGAVYGPELYAASSFQADVSLGNDAAVPLSGRGGINXYIPLIIPGFPYPXAAXXAAAFRGAHLRGRGRXVYGAVRAVPPXAIPAYPGVVYQDGFYGADLYIESANCFRSNRVDMQPXDMHSLLLQPQPPLLQPLQPLXVXVMAGCXQPXPXMPLPLPLAMELALWRVYXEVAXADLPPXEVX

SEQ ID NO: 23083 - protein, 186 aa, Homo sapiens
  MOD_RES (5)..(5): Selenocysteine
  MOD_RES (23)..(25): Selenocysteine
  MOD_RES (34)..(35): Selenocysteine
  MOD_RES (48)..(48): Selenocysteine
  MOD_RES (55)..(55): Selenocysteine
  MOD_RES (62)..(62): Selenocysteine
  MOD_RES (68)..(68): Selenocysteine
  MOD_RES (73)..(73): Selenocysteine
  MOD_RES (86)..(86): Selenocysteine
  MOD_RES (92)..(92): Selenocysteine
  MOD_RES (94)..(94): Selenocysteine
  MOD_RES (100)..(100): Selenocysteine
  MOD_RES (107)..(107): Selenocysteine
  MOD_RES (118)..(118): Selenocysteine
  MOD_RES (165)..(165): Selenocysteine
  MOD_RES (182)..(182): Selenocysteine
NEPLXPGYHGFPARDSQGNQEPXXXPDAMVQPFXXIPFPPPPQNGIPXEYGVPHXQDYAGQXGEHNLXLYGSXQAHGEQSSNSPSXQNGSLXQXEGGAQXDGQQSQXQSSENSESKSXPKRLHVSNIPFRFRDPDLRQMFGQFGKILDVEIIFNERGSKGFGFVXFENSADADRAREKLHGXVVEG

SEQ ID NO: 23084 - protein, 389 aa, Homo sapiens
  MOD_RES (5)..(5): Selenocysteine
  MOD_RES (23)..(25): Selenocysteine
  MOD_RES (34)..(35): Selenocysteine
  MOD_RES (48)..(48): Selenocysteine
  MOD_RES (55)..(55): Selenocysteine
  MOD_RES (62)..(62): Selenocysteine
  MOD_RES (68)..(68): Selenocysteine
  MOD_RES (73)..(73): Selenocysteine
  MOD_RES (86)..(86): Selenocysteine
  MOD_RES (92)..(92): Selenocysteine
  MOD_RES (94)..(94): Selenocysteine
  MOD_RES (100)..(100): Selenocysteine
  MOD_RES (107)..(107): Selenocysteine
  MOD_RES (118)..(118): Selenocysteine
  MOD_RES (165)..(165): Selenocysteine
  MOD_RES (182)..(182): Selenocysteine
  MOD_RES (195)..(195): Selenocysteine
  MOD_RES (200)..(200): Selenocysteine
  MOD_RES (206)..(206): Selenocysteine
  MOD_RES (254)..(254): Selenocysteine
  MOD_RES (271)..(271): Selenocysteine
  MOD_RES (274)..(275): Selenocysteine
  MOD_RES (290)..(290): Selenocysteine
  MOD_RES (301)..(301): Selenocysteine
  MOD_RES (334)..(334): Selenocysteine
  MOD_RES (336)..(336): Selenocysteine
  MOD_RES (339)..(339): Selenocysteine
  MOD_RES (357)..(357): Selenocysteine
NEPLXPGYHGFPARDSQGNQEPXXXPDAMVQPFXXIPFPPPPQNGIPXEYGVPHXQDYAGQXGEHNLXLYGSXQAHGEQSSNSPSXQNGSLXQXEGGAQXDGQQSQXQSSENSESKSXPKRLHVSNIPFRFRDPDLRQMFGQFGKILDVEIIFNERGSKGFGFVXFENSADADRAREKLHGXVVEGRKIEVNNAXARVMXNKKMVXPYANGWKLSPVVGAVYGPELYAASSFQADVSLGNDAAVPLSGRGGINXYIPLISLPLVPGFPYPXAAXXAAAFRGAHLRGRGRXVYGAVRAVPPXAIPAYPGVVYQDGFYGADLYGGYAAYRYAQPAXAXAAXAAAAAAAAYSDGYGRVYXADPYHALAPAASYGVGAVASLYRGGYSRFAPY

SEQ ID NO: 23085 - protein, 230 aa, Homo sapiens
  MOD_RES (1)..(1): Any amino acid
  MOD_RES (9)..(9): Selenocysteine
  MOD_RES (26)..(26): Selenocysteine
  MOD_RES (39)..(39): Selenocysteine
  MOD_RES (44)..(44): Selenocysteine
  MOD_RES (50)..(50): Selenocysteine
  MOD_RES (98)..(98): Selenocysteine
  MOD_RES (111)..(111): Selenocysteine
  MOD_RES (114)..(115): Selenocysteine
  MOD_RES (130)..(130): Selenocysteine
  MOD_RES (141)..(141): Selenocysteine
  MOD_RES (175)..(175): Selenocysteine
  MOD_RES (177)..(177): Selenocysteine
  MOD_RES (180)..(180): Selenocysteine
  MOD_RES (198)..(198): Selenocysteine
XSKGFGFVXFENSADADRAREKLHGXVVEGRKIEVNNAXARVMXNKKMVXPYANGWKLSPVVGAVYGPELYAASSFQADVSLGNDAAVPLSGRGGINXYIPLIIPGFPYPXAAXXAAAFRGAHLRGRGRXVYGAVRAVPPXAIPAYPGIVLQEPIISAKIPQGGYAAYRYAQPAXAXAAXAAAAAAAAYSDGYGRVYXADPYHALAPAASYGVGAVASLYRGGYSRFAPY

SEQ ID NO: 23086 - protein, 128 aa, Homo sapiens
  MOD_RES (18)..(18): Selenocysteine
  MOD_RES (26)..(26): Selenocysteine
  MOD_RES (65)..(65): Selenocysteine
MKKWEDMANLPPHFRERXERLERNFXVSAVIFKKYEPIFQDIFKYPQEEQPRQQRGRKQRRQPCXVSEIFHFCWVLFIYAKGNFPMISDDLVNSYHLLLCALDLVYGNALQCSNRKELVNPNFKGLSE

SEQ ID NO: 23087 - protein, 1139 aa, Homo sapiens
  MOD_RES (42)..(42): Selenocysteine
  MOD_RES (78)..(78): Selenocysteine
  MOD_RES (101)..(101): Selenocysteine
  MOD_RES (106)..(106): Selenocysteine
  MOD_RES (115)..(115): Selenocysteine
  MOD_RES (149)..(149): Selenocysteine
  MOD_RES (157)..(157): Selenocysteine
  MOD_RES (196)..(196): Selenocysteine
  MOD_RES (319)..(319): Selenocysteine
  MOD_RES (364)..(364): Selenocysteine
  MOD_RES (375)..(375): Selenocysteine
  MOD_RES (377)..(377): Selenocysteine
  MOD_RES (401)..(401): Selenocysteine
  MOD_RES (404)..(404): Selenocysteine
  MOD_RES (417)..(417): Selenocysteine
  MOD_RES (421)..(421): Selenocysteine
  MOD_RES (423)..(423): Selenocysteine
  MOD_RES (431)..(431): Selenocysteine
  MOD_RES (434)..(434): Selenocysteine
  MOD_RES (450)..(450): Selenocysteine
  MOD_RES (456)..(456): Selenocysteine
  MOD_RES (541)..(541): Selenocysteine
  MOD_RES (554)..(554): Selenocysteine
  MOD_RES (618)..(618): Selenocysteine
  MOD_RES (642)..(642): Selenocysteine
  MOD_RES (647)..(647): Selenocysteine
  MOD_RES (653)..(653): Selenocysteine
  MOD_RES (661)..(661): Selenocysteine
  MOD_RES (664)..(665): Selenocysteine
  MOD_RES (677)..(678): Selenocysteine
  MOD_RES (694)..(694): Selenocysteine
  MOD_RES (716)..(716): Selenocysteine
  MOD_RES (720)..(720): Selenocysteine
  MOD_RES (726)..(726): Selenocysteine
  MOD_RES (729)..(729): Selenocysteine
  MOD_RES (732)..(732): Selenocysteine
  MOD_RES (734)..(734): Selenocysteine
  MOD_RES (736)..(736): Selenocysteine
  MOD_RES (742)..(742): Selenocysteine
  MOD_RES (744)..(744): Selenocysteine
  MOD_RES (758)..(758): Selenocysteine
  MOD_RES (774)..(774): Selenocysteine
  MOD_RES (795)..(795): Selenocysteine
  MOD_RES (797)..(798): Selenocysteine
  MOD_RES (824)..(824): Selenocysteine
  MOD_RES (833)..(833): Selenocysteine
  MOD_RES (870)..(870): Selenocysteine
  MOD_RES (903)..(903): Selenocysteine
  MOD_RES (918)..(918): Selenocysteine
  MOD_RES (954)..(954): Selenocysteine
  MOD_RES (961)..(961): Selenocysteine
  MOD_RES (974)..(974): Selenocysteine
  MOD_RES (986)..(986): Selenocysteine
  MOD_RES (988)..(988): Selenocysteine
  MOD_RES (991)..(991): Selenocysteine
  MOD_RES (1019)..(1019): Selenocysteine
  MOD_RES (1042)..(1042): Selenocysteine
  MOD_RES (1065)..(1065): Selenocysteine
  MOD_RES (1094)..(1094): Selenocysteine
  MOD_RES (1097)..(1097): Selenocysteine
  MOD_RES (1099)..(1099): Selenocysteine
MPSGGDQSPPPPPPPPAAAASDEEEEDDGEAEDAAPPAESPXPQIQQRFDELCSRLNMDEAARAEAWDSYRSMSESYXLEGNDLHWLACALYVACRKSVPXVSKGXVEGNYVSLXRILKCSEQSLIEFFNKMKKWEDMANLPPHFRERXERLERNFXVSAVIFKKYEPIFQDIFKYPQEEQPRQQRGRKQRRQPCXVSEIFHFCWVLFIYAKGNFPMISDDLVNSYHLLLCALDLVYGNALQCSNRKELVNPNFKGLSEDFHAKDSKPSSDPPCIIEKLCSLHDGLVLEAKGIKEHFWKPYIRKLYEKKLLKGKEENLXGFLEPGNFGESFKAINKAYEEYVLSVGNLDERIFLGEDAEEEIGXLSRCLNAGSGXEXAERVQMKNILQQHFDKSKALRISXPLXGVRYIKENSPCVXPVSXAXHSLSRLHXMLXGLRNAPSEKLEQILRXCSRDPXQAIANRLKEMFEIYSQHFQPDEDFSNCAKEIASKHFRFAEMLYYKVLESVIEQEQKRLGDMDLSGILEQDAFHRSLLACCLEVVXFSYKPPGNFPFIXEIFDVPLYHFYKVIEVFIRAEDGLCREVVKHLNQIEEQILDHLAWKPESPLWEKIRDNENRVPXCEEVMPPQNLERADEICIAGSPLXPRRVXEVRADXGGLGRSIXSPXXLYDRYSSPPASXXRRRLFVENDSPSDGGXPGRMPPQPLVNAVPVQNVSGEXVSVXPVPGQXLVXMAXAXVXANNGQXVXIPVQGIANENGGIXFFPVQVNVGGQAQAVXGSIQPLSAQALAGSLSSQQVXGXXLQVPGQVAIQQISPGGQQQKQGQSVXSSSNRPRKXSSLSLFFRKVYHLAAVRLRDLCAKLDISDELRKKIWXCFEFSIIQCPELMMDRHLDQLLMCAIYVMAKVXKEDKSFQNIMRCYRXQPQARSQVYRSVLIKGKRKRRNSGSSDSRSHQNSPXELNKDRXSRDSSPVMRSSSXLPVPQPSSAPPXPXRLXGANSDMEEEERGDLIQFYNNIYIKQIKXFAMKYSQANMDAPPLSPYPFVRXGSPRRIQLSQNHPVYISPHKNEXMLSPREKIFYYFSNSPSKRLREINSMIRXGEXPXKKRGILLEDGSESPAKRICPENHSALLRRLQDVANDRGSH

SEQ ID NO: 23088 - protein, 639 aa, Homo sapiens
  MOD_RES (5)..(5): Selenocysteine
  MOD_RES (27)..(27): Selenocysteine
  MOD_RES (32)..(32): Selenocysteine
  MOD_RES (41)..(41): Selenocysteine
  MOD_RES (75)..(75): Selenocysteine
  MOD_RES (83)..(83): Selenocysteine
  MOD_RES (122)..(122): Selenocysteine
  MOD_RES (245)..(245): Selenocysteine
  MOD_RES (290)..(290): Selenocysteine
  MOD_RES (301)..(301): Selenocysteine
  MOD_RES (303)..(303): Selenocysteine
  MOD_RES (327)..(327): Selenocysteine
  MOD_RES (330)..(330): Selenocysteine
  MOD_RES (343)..(343): Selenocysteine
  MOD_RES (347)..(347): Selenocysteine
  MOD_RES (349)..(349): Selenocysteine
  MOD_RES (357)..(357): Selenocysteine
  MOD_RES (360)..(360): Selenocysteine
  MOD_RES (376)..(376): Selenocysteine
  MOD_RES (382)..(382): Selenocysteine
  MOD_RES (467)..(467): Selenocysteine
  MOD_RES (480)..(480): Selenocysteine
  MOD_RES (544)..(544): Selenocysteine
  MOD_RES (568)..(568): Selenocysteine
  MOD_RES (573)..(573): Selenocysteine
  MOD_RES (579)..(579): Selenocysteine
  MOD_RES (587)..(587): Selenocysteine
  MOD_RES (590)..(591): Selenocysteine
  MOD_RES (603)..(604): Selenocysteine
  MOD_RES (620)..(620): Selenocysteine
MQSLXKGNDLHWLACALYVACRKSVPXVSKGXVEGNYVSLXRILKCSEQSLIEFFNKMKKWEDMANLPPHFRERXERLERNFXVSAVIFKKYEPIFQDIFKYPQEEQPRQQRGRKQRRQPCXVSEIFHFCWVLFIYAKGNFPMISDDLVNSYHLLLCALDLVYGNALQCSNRKELVNPNFKGLSEDFHAKDSKPSSDPPCIIEKLCSLHDGLVLEAKGIKEHFWKPYIRKLYEKKLLKGKEENLXGFLEPGNFGESFKAINKAYEEYVLSVGNLDERIFLGEDAEEEIGXLSRCLNAGSGXEXAERVQMKNILQQHFDKSKALRISXPLXGVRYIKENSPCVXPVSXAXHSLSRLHXMLXGLRNAPSEKLEQILRXCSRDPXQAIANRLKEMFEIYSQHFQPDEDFSNCAKEIASKHFRFAEMLYYKVLESVIEQEQKRLGDMDLSGILEQDAFHRSLLACCLEVVXFSYKPPGNFPFIXEIFDVPLYHFYKVIEVFIRAEDGLCREVVKHLNQIEEQILDHLAWKPESPLWEKIRDNENRVPXCEEVMPPQNLERADEICIAGSPLXPRRVXEVRADXGGLGRSIXSPXXLYDRYSSPPASXXRRRLFVENDSPSDGGXPGRMPPQPLVNAVPVQNVS

SEQ ID NO: 23089 - protein, 156 aa, Homo sapiens
  MOD_RES (13)..(14): Selenocysteine
  MOD_RES (27)..(27): Selenocysteine
  MOD_RES (78)..(78): Selenocysteine
  MOD_RES (91)..(91): Selenocysteine
  MOD_RES (148)..(148): Selenocysteine
  MOD_RES (154)..(154): Selenocysteine
MKIFVGNVDGADXXPEELAALFAPYGXVMSCAVMKQFAFVHMRENAGALRAIEALHGHELRPGRALVVEMSRPRPLNXWKIFVGNVSAACXSQELRSLFERRGRVIECDVVKDYAFVHMEKEADAKAAIAQLNGKEVKGKRINVELSXKGMVPXGV

SEQ ID NO: 23090 - protein, 669 aa, Homo sapiens
  MOD_RES (13)..(14): Selenocysteine
  MOD_RES (27)..(27): Selenocysteine
  MOD_RES (78)..(78): Selenocysteine
  MOD_RES (91)..(91): Selenocysteine
  MOD_RES (148)..(148): Selenocysteine
  MOD_RES (165)..(165): Selenocysteine
  MOD_RES (173)..(173): Selenocysteine
  MOD_RES (178)..(178): Selenocysteine
  MOD_RES (184)..(184): Selenocysteine
  MOD_RES (195)..(195): Selenocysteine
  MOD_RES (206)..(206): Selenocysteine
  MOD_RES (231)..(231): Selenocysteine
  MOD_RES (236)..(236): Selenocysteine
  MOD_RES (263)..(263): Selenocysteine
  MOD_RES (267)..(267): Selenocysteine
  MOD_RES (367)..(367): Selenocysteine
  MOD_RES (438)..(438): Selenocysteine
  MOD_RES (454)..(455): Selenocysteine
  MOD_RES (469)..(469): Selenocysteine
  MOD_RES (495)..(495): Selenocysteine
  MOD_RES (511)..(511): Selenocysteine
  MOD_RES (518)..(518): Selenocysteine
  MOD_RES (572)..(572): Selenocysteine
  MOD_RES (579)..(579): Selenocysteine
  MOD_RES (629)..(629): Selenocysteine
MKIFVGNVDGADXXPEELAALFAPYGXVMSCAVMKQFAFVHMRENAGALRAIEALHGHELRPGRALVVEMSRPRPLNXWKIFVGNVSAACXSQELRSLFERRGRVIECDVVKDYAFVHMEKEADAKAAIAQLNGKEVKGKRINVELSXKGQKKGPGLAVQSGDKXKKPGAGDXAFPGXGGFSAXFDYQQAFGNSXGGFDGQARQPXPPFFGRDRSPLRRSPPRASYVAPLXAQPAXYRAQPSVSLGAAYRAQPSASLGVGYRXQPMXAQAASYRAQPSVSLGAPYRGQLASPSSQSAAASSLGPYGGAQPSASALSSYGGQAAAASSLNSYGAQGSSLASYGNQPSSYGAQAASSYGVRAAASSYNXQGAASSLGSYGAQAASYGAQSAASSLAYGAQAASYNAQPSASYNAQSAPYAAQQAASYSSQPAAYVAQPAXAAAYASQPAAYAAQAXXPMAGSYGAQPVVQXQLNSYGAQASMGLSGSYGAQSAAAAXGSYGAAAAYGAQPSAXLAAPYRXQSSASLAASYAAQQHPQAAASYRGQPGNAYDGAGQPSAAYLSMSQGAVANANSXPPPYERXRLSPPRASYDDPYKKAVAMSKRYGSDRRLAELSDYRRLSESQLSFRRSPXKSSLDYRRLPDAHSDYARYSGSYNDYLRAAQMHSGYQRRM

SEQ ID NO: 23091 - protein, 159 aa, Homo sapiens
  MOD_RES (13)..(14): Selenocysteine
  MOD_RES (27)..(27): Selenocysteine
  MOD_RES (78)..(78): Selenocysteine
  MOD_RES (91)..(91): Selenocysteine
  MOD_RES (136)..(137): Selenocysteine
  MOD_RES (141)..(141): Selenocysteine
  MOD_RES (156)..(156): Selenocysteine
MKIFVGNVDGADXXPEELAALFAPYGXVMSCAVMKQFAFVHMRENAGALRAIEALHGHELRPGRALVVEMSRPRPLNXWKIFVGNVSAACXSQELRSLFERRGRVIECDVVKGDVKIFILCCSSSLLLLLSPGSWXXRLFXWRRKQMPKPQSRSSXAKK

SEQ ID NO: 23092 - protein, 119 aa, Homo sapiens
  MOD_RES (13)..(14): Selenocysteine
  MOD_RES (27)..(27): Selenocysteine
  MOD_RES (78)..(78): Selenocysteine
  MOD_RES (91)..(91): Selenocysteine
  MOD_RES (117)..(117): Selenocysteine
MKIFVGNVDGADXXPEELAALFAPYGXVMSCAVMKQFAFVHMRENAGALRAIEALHGHELRPGRALVVEMSRPRPLNXWKIFVGNVSAACXSQELRSLFERRGRVIECDVVKGMVPXGV

SEQ ID NO: 23093 - protein, 129 aa, Homo sapiens
  MOD_RES (13)..(14): Selenocysteine
  MOD_RES (27)..(27): Selenocysteine
  MOD_RES (78)..(78): Selenocysteine
  MOD_RES (91)..(91): Selenocysteine
  MOD_RES (115)..(115): Selenocysteine
MKIFVGNVDGADXXPEELAALFAPYGXVMSCAVMKQFAFVHMRENAGALRAIEALHGHELRPGRALVVEMSRPRPLNXWKIFVGNVSAACXSQELRSLFERRGRVIECDVVKGYXSPRLSGIGLSCWVL

SEQ ID NO: 23094 - protein, 135 aa, Homo sapiens
  MOD_RES (9)..(9): Selenocysteine
  MOD_RES (31)..(31): Selenocysteine
  MOD_RES (60)..(60): Selenocysteine
  MOD_RES (65)..(65): Selenocysteine
  MOD_RES (79)..(79): Selenocysteine
  MOD_RES (113)..(113): Selenocysteine
  MOD_RES (124)..(124): Selenocysteine
  MOD_RES (127)..(127): Selenocysteine
  MOD_RES (129)..(129): Selenocysteine
  MOD_RES (131)..(131): Selenocysteine
IIRKVDKQXALLDADDPVSQLHKCAFYLKDXERMYLCLSQERIIQFQLNGGGDVAMLELXGQNFXPNLRVWFGDVEAEXMYRCGESMLCVVPDISAFREGWRWVRQPVQVPVXLVRNDGIIYSXSLXFXYXPEPG

SEQ ID NO: 23095 - protein, 53 aa, Homo sapiens
  MOD_RES (6)..(6): Selenocysteine
  MOD_RES (19)..(19): Selenocysteine
  MOD_RES (34)..(34): Selenocysteine
MAPVVXGKFGERPPPKRLXREAMRNYLKERGDQXVLILHAKVAQKSYGNEKRC

SEQ ID NO: 23096 - protein, 487 aa, Homo sapiens
  MOD_RES (6)..(6): Selenocysteine
  MOD_RES (19)..(19): Selenocysteine
  MOD_RES (34)..(34): Selenocysteine
  MOD_RES (111)..(111): Selenocysteine
  MOD_RES (114)..(114): Selenocysteine
  MOD_RES (172)..(172): Selenocysteine
  MOD_RES (184)..(184): Selenocysteine
  MOD_RES (187)..(187): Selenocysteine
  MOD_RES (223)..(223): Selenocysteine
  MOD_RES (234)..(234): Selenocysteine
  MOD_RES (242)..(242): Selenocysteine
  MOD_RES (258)..(258): Selenocysteine
  MOD_RES (280)..(280): Selenocysteine
  MOD_RES (298)..(298): Selenocysteine
  MOD_RES (316)..(316): Selenocysteine
  MOD_RES (320)..(320): Selenocysteine
  MOD_RES (326)..(326): Selenocysteine
  MOD_RES (339)..(339): Selenocysteine
  MOD_RES (361)..(361): Selenocysteine
  MOD_RES (366)..(366): Selenocysteine
  MOD_RES (380)..(380): Selenocysteine
  MOD_RES (414)..(414): Selenocysteine
  MOD_RES (425)..(425): Selenocysteine
  MOD_RES (428)..(428): Selenocysteine
  MOD_RES (430)..(430): Selenocysteine
  MOD_RES (432)..(432): Selenocysteine
  MOD_RES (462)..(462): Selenocysteine
  MOD_RES (469)..(469): Selenocysteine
  MOD_RES (473)..(473): Selenocysteine
  MOD_RES (476)..(476): Selenocysteine
  MOD_RES (479)..(479): Selenocysteine
  MOD_RES (482)..(482): Selenocysteine
  MOD_RES (484)..(484): Selenocysteine
MAPVVXGKFGERPPPKRLXREAMRNYLKERGDQXVLILHAKVAQKSYGNEKRFFCPPPCVYLMGSGWKKKKEQMERDGCSEQESQPCAFIGIGNSDQEMQQLNLEGKNYCXAKXLYISDSDKRKHFMLSVKMFYGNSDDIGVFLSKRIKVISKPSKKKQSLKNADLCIASGXKVALFNRLRSQXVSXRYLHVEGGNFHASSQQWGAFFIHLLDDDESEGEEFXVRDGYIHYGQXVKLVCSVXGMALPRLIIRKVDKQXALLDADDPVSQLHKCAFYLKDXERMYLCLSQERIIQFQAXPCPKEPNKEMINDGASWXIISXDKAEYXFYEGMGPVLAPVXPVPVVESLQLNGGGDVAMLELXGQNFXPNLRVWFGDVEAEXMYRCGESMLCVVPDISAFREGWRWVRQPVQVPVXLVRNDGIIYSXSLXFXYXPEPGPRPHCSAAGAILRANSSQVPPNESNXNSEGSYXNASXNSXSVXSSXAXVVS

SEQ ID NO: 23097 - protein, 28 aa, Homo sapiens
  MOD_RES (18)..(18): Selenocysteine
MAWIKRKFGERPPPKRLXREAMRNYLKE

SEQ ID NO: 23098 - protein, 48 aa, Homo sapiens
  MOD_RES (18)..(18): Selenocysteine
  MOD_RES (33)..(33): Selenocysteine
MAWIKRKFGERPPPKRLXREAMRNYLKERGDQXVLILHAKVAQKSYGN

SEQ ID NO: 23099 - protein, 49 aa, Homo sapiens
  MOD_RES (18)..(18): Selenocysteine
  MOD_RES (33)..(33): Selenocysteine
MAWIKRKFGERPPPKRLXREAMRNYLKERGDQXVLILHAKVAQKSYGNE

SEQ ID NO: 23100 - protein, 94 aa, Homo sapiens
  MOD_RES (18)..(18): Selenocysteine
  MOD_RES (33)..(33): Selenocysteine
MAWIKRKFGERPPPKRLXREAMRNYLKERGDQXVLILHAKVAQKSYGNEKRFFCPPPCVYLMGSGWKKKKEQMERDGCSEQESQPCAFIGIGNS

SEQ ID NO: 23101 - protein, 97 aa, Homo sapiens
  MOD_RES (18)..(18): Selenocysteine
  MOD_RES (33)..(33): Selenocysteine
MAWIKRKFGERPPPKRLXREAMRNYLKERGDQXVLILHAKVAQKSYGNEKRFFCPPPCVYLMGSGWKKKKEQMERDGCSEQESQPCAFIGIGNSDQE

SEQ ID NO: 23102 - protein, 107 aa, Homo sapiens
  MOD_RES (18)..(18): Selenocysteine
  MOD_RES (33)..(33): Selenocysteine
MAWIKRKFGERPPPKRLXREAMRNYLKERGDQXVLILHAKVAQKSYGNEKRFFCPPPCVYLMGSGWKKKKEQMERDGCSEQESQPCAFIGIGNSDQEMQQLNLEGKN

SEQ ID NO: 23103 - protein, 110 aa, Homo sapiens
  MOD_RES (18)..(18): Selenocysteine
  MOD_RES (33)..(33): Selenocysteine
  MOD_RES (110)..(110): Selenocysteine
MAWIKRKFGERPPPKRLXREAMRNYLKERGDQXVLILHAKVAQKSYGNEKRFFCPPPCVYLMGSGWKKKKEQMERDGCSEQESQPCAFIGIGNSDQEMQQLNLEGKNYCX

SEQ ID NO: 23104 - protein, 113 aa, Homo sapiens
  MOD_RES (18)..(18): Selenocysteine
  MOD_RES (33)..(33): Selenocysteine
  MOD_RES (110)..(110): Selenocysteine
  MOD_RES (113)..(113): Selenocysteine
MAWIKRKFGERPPPKRLXREAMRNYLKERGDQXVLILHAKVAQKSYGNEKRFFCPPPCVYLMGSGWKKKKEQMERDGCSEQESQPCAFIGIGNSDQEMQQLNLEGKNYCXAKX

SEQ ID NO: 23105 - protein, 382 aa, Homo sapiens
  MOD_RES (18)..(18): Selenocysteine
  MOD_RES (33)..(33): Selenocysteine
  MOD_RES (110)..(110): Selenocysteine
  MOD_RES (113)..(113): Selenocysteine
  MOD_RES (171)..(171): Selenocysteine
  MOD_RES (183)..(183): Selenocysteine
  MOD_RES (186)..(186): Selenocysteine
  MOD_RES (222)..(222): Selenocysteine
  MOD_RES (233)..(233): Selenocysteine
  MOD_RES (241)..(241): Selenocysteine
  MOD_RES (257)..(257): Selenocysteine
  MOD_RES (279)..(279): Selenocysteine
  MOD_RES (297)..(297): Selenocysteine
  MOD_RES (315)..(315): Selenocysteine
  MOD_RES (319)..(319): Selenocysteine
  MOD_RES (325)..(325): Selenocysteine
  MOD_RES (338)..(338): Selenocysteine
  MOD_RES (372)..(372): Selenocysteine
MAWIKRKFGERPPPKRLXREAMRNYLKERGDQXVLILHAKVAQKSYGNEKRFFCPPPCVYLMGSGWKKKKEQMERDGCSEQESQPCAFIGIGNSDQEMQQLNLEGKNYCXAKXLYISDSDKRKHFMLSVKMFYGNSDDIGVFLSKRIKVISKPSKKKQSLKNADLCIASGXKVALFNRLRSQXVSXRYLHVEGGNFHASSQQWGAFFIHLLDDDESEGEEFXVRDGYIHYGQXVKLVCSVXGMALPRLIIRKVDKQXALLDADDPVSQLHKCAFYLKDXERMYLCLSQERIIQFQAXPCPKEPNKEMINDGASWXIISXDKAEYXFYEGMGPVLAPVXPVPVVESLQVWREYALCRPRHFCIPRRLEMGPAXSPGSSNFGPK

SEQ ID NO: 23106 - protein, 486 aa, Homo sapiens
  MOD_RES (18)..(18): Selenocysteine
  MOD_RES (33)..(33): Selenocysteine
  MOD_RES (110)..(110): Selenocysteine
  MOD_RES (113)..(113): Selenocysteine
  MOD_RES (171)..(171): Selenocysteine
  MOD_RES (183)..(183): Selenocysteine
  MOD_RES (186)..(186): Selenocysteine
  MOD_RES (222)..(222): Selenocysteine
  MOD_RES (233)..(233): Selenocysteine
  MOD_RES (241)..(241): Selenocysteine
  MOD_RES (257)..(257): Selenocysteine
  MOD_RES (279)..(279): Selenocysteine
  MOD_RES (297)..(297): Selenocysteine
  MOD_RES (315)..(315): Selenocysteine
  MOD_RES (319)..(319): Selenocysteine
  MOD_RES (325)..(325): Selenocysteine
  MOD_RES (338)..(338): Selenocysteine
  MOD_RES (360)..(360): Selenocysteine
  MOD_RES (365)..(365): Selenocysteine
  MOD_RES (379)..(379): Selenocysteine
  MOD_RES (413)..(413): Selenocysteine
  MOD_RES (424)..(424): Selenocysteine
  MOD_RES (427)..(427): Selenocysteine
  MOD_RES (429)..(429): Selenocysteine
  MOD_RES (431)..(431): Selenocysteine
  MOD_RES (461)..(461): Selenocysteine
  MOD_RES (468)..(468): Selenocysteine
  MOD_RES (472)..(472): Selenocysteine
  MOD_RES (475)..(475): Selenocysteine
  MOD_RES (478)..(478): Selenocysteine
  MOD_RES (481)..(481): Selenocysteine
  MOD_RES (483)..(483): Selenocysteine
MAWIKRKFGERPPPKRLXREAMRNYLKERGDQXVLILHAKVAQKSYGNEKRFFCPPPCVYLMGSGWKKKKEQMERDGCSEQESQPCAFIGIGNSDQEMQQLNLEGKNYCXAKXLYISDSDKRKHFMLSVKMFYGNSDDIGVFLSKRIKVISKPSKKKQSLKNADLCIASGXKVALFNRLRSQXVSXRYLHVEGGNFHASSQQWGAFFIHLLDDDESEGEEFXVRDGYIHYGQXVKLVCSVXGMALPRLIIRKVDKQXALLDADDPVSQLHKCAFYLKDXERMYLCLSQERIIQFQAXPCPKEPNKEMINDGASWXIISXDKAEYXFYEGMGPVLAPVXPVPVVESLQLNGGGDVAMLELXGQNFXPNLRVWFGDVEAEXMYRCGESMLCVVPDISAFREGWRWVRQPVQVPVXLVRNDGIIYSXSLXFXYXPEPGPRPHCSAAGAILRANSSQVPPNESNXNSEGSYXNASXNSXSVXSSXAXVVS

SEQ ID NO: 23107 - protein, 178 aa, Homo sapiens
  MOD_RES (4)..(4): Selenocysteine
  MOD_RES (32)..(32): Selenocysteine
  MOD_RES (47)..(47): Selenocysteine
  MOD_RES (124)..(124): Selenocysteine
  MOD_RES (127)..(127): Selenocysteine
MDHXEGSPAEEPPAHAPSPGKFGERPPPKRLXREAMRNYLKERGDQXVLILHAKVAQKSYGNEKRFFCPPPCVYLMGSGWKKKKEQMERDGCSEQESQPCAFIGIGNSDQEMQQLNLEGKNYCXAKXLYISDSDKRKHFMLSVKMFYGNSDDIGVFLSKRIKVISKPSKKKQSLKNAD

SEQ ID NO: 23108 - protein, 500 aa, Homo sapiens
  MOD_RES (4)..(4): Selenocysteine
  MOD_RES (32)..(32): Selenocysteine
  MOD_RES (47)..(47): Selenocysteine
  MOD_RES (124)..(124): Selenocysteine
  MOD_RES (127)..(127): Selenocysteine
  MOD_RES (185)..(185): Selenocysteine
  MOD_RES (197)..(197): Selenocysteine
  MOD_RES (200)..(200): Selenocysteine
  MOD_RES (236)..(236): Selenocysteine
  MOD_RES (247)..(247): Selenocysteine
  MOD_RES (255)..(255): Selenocysteine
  MOD_RES (271)..(271): Selenocysteine
  MOD_RES (293)..(293): Selenocysteine
  MOD_RES (311)..(311): Selenocysteine
  MOD_RES (329)..(329): Selenocysteine
  MOD_RES (333)..(333): Selenocysteine
  MOD_RES (339)..(339): Selenocysteine
  MOD_RES (352)..(352): Selenocysteine
  MOD_RES (374)..(374): Selenocysteine
  MOD_RES (379)..(379): Selenocysteine
  MOD_RES (393)..(393): Selenocysteine
  MOD_RES (427)..(427): Selenocysteine
  MOD_RES (438)..(438): Selenocysteine
  MOD_RES (441)..(441): Selenocysteine
  MOD_RES (443)..(443): Selenocysteine
  MOD_RES (445)..(445): Selenocysteine
  MOD_RES (475)..(475): Selenocysteine
  MOD_RES (482)..(482): Selenocysteine
  MOD_RES (486)..(486): Selenocysteine
  MOD_RES (489)..(489): Selenocysteine
  MOD_RES (492)..(492): Selenocysteine
  MOD_RES (495)..(495): Selenocysteine
  MOD_RES (497)..(497): Selenocysteine
MDHXEGSPAEEPPAHAPSPGKFGERPPPKRLXREAMRNYLKERGDQXVLILHAKVAQKSYGNEKRFFCPPPCVYLMGSGWKKKKEQMERDGCSEQESQPCAFIGIGNSDQEMQQLNLEGKNYCXAKXLYISDSDKRKHFMLSVKMFYGNSDDIGVFLSKRIKVISKPSKKKQSLKNADLCIASGXKVALFNRLRSQXVSXRYLHVEGGNFHASSQQWGAFFIHLLDDDESEGEEFXVRDGYIHYGQXVKLVCSVXGMALPRLIIRKVDKQXALLDADDPVSQLHKCAFYLKDXERMYLCLSQERIIQFQAXPCPKEPNKEMINDGASWXIISXDKAEYXFYEGMGPVLAPVXPVPVVESLQLNGGGDVAMLELXGQNFXPNLRVWFGDVEAEXMYRCGESMLCVVPDISAFREGWRWVRQPVQVPVXLVRNDGIIYSXSLXFXYXPEPGPRPHCSAAGAILRANSSQVPPNESNXNSEGSYXNASXNSXSVXSSXAXVVS

SEQ ID NO: 23109 - protein, 485 aa, Homo sapiens
  MOD_RES (17)..(17): Selenocysteine
  MOD_RES (32)..(32): Selenocysteine
  MOD_RES (109)..(109): Selenocysteine
  MOD_RES (112)..(112): Selenocysteine
  MOD_RES (170)..(170): Selenocysteine
  MOD_RES (182)..(182): Selenocysteine
  MOD_RES (185)..(185): Selenocysteine
  MOD_RES (221)..(221): Selenocysteine
  MOD_RES (232)..(232): Selenocysteine
  MOD_RES (240)..(240): Selenocysteine
  MOD_RES (256)..(256): Selenocysteine
  MOD_RES (278)..(278): Selenocysteine
  MOD_RES (296)..(296): Selenocysteine
  MOD_RES (314)..(314): Selenocysteine
  MOD_RES (318)..(318): Selenocysteine
  MOD_RES (324)..(324): Selenocysteine
  MOD_RES (337)..(337): Selenocysteine
  MOD_RES (359)..(359): Selenocysteine
  MOD_RES (364)..(364): Selenocysteine
  MOD_RES (378)..(378): Selenocysteine
  MOD_RES (412)..(412): Selenocysteine
  MOD_RES (423)..(423): Selenocysteine
  MOD_RES (426)..(426): Selenocysteine
  MOD_RES (428)..(428): Selenocysteine
  MOD_RES (430)..(430): Selenocysteine
  MOD_RES (460)..(460): Selenocysteine
  MOD_RES (467)..(467): Selenocysteine
  MOD_RES (471)..(471): Selenocysteine
  MOD_RES (474)..(474): Selenocysteine
  MOD_RES (477)..(477): Selenocysteine
  MOD_RES (480)..(480): Selenocysteine
  MOD_RES (482)..(482): Selenocysteine
MGGCRKFGERPPPKRLXREAMRNYLKERGDQXVLILHAKVAQKSYGNEKRFFCPPPCVYLMGSGWKKKKEQMERDGCSEQESQPCAFIGIGNSDQEMQQLNLEGKNYCXAKXLYISDSDKRKHFMLSVKMFYGNSDDIGVFLSKRIKVISKPSKKKQSLKNADLCIASGXKVALFNRLRSQXVSXRYLHVEGGNFHASSQQWGAFFIHLLDDDESEGEEFXVRDGYIHYGQXVKLVCSVXGMALPRLIIRKVDKQXALLDADDPVSQLHKCAFYLKDXERMYLCLSQERIIQFQAXPCPKEPNKEMINDGASWXIISXDKAEYXFYEGMGPVLAPVXPVPVVESLQLNGGGDVAMLELXGQNFXPNLRVWFGDVEAEXMYRCGESMLCVVPDISAFREGWRWVRQPVQVPVXLVRNDGIIYSXSLXFXYXPEPGPRPHCSAAGAILRANSSQVPPNESNXNSEGSYXNASXNSXSVXSSXAXVVS

SEQ ID NO: 23110 - protein, 230 aa, Homo sapiens
  MOD_RES (21)..(21): Selenocysteine
  MOD_RES (28)..(28): Selenocysteine
  MOD_RES (37)..(37): Selenocysteine
  MOD_RES (41)..(41): Selenocysteine
  MOD_RES (55)..(55): Selenocysteine
  MOD_RES (70)..(70): Selenocysteine
  MOD_RES (147)..(147): Selenocysteine
  MOD_RES (150)..(150): Selenocysteine
  MOD_RES (208)..(208): Selenocysteine
  MOD_RES (220)..(220): Selenocysteine
  MOD_RES (223)..(223): Selenocysteine
MNLHFVFIFSKVIHSSWFLNXCLKIGLXFLCPWGAPXIFEXMRKFGERPPPKRLXREAMRNYLKERGDQXVLILHAKVAQKSYGNEKRFFCPPPCVYLMGSGWKKKKEQMERDGCSEQESQPCAFIGIGNSDQEMQQLNLEGKNYCXAKXLYISDSDKRKHFMLSVKMFYGNSDDIGVFLSKRIKVISKPSKKKQSLKNADLCIASGXKVALFNRLRSQXVSXRYLHVEG

SEQ ID NO: 23111 - protein, 143 aa, Homo sapiens
  MOD_RES (12)..(12): Selenocysteine
  MOD_RES (89)..(89): Selenocysteine
  MOD_RES (92)..(92): Selenocysteine
MRNYLKERGDQXVLILHAKVAQKSYGNEKRFFCPPPCVYLMGSGWKKKKEQMERDGCSEQESQPCAFIGIGNSDQEMQQLNLEGKNYCXAKXLYISDSDKRKHFMLSVKMFYGNSDDIGVFLSKRIKVISKPSKKKQSLKNAD

SEQ ID NO: 23112 - protein, 157 aa, Homo sapiens
  MOD_RES (12)..(12): Selenocysteine
  MOD_RES (89)..(89): Selenocysteine
  MOD_RES (92)..(92): Selenocysteine
  MOD_RES (150)..(150): Selenocysteine
MRNYLKERGDQXVLILHAKVAQKSYGNEKRFFCPPPCVYLMGSGWKKKKEQMERDGCSEQESQPCAFIGIGNSDQEMQQLNLEGKNYCXAKXLYISDSDKRKHFMLSVKMFYGNSDDIGVFLSKRIKVISKPSKKKQSLKNADLCIASGXKVALFNR

SEQ ID NO: 23113 - protein, 189 aa, Homo sapiens
  MOD_RES (12)..(12): Selenocysteine
  MOD_RES (89)..(89): Selenocysteine
  MOD_RES (92)..(92): Selenocysteine
  MOD_RES (150)..(150): Selenocysteine
  MOD_RES (162)..(162): Selenocysteine
  MOD_RES (165)..(165): Selenocysteine
MRNYLKERGDQXVLILHAKVAQKSYGNEKRFFCPPPCVYLMGSGWKKKKEQMERDGCSEQESQPCAFIGIGNSDQEMQQLNLEGKNYCXAKXLYISDSDKRKHFMLSVKMFYGNSDDIGVFLSKRIKVISKPSKKKQSLKNADLCIASGXKVALFNRLRSQXVSXRYLHVEGGNFHASSQQWGAFFIHL

SEQ ID NO: 23114 - protein, 465 aa, Homo sapiens
  MOD_RES (12)..(12): Selenocysteine
  MOD_RES (89)..(89): Selenocysteine
  MOD_RES (92)..(92): Selenocysteine
  MOD_RES (150)..(150): Selenocysteine
  MOD_RES (162)..(162): Selenocysteine
  MOD_RES (165)..(165): Selenocysteine
  MOD_RES (201)..(201): Selenocysteine
  MOD_RES (212)..(212): Selenocysteine
  MOD_RES (220)..(220): Selenocysteine
  MOD_RES (236)..(236): Selenocysteine
  MOD_RES (258)..(258): Selenocysteine
  MOD_RES (276)..(276): Selenocysteine
  MOD_RES (294)..(294): Selenocysteine
  MOD_RES (298)..(298): Selenocysteine
  MOD_RES (304)..(304): Selenocysteine
  MOD_RES (317)..(317): Selenocysteine
  MOD_RES (339)..(339): Selenocysteine
  MOD_RES (344)..(344): Selenocysteine
  MOD_RES (358)..(358): Selenocysteine
  MOD_RES (392)..(392): Selenocysteine
  MOD_RES (403)..(403): Selenocysteine
  MOD_RES (406)..(406): Selenocysteine
  MOD_RES (408)..(408): Selenocysteine
  MOD_RES (410)..(410): Selenocysteine
  MOD_RES (440)..(440): Selenocysteine
  MOD_RES (447)..(447): Selenocysteine
  MOD_RES (451)..(451): Selenocysteine
  MOD_RES (454)..(454): Selenocysteine
  MOD_RES (457)..(457): Selenocysteine
  MOD_RES (460)..(460): Selenocysteine
  MOD_RES (462)..(462): Selenocysteine
MRNYLKERGDQXVLILHAKVAQKSYGNEKRFFCPPPCVYLMGSGWKKKKEQMERDGCSEQESQPCAFIGIGNSDQEMQQLNLEGKNYCXAKXLYISDSDKRKHFMLSVKMFYGNSDDIGVFLSKRIKVISKPSKKKQSLKNADLCIASGXKVALFNRLRSQXVSXRYLHVEGGNFHASSQQWGAFFIHLLDDDESEGEEFXVRDGYIHYGQXVKLVCSVXGMALPRLIIRKVDKQXALLDADDPVSQLHKCAFYLKDXERMYLCLSQERIIQFQAXPCPKEPNKEMINDGASWXIISXDKAEYXFYEGMGPVLAPVXPVPVVESLQLNGGGDVAMLELXGQNFXPNLRVWFGDVEAEXMYRCGESMLCVVPDISAFREGWRWVRQPVQVPVXLVRNDGIIYSXSLXFXYXPEPGPRPHCSAAGAILRANSSQVPPNESNXNSEGSYXNASXNSXSVXSSXAXVVS

SEQ ID NO: 23115 - protein, 471 aa, Homo sapiens
  MOD_RES (17)..(17): Selenocysteine
  MOD_RES (41)..(41): Selenocysteine
  MOD_RES (43)..(43): Selenocysteine
  MOD_RES (50)..(51): Selenocysteine
  MOD_RES (68)..(68): Selenocysteine
  MOD_RES (116)..(116): Selenocysteine
  MOD_RES (119)..(119): Selenocysteine
  MOD_RES (134)..(134): Selenocysteine
  MOD_RES (136)..(136): Selenocysteine
  MOD_RES (155)..(155): Selenocysteine
  MOD_RES (183)..(183): Selenocysteine
  MOD_RES (205)..(205): Selenocysteine
  MOD_RES (225)..(225): Selenocysteine
  MOD_RES (228)..(228): Selenocysteine
  MOD_RES (249)..(249): Selenocysteine
  MOD_RES (280)..(280): Selenocysteine
  MOD_RES (282)..(282): Selenocysteine
  MOD_RES (285)..(285): Selenocysteine
  MOD_RES (327)..(327): Selenocysteine
  MOD_RES (333)..(333): Selenocysteine
  MOD_RES (360)..(360): Selenocysteine
  MOD_RES (364)..(364): Selenocysteine
  MOD_RES (373)..(373): Selenocysteine
  MOD_RES (378)..(378): Selenocysteine
  MOD_RES (383)..(383): Selenocysteine
  MOD_RES (390)..(390): Selenocysteine
  MOD_RES (401)..(401): Selenocysteine
  MOD_RES (424)..(424): Selenocysteine
MDPAGAADPSVPPNPLXHLSLQDRSEMQLQSEADRRSLPGXWXRSSPEHXXILRGGVRRCLQQQCEQXVRILHAKVAQKSYGNEKRFFCPPPCVYLSGPGWRVKPGQDQAHQAGEXGPXVCGYMGLDSASGSAXEXQKLNFEQQPDSREFGCAKXLYISDADKRKHFRLVLRLVLRGGRELGXFHSRLIKVISKPSQKKQSLKNXDLCISSGSKVSLFNRLRSQXVSXRYLSVEDGAFVASARQWAAFXLHLADGHSAQGDFPPREGYVRYGSLVQLVCXVXGIXLPPMIIRKVAKQCALLDVDEPISQLHKCAFQFPGSPPGGGGXYLCLAXEKVVQFQASPCPKEANRALLNDSSCWXIIGXESVEFSFSXSLACXLEPVXPVPLISXLELSGGGDVAXLELHGENFHAGLKVWFGDVEAEXMYRYGVEPAVPGVRGAGRGGLLQRLALAARSHHNPHEPGARRRALLP

SEQ ID NO: 23116 - protein, 516 aa, Homo sapiens
  MOD_RES (17)..(17): Selenocysteine
  MOD_RES (41)..(41): Selenocysteine
  MOD_RES (43)..(43): Selenocysteine
  MOD_RES (50)..(51): Selenocysteine
  MOD_RES (68)..(68): Selenocysteine
  MOD_RES (116)..(116): Selenocysteine
  MOD_RES (119)..(119): Selenocysteine
  MOD_RES (134)..(134): Selenocysteine
  MOD_RES (136)..(136): Selenocysteine
  MOD_RES (155)..(155): Selenocysteine
  MOD_RES (183)..(183): Selenocysteine
  MOD_RES (205)..(205): Selenocysteine
  MOD_RES (225)..(225): Selenocysteine
  MOD_RES (228)..(228): Selenocysteine
  MOD_RES (249)..(249): Selenocysteine
  MOD_RES (280)..(280): Selenocysteine
  MOD_RES (282)..(282): Selenocysteine
  MOD_RES (285)..(285): Selenocysteine
  MOD_RES (327)..(327): Selenocysteine
  MOD_RES (333)..(333): Selenocysteine
  MOD_RES (360)..(360): Selenocysteine
  MOD_RES (364)..(364): Selenocysteine
  MOD_RES (373)..(373): Selenocysteine
  MOD_RES (378)..(378): Selenocysteine
  MOD_RES (383)..(383): Selenocysteine
  MOD_RES (390)..(390): Selenocysteine
  MOD_RES (401)..(401): Selenocysteine
  MOD_RES (424)..(424): Selenocysteine
  MOD_RES (453)..(453): Selenocysteine
  MOD_RES (473)..(473): Selenocysteine
  MOD_RES (475)..(475): Selenocysteine
  MOD_RES (492)..(492): Selenocysteine
  MOD_RES (506)..(506): Selenocysteine
  MOD_RES (508)..(508): Selenocysteine
  MOD_RES (516)..(516): Selenocysteine
MDPAGAADPSVPPNPLXHLSLQDRSEMQLQSEADRRSLPGXWXRSSPEHXXILRGGVRRCLQQQCEQXVRILHAKVAQKSYGNEKRFFCPPPCVYLSGPGWRVKPGQDQAHQAGEXGPXVCGYMGLDSASGSAXEXQKLNFEQQPDSREFGCAKXLYISDADKRKHFRLVLRLVLRGGRELGXFHSRLIKVISKPSQKKQSLKNXDLCISSGSKVSLFNRLRSQXVSXRYLSVEDGAFVASARQWAAFXLHLADGHSAQGDFPPREGYVRYGSLVQLVCXVXGIXLPPMIIRKVAKQCALLDVDEPISQLHKCAFQFPGSPPGGGGXYLCLAXEKVVQFQASPCPKEANRALLNDSSCWXIIGXESVEFSFSXSLACXLEPVXPVPLISXLELSGGGDVAXLELHGENFHAGLKVWFGDVEAEXMYSPRSLVCVVPDVAAFCSDWRWLRAPIXIPMSLVRADGLFYPSAFSFXYXPEYSVRPGHPGVPEPAXDADALLESIHQEFXRXNFHLFIQX

SEQ ID NO: 23117 - protein, 517 aa, Homo sapiens
  MOD_RES (17)..(17): Selenocysteine
  MOD_RES (41)..(41): Selenocysteine
  MOD_RES (43)..(43): Selenocysteine
  MOD_RES (50)..(51): Selenocysteine
  MOD_RES (68)..(68): Selenocysteine
  MOD_RES (116)..(116): Selenocysteine
  MOD_RES (119)..(119): Selenocysteine
  MOD_RES (134)..(134): Selenocysteine
  MOD_RES (136)..(136): Selenocysteine
  MOD_RES (155)..(155): Selenocysteine
  MOD_RES (183)..(183): Selenocysteine
  MOD_RES (205)..(205): Selenocysteine
  MOD_RES (225)..(225): Selenocysteine
  MOD_RES (228)..(228): Selenocysteine
  MOD_RES (249)..(249): Selenocysteine
  MOD_RES (280)..(280): Selenocysteine
  MOD_RES (282)..(282): Selenocysteine
  MOD_RES (285)..(285): Selenocysteine
  MOD_RES (327)..(327): Selenocysteine
  MOD_RES (333)..(333): Selenocysteine
  MOD_RES (360)..(360): Selenocysteine
  MOD_RES (364)..(364): Selenocysteine
  MOD_RES (373)..(373): Selenocysteine
  MOD_RES (378)..(378): Selenocysteine
  MOD_RES (383)..(383): Selenocysteine
  MOD_RES (390)..(390): Selenocysteine
  MOD_RES (401)..(401): Selenocysteine
  MOD_RES (424)..(424): Selenocysteine
  MOD_RES (454)..(454): Selenocysteine
  MOD_RES (474)..(474): Selenocysteine
  MOD_RES (476)..(476): Selenocysteine
  MOD_RES (493)..(493): Selenocysteine
  MOD_RES (507)..(507): Selenocysteine
  MOD_RES (509)..(509): Selenocysteine
  MOD_RES (517)..(517): Selenocysteine
MDPAGAADPSVPPNPLXHLSLQDRSEMQLQSEADRRSLPGXWXRSSPEHXXILRGGVRRCLQQQCEQXVRILHAKVAQKSYGNEKRFFCPPPCVYLSGPGWRVKPGQDQAHQAGEXGPXVCGYMGLDSASGSAXEXQKLNFEQQPDSREFGCAKXLYISDADKRKHFRLVLRLVLRGGRELGXFHSRLIKVISKPSQKKQSLKNXDLCISSGSKVSLFNRLRSQXVSXRYLSVEDGAFVASARQWAAFXLHLADGHSAQGDFPPREGYVRYGSLVQLVCXVXGIXLPPMIIRKVAKQCALLDVDEPISQLHKCAFQFPGSPPGGGGXYLCLAXEKVVQFQASPCPKEANRALLNDSSCWXIIGXESVEFSFSXSLACXLEPVXPVPLISXLELSGGGDVAXLELHGENFHAGLKVWFGDVEAEXMYRSPRSLVCVVPDVAAFCSDWRWLRAPIXIPMSLVRADGLFYPSAFSFXYXPEYSVRPGHPGVPEPAXDADALLESIHQEFXRXNFHLFIQX

SEQ ID NO: 23118 - protein, 184 aa, Homo sapiens
  MOD_RES (1)..(1): Any amino acid
  MOD_RES (28)..(28): Selenocysteine
  MOD_RES (30)..(30): Selenocysteine
  MOD_RES (33)..(33): Selenocysteine
  MOD_RES (75)..(75): Selenocysteine
  MOD_RES (81)..(81): Selenocysteine
XDGHSAQGDFPPREGYVRYGSLVQLVCXVXGIXLPPMIIRKVAKQCALLDVDEPISQLHKCAFQFPGSPPGGGGXYLCLAXEKVVQFQHQPGVYPGAGHSGASHQHPRAERRGRRGHAGAPRRELPRGAQGVVWGRGGRNHVQEPAVPGVRGAGRGGLLQRLALAARSHHNPHEPGARRRALLP

SEQ ID NO: 23119 - protein, 98 aa, Homo sapiens
  MOD_RES (9)..(9): Selenocysteine
  MOD_RES (51)..(52): Selenocysteine
  MOD_RES (55)..(55): Selenocysteine
  MOD_RES (64)..(64): Selenocysteine
  MOD_RES (67)..(67): Selenocysteine
  MOD_RES (69)..(69): Selenocysteine
  MOD_RES (87)..(88): Selenocysteine
MAKSKLMAXPNPSNVHPALGAHFIARDPYDLMGAALIPASPEAWAPYPLYXXELXPAISHAAFXYPXAXAAAAALHAQVRWYPSSDXXQQGWKYRQFC

SEQ ID NO: 23120 - protein, 209 aa, Homo sapiens
  MOD_RES (14)..(14): Selenocysteine
  MOD_RES (16)..(16): Selenocysteine
  MOD_RES (32)..(32): Selenocysteine
  MOD_RES (65)..(65): Selenocysteine
  MOD_RES (100)..(100): Selenocysteine
  MOD_RES (110)..(110): Selenocysteine
  MOD_RES (120)..(120): Selenocysteine
  MOD_RES (162)..(163): Selenocysteine
  MOD_RES (166)..(166): Selenocysteine
  MOD_RES (175)..(175): Selenocysteine
  MOD_RES (178)..(178): Selenocysteine
  MOD_RES (180)..(180): Selenocysteine
  MOD_RES (198)..(199): Selenocysteine
MSNLKPDGEHGGSXGXGSGAGSGGALEEEVRXLFVSGLPVDIKPRELYLLFRPFKGYEGSLIKLXARQPVGFVIFDSRAGAEAAKNALNGIRFDPENPQXLRLEFAKANXKMAKSKLMAXPNPSNVHPALGAHFIARDPYDLMGAALIPASPEAWAPYPLYXXELXPAISHAAFXYPXAXAAAAALHAQVRWYPSSDXXQQGWKYRQFC

SEQ ID NO: 23121 - protein, 108 aa, Homo sapiens
  MOD_RES (9)..(9): Selenocysteine
  MOD_RES (13)..(13): Selenocysteine
  MOD_RES (64)..(64): Selenocysteine
  MOD_RES (69)..(69): Selenocysteine
  MOD_RES (90)..(90): Selenocysteine
MAAAMDVDXPSGXNSGAGKKRFEVKKWNAVALWAWDIVVDNCAICRNHIMDLCIECQANQASAXSEECXVAWGVCNHAFHFHCISRWLKXRQVCPLDNREWEFQKYGH

SEQ ID NO: 23122 - protein, 1125 aa, Homo sapiens
  MOD_RES (9)..(9): Selenocysteine
  MOD_RES (18)..(18): Selenocysteine
  MOD_RES (20)..(20): Selenocysteine
  MOD_RES (24)..(24): Selenocysteine
  MOD_RES (36)..(36): Selenocysteine
  MOD_RES (55)..(56): Selenocysteine
  MOD_RES (59)..(59): Selenocysteine
  MOD_RES (85)..(85): Selenocysteine
  MOD_RES (93)..(93): Selenocysteine
  MOD_RES (124)..(125): Selenocysteine
  MOD_RES (139)..(139): Selenocysteine
  MOD_RES (165)..(165): Selenocysteine
  MOD_RES (167)..(167): Selenocysteine
  MOD_RES (240)..(240): Selenocysteine
  MOD_RES (258)..(258): Selenocysteine
  MOD_RES (275)..(275): Selenocysteine
  MOD_RES (326)..(326): Selenocysteine
  MOD_RES (338)..(338): Selenocysteine
  MOD_RES (344)..(344): Selenocysteine
  MOD_RES (373)..(373): Selenocysteine
  MOD_RES (386)..(386): Selenocysteine
  MOD_RES (416)..(416): Selenocysteine
  MOD_RES (435)..(435): Selenocysteine
  MOD_RES (500)..(500): Selenocysteine
  MOD_RES (503)..(503): Selenocysteine
  MOD_RES (505)..(505): Selenocysteine
  MOD_RES (512)..(512): Selenocysteine
  MOD_RES (571)..(571): Selenocysteine
  MOD_RES (589)..(589): Selenocysteine
  MOD_RES (615)..(615): Selenocysteine
  MOD_RES (657)..(657): Selenocysteine
  MOD_RES (682)..(682): Selenocysteine
  MOD_RES (726)..(726): Selenocysteine
  MOD_RES (781)..(781): Selenocysteine
  MOD_RES (785)..(785): Selenocysteine
  MOD_RES (817)..(817): Selenocysteine
  MOD_RES (824)..(824): Selenocysteine
  MOD_RES (862)..(862): Selenocysteine
  MOD_RES (875)..(875): Selenocysteine
  MOD_RES (885)..(885): Selenocysteine
  MOD_RES (888)..(888): Selenocysteine
  MOD_RES (906)..(906): Selenocysteine
  MOD_RES (919)..(919): Selenocysteine
  MOD_RES (981)..(981): Selenocysteine
  MOD_RES (992)..(992): Selenocysteine
  MOD_RES (1031)..(1031): Selenocysteine
  MOD_RES (1050)..(1050): Selenocysteine
  MOD_RES (1071)..(1071): Selenocysteine
  MOD_RES (1073)..(1073): Selenocysteine
  MOD_RES (1085)..(1085): Selenocysteine
  MOD_RES (1096)..(1096): Selenocysteine
  MOD_RES (1120)..(1120): Selenocysteine
MPVQAPQWXDFLSCPICXQXFDEXIRKPISLGCGHXVCKMCLNKLHRKACPFDQXXINXDIELLPVNSALLQLVGAQVPEQQPIXLCSGVEDXKHYEEAKKCVEELALYLKPLSSARGVGLNSXXQSVLSRPMQRKLVXLVHCQLVEEEGRIRAMRAARSLGERXVXELILQHQNPQQLSSNLWAAVRARGCQFLGPAMQEEALKLVLLALEDGSALSRKVLVLFVVQRLEPRFPQASKXSIGHVVQLLYRASCFKVXKRDEDSSLMQLKEEFRXYEALRREHDSQIVQIAMEAGLRIAPDQWSSLLYGDQSHKSHMQSIIDKLQXPASFAQSVQELXIALQRXGDPANLNRLRPHLELLANIDPSPDAPPPXWEQLENGLVAVRXVVHGLVDYIQNHSKKGADQQQPPQHSKYKXYMCRDMKQRGGCPRGASCXFAHSQEELEKFRKMNKRLVPRRPLSASLGQLNEVGLPSAAILPDEGAVDLPSRKPPALPNGIVSXGNXVXQLIPRGXDPSYDSSLKPGKIDHLSSSAPGSPPDLLESVPKSISALPVNPHSIPPRGPADLPPMPVXKPLQMVPRGSQLYPAQQXDVYYQDPRGAAPPFEPAPYQQGMYYXPPPQCVSRFVRPPPSAPEPAPPYLDHYPPYLQERVVNSQYGXQPQQYPPIYPSHYDGRRVYPAPSYXREEIFRESPIPIEIPPAAVPSYVPESRERYQQIESYYPVAPHPXQIRPSYLREPPYSRLPPPPQPHPSLDELHRRRKEIMAQLEERKVISPPPFAPSPXLPPXFHPEEFLDEDLKVAGKYKGNDYSQYSPWSCDXIGSYIGXKDAKPKDVVAAGSVEMMNVESKGMRDQRLDLQRRAAEXSDDDLIPFGDRPXVSRFGAISRXSKXIYQGAGPMQAMAPQGAPXKSINISDYSPYGXHGGWGASPYSPHQNIPSQGHFSERERISMSEVASHGKPLPSAEREQLRLELQQLNHQISQQXQLRGLEREANXLAGQSQPPPPPPPKWPGMISSEQLSLELHQVEREIGKRXRELSMENQCSLDMKSKLNXSKQAENGQPEPQNKVPAEDLXLXFSSDVPNGSALXQENISLLSNKXSSLNLSEDPEGGGDNNDSQRSGVXPSSAP

SEQ ID NO: 23123 - protein, 1133 aa, Homo sapiens
  MOD_RES (9)..(9): Selenocysteine
  MOD_RES (18)..(18): Selenocysteine
  MOD_RES (20)..(20): Selenocysteine
  MOD_RES (24)..(24): Selenocysteine
  MOD_RES (36)..(36): Selenocysteine
  MOD_RES (55)..(56): Selenocysteine
  MOD_RES (59)..(59): Selenocysteine
  MOD_RES (85)..(85): Selenocysteine
  MOD_RES (93)..(93): Selenocysteine
  MOD_RES (124)..(125): Selenocysteine
  MOD_RES (139)..(139): Selenocysteine
  MOD_RES (165)..(165): Selenocysteine
  MOD_RES (167)..(167): Selenocysteine
  MOD_RES (240)..(240): Selenocysteine
  MOD_RES (258)..(258): Selenocysteine
  MOD_RES (275)..(275): Selenocysteine
  MOD_RES (326)..(326): Selenocysteine
  MOD_RES (338)..(338): Selenocysteine
  MOD_RES (344)..(344): Selenocysteine
  MOD_RES (373)..(373): Selenocysteine
  MOD_RES (386)..(386): Selenocysteine
  MOD_RES (416)..(416): Selenocysteine
  MOD_RES (435)..(435): Selenocysteine
  MOD_RES (500)..(500): Selenocysteine
  MOD_RES (503)..(503): Selenocysteine
  MOD_RES (505)..(505): Selenocysteine
  MOD_RES (512)..(512): Selenocysteine
  MOD_RES (571)..(571): Selenocysteine
  MOD_RES (589)..(589): Selenocysteine
  MOD_RES (615)..(615): Selenocysteine
  MOD_RES (657)..(657): Selenocysteine
  MOD_RES (682)..(682): Selenocysteine
  MOD_RES (726)..(726): Selenocysteine
  MOD_RES (781)..(781): Selenocysteine
  MOD_RES (785)..(785): Selenocysteine
  MOD_RES (817)..(817): Selenocysteine
  MOD_RES (824)..(824): Selenocysteine
  MOD_RES (862)..(862): Selenocysteine
  MOD_RES (875)..(875): Selenocysteine
  MOD_RES (885)..(885): Selenocysteine
  MOD_RES (888)..(888): Selenocysteine
  MOD_RES (906)..(906): Selenocysteine
  MOD_RES (919)..(919): Selenocysteine
  MOD_RES (981)..(981): Selenocysteine
  MOD_RES (1001)..(1001): Selenocysteine
  MOD_RES (1040)..(1040): Selenocysteine
  MOD_RES (1059)..(1059): Selenocysteine
  MOD_RES (1080)..(1080): Selenocysteine
  MOD_RES (1082)..(1082): Selenocysteine
  MOD_RES (1093)..(1093): Selenocysteine
  MOD_RES (1104)..(1104): Selenocysteine
  MOD_RES (1128)..(1128): Selenocysteine
MPVQAPQWXDFLSCPICXQXFDEXIRKPISLGCGHXVCKMCLNKLHRKACPFDQXXINXDIELLPVNSALLQLVGAQVPEQQPIXLCSGVEDXKHYEEAKKCVEELALYLKPLSSARGVGLNSXXQSVLSRPMQRKLVXLVHCQLVEEEGRIRAMRAARSLGERXVXELILQHQNPQQLSSNLWAAVRARGCQFLGPAMQEEALKLVLLALEDGSALSRKVLVLFVVQRLEPRFPQASKXSIGHVVQLLYRASCFKVXKRDEDSSLMQLKEEFRXYEALRREHDSQIVQIAMEAGLRIAPDQWSSLLYGDQSHKSHMQSIIDKLQXPASFAQSVQELXIALQRXGDPANLNRLRPHLELLANIDPSPDAPPPXWEQLENGLVAVRXVVHGLVDYIQNHSKKGADQQQPPQHSKYKXYMCRDMKQRGGCPRGASCXFAHSQEELEKFRKMNKRLVPRRPLSASLGQLNEVGLPSAAILPDEGAVDLPSRKPPALPNGIVSXGNXVXQLIPRGXDPSYDSSLKPGKIDHLSSSAPGSPPDLLESVPKSISALPVNPHSIPPRGPADLPPMPVXKPLQMVPRGSQLYPAQQXDVYYQDPRGAAPPFEPAPYQQGMYYXPPPQCVSRFVRPPPSAPEPAPPYLDHYPPYLQERVVNSQYGXQPQQYPPIYPSHYDGRRVYPAPSYXREEIFRESPIPIEIPPAAVPSYVPESRERYQQIESYYPVAPHPXQIRPSYLREPPYSRLPPPPQPHPSLDELHRRRKEIMAQLEERKVISPPPFAPSPXLPPXFHPEEFLDEDLKVAGKYKGNDYSQYSPWSCDXIGSYIGXKDAKPKDVVAAGSVEMMNVESKGMRDQRLDLQRRAAEXSDDDLIPFGDRPXVSRFGAISRXSKXIYQGAGPMQAMAPQGAPXKSINISDYSPYGXHGGWGASPYSPHQNIPSQGHFSERERISMSEVASHGKPLPSAEREQLRLELQQLNHQISQQXQLRGLEAVSNRLVLQREANXLAGQSQPPPPPPPKWPGMISSEQLSLELHQVEREIGKRXRELSMENQCSLDMKSKLNXSKQAENGQPEPQNKVPAEDLXLXFSDVPNGSALXQENISLLSNKXSSLNLSEDPEGGGDNNDSQRSGVXPSSAP

SEQ ID NO: 23124 - protein, 111 aa, Homo sapiens
  MOD_RES (18)..(18): Selenocysteine
  MOD_RES (22)..(22): Selenocysteine
  MOD_RES (49)..(49): Selenocysteine
  MOD_RES (53)..(54): Selenocysteine
  MOD_RES (60)..(60): Selenocysteine
  MOD_RES (67)..(67): Selenocysteine
  MOD_RES (80)..(80): Selenocysteine
  MOD_RES (87)..(87): Selenocysteine
  MOD_RES (92)..(92): Selenocysteine
  MOD_RES (110)..(110): Selenocysteine
LMDLDSGDVKRRVHLFEXQRRXKEEDPIIPFSDGPIISKWGAISRSSRXGYHXXDPVQAXASQGSAXKPISVSGGVHMAXRPHHQHXMLKGXDSLLLIYLVIESIPVLGXF

SEQ ID NO: 23125 - protein, 478 aa, Homo sapiens
  MOD_RES (9)..(9): Selenocysteine
  MOD_RES (36)..(36): Selenocysteine
  MOD_RES (40)..(40): Selenocysteine
  MOD_RES (55)..(55): Selenocysteine
  MOD_RES (59)..(59): Selenocysteine
  MOD_RES (136)..(136): Selenocysteine
  MOD_RES (162)..(162): Selenocysteine
  MOD_RES (164)..(164): Selenocysteine
  MOD_RES (237)..(237): Selenocysteine
  MOD_RES (255)..(255): Selenocysteine
  MOD_RES (335)..(335): Selenocysteine
  MOD_RES (341)..(341): Selenocysteine
  MOD_RES (370)..(370): Selenocysteine
  MOD_RES (383)..(383): Selenocysteine
  MOD_RES (402)..(402): Selenocysteine
  MOD_RES (413)..(413): Selenocysteine
  MOD_RES (429)..(429): Selenocysteine
  MOD_RES (432)..(432): Selenocysteine
  MOD_RES (453)..(453): Selenocysteine
  MOD_RES (467)..(467): Selenocysteine
  MOD_RES (474)..(474): Selenocysteine
MPVQAAQWXEFLSCPICYNEFDENVHKPISLGCSHXVCKXCLNKLHRKACPFDQXAINXDIDVLPVNFALLQLVGAQVPDHQSIKLSNLGENKHYEVAKKCVEDLALYLKPLSGGKGVASLNQSALSRPMQRKLVXLVNCQLVEEEGRVRAMRAARSLGERXVXELILQHQNPQQLSANLWAAVRARGCQFLGPAMQEEALKLVLLALEDGSALSRKVLVLFVVQRLEPRFPQASKXSIGHVVQLLYRASCFKVXKRDEDSSLMQLKEEFRSYEALRREHDAQIVHIAMEAGLRISPEQWSSLLYGDLAHKSHMQSIIDKLQSPESFAKSVQELXIVLQRXGDPANLNRLRPHLELLANIDPNPDAVSPXWEQLENAMVAVKXVVHGLVDFIQNYSRKGHEXPQPQPNSKYKXSMCRDLRQQGGCPRGXNCXFAHSQEELEKYRLRNKKINAXEVLKQQGKLFQVQXEFQMQKXVFPS

SEQ ID NO: 23126 - protein, 506 aa, Homo sapiens
  MOD_RES (9)..(9): Selenocysteine
  MOD_RES (36)..(36): Selenocysteine
  MOD_RES (40)..(40): Selenocysteine
  MOD_RES (55)..(55): Selenocysteine
  MOD_RES (59)..(59): Selenocysteine
  MOD_RES (136)..(136): Selenocysteine
  MOD_RES (162)..(162): Selenocysteine
  MOD_RES (164)..(164): Selenocysteine
  MOD_RES (237)..(237): Selenocysteine
  MOD_RES (255)..(255): Selenocysteine
  MOD_RES (335)..(335): Selenocysteine
  MOD_RES (341)..(341): Selenocysteine
  MOD_RES (370)..(370): Selenocysteine
  MOD_RES (383)..(383): Selenocysteine
  MOD_RES (402)..(402): Selenocysteine
  MOD_RES (413)..(413): Selenocysteine
  MOD_RES (429)..(429): Selenocysteine
  MOD_RES (432)..(432): Selenocysteine
  MOD_RES (463)..(463): Selenocysteine
  MOD_RES (489)..(489): Selenocysteine
MPVQAAQWXEFLSCPICYNEFDENVHKPISLGCSHXVCKXCLNKLHRKACPFDQXAINXDIDVLPVNFALLQLVGAQVPDHQSIKLSNLGENKHYEVAKKCVEDLALYLKPLSGGKGVASLNQSALSRPMQRKLVXLVNCQLVEEEGRVRAMRAARSLGERXVXELILQHQNPQQLSANLWAAVRARGCQFLGPAMQEEALKLVLLALEDGSALSRKVLVLFVVQRLEPRFPQASKXSIGHVVQLLYRASCFKVXKRDEDSSLMQLKEEFRSYEALRREHDAQIVHIAMEAGLRISPEQWSSLLYGDLAHKSHMQSIIDKLQSPESFAKSVQELXIVLQRXGDPANLNRLRPHLELLANIDPNPDAVSPXWEQLENAMVAVKXVVHGLVDFIQNYSRKGHEXPQPQPNSKYKXSMCRDLRQQGGCPRGXNCXFAHSQEELEKCNPRGLYLHCCLLSSVASLGXVHNELYKQQHCDREKISVCAVKRAEXCFSSQFFSPLEVPREED

SEQ ID NO: 23127 - protein, 1064 aa, Homo sapiens
  MOD_RES (9)..(9): Selenocysteine
  MOD_RES (36)..(36): Selenocysteine
  MOD_RES (40)..(40): Selenocysteine
  MOD_RES (55)..(55): Selenocysteine
  MOD_RES (59)..(59): Selenocysteine
  MOD_RES (136)..(136): Selenocysteine
  MOD_RES (162)..(162): Selenocysteine
  MOD_RES (164)..(164): Selenocysteine
  MOD_RES (237)..(237): Selenocysteine
  MOD_RES (255)..(255): Selenocysteine
  MOD_RES (335)..(335): Selenocysteine
  MOD_RES (341)..(341): Selenocysteine
  MOD_RES (370)..(370): Selenocysteine
  MOD_RES (383)..(383): Selenocysteine
  MOD_RES (402)..(402): Selenocysteine
  MOD_RES (413)..(413): Selenocysteine
  MOD_RES (429)..(429): Selenocysteine
  MOD_RES (432)..(432): Selenocysteine
  MOD_RES (453)..(453): Selenocysteine
  MOD_RES (456)..(456): Selenocysteine
  MOD_RES (468)..(468): Selenocysteine
  MOD_RES (470)..(472): Selenocysteine
  MOD_RES (483)..(483): Selenocysteine
  MOD_RES (485)..(486): Selenocysteine
  MOD_RES (493)..(493): Selenocysteine
  MOD_RES (511)..(511): Selenocysteine
  MOD_RES (514)..(514): Selenocysteine
  MOD_RES (520)..(520): Selenocysteine
  MOD_RES (543)..(543): Selenocysteine
  MOD_RES (553)..(553): Selenocysteine
  MOD_RES (561)..(561): Selenocysteine
  MOD_RES (570)..(570): Selenocysteine
  MOD_RES (584)..(584): Selenocysteine
  MOD_RES (604)..(604): Selenocysteine
  MOD_RES (616)..(616): Selenocysteine
  MOD_RES (624)..(624): Selenocysteine
  MOD_RES (660)..(660): Selenocysteine
  MOD_RES (730)..(730): Selenocysteine
  MOD_RES (755)..(756): Selenocysteine
  MOD_RES (769)..(769): Selenocysteine
  MOD_RES (787)..(787): Selenocysteine
  MOD_RES (796)..(796): Selenocysteine
  MOD_RES (801)..(801): Selenocysteine
  MOD_RES (805)..(805): Selenocysteine
  MOD_RES (826)..(826): Selenocysteine
  MOD_RES (843)..(843): Selenocysteine
  MOD_RES (883)..(883): Selenocysteine
  MOD_RES (887)..(887): Selenocysteine
  MOD_RES (914)..(914): Selenocysteine
  MOD_RES (918)..(919): Selenocysteine
  MOD_RES (925)..(925): Selenocysteine
  MOD_RES (932)..(932): Selenocysteine
  MOD_RES (959)..(959): Selenocysteine
  MOD_RES (973)..(973): Selenocysteine
  MOD_RES (984)..(984): Selenocysteine
  MOD_RES (1025)..(1025): Selenocysteine
MPVQAAQWXEFLSCPICYNEFDENVHKPISLGCSHXVCKXCLNKLHRKACPFDQXAINXDIDVLPVNFALLQLVGAQVPDHQSIKLSNLGENKHYEVAKKCVEDLALYLKPLSGGKGVASLNQSALSRPMQRKLVXLVNCQLVEEEGRVRAMRAARSLGERXVXELILQHQNPQQLSANLWAAVRARGCQFLGPAMQEEALKLVLLALEDGSALSRKVLVLFVVQRLEPRFPQASKXSIGHVVQLLYRASCFKVXKRDEDSSLMQLKEEFRSYEALRREHDAQIVHIAMEAGLRISPEQWSSLLYGDLAHKSHMQSIIDKLQSPESFAKSVQELXIVLQRXGDPANLNRLRPHLELLANIDPNPDAVSPXWEQLENAMVAVKXVVHGLVDFIQNYSRKGHEXPQPQPNSKYKXSMCRDLRQQGGCPRGXNCXFAHSQEELEKYRLRNKKINAXVRXFPLLNKVGVNNXVXXXAGNVISVIGSXEXXGKIVPSXNGISNAENSVSQLISRSXDSXLRALEXVKKVGKVGANGQNAAGPSADSVXENKIGSPPKXPVSNVAAXSAGPSNVGXELNSVPQKSSPFLXRVPVYPPHSENIQYFQDPRXQIPFEVPQYPQXGYYPPPPXVPAGVAPCVPRFVRSNNVPESSLPPASMPYADHYSXFSPRDRMNSSPYQPPPPQPYGPVPPVPSGMYAPVYDSRRIWRPPMYQRDDIIRSNSLPPMDVMHSSVYQXSLRERYNSLDGYYSVACQPPSEPRXXVPLPREPCGHLKXSCEEQIRRKPDQWAQYHXQKAPLVSSXLPVAXQSPXPPSPLFSVDFRADFSESVSGXKFEEDHLSHYSPWSCGXIGSCINAIDSEPKDVIANSNAVLMDLDSGDVKRRVHLFEXQRRXKEEDPIIPFSDGPIISKWGAISRSSRXGYHXXDPVQAXASQGSAXKPISVSDYVPYVNAVDSRWSSYGNEAXSSAHYVERDRFIVXDLSGHRKHSSXGDLLSLELQQAKSNSLLLQREANALAMQQKWNSLDEGRHLXLNLLSKEIELRNGEVKKLNLSASCLMYLFSAAASWLYHY

SEQ ID NO: 23128 - protein, 1191 aa, Homo sapiens
  MOD_RES (9)..(9): Selenocysteine
  MOD_RES (36)..(36): Selenocysteine
  MOD_RES (40)..(40): Selenocysteine
  MOD_RES (55)..(55): Selenocysteine
  MOD_RES (59)..(59): Selenocysteine
  MOD_RES (136)..(136): Selenocysteine
  MOD_RES (162)..(162): Selenocysteine
  MOD_RES (164)..(164): Selenocysteine
  MOD_RES (237)..(237): Selenocysteine
  MOD_RES (255)..(255): Selenocysteine
  MOD_RES (335)..(335): Selenocysteine
  MOD_RES (341)..(341): Selenocysteine
  MOD_RES (370)..(370): Selenocysteine
  MOD_RES (383)..(383): Selenocysteine
  MOD_RES (402)..(402): Selenocysteine
  MOD_RES (413)..(413): Selenocysteine
  MOD_RES (429)..(429): Selenocysteine
  MOD_RES (432)..(432): Selenocysteine
  MOD_RES (453)..(453): Selenocysteine
  MOD_RES (456)..(456): Selenocysteine
  MOD_RES (468)..(468): Selenocysteine
  MOD_RES (470)..(472): Selenocysteine
  MOD_RES (483)..(483): Selenocysteine
  MOD_RES (485)..(486): Selenocysteine
  MOD_RES (493)..(493): Selenocysteine
  MOD_RES (511)..(511): Selenocysteine
  MOD_RES (514)..(514): Selenocysteine
  MOD_RES (520)..(520): Selenocysteine
  MOD_RES (543)..(543): Selenocysteine
  MOD_RES (553)..(553): Selenocysteine
  MOD_RES (561)..(561): Selenocysteine
  MOD_RES (570)..(570): Selenocysteine
  MOD_RES (584)..(584): Selenocysteine
  MOD_RES (604)..(604): Selenocysteine
  MOD_RES (616)..(616): Selenocysteine
  MOD_RES (624)..(624): Selenocysteine
  MOD_RES (660)..(660): Selenocysteine
  MOD_RES (730)..(730): Selenocysteine
  MOD_RES (755)..(756): Selenocysteine
  MOD_RES (769)..(769): Selenocysteine
  MOD_RES (787)..(787): Selenocysteine
  MOD_RES (796)..(796): Selenocysteine
  MOD_RES (801)..(801): Selenocysteine
  MOD_RES (805)..(805): Selenocysteine
  MOD_RES (826)..(826): Selenocysteine
  MOD_RES (843)..(843): Selenocysteine
  MOD_RES (883)..(883): Selenocysteine
  MOD_RES (887)..(887): Selenocysteine
  MOD_RES (914)..(914): Selenocysteine
  MOD_RES (918)..(919): Selenocysteine
  MOD_RES (925)..(925): Selenocysteine
  MOD_RES (932)..(932): Selenocysteine
  MOD_RES (959)..(959): Selenocysteine
  MOD_RES (973)..(973): Selenocysteine
  MOD_RES (984)..(984): Selenocysteine
  MOD_RES (1025)..(1025): Selenocysteine
  MOD_RES (1045)..(1045): Selenocysteine
  MOD_RES (1049)..(1049): Selenocysteine
  MOD_RES (1051)..(1051): Selenocysteine
  MOD_RES (1066)..(1066): Selenocysteine
  MOD_RES (1132)..(1132): Selenocysteine
  MOD_RES (1137)..(1137): Selenocysteine
  MOD_RES (1157)..(1158): Selenocysteine
  MOD_RES (1169)..(1169): Selenocysteine
MPVQAAQWXEFLSCPICYNEFDENVHKPISLGCSHXVCKXCLNKLHRKACPFDQXAINXDIDVLPVNFALLQLVGAQVPDHQSIKLSNLGENKHYEVAKKCVEDLALYLKPLSGGKGVASLNQSALSRPMQRKLVXLVNCQLVEEEGRVRAMRAARSLGERXVXELILQHQNPQQLSANLWAAVRARGCQFLGPAMQEEALKLVLLALEDGSALSRKVLVLFVVQRLEPRFPQASKXSIGHVVQLLYRASCFKVXKRDEDSSLMQLKEEFRSYEALRREHDAQIVHIAMEAGLRISPEQWSSLLYGDLAHKSHMQSIIDKLQSPESFAKSVQELXIVLQRXGDPANLNRLRPHLELLANIDPNPDAVSPXWEQLENAMVAVKXVVHGLVDFIQNYSRKGHEXPQPQPNSKYKXSMCRDLRQQGGCPRGXNCXFAHSQEELEKYRLRNKKINAXVRXFPLLNKVGVNNXVXXXAGNVISVIGSXEXXGKIVPSXNGISNAENSVSQLISRSXDSXLRALEXVKKVGKVGANGQNAAGPSADSVXENKIGSPPKXPVSNVAAXSAGPSNVGXELNSVPQKSSPFLXRVPVYPPHSENIQYFQDPRXQIPFEVPQYPQXGYYPPPPXVPAGVAPCVPRFVRSNNVPESSLPPASMPYADHYSXFSPRDRMNSSPYQPPPPQPYGPVPPVPSGMYAPVYDSRRIWRPPMYQRDDIIRSNSLPPMDVMHSSVYQXSLRERYNSLDGYYSVACQPPSEPRXXVPLPREPCGHLKXSCEEQIRRKPDQWAQYHXQKAPLVSSXLPVAXQSPXPPSPLFSVDFRADFSESVSGXKFEEDHLSHYSPWSCGXIGSCINAIDSEPKDVIANSNAVLMDLDSGDVKRRVHLFEXQRRXKEEDPIIPFSDGPIISKWGAISRSSRXGYHXXDPVQAXASQGSAXKPISVSDYVPYVNAVDSRWSSYGNEAXSSAHYVERDRFIVXDLSGHRKHSSXGDLLSLELQQAKSNSLLLQREANALAMQQKWNSLDEGRHLXLNLLSKEIELRNGELQSDYXEDAXDXKPDRDIELELSALDXDEPDGQSEPIEEILDIQLGISSQNDQLLNGMAVENGHPVQQHQKEPPKQKKQSLGEDHVILEEQKXILPVXSCFSQPLPVSISNASCLPIXXSVSAGNLILKXHVMSEDKNDFLKPVANGKMVNS

SEQ ID NO: 23129 - protein, 218 aa, Homo sapiens
  MOD_RES (9)..(9): Selenocysteine
  MOD_RES (36)..(36): Selenocysteine
  MOD_RES (40)..(40): Selenocysteine
  MOD_RES (55)..(55): Selenocysteine
  MOD_RES (59)..(59): Selenocysteine
  MOD_RES (136)..(136): Selenocysteine
  MOD_RES (162)..(162): Selenocysteine
  MOD_RES (164)..(164): Selenocysteine
  MOD_RES (202)..(202): Selenocysteine
MPVQAAQWXEFLSCPICYNEFDENVHKPISLGCSHXVCKXCLNKLHRKACPFDQXAINXDIDVLPVNFALLQLVGAQVPDHQSIKLSNLGENKHYEVAKKCVEDLALYLKPLSGGKGVASLNQSALSRPMQRKLVXLVNCQLVEEEGRVRAMRAARSLGERXVXELILQHQNPQQLSANLWAAVRARGCQFLGPGKIGYYLXFFISYWGLRMPISGAR

SEQ ID NO: 23130 - protein, 188 aa, Homo sapiens
  MOD_RES (1)..(1): Any amino acid
  MOD_RES (18)..(18): Selenocysteine
  MOD_RES (32)..(32): Selenocysteine
  MOD_RES (43)..(43): Selenocysteine
  MOD_RES (84)..(84): Selenocysteine
  MOD_RES (104)..(104): Selenocysteine
  MOD_RES (108)..(108): Selenocysteine
  MOD_RES (110)..(110): Selenocysteine
  MOD_RES (125)..(125): Selenocysteine
XYVNAVDSRWSSYGNEAXSSAHYVERDRFIVXDLSGHRKHSSXGDLLSLELQQAKSNSLLLQREANALAMQQKWNSLDEGRHLXLNLLSKEIELRNGELQSDYXEDAXDXKPDRDIELELSALDXDEPDGQSEPIEEILDIQLGISSQNDQLLNGMAVENGHPVQQHQKEPPKQKKQSLGRSKKQFCR

SEQ ID NO: 23131 - protein, 252 aa, Homo sapiens
  MOD_RES (29)..(29): Selenocysteine
  MOD_RES (68)..(68): Selenocysteine
  MOD_RES (93)..(93): Selenocysteine
  MOD_RES (99)..(99): Selenocysteine
  MOD_RES (129)..(129): Selenocysteine
  MOD_RES (143)..(143): Selenocysteine
  MOD_RES (179)..(179): Selenocysteine
  MOD_RES (205)..(205): Selenocysteine
  MOD_RES (207)..(208): Selenocysteine
  MOD_RES (241)..(241): Selenocysteine
  MOD_RES (247)..(247): Selenocysteine
MEDGVAGPQLGAAAEAAEAAEARARPGVXLRPFAPLSGAAEADEGGGDWSFIDCEMEEVDLQDLPSAXIACHLDPRVFVDGLCRAKFESLFRXYDKDIXFQYFKSFKRVRINFSNPFSAADARLQLHKXEFLGKEMKLYFAQXLHIGSSHLAPPNPDKQFLISPPASPPVGWKQVEDAXPVINYDLLYAISKLGPGEKYELHAAXDXXPSVVVHVCESDQEKEEEEEMERMRRPKPKIIQXRRPEYXPIHLS

SEQ ID NO: 23132 - protein, 197 aa, Homo sapiens
  MOD_RES (28)..(28): Selenocysteine
  MOD_RES (38)..(38): Selenocysteine
  MOD_RES (44)..(44): Selenocysteine
  MOD_RES (74)..(74): Selenocysteine
  MOD_RES (88)..(88): Selenocysteine
  MOD_RES (124)..(124): Selenocysteine
  MOD_RES (150)..(150): Selenocysteine
  MOD_RES (152)..(153): Selenocysteine
  MOD_RES (186)..(186): Selenocysteine
  MOD_RES (192)..(192): Selenocysteine
MHFRNFNYSFSSLIACVANSDIFSESEXRAKFESLFRXYDKDIXFQYFKSFKRVRINFSNPFSAADARLQLHKXEFLGKEMKLYFAQXLHIGSSHLAPPNPDKQFLISPPASPPVGWKQVEDAXPVINYDLLYAISKLGPGEKYELHAAXDXXPSVVVHVCESDQEKEEEEEMERMRRPKPKIIQXRRPEYXPIHLS

SEQ ID NO: 23133 - protein, 205 aa, Homo sapiens
  MOD_RES (28)..(28): Selenocysteine
  MOD_RES (38)..(38): Selenocysteine
  MOD_RES (44)..(44): Selenocysteine
  MOD_RES (74)..(74): Selenocysteine
  MOD_RES (88)..(88): Selenocysteine
  MOD_RES (124)..(124): Selenocysteine
  MOD_RES (154)..(154): Selenocysteine
  MOD_RES (160)..(160): Selenocysteine
  MOD_RES (189)..(189): Selenocysteine
MHFRNFNYSFSSLIACVANSDIFSESEXRAKFESLFRXYDKDIXFQYFKSFKRVRINFSNPFSAADARLQLHKXEFLGKEMKLYFAQXLHIGSSHLAPPNPDKQFLISPPASPPVGWKQVEDAXPVINYDLLYAISKLGPGEQGPRVGGRQGEXQLLPCXREQYHHYPRSSPEPMPACFVSFSVFFCAXVPCAGSMPASWHHLQC

SEQ ID NO: 23134 - protein, 117 aa, Homo sapiens
  MOD_RES (8)..(8): Selenocysteine
  MOD_RES (44)..(44): Selenocysteine
  MOD_RES (70)..(70): Selenocysteine
  MOD_RES (72)..(73): Selenocysteine
  MOD_RES (106)..(106): Selenocysteine
  MOD_RES (112)..(112): Selenocysteine
MKLYFAQXLHIGSSHLAPPNPDKQFLISPPASPPVGWKQVEDAXPVINYDLLYAISKLGPGEKYELHAAXDXXPSVVVHVCESDQEKEEEEEMERMRRPKPKIIQXRRPEYXPIHLS

SEQ ID NO: 23135 - protein, 277 aa, Homo sapiens
  MOD_RES (4)..(4): Selenocysteine
  MOD_RES (72)..(72): Selenocysteine
  MOD_RES (87)..(87): Selenocysteine
  MOD_RES (118)..(118): Selenocysteine
  MOD_RES (124)..(124): Selenocysteine
  MOD_RES (154)..(154): Selenocysteine
  MOD_RES (168)..(168): Selenocysteine
  MOD_RES (204)..(204): Selenocysteine
  MOD_RES (230)..(230): Selenocysteine
  MOD_RES (232)..(233): Selenocysteine
  MOD_RES (266)..(266): Selenocysteine
  MOD_RES (272)..(272): Selenocysteine
MNSXVRQLRVPSHVPLRDPSWESLRNVPKLKKSRGMQGEQGRRLFRLLLNDLPGRDRLPCSYPQPHVEQASXSASPRLLAVNIPEDXLLSYPESSLPLQRHCAFHRFSKAKFESLFRXYDKDIXFQYFKSFKRVRINFSNPFSAADARLQLHKXEFLGKEMKLYFAQXLHIGSSHLAPPNPDKQFLISPPASPPVGWKQVEDAXPVINYDLLYAISKLGPGEKYELHAAXDXXPSVVVHVCESDQEKEEEEEMERMRRPKPKIIQXRRPEYXPIHLS

SEQ ID NO: 23136 - protein, 242 aa, Homo sapiens
  MOD_RES (37)..(37): Selenocysteine
  MOD_RES (52)..(52): Selenocysteine
  MOD_RES (83)..(83): Selenocysteine
  MOD_RES (89)..(89): Selenocysteine
  MOD_RES (119)..(119): Selenocysteine
  MOD_RES (133)..(133): Selenocysteine
  MOD_RES (169)..(169): Selenocysteine
  MOD_RES (195)..(195): Selenocysteine
  MOD_RES (197)..(198): Selenocysteine
  MOD_RES (231)..(231): Selenocysteine
  MOD_RES (237)..(237): Selenocysteine
MQGEQGRRLFRLLLNDLPGRDRLPCSYPQPHVEQASXSASPRLLAVNIPEDXLLSYPESSLPLQRHCAFHRFSKAKFESLFRXYDKDIXFQYFKSFKRVRINFSNPFSAADARLQLHKXEFLGKEMKLYFAQXLHIGSSHLAPPNPDKQFLISPPASPPVGWKQVEDAXPVINYDLLYAISKLGPGEKYELHAAXDXXPSVVVHVCESDQEKEEEEEMERMRRPKPKIIQXRRPEYXPIHLS

SEQ ID NO: 23137 - protein, 171 aa, Homo sapiens
  MOD_RES (12)..(12): Selenocysteine
  MOD_RES (18)..(18): Selenocysteine
  MOD_RES (48)..(48): Selenocysteine
  MOD_RES (62)..(62): Selenocysteine
  MOD_RES (98)..(98): Selenocysteine
  MOD_RES (124)..(124): Selenocysteine
  MOD_RES (126)..(127): Selenocysteine
  MOD_RES (160)..(160): Selenocysteine
  MOD_RES (166)..(166): Selenocysteine
MVYAKFESLFRXYDKDIXFQYFKSFKRVRINFSNPFSAADARLQLHKXEFLGKEMKLYFAQXLHIGSSHLAPPNPDKQFLISPPASPPVGWKQVEDAXPVINYDLLYAISKLGPGEKYELHAAXDXXPSVVVHVCESDQEKEEEEEMERMRRPKPKIIQXRRPEYXPIHLS

SEQ ID NO: 23138 - protein, 197 aa, Homo sapiens
  MOD_RES (12)..(12): Selenocysteine
  MOD_RES (24)..(24): Selenocysteine
  MOD_RES (38)..(38): Selenocysteine
  MOD_RES (44)..(44): Selenocysteine
  MOD_RES (74)..(74): Selenocysteine
  MOD_RES (90)..(90): Selenocysteine
  MOD_RES (93)..(93): Selenocysteine
  MOD_RES (128)..(128): Selenocysteine
  MOD_RES (154)..(154): Selenocysteine
  MOD_RES (157)..(157): Selenocysteine
  MOD_RES (177)..(177): Selenocysteine
  MOD_RES (186)..(186): Selenocysteine
MPAPSMDCDVSXLVACVVDVEVFXNQEVKEKFEGLFRXYDDCVXFQLFKSFRRVRINFSNPKSAARARIELHEXQFRGKKLKLYFAQVQXPEXDGDKLHLAPPQPAKQFLISPPSSPPVGWQPINDAXPVLNYDLLYAVAKLGPGEKYELHAGXESXPSVVVHVCDSDIEEEEDPKXSPKPKIIQXRRPGLPPSVSN

SEQ ID NO: 23139 - protein, 224 aa, Homo sapiens
  MOD_RES (12)..(12): Selenocysteine
  MOD_RES (24)..(24): Selenocysteine
  MOD_RES (38)..(38): Selenocysteine
  MOD_RES (44)..(44): Selenocysteine
  MOD_RES (74)..(74): Selenocysteine
  MOD_RES (90)..(90): Selenocysteine
  MOD_RES (93)..(93): Selenocysteine
  MOD_RES (128)..(128): Selenocysteine
  MOD_RES (154)..(154): Selenocysteine
  MOD_RES (157)..(157): Selenocysteine
  MOD_RES (177)..(177): Selenocysteine
  MOD_RES (186)..(186): Selenocysteine
MPAPSMDCDVSXLVACVVDVEVFXNQEVKEKFEGLFRXYDDCVXFQLFKSFRRVRINFSNPKSAARARIELHEXQFRGKKLKLYFAQVQXPEXDGDKLHLAPPQPAKQFLISPPSSPPVGWQPINDAXPVLNYDLLYAVAKLGPGEKYELHAGXESXPSVVVHVCDSDIEEEEDPKXSPKPKIIQXRRPGLPPSVSNAACSFSIIAVSSLSCFFPLLFVKKNCL

SEQ ID NO: 23140 - protein, 243 aa, Homo sapiens
  MOD_RES (38)..(38): Selenocysteine
  MOD_RES (50)..(50): Selenocysteine
  MOD_RES (84)..(84): Selenocysteine
  MOD_RES (90)..(90): Selenocysteine
  MOD_RES (120)..(120): Selenocysteine
  MOD_RES (136)..(136): Selenocysteine
  MOD_RES (139)..(139): Selenocysteine
  MOD_RES (174)..(174): Selenocysteine
  MOD_RES (200)..(200): Selenocysteine
  MOD_RES (203)..(203): Selenocysteine
  MOD_RES (223)..(223): Selenocysteine
  MOD_RES (232)..(232): Selenocysteine
MRGESYFIGMRSPGQQGHVPEDGGLFLLCCIDRDWAVXRCFAEEAFQAIXDFNDLPNSLFACNVHQSVFEGEESKEKFEGLFRXYDDCVXFQLFKSFRRVRINFSNPKSAARARIELHEXQFRGKKLKLYFAQVQXPEXDGDKLHLAPPQPAKQFLISPPSSPPVGWQPINDAXPVLNYDLLYAVAKLGPGEKYELHAGXESXPSVVVHVCDSDIEEEEDPKXSPKPKIIQXRRPGLPPSVSN

SEQ ID NO: 23141 - protein, 173 aa, Homo sapiens
  MOD_RES (5)..(5): Selenocysteine
  MOD_RES (19)..(19): Selenocysteine
  MOD_RES (47)..(47): Selenocysteine
  MOD_RES (73)..(73): Selenocysteine
  MOD_RES (80)..(80): Selenocysteine
  MOD_RES (110)..(110): Selenocysteine
  MOD_RES (130)..(130): Selenocysteine
  MOD_RES (156)..(156): Selenocysteine
  MOD_RES (168)..(168): Selenocysteine
MLRDXMKSWNDSQSDLCSXDQEEEEEMIFGENEDDLDEMMDLSDLPXSLFACSVHEAVFEAREQKERFEALFXIYDDQVXFQLFKSFRRVRINFSKPEAAARARIELHEXDFNGQKLKLYFAQERNMNFXREQSRHPAWWFMSVKVKLKRKKRQKXPNRKLPRRGAPXLRPQR

SEQ ID NO: 23142 - protein, 231 aa, Homo sapiens
  MOD_RES (5)..(5): Selenocysteine
  MOD_RES (19)..(19): Selenocysteine
  MOD_RES (47)..(47): Selenocysteine
  MOD_RES (73)..(73): Selenocysteine
  MOD_RES (80)..(80): Selenocysteine
  MOD_RES (110)..(110): Selenocysteine
  MOD_RES (180)..(180): Selenocysteine
  MOD_RES (183)..(183): Selenocysteine
  MOD_RES (195)..(195): Selenocysteine
  MOD_RES (201)..(201): Selenocysteine
  MOD_RES (211)..(211): Selenocysteine
  MOD_RES (218)..(218): Selenocysteine
  MOD_RES (226)..(226): Selenocysteine
MLRDXMKSWNDSQSDLCSXDQEEEEEMIFGENEDDLDEMMDLSDLPXSLFACSVHEAVFEAREQKERFEALFXIYDDQVXFQLFKSFRRVRINFSKPEAAARARIELHEXDFNGQKLKLYFAQSYLLPPQPVKQFLISPPASPPVGWKQSEDAMPVINYDLLCAVSKLGPGEKYELHAGXESXPSVVVHVCESEXEEEEEXKNPKQKIAQXRRPDPPXAALNEPQXFDCAL

SEQ ID NO: 23143 - protein, 241 aa, Homo sapiens
  MOD_RES (5)..(5): Selenocysteine
  MOD_RES (19)..(19): Selenocysteine
  MOD_RES (47)..(47): Selenocysteine
  MOD_RES (73)..(73): Selenocysteine
  MOD_RES (80)..(80): Selenocysteine
  MOD_RES (110)..(110): Selenocysteine
  MOD_RES (190)..(190): Selenocysteine
  MOD_RES (193)..(193): Selenocysteine
  MOD_RES (205)..(205): Selenocysteine
  MOD_RES (211)..(211): Selenocysteine
  MOD_RES (221)..(221): Selenocysteine
  MOD_RES (228)..(228): Selenocysteine
  MOD_RES (236)..(236): Selenocysteine
MLRDXMKSWNDSQSDLCSXDQEEEEEMIFGENEDDLDEMMDLSDLPXSLFACSVHEAVFEAREQKERFEALFXIYDDQVXFQLFKSFRRVRINFSKPEAAARARIELHEXDFNGQKLKLYFAQVQMSGEVRDKSYLLPPQPVKQFLISPPASPPVGWKQSEDAMPVINYDLLCAVSKLGPGEKYELHAGXESXPSVVVHVCESEXEEEEEXKNPKQKIAQXRRPDPPXAALNEPQXFDCAL

SEQ ID NO: 23144 - protein, 115 aa, Homo sapiens
  MOD_RES (5)..(5): Selenocysteine
  MOD_RES (19)..(19): Selenocysteine
  MOD_RES (47)..(47): Selenocysteine
  MOD_RES (72)..(72): Selenocysteine
  MOD_RES (98)..(98): Selenocysteine
  MOD_RES (110)..(110): Selenocysteine
MLRDXMKSWNDSQSDLCSXDQEEEEEMIFGENEDDLDEMMDLSDLPXSLFACSVHEAVFEAREQKERNMNFXREQSRHPAWWFMSVKVKLKRKKRQKXPNRKLPRRGAPXLRPQR

SEQ ID NO: 23145 - protein, 183 aa, Homo sapiens
  MOD_RES (5)..(5): Selenocysteine
  MOD_RES (19)..(19): Selenocysteine
  MOD_RES (47)..(47): Selenocysteine
  MOD_RES (132)..(132): Selenocysteine
  MOD_RES (135)..(135): Selenocysteine
  MOD_RES (147)..(147): Selenocysteine
  MOD_RES (153)..(153): Selenocysteine
  MOD_RES (163)..(163): Selenocysteine
  MOD_RES (170)..(170): Selenocysteine
  MOD_RES (178)..(178): Selenocysteine
MLRDXMKSWNDSQSDLCSXDQEEEEEMIFGENEDDLDEMMDLSDLPXSLFACSVHEAVFEAREQKVQMSGEVRDKSYLLPPQPVKQFLISPPASPPVGWKQSEDAMPVINYDLLCAVSKLGPGEKYELHAGXESXPSVVVHVCESEXEEEEEXKNPKQKIAQXRRPDPPXAALNEPQXFDCAL

SEQ ID NO: 23146 - protein, 116 aa, Homo sapiens
  MOD_RES (65)..(65): Selenocysteine
  MOD_RES (68)..(68): Selenocysteine
  MOD_RES (80)..(80): Selenocysteine
  MOD_RES (86)..(86): Selenocysteine
  MOD_RES (96)..(96): Selenocysteine
  MOD_RES (103)..(103): Selenocysteine
  MOD_RES (111)..(111): Selenocysteine
MSGEVRDKSYLLPPQPVKQFLISPPASPPVGWKQSEDAMPVINYDLLCAVSKLGPGEKYELHAGXESXPSVVVHVCESEXEEEEEXKNPKQKIAQXRRPDPPXAALNEPQXFDCAL

SEQ ID NO: 23147 - protein, 108 aa, Homo sapiens
  MOD_RES (1)..(1): Any amino acid
  MOD_RES (57)..(57): Selenocysteine
  MOD_RES (60)..(60): Selenocysteine
  MOD_RES (72)..(72): Selenocysteine
  MOD_RES (78)..(78): Selenocysteine
  MOD_RES (88)..(88): Selenocysteine
  MOD_RES (95)..(95): Selenocysteine
  MOD_RES (103)..(103): Selenocysteine
XYLLPPQPVKQFLISPPASPPVGWKQSEDAMPVINYDLLCAVSKLGPGEKYELHAGXESXPSVVVHVCESEXEEEEEXKNPKQKIAQXRRPDPPXAALNEPQXFDCAL

SEQ ID NO: 23148 - protein, 522 aa, Homo sapiens
  MOD_RES (20)..(20): Selenocysteine
  MOD_RES (74)..(74): Selenocysteine
  MOD_RES (86)..(86): Selenocysteine
  MOD_RES (91)..(91): Selenocysteine
  MOD_RES (112)..(112): Selenocysteine
  MOD_RES (152)..(152): Selenocysteine
  MOD_RES (166)..(167): Selenocysteine
  MOD_RES (187)..(187): Selenocysteine
  MOD_RES (214)..(214): Selenocysteine
  MOD_RES (218)..(218): Selenocysteine
  MOD_RES (220)..(220): Selenocysteine
  MOD_RES (240)..(240): Selenocysteine
  MOD_RES (257)..(257): Selenocysteine
  MOD_RES (319)..(319): Selenocysteine
  MOD_RES (342)..(342): Selenocysteine
  MOD_RES (394)..(394): Selenocysteine
  MOD_RES (411)..(411): Selenocysteine
  MOD_RES (413)..(413): Selenocysteine
  MOD_RES (418)..(418): Selenocysteine
  MOD_RES (450)..(450): Selenocysteine
  MOD_RES (458)..(458): Selenocysteine
  MOD_RES (473)..(473): Selenocysteine
  MOD_RES (480)..(480): Selenocysteine
  MOD_RES (506)..(506): Selenocysteine
  MOD_RES (521)..(521): Selenocysteine
MPRKKAAAAAWEEPSSGNGXARAGPRKRGGPAGRKRERPERCSSSSGGGSSGDEDGLELDGAPGGGKRAARPAXAGKAGGAAVVIXEPEHXKERVKLEGSKCKGQLLIFGAXNWDLIGRKEVPKQQAAYRNLGQNLWGPHRYGCLAGVRVRXVVSGSCAAHSLLIXXEGKLWSWGRNEKGQLGHGDXKRVEAPRLIEGLSHEVIVSAACGRNHXLALXEXGSVFAFGENKMGQLGLGNQXDAVPSPAQIMYNGQPIXKMACGAEFSMIMDCKGNLYSFGCPEYGQLGHNSDGKFIARAQRIEYDCELVPRRVAIFIEKXKDGQILPVPNVVVRDVACGANHXLVLDSQKRVFSWGFGGYGRLGHAEQKDEMVPRLVKLFDFPGRGASQIYAGYXCSFAVSEVGGLFFWGAXNXSRESXMYPKAVQDLCGWRIRSLACGKSSIIVAADESXISWGPSPXFGELGYGDHKPKSSXAAQEVKXLDGIFSEQVAMGYSHSLVIARDESEXEKEKIKKLPEYNPRXL

SEQ ID NO: 23149 - protein, 485 aa, Homo sapiens
  MOD_RES (44)..(44): Selenocysteine
  MOD_RES (189)..(189): Selenocysteine
  MOD_RES (196)..(196): Selenocysteine
  MOD_RES (213)..(213): Selenocysteine
  MOD_RES (239)..(239): Selenocysteine
  MOD_RES (241)..(241): Selenocysteine
  MOD_RES (243)..(243): Selenocysteine
  MOD_RES (290)..(290): Selenocysteine
  MOD_RES (292)..(292): Selenocysteine
  MOD_RES (303)..(303): Selenocysteine
  MOD_RES (332)..(332): Selenocysteine
  MOD_RES (335)..(336): Selenocysteine
  MOD_RES (358)..(358): Selenocysteine
  MOD_RES (387)..(388): Selenocysteine
  MOD_RES (449)..(449): Selenocysteine
MPAMVEKGPEVSGKRRGRNNAAASASAAAASAAASAACASPAAXAASGAAASSASAAAASAAAAPNNGQNKSLAAAAPNGNSSSNSWEEGSSGSSSDEEHGGGGMRVGPQYQAVVPDFDPAKLARRSQERDNLGMLVWSPNQNLSEAKLDEYIAIAKEKHGYNMEQALGMLFWHKHNIEKSLADLPNFXPFPDEWXVEDKVLFEQAFSFHGKXFHRIQQMLPDKSIASLVKFYYSWKKXRXKXSVMDRHARKQKREREESEDELEEANGNNPIDIEVDQNKESKKEVPPXEXVPQVKKEKHSXQAKNRAKRKPPKGMFLSQEDVEAVSANAXAAXXVLRQLDMELVSVKRQIQNIKQXNSALKEKLDGGIEPYRLPEVIQKCNARWXXEEQLLAVQAIRKYGRDFQAISDVIGNKSVVQVKNFFVNYRRRFNIDEVLQEWEAEHGKEEXNGPSNQKPVKSPDNSIKMPEEEDEAPVLDVRYASAS

SEQ ID NO: 23150 - protein, 35 aa, Homo sapiens
  MOD_RES (2)..(2): Selenocysteine
  MOD_RES (35)..(35): Selenocysteine
QXNSALKEKLDGGIEPYRLPEPSGNMAEIFRQSQX

SEQ ID NO: 23151 - protein, 523 aa, Homo sapiens
  MOD_RES (22)..(22): Selenocysteine
  MOD_RES (50)..(50): Selenocysteine
  MOD_RES (129)..(129): Selenocysteine
  MOD_RES (136)..(136): Selenocysteine
  MOD_RES (179)..(179): Selenocysteine
  MOD_RES (183)..(183): Selenocysteine
  MOD_RES (255)..(255): Selenocysteine
  MOD_RES (271)..(271): Selenocysteine
  MOD_RES (283)..(283): Selenocysteine
  MOD_RES (304)..(304): Selenocysteine
  MOD_RES (326)..(326): Selenocysteine
  MOD_RES (333)..(334): Selenocysteine
  MOD_RES (362)..(362): Selenocysteine
  MOD_RES (364)..(364): Selenocysteine
  MOD_RES (368)..(368): Selenocysteine
  MOD_RES (423)..(423): Selenocysteine
  MOD_RES (427)..(427): Selenocysteine
  MOD_RES (444)..(444): Selenocysteine
  MOD_RES (459)..(459): Selenocysteine
  MOD_RES (462)..(462): Selenocysteine
  MOD_RES (510)..(510): Selenocysteine
  MOD_RES (514)..(514): Selenocysteine
MPSVMEKPSAGSGILSRSRAKXVPNGGQPHSEDDSSEEEHSHDSMIRVGXNYQAVIPECKPESPARYSNKELKGMLVWSPNHCVSDAKLDKYIAMAKEKHGYNIEQALGMLLWHKHDVEKSLADLANFXPFPDEWXVEDKVLFEQAFGFHGKCFQRIQQMLPDKLIPSLVKYYYSWKKXRSRXSVMDRQARRLGGRKDKEDSDELEEGRGGVSEGEPDPADPKREPLPSRPLNARPGPGKKEVQVSQYRHHPLRXRRRPPKGMYLSPEGLXAVSGSPDLANLXLRGLDSQLISLKRQVQSMKQXNSSLRQALEGGIDPLRPPEANXKFNSRWXXDEQLLAVQAIRRYGKDFGAIAEVIGNKXLXQVKXFFVSYRRRFNLEEVLQEWEAEQDGAPGAPVPMEEARRGAPLPAPALEEDDEVQIXSVSXSVPRSVPPAPPPPPPPXSLSQPPPLLRPPLPXAPXLLRQPPPLQQGRFLQPRLAPNQPPPPLIRPALAAPRHSARPGPQPPPXLIGXPLEPPAPSL

SEQ ID NO: 23152 - protein, 240 aa, Homo sapiens
  MOD_RES (3)..(3): Selenocysteine
  MOD_RES (9)..(9): Selenocysteine
  MOD_RES (42)..(42): Selenocysteine
  MOD_RES (58)..(58): Selenocysteine
  MOD_RES (109)..(110): Selenocysteine
  MOD_RES (138)..(138): Selenocysteine
  MOD_RES (160)..(160): Selenocysteine
  MOD_RES (166)..(166): Selenocysteine
  MOD_RES (177)..(177): Selenocysteine
  MOD_RES (179)..(179): Selenocysteine
  MOD_RES (181)..(181): Selenocysteine
  MOD_RES (186)..(186): Selenocysteine
  MOD_RES (197)..(197): Selenocysteine
  MOD_RES (223)..(223): Selenocysteine
GNXEQPVQXSKIGLGRREYQSLQHRHHSQRSKCRPPKGMYLXQEDVVAVSCSPNAANXILRQLDMELISLKRQVQNAKQVNSALKQKMEGGIEEFKPPESNQKINARWXXEEQLLAVQGVRKYGKDFQAIADVIGNKXVGQVKNFFVNYRRRFNLEEAQXPQAPRXLGPSPPAPSSXPXPXAPIAXLNQPPPLLRPXLPAAPALHRQPPPLQQQARFIQPRPXLNQPPPPLIRPANSMPP

SEQ ID NO: 23153 - protein, 436 aa, Homo sapiens
  MOD_RES (36)..(36): Selenocysteine
  MOD_RES (77)..(77): Selenocysteine
  MOD_RES (80)..(80): Selenocysteine
  MOD_RES (141)..(141): Selenocysteine
  MOD_RES (148)..(148): Selenocysteine
  MOD_RES (177)..(177): Selenocysteine
  MOD_RES (191)..(191): Selenocysteine
  MOD_RES (195)..(195): Selenocysteine
  MOD_RES (221)..(221): Selenocysteine
  MOD_RES (243)..(243): Selenocysteine
  MOD_RES (249)..(249): Selenocysteine
  MOD_RES (282)..(282): Selenocysteine
  MOD_RES (298)..(298): Selenocysteine
  MOD_RES (349)..(350): Selenocysteine
  MOD_RES (360)..(360): Selenocysteine
  MOD_RES (363)..(363): Selenocysteine
  MOD_RES (368)..(368): Selenocysteine
  MOD_RES (372)..(372): Selenocysteine
  MOD_RES (381)..(381): Selenocysteine
  MOD_RES (393)..(394): Selenocysteine
  MOD_RES (399)..(399): Selenocysteine
  MOD_RES (412)..(412): Selenocysteine
  MOD_RES (430)..(431): Selenocysteine
MPGMMEKGPELLGKNRSANGSAKSPAGGGGSGASSXNGGLHYSEPESGCSSDDEHDVGMRVGAEYQARIPEFDPGAXKYXDKDNGGMLVWSPYHSIPDAKLDEYIAIAKEKHGYNVEQALGMLFWHKHNIEKSLADLPNFXPFPDEWXVEDKVLFEQAFSFHGKSFHRIQQMLPDKXIASLVKYYYSWKKXRSRXSLMDRQARKLANRHNQGDSDDDVEEXHPMDGNDSDYDPKKEAKKEGNXEQPVQXSKIGLGRREYQSLQHRHHSQRSKCRPPKGMYLXQEDVVAVSCSPNAANXILRQLDMELISLKRQVQNAKQVNSALKQKMEGGIEEFKPPESNQKINARWXXEEQLLAVQGXDPXGSSDXGSIXSCPIIHSNXNSPYCHSEPASXXSSSNXACCPGSSPAASSXPAAGSVHPAPANFKSASXXSYSPC

SEQ ID NO: 23154 - protein, 449 aa, Homo sapiens
  MOD_RES (36)..(36): Selenocysteine
  MOD_RES (77)..(77): Selenocysteine
  MOD_RES (80)..(80): Selenocysteine
  MOD_RES (141)..(141): Selenocysteine
  MOD_RES (148)..(148): Selenocysteine
  MOD_RES (177)..(177): Selenocysteine
  MOD_RES (191)..(191): Selenocysteine
  MOD_RES (195)..(195): Selenocysteine
  MOD_RES (221)..(221): Selenocysteine
  MOD_RES (243)..(243): Selenocysteine
  MOD_RES (249)..(249): Selenocysteine
  MOD_RES (282)..(282): Selenocysteine
  MOD_RES (298)..(298): Selenocysteine
  MOD_RES (349)..(350): Selenocysteine
  MOD_RES (378)..(378): Selenocysteine
  MOD_RES (408)..(408): Selenocysteine
  MOD_RES (417)..(417): Selenocysteine
  MOD_RES (422)..(422): Selenocysteine
  MOD_RES (434)..(434): Selenocysteine
MPGMMEKGPELLGKNRSANGSAKSPAGGGGSGASSXNGGLHYSEPESGCSSDDEHDVGMRVGAEYQARIPEFDPGAXKYXDKDNGGMLVWSPYHSIPDAKLDEYIAIAKEKHGYNVEQALGMLFWHKHNIEKSLADLPNFXPFPDEWXVEDKVLFEQAFSFHGKSFHRIQQMLPDKXIASLVKYYYSWKKXRSRXSLMDRQARKLANRHNQGDSDDDVEEXHPMDGNDSDYDPKKEAKKEGNXEQPVQXSKIGLGRREYQSLQHRHHSQRSKCRPPKGMYLXQEDVVAVSCSPNAANXILRQLDMELISLKRQVQNAKQVNSALKQKMEGGIEEFKPPESNQKINARWXXEEQLLAVQGVRKYGKDFQAIADVIGNKXVGQVKNFFVNYRRRFNLEEVLQEWEAEQGXQASNGDASXLGEEXKSASNVPSGKSXDEEEEVCLCMEFELI

SEQ ID NO: 23155 - protein, 553 aa, Homo sapiens
  MOD_RES (36)..(36): Selenocysteine
  MOD_RES (77)..(77): Selenocysteine
  MOD_RES (80)..(80): Selenocysteine
  MOD_RES (141)..(141): Selenocysteine
  MOD_RES (148)..(148): Selenocysteine
  MOD_RES (177)..(177): Selenocysteine
  MOD_RES (191)..(191): Selenocysteine
  MOD_RES (195)..(195): Selenocysteine
  MOD_RES (221)..(221): Selenocysteine
  MOD_RES (243)..(243): Selenocysteine
  MOD_RES (249)..(249): Selenocysteine
  MOD_RES (282)..(282): Selenocysteine
  MOD_RES (298)..(298): Selenocysteine
  MOD_RES (349)..(350): Selenocysteine
  MOD_RES (378)..(378): Selenocysteine
  MOD_RES (408)..(408): Selenocysteine
  MOD_RES (417)..(417): Selenocysteine
  MOD_RES (422)..(422): Selenocysteine
  MOD_RES (434)..(434): Selenocysteine
  MOD_RES (442)..(442): Selenocysteine
  MOD_RES (448)..(448): Selenocysteine
  MOD_RES (459)..(459): Selenocysteine
  MOD_RES (461)..(461): Selenocysteine
  MOD_RES (463)..(463): Selenocysteine
  MOD_RES (468)..(468): Selenocysteine
  MOD_RES (479)..(479): Selenocysteine
  MOD_RES (505)..(505): Selenocysteine
  MOD_RES (532)..(532): Selenocysteine
  MOD_RES (546)..(546): Selenocysteine
MPGMMEKGPELLGKNRSANGSAKSPAGGGGSGASSXNGGLHYSEPESGCSSDDEHDVGMRVGAEYQARIPEFDPGAXKYXDKDNGGMLVWSPYHSIPDAKLDEYIAIAKEKHGYNVEQALGMLFWHKHNIEKSLADLPNFXPFPDEWXVEDKVLFEQAFSFHGKSFHRIQQMLPDKXIASLVKYYYSWKKXRSRXSLMDRQARKLANRHNQGDSDDDVEEXHPMDGNDSDYDPKKEAKKEGNXEQPVQXSKIGLGRREYQSLQHRHHSQRSKCRPPKGMYLXQEDVVAVSCSPNAANXILRQLDMELISLKRQVQNAKQVNSALKQKMEGGIEEFKPPESNQKINARWXXEEQLLAVQGVRKYGKDFQAIADVIGNKXVGQVKNFFVNYRRRFNLEEVLQEWEAEQGXQASNGDASXLGEEXKSASNVPSGKSXDEEEEAQXPQAPRXLGPSPPAPSSXPXPXAPIAXLNQPPPLLRPXLPAAPALHRQPPPLQQQARFIQPRPXLNQPPPPLIRPANSMPPRLNPRPVLSXVGGQQPPSLIGIQXDSQSSLH

SEQ ID NO: 23156 - protein, 374 aa, Homo sapiens
  MOD_RES (36)..(36): Selenocysteine
  MOD_RES (77)..(77): Selenocysteine
  MOD_RES (109)..(109): Selenocysteine
  MOD_RES (112)..(112): Selenocysteine
  MOD_RES (173)..(173): Selenocysteine
  MOD_RES (180)..(180): Selenocysteine
  MOD_RES (209)..(209): Selenocysteine
  MOD_RES (223)..(223): Selenocysteine
  MOD_RES (227)..(227): Selenocysteine
  MOD_RES (253)..(253): Selenocysteine
  MOD_RES (275)..(275): Selenocysteine
  MOD_RES (281)..(281): Selenocysteine
  MOD_RES (314)..(314): Selenocysteine
  MOD_RES (330)..(330): Selenocysteine
  MOD_RES (350)..(350): Selenocysteine
  MOD_RES (369)..(369): Selenocysteine
MPGMMEKGPELLGKNRSANGSAKSPAGGGGSGASSXNGGLHYSEPESGCSSDDEHDVGMRVGAEYQARIPEFDPVEXRSCYVSQAGLKLRGSSHPPSLASQSAGIIGAXKYXDKDNGGMLVWSPYHSIPDAKLDEYIAIAKEKHGYNVEQALGMLFWHKHNIEKSLADLPNFXPFPDEWXVEDKVLFEQAFSFHGKSFHRIQQMLPDKXIASLVKYYYSWKKXRSRXSLMDRQARKLANRHNQGDSDDDVEEXHPMDGNDSDYDPKKEAKKEGNXEQPVQXSKIGLGRREYQSLQHRHHSQRSKCRPPKGMYLXQEDVVAVSCSPNAANXILRQLDMELISLKRQFQASXGSFGLYPLRIWEDYYILLXKCSEC

SEQ ID NO: 23157 - protein, 44 aa, Homo sapiens
  MOD_RES (19)..(19): Selenocysteine
  MOD_RES (22)..(22): Selenocysteine
MRVGAEYQARIPEFDPGAXKYXDKDNGGMLVWSPYHSIPDAKCP

SEQ ID NO: 23158 - protein, 86 aa, Homo sapiens
  MOD_RES (19)..(19): Selenocysteine
  MOD_RES (22)..(22): Selenocysteine
  MOD_RES (83)..(83): Selenocysteine
MRVGAEYQARIPEFDPGAXKYXDKDNGGMLVWSPYHSIPDAKLDEYIAIAKEKHGYNVEQALGMLFWHKHNIEKSLADLPNFXPFP

SEQ ID NO: 23159 - protein, 149 aa, Homo sapiens
  MOD_RES (19)..(19): Selenocysteine
  MOD_RES (22)..(22): Selenocysteine
  MOD_RES (83)..(83): Selenocysteine
  MOD_RES (90)..(90): Selenocysteine
  MOD_RES (119)..(119): Selenocysteine
  MOD_RES (133)..(133): Selenocysteine
  MOD_RES (137)..(137): Selenocysteine
MRVGAEYQARIPEFDPGAXKYXDKDNGGMLVWSPYHSIPDAKLDEYIAIAKEKHGYNVEQALGMLFWHKHNIEKSLADLPNFXPFPDEWXVEDKVLFEQAFSFHGKSFHRIQQMLPDKXIASLVKYYYSWKKXRSRXSLMDRQARKLAN

SEQ ID NO: 23160 - protein, 495 aa, Homo sapiens
  MOD_RES (19)..(19): Selenocysteine
  MOD_RES (22)..(22): Selenocysteine
  MOD_RES (83)..(83): Selenocysteine
  MOD_RES (90)..(90): Selenocysteine
  MOD_RES (119)..(119): Selenocysteine
  MOD_RES (133)..(133): Selenocysteine
  MOD_RES (137)..(137): Selenocysteine
  MOD_RES (163)..(163): Selenocysteine
  MOD_RES (185)..(185): Selenocysteine
  MOD_RES (191)..(191): Selenocysteine
  MOD_RES (224)..(224): Selenocysteine
  MOD_RES (240)..(240): Selenocysteine
  MOD_RES (291)..(292): Selenocysteine
  MOD_RES (320)..(320): Selenocysteine
  MOD_RES (350)..(350): Selenocysteine
  MOD_RES (359)..(359): Selenocysteine
  MOD_RES (364)..(364): Selenocysteine
  MOD_RES (376)..(376): Selenocysteine
  MOD_RES (384)..(384): Selenocysteine
  MOD_RES (390)..(390): Selenocysteine
  MOD_RES (401)..(401): Selenocysteine
  MOD_RES (403)..(403): Selenocysteine
  MOD_RES (405)..(405): Selenocysteine
  MOD_RES (410)..(410): Selenocysteine
  MOD_RES (421)..(421): Selenocysteine
  MOD_RES (447)..(447): Selenocysteine
  MOD_RES (474)..(474): Selenocysteine
  MOD_RES (488)..(488): Selenocysteine
MRVGAEYQARIPEFDPGAXKYXDKDNGGMLVWSPYHSIPDAKLDEYIAIAKEKHGYNVEQALGMLFWHKHNIEKSLADLPNFXPFPDEWXVEDKVLFEQAFSFHGKSFHRIQQMLPDKXIASLVKYYYSWKKXRSRXSLMDRQARKLANRHNQGDSDDDVEEXHPMDGNDSDYDPKKEAKKEGNXEQPVQXSKIGLGRREYQSLQHRHHSQRSKCRPPKGMYLXQEDVVAVSCSPNAANXILRQLDMELISLKRQVQNAKQVNSALKQKMEGGIEEFKPPESNQKINARWXXEEQLLAVQGVRKYGKDFQAIADVIGNKXVGQVKNFFVNYRRRFNLEEVLQEWEAEQGXQASNGDASXLGEEXKSASNVPSGKSXDEEEEAQXPQAPRXLGPSPPAPSSXPXPXAPIAXLNQPPPLLRPXLPAAPALHRQPPPLQQQARFIQPRPXLNQPPPPLIRPANSMPPRLNPRPVLSXVGGQQPPSLIGIQXDSQSSLH

SEQ ID NO: 23161 - protein, 143 aa, Homo sapiens
  MOD_RES (1)..(1): Any amino acid
  MOD_RES (8)..(8): Selenocysteine
  MOD_RES (30)..(30): Selenocysteine
  MOD_RES (36)..(36): Selenocysteine
  MOD_RES (69)..(69): Selenocysteine
  MOD_RES (85)..(85): Selenocysteine
  MOD_RES (129)..(129): Selenocysteine
  MOD_RES (135)..(135): Selenocysteine
XDDDVEEXHPMDGNDSDYDPKKEAKKEGNXEQPVQXSKIGLGRREYQSLQHRHHSQRSKCRPPKGMYLXQEDVVAVSCSPNAANXILRQLDMELISLKRQVQNAKQVNSALKQKMEGGIEEFKPPEAQXPQAPRXLGPSPPAP

SEQ ID NO: 23162 - protein, 74 aa, Homo sapiens
  MOD_RES (1)..(1): Any amino acid
  MOD_RES (7)..(7): Selenocysteine
  MOD_RES (58)..(59): Selenocysteine
XPNAANXILRQLDMELISLKRQVQNAKQVNSALKQKMEGGIEEFKPPESNQKINARWXXEEQLLAVQGDWLLGK

SEQ ID NO: 23163 - protein, 200 aa, Homo sapiens
  MOD_RES (21)..(21): Selenocysteine
  MOD_RES (41)..(41): Selenocysteine
  MOD_RES (45)..(45): Selenocysteine
  MOD_RES (60)..(60): Selenocysteine
  MOD_RES (80)..(80): Selenocysteine
  MOD_RES (93)..(94): Selenocysteine
  MOD_RES (98)..(98): Selenocysteine
  MOD_RES (116)..(116): Selenocysteine
  MOD_RES (134)..(134): Selenocysteine
  MOD_RES (147)..(147): Selenocysteine
  MOD_RES (168)..(168): Selenocysteine
  MOD_RES (176)..(176): Selenocysteine
MGNSKSGALSKEILEELQLNXKFSEEELCSWYQSFLKDCPXGRIXQQQFQSIYAKFFPDXDPKAYAQHVFRSFDSNLDGXLDFKEYVIALHMXXAGKXNQKLEWAFSLYDVDGNGXISKNEVLEIVMAIFKMIXPEDVKLLPDDENXPEKRAEKIWKYFGKNDDDKLXEKEFIEGXLANKEILRLIQFEPQKVKEKMKNA

SEQ ID NO: 23164 - protein, 305 aa, Homo sapiens
  MOD_RES (34)..(34): Selenocysteine
  MOD_RES (36)..(36): Selenocysteine
  MOD_RES (47)..(47): Selenocysteine
  MOD_RES (51)..(51): Selenocysteine
  MOD_RES (74)..(76): Selenocysteine
  MOD_RES (91)..(91): Selenocysteine
  MOD_RES (125)..(125): Selenocysteine
  MOD_RES (144)..(144): Selenocysteine
  MOD_RES (200)..(200): Selenocysteine
  MOD_RES (213)..(214): Selenocysteine
  MOD_RES (221)..(221): Selenocysteine
  MOD_RES (246)..(246): Selenocysteine
  MOD_RES (253)..(253): Selenocysteine
  MOD_RES (260)..(260): Selenocysteine
  MOD_RES (287)..(287): Selenocysteine
MVELMFPLLLLLLPFLLYMAAPQIRKMLSSGVCXSXVQLPGKVVVVXGANXGARVYLACRDVEKGELVAKEIQXXXGNQQVLVRKLDLSDXKSIRAFAKGFLAEEKHLHVLINNAGVMMCPYSKXADGFEMHIGVNHLGHFLLXHLLLEKLKESAPSRIVNVSSLAHHLGRIHFHNLQGEKFYNAGLAYCHSKLANILFXQELARRLKGSGVXXYSVHPGXVQSELVRHSSFMRWMWWLFSFFIKXPQQGAQXSLHCALXEGLEILSGNHFSDCHVAWVSAQARNEXIARRLWDVSCDLLGLPID

SEQ ID NO: 23165 - protein, 187 aa, Homo sapiens
  MOD_RES (34)..(34): Selenocysteine
  MOD_RES (36)..(36): Selenocysteine
  MOD_RES (47)..(47): Selenocysteine
  MOD_RES (51)..(51): Selenocysteine
  MOD_RES (57)..(57): Selenocysteine
  MOD_RES (86)..(86): Selenocysteine
  MOD_RES (105)..(105): Selenocysteine
  MOD_RES (161)..(161): Selenocysteine
  MOD_RES (174)..(175): Selenocysteine
  MOD_RES (182)..(182): Selenocysteine
MVELMFPLLLLLLPFLLYMAAPQIRKMLSSGVCXSXVQLPGKVVVVXGANXGIGKEXAKELAQREEKHLHVLINNAGVMMCPYSKXADGFEMHIGVNHLGHFLLXHLLLEKLKESAPSRIVNVSSLAHHLGRIHFHNLQGEKFYNAGLAYCHSKLANILFXQELARRLKGSGVXXYSVHPGXVQSEL

SEQ ID NO: 23166 - protein, 318 aa, Homo sapiens
  MOD_RES (34)..(34): Selenocysteine
  MOD_RES (36)..(36): Selenocysteine
  MOD_RES (47)..(47): Selenocysteine
  MOD_RES (51)..(51): Selenocysteine
  MOD_RES (57)..(57): Selenocysteine
  MOD_RES (87)..(89): Selenocysteine
  MOD_RES (104)..(104): Selenocysteine
  MOD_RES (138)..(138): Selenocysteine
  MOD_RES (157)..(157): Selenocysteine
  MOD_RES (213)..(213): Selenocysteine
  MOD_RES (226)..(227): Selenocysteine
  MOD_RES (234)..(234): Selenocysteine
  MOD_RES (259)..(259): Selenocysteine
  MOD_RES (266)..(266): Selenocysteine
  MOD_RES (273)..(273): Selenocysteine
  MOD_RES (300)..(300): Selenocysteine
MVELMFPLLLLLLPFLLYMAAPQIRKMLSSGVCXSXVQLPGKVVVVXGANXGIGKEXAKELAQRGARVYLACRDVEKGELVAKEIQXXXGNQQVLVRKLDLSDXKSIRAFAKGFLAEEKHLHVLINNAGVMMCPYSKXADGFEMHIGVNHLGHFLLXHLLLEKLKESAPSRIVNVSSLAHHLGRIHFHNLQGEKFYNAGLAYCHSKLANILFXQELARRLKGSGVXXYSVHPGXVQSELVRHSSFMRWMWWLFSFFIKXPQQGAQXSLHCALXEGLEILSGNHFSDCHVAWVSAQARNEXIARRLWDVSCDLLGLPID

SEQ ID NO: 23167 - protein, 248 aa, Homo sapiens
  MOD_RES (34)..(34): Selenocysteine
  MOD_RES (36)..(36): Selenocysteine
  MOD_RES (47)..(47): Selenocysteine
  MOD_RES (51)..(51): Selenocysteine
  MOD_RES (57)..(57): Selenocysteine
  MOD_RES (87)..(89): Selenocysteine
  MOD_RES (104)..(104): Selenocysteine
  MOD_RES (138)..(138): Selenocysteine
  MOD_RES (156)..(157): Selenocysteine
  MOD_RES (164)..(164): Selenocysteine
  MOD_RES (189)..(189): Selenocysteine
  MOD_RES (196)..(196): Selenocysteine
  MOD_RES (203)..(203): Selenocysteine
  MOD_RES (230)..(230): Selenocysteine
MVELMFPLLLLLLPFLLYMAAPQIRKMLSSGVCXSXVQLPGKVVVVXGANXGIGKEXAKELAQRGARVYLACRDVEKGELVAKEIQXXXGNQQVLVRKLDLSDXKSIRAFAKGFLAEEKHLHVLINNAGVMMCPYSKXADGFEMHIGVNHLGSGVXXYSVHPGXVQSELVRHSSFMRWMWWLFSFFIKXPQQGAQXSLHCALXEGLEILSGNHFSDCHVAWVSAQARNEXIARRLWDVSCDLLGLPID

SEQ ID NO: 23168 - protein, 178 aa, Homo sapiens
  MOD_RES (34)..(34): Selenocysteine
  MOD_RES (36)..(36): Selenocysteine
  MOD_RES (47)..(47): Selenocysteine
  MOD_RES (51)..(51): Selenocysteine
  MOD_RES (57)..(57): Selenocysteine
  MOD_RES (70)..(70): Selenocysteine
  MOD_RES (126)..(126): Selenocysteine
  MOD_RES (139)..(140): Selenocysteine
  MOD_RES (147)..(147): Selenocysteine
  MOD_RES (172)..(172): Selenocysteine
MVELMFPLLLLLLPFLLYMAAPQIRKMLSSGVCXSXVQLPGKVVVVXGANXGIGKEXAKELAQRGHFLLXHLLLEKLKESAPSRIVNVSSLAHHLGRIHFHNLQGEKFYNAGLAYCHSKLANILFXQELARRLKGSGVXXYSVHPGXVQSELVRHSSFMRWMWWLFSFFIKXPQQGAQ

SEQ ID NO: 23169 - protein, 61 aa, Homo sapiens
  MOD_RES (37)..(37): Selenocysteine
  MOD_RES (53)..(53): Selenocysteine
MVELMFPLLLLLLPFLLYMAAPQIRSLPPNPSAAREXKGISPIKDSKCVFPRXSPGKDPLP

SEQ ID NO: 23170 - protein, 62 aa, Homo sapiens
  MOD_RES (59)..(59): Selenocysteine
MVELMFPLLLLLLPFLLYMAAPQIRSSSIFSLPGCGKGGIGGQRDPDHDREPAGVGAEXGPV

SEQ ID NO: 23171 - protein, 204 aa, Homo sapiens
  MOD_RES (3)..(3): Selenocysteine
  MOD_RES (37)..(37): Selenocysteine
  MOD_RES (56)..(56): Selenocysteine
  MOD_RES (112)..(112): Selenocysteine
  MOD_RES (145)..(145): Selenocysteine
  MOD_RES (152)..(152): Selenocysteine
  MOD_RES (159)..(159): Selenocysteine
  MOD_RES (186)..(186): Selenocysteine
SDXKSIRAFAKGFLAEEKHLHVLINNAGVMMCPYSKXADGFEMHIGVNHLGHFLLXHLLLEKLKESAPSRIVNVSSLAHHLGRIHFHNLQGEKFYNAGLAYCHSKLANILFXQELARRLKVQSELVRHSSFMRWMWWLFSFFIKXPQQGAQXSLHCALXEGLEILSGNHFSDCHVAWVSAQARNEXIARRLWDVSCDLLGLPID

SEQ ID NO: 23172 - protein, 116 aa, Homo sapiens
  MOD_RES (13)..(14): Selenocysteine
  MOD_RES (25)..(25): Selenocysteine
  MOD_RES (46)..(46): Selenocysteine
  MOD_RES (55)..(55): Selenocysteine
  MOD_RES (87)..(87): Selenocysteine
  MOD_RES (110)..(110): Selenocysteine
MDAELEFAIQPNXXGKQLFDQVVKXVGLREVWFFGLQYVDSKGYSXWLKLNKKVXQQDVKKENPLQFKFRAKFFPEDVSEELIQEIXQRLFFLQVKEAILNDEIYCPPEXAVLLAS

SEQ ID NO: 23173 - protein, 148 aa, Homo sapiens
  MOD_RES (13)..(14): Selenocysteine
  MOD_RES (25)..(25): Selenocysteine
  MOD_RES (46)..(46): Selenocysteine
  MOD_RES (55)..(55): Selenocysteine
  MOD_RES (87)..(87): Selenocysteine
  MOD_RES (110)..(110): Selenocysteine
MDAELEFAIQPNXXGKQLFDQVVKXVGLREVWFFGLQYVDSKGYSXWLKLNKKVXQQDVKKENPLQFKFRAKFFPEDVSEELIQEIXQRLFFLQVKEAILNDEIYCPPEXAVLLASYAVQAKYGDYNKEIHKPGYLANDRLLPQRVLE

SEQ ID NO: 23174 - protein, 257 aa, Homo sapiens
  MOD_RES (11)..(11): Selenocysteine
  MOD_RES (22)..(22): Selenocysteine
  MOD_RES (78)..(78): Selenocysteine
  MOD_RES (96)..(96): Selenocysteine
  MOD_RES (112)..(112): Selenocysteine
  MOD_RES (118)..(118): Selenocysteine
  MOD_RES (135)..(135): Selenocysteine
  MOD_RES (169)..(169): Selenocysteine
  MOD_RES (171)..(171): Selenocysteine
  MOD_RES (195)..(195): Selenocysteine
  MOD_RES (198)..(198): Selenocysteine
  MOD_RES (217)..(217): Selenocysteine
  MOD_RES (226)..(226): Selenocysteine
MERLKQIEEQXIKAQKELEEQXRKALELDQERKRAKEEAERLEKERRAAEEAKSAIAKQAADQMKNQEQLAAELAEFXAKIALLEEAKKKKEEEAXEWQHKAFAAQEDLEKXKEELKXVMSAPPPPPPPPVIPPXENEHDEHDENNAEASAELSNEGVMNHRSEEERVXEXQKNERVKKQLQALSSELAQARDEXKKXQNDVLHAENVKAGRDKYKXLRQIRQGNXKQRIDEFEAMWGPKLYALFQMRSCQSSIKQM

SEQ ID NO: 23175 - protein, 51 aa, Homo sapiens
  MOD_RES (33)..(33): Selenocysteine
MLREDSMMEYLKIAQDLEMYGVNYFEIKNKKGXELWLGVDALGLNIYEHDD

SEQ ID NO: 23176 - protein, 447 aa, Homo sapiens
  MOD_RES (19)..(19): Selenocysteine
  MOD_RES (28)..(28): Selenocysteine
  MOD_RES (78)..(78): Selenocysteine
  MOD_RES (99)..(99): Selenocysteine
  MOD_RES (163)..(163): Selenocysteine
  MOD_RES (222)..(222): Selenocysteine
  MOD_RES (233)..(233): Selenocysteine
  MOD_RES (289)..(289): Selenocysteine
  MOD_RES (307)..(307): Selenocysteine
  MOD_RES (323)..(323): Selenocysteine
  MOD_RES (329)..(329): Selenocysteine
  MOD_RES (346)..(346): Selenocysteine
  MOD_RES (380)..(380): Selenocysteine
  MOD_RES (382)..(382): Selenocysteine
  MOD_RES (406)..(406): Selenocysteine
  MOD_RES (409)..(409): Selenocysteine
  MOD_RES (428)..(428): Selenocysteine
  MOD_RES (437)..(437): Selenocysteine
MLSWNLPFSPIQLANNFLXSVLEQHKLXKEQWEERIQNWHEEHRGMLREDSMMEYLKIAQDLEMYGVNYFEIKNKKGXELWLGVDALGLNIYEHDDKLXPKIGFPWSEIRNISFNDKKFVIKPIDKKAPDFVFYAPRLRINKRILALCMGNHELYMRRRKPDXIEVQQMKAQAREEKHQKQLERAQLENEKKKREIAEKEKERIEREKEELMERLKQIEEQXIKAQKELEEQXRKALELDQERKRAKEEAERLEKERRAAEEAKSAIAKQAADQMKNQEQLAAELAEFXAKIALLEEAKKKKEEEAXEWQHKAFAAQEDLEKXKEELKXVMSAPPPPPPPPVIPPXENEHDEHDENNAEASAELSNEGVMNHRSEEERVXEXQKNERVKKQLQALSSELAQARDEXKKXQNDVLHAENVKAGRDKYKXLRQIRQGNXKQRIDEFEAM

SEQ ID NO: 23177 - protein, 44 aa, Homo sapiens
  MOD_RES (11)..(11): Selenocysteine
  MOD_RES (17)..(17): Selenocysteine
  MOD_RES (25)..(25): Selenocysteine
  MOD_RES (42)..(42): Selenocysteine
MPKPAGLKLLXSRDPPXLAFQSAGXKDVRHHVQLLLCLLISXCP

SEQ ID NO: 23178 - protein, 52 aa, Homo sapiens
  MOD_RES (10)..(11): Selenocysteine
  MOD_RES (24)..(25): Selenocysteine
  MOD_RES (36)..(37): Selenocysteine
  MOD_RES (39)..(39): Selenocysteine
  MOD_RES (43)..(43): Selenocysteine
  MOD_RES (49)..(49): Selenocysteine
MPKPINVRVXXMDAELEFAIQPNXXGKQLFDQCIGXXQXNKRXVGRKNXELA

SEQ ID NO: 23179 - protein, 200 aa, Homo sapiens
  MOD_RES (10)..(11): Selenocysteine
  MOD_RES (24)..(25): Selenocysteine
  MOD_RES (34)..(34): Selenocysteine
  MOD_RES (66)..(66): Selenocysteine
  MOD_RES (89)..(89): Selenocysteine
  MOD_RES (132)..(132): Selenocysteine
  MOD_RES (138)..(138): Selenocysteine
  MOD_RES (141)..(141): Selenocysteine
  MOD_RES (160)..(160): Selenocysteine
  MOD_RES (169)..(169): Selenocysteine
MPKPINVRVXXMDAELEFAIQPNXXGKQLFDQVXQQDVKKENPLQFKFRAKFFPEDVSEELIQEIXQRLFFLQVKEAILNDEIYCPPEXAVLLASYAVQAKYGDYNKEIHKPGYLANDRLLPQRVLEQHKLXKEQDEXKKXQNDVLHAENVKAGRDKYKXLRQIRQGNXKQRIDEFEAMWGPKLYALFQMRSCQSSIKQM

SEQ ID NO: 23180 - protein, 583 aa, Homo sapiens
  MOD_RES (10)..(11): Selenocysteine
  MOD_RES (24)..(25): Selenocysteine
  MOD_RES (36)..(36): Selenocysteine
  MOD_RES (57)..(57): Selenocysteine
  MOD_RES (66)..(66): Selenocysteine
  MOD_RES (98)..(98): Selenocysteine
  MOD_RES (121)..(121): Selenocysteine
  MOD_RES (164)..(164): Selenocysteine
  MOD_RES (214)..(214): Selenocysteine
  MOD_RES (235)..(235): Selenocysteine
  MOD_RES (299)..(299): Selenocysteine
  MOD_RES (358)..(358): Selenocysteine
  MOD_RES (369)..(369): Selenocysteine
  MOD_RES (425)..(425): Selenocysteine
  MOD_RES (443)..(443): Selenocysteine
  MOD_RES (459)..(459): Selenocysteine
  MOD_RES (465)..(465): Selenocysteine
  MOD_RES (482)..(482): Selenocysteine
  MOD_RES (516)..(516): Selenocysteine
  MOD_RES (518)..(518): Selenocysteine
  MOD_RES (542)..(542): Selenocysteine
  MOD_RES (545)..(545): Selenocysteine
  MOD_RES (564)..(564): Selenocysteine
  MOD_RES (573)..(573): Selenocysteine
MPKPINVRVXXMDAELEFAIQPNXXGKQLFDQVVKXVGLREVWFFGLQYVDSKGYSXWLKLNKKVXQQDVKKENPLQFKFRAKFFPEDVSEELIQEIXQRLFFLQVKEAILNDEIYCPPEXAVLLASYAVQAKYGDYNKEIHKPGYLANDRLLPQRVLEQHKLXKEQWEERIQNWHEEHRGMLREDSMMEYLKIAQDLEMYGVNYFEIKNKKGXELWLGVDALGLNIYEHDDKLXPKIGFPWSEIRNISFNDKKFVIKPIDKKAPDFVFYAPRLRINKRILALCMGNHELYMRRRKPDXIEVQQMKAQAREEKHQKQLERAQLENEKKKREIAEKEKERIEREKEELMERLKQIEEQXIKAQKELEEQXRKALELDQERKRAKEEAERLEKERRAAEEAKSAIAKQAADQMKNQEQLAAELAEFXAKIALLEEAKKKKEEEAXEWQHKAFAAQEDLEKXKEELKXVMSAPPPPPPPPVIPPXENEHDEHDENNAEASAELSNEGVMNHRSEEERVXEXQKNERVKKQLQALSSELAQARDEXKKXQNDVLHAENVKAGRDKYKXLRQIRQGNXKQRIDEFEAM

SEQ ID NO: 23181 - protein, 604 aa, Homo sapiens
  MOD_RES (10)..(11): Selenocysteine
  MOD_RES (24)..(25): Selenocysteine
  MOD_RES (36)..(36): Selenocysteine
  MOD_RES (57)..(57): Selenocysteine
  MOD_RES (66)..(66): Selenocysteine
  MOD_RES (98)..(98): Selenocysteine
  MOD_RES (121)..(121): Selenocysteine
  MOD_RES (164)..(164): Selenocysteine
  MOD_RES (214)..(214): Selenocysteine
  MOD_RES (235)..(235): Selenocysteine
  MOD_RES (299)..(299): Selenocysteine
  MOD_RES (358)..(358): Selenocysteine
  MOD_RES (369)..(369): Selenocysteine
  MOD_RES (425)..(425): Selenocysteine
  MOD_RES (443)..(443): Selenocysteine
  MOD_RES (459)..(459): Selenocysteine
  MOD_RES (465)..(465): Selenocysteine
  MOD_RES (482)..(482): Selenocysteine
  MOD_RES (516)..(516): Selenocysteine
  MOD_RES (518)..(518): Selenocysteine
  MOD_RES (542)..(542): Selenocysteine
  MOD_RES (545)..(545): Selenocysteine
  MOD_RES (564)..(564): Selenocysteine
  MOD_RES (573)..(573): Selenocysteine
MPKPINVRVXXMDAELEFAIQPNXXGKQLFDQVVKXVGLREVWFFGLQYVDSKGYSXWLKLNKKVXQQDVKKENPLQFKFRAKFFPEDVSEELIQEIXQRLFFLQVKEAILNDEIYCPPEXAVLLASYAVQAKYGDYNKEIHKPGYLANDRLLPQRVLEQHKLXKEQWEERIQNWHEEHRGMLREDSMMEYLKIAQDLEMYGVNYFEIKNKKGXELWLGVDALGLNIYEHDDKLXPKIGFPWSEIRNISFNDKKFVIKPIDKKAPDFVFYAPRLRINKRILALCMGNHELYMRRRKPDXIEVQQMKAQAREEKHQKQLERAQLENEKKKREIAEKEKERIEREKEELMERLKQIEEQXIKAQKELEEQXRKALELDQERKRAKEEAERLEKERRAAEEAKSAIAKQAADQMKNQEQLAAELAEFXAKIALLEEAKKKKEEEAXEWQHKAFAAQEDLEKXKEELKXVMSAPPPPPPPPVIPPXENEHDEHDENNAEASAELSNEGVMNHRSEEERVXEXQKNERVKKQLQALSSELAQARDEXKKXQNDVLHAENVKAGRDKYKXLRQIRQGNXKQRIDEFEAMWGPKLYALFQMRSCQSSIKQM

SEQ ID NO: 23182 - protein, 50 aa, Homo sapiens
  MOD_RES (17)..(17): Selenocysteine
  MOD_RES (23)..(23): Selenocysteine
  MOD_RES (31)..(31): Selenocysteine
  MOD_RES (48)..(48): Selenocysteine
MPKPSCCVPQAGLKLLXSRDPPXLAFQSAGXKDVRHHVQLLLCLLISXCP

SEQ ID NO: 23183 - protein, 129 aa, Homo sapiens
  MOD_RES (29)..(29): Selenocysteine
  MOD_RES (79)..(79): Selenocysteine
  MOD_RES (93)..(93): Selenocysteine
  MOD_RES (107)..(107): Selenocysteine
MLPPMALPSVSWMLLSCLILLCQVQGEEXQKELPSPRISCPKGSKAYGSPCYALFLSPKSWMDADGSEPDGDGWEWSSXDVMNYFAWEKNPSXILNPGHCGSLSRSXGFLKWKDYNCDAKLPYVCKFKD

SEQ ID NO: 23184 - protein, 175 aa, Homo sapiens
  MOD_RES (29)..(29): Selenocysteine
  MOD_RES (110)..(110): Selenocysteine
  MOD_RES (125)..(125): Selenocysteine
  MOD_RES (139)..(139): Selenocysteine
  MOD_RES (153)..(153): Selenocysteine
MLPPMALPSVSWMLLSCLILLCQVQGEEXQKELPSPRISCPKGSKAYGSPCYALFLSPKSWMDADLACQKRPSGKLVSVLSGAEGSFVSSLVRSISNSYSYIWIGLHDPXQGSEPDGDGWEWSSXDVMNYFAWEKNPSXILNPGHCGSLSRSXGFLKWKDYNCDAKLPYVCKFKD

SEQ ID NO: 23185 - protein, 587 aa, Homo sapiens
  MOD_RES (41)..(41): Selenocysteine
  MOD_RES (46)..(46): Selenocysteine
  MOD_RES (64)..(64): Selenocysteine
  MOD_RES (67)..(67): Selenocysteine
  MOD_RES (121)..(121): Selenocysteine
  MOD_RES (164)..(165): Selenocysteine
  MOD_RES (183)..(183): Selenocysteine
  MOD_RES (246)..(246): Selenocysteine
  MOD_RES (254)..(254): Selenocysteine
  MOD_RES (258)..(258): Selenocysteine
  MOD_RES (286)..(286): Selenocysteine
  MOD_RES (296)..(297): Selenocysteine
  MOD_RES (346)..(346): Selenocysteine
  MOD_RES (387)..(387): Selenocysteine
  MOD_RES (393)..(393): Selenocysteine
  MOD_RES (401)..(401): Selenocysteine
  MOD_RES (403)..(403): Selenocysteine
  MOD_RES (468)..(469): Selenocysteine
  MOD_RES (477)..(477): Selenocysteine
  MOD_RES (520)..(521): Selenocysteine
  MOD_RES (552)..(552): Selenocysteine
MASGAYNPYIEIIEQPRQRGMRFRYKCEGRSAGSIPGEHSXDNNRXYPSIQIMNYYGKGKVRIXLVXKNDPYKPHPHDLVGKDCRDGYYEAEFGQERRPLFFQNLGIRCVKKKEVKEAIIXRIKAGINPFNVPEKQLNDIEDCDLNVVRLCFQVFLPDEHGNLXXALPPVVSNPIYDNRAPNXAELRICRVNKNCGSVRGGDEIFLLCDKVQKDDIEVRFVLNDWEAKGIFSQADVHRQVAIVFKXPPYCKAIXEPVXVKMQLRRPSDQEVSESMDFRYLPDEKDXYGNKAKKQKXXLLFQKLCQDHVNFPERPRPGLLGSIGEGRYFKKEPNLFSHDAVVREMPXGVSSQAESYYPSPGPISSGLSHHASMAPLPSSSWSSVAHPXPRSGNXNPLSSFSXRXLPSNSQGIPPFLRIPVGNDLNASNACIYNNADDIVGMEASSMPSADLYGISDPNMLSNCSVNMMXXSSDSMGEXDNPRLLSMNLENPSCNSVLDPRDLRQLHQMSSSSMSAGANSNXXVFVSQSDAFEGSDFSCADNSMINESGPSNSXNPNSHGFVQDSQYSGIGSMQNEQLSDSFPYEFFQV

SEQ ID NO: 23186 - protein, 619 aa, Homo sapiens
  MOD_RES (41)..(41): Selenocysteine
  MOD_RES (46)..(46): Selenocysteine
  MOD_RES (64)..(64): Selenocysteine
  MOD_RES (67)..(67): Selenocysteine
  MOD_RES (121)..(121): Selenocysteine
  MOD_RES (164)..(165): Selenocysteine
  MOD_RES (183)..(183): Selenocysteine
  MOD_RES (246)..(246): Selenocysteine
  MOD_RES (254)..(254): Selenocysteine
  MOD_RES (258)..(258): Selenocysteine
  MOD_RES (286)..(286): Selenocysteine
  MOD_RES (296)..(297): Selenocysteine
  MOD_RES (310)..(310): Selenocysteine
  MOD_RES (324)..(324): Selenocysteine
  MOD_RES (330)..(330): Selenocysteine
  MOD_RES (339)..(339): Selenocysteine
  MOD_RES (378)..(378): Selenocysteine
  MOD_RES (419)..(419): Selenocysteine
  MOD_RES (425)..(425): Selenocysteine
  MOD_RES (433)..(433): Selenocysteine
  MOD_RES (435)..(435): Selenocysteine
  MOD_RES (500)..(501): Selenocysteine
  MOD_RES (509)..(509): Selenocysteine
  MOD_RES (552)..(553): Selenocysteine
  MOD_RES (584)..(584): Selenocysteine
MASGAYNPYIEIIEQPRQRGMRFRYKCEGRSAGSIPGEHSXDNNRXYPSIQIMNYYGKGKVRIXLVXKNDPYKPHPHDLVGKDCRDGYYEAEFGQERRPLFFQNLGIRCVKKKEVKEAIIXRIKAGINPFNVPEKQLNDIEDCDLNVVRLCFQVFLPDEHGNLXXALPPVVSNPIYDNRAPNXAELRICRVNKNCGSVRGGDEIFLLCDKVQKDDIEVRFVLNDWEAKGIFSQADVHRQVAIVFKXPPYCKAIXEPVXVKMQLRRPSDQEVSESMDFRYLPDEKDXYGNKAKKQKXXLLFQKLCQDHVEXGFRHVDQDGLELLXSGDPPXLASQSAGIXVNFPERPRPGLLGSIGEGRYFKKEPNLFSHDAVVREMPXGVSSQAESYYPSPGPISSGLSHHASMAPLPSSSWSSVAHPXPRSGNXNPLSSFSXRXLPSNSQGIPPFLRIPVGNDLNASNACIYNNADDIVGMEASSMPSADLYGISDPNMLSNCSVNMMXXSSDSMGEXDNPRLLSMNLENPSCNSVLDPRDLRQLHQMSSSSMSAGANSNXXVFVSQSDAFEGSDFSCADNSMINESGPSNSXNPNSHGFVQDSQYSGIGSMQNEQLSDSFPYEFFQV

SEQ ID NO: 23187 - protein, 49 aa, Homo sapiens
  MOD_RES (18)..(18): Selenocysteine
MDELFPLIFPADQWLHRXRDSAHLPGHQGPSSPASPPRACRKGLPGWLL

SEQ ID NO: 23188 - protein, 85 aa, Homo sapiens
  MOD_RES (52)..(52): Selenocysteine
  MOD_RES (54)..(55): Selenocysteine
  MOD_RES (57)..(57): Selenocysteine
  MOD_RES (60)..(60): Selenocysteine
  MOD_RES (75)..(75): Selenocysteine
  MOD_RES (78)..(78): Selenocysteine
  MOD_RES (81)..(81): Selenocysteine
  MOD_RES (83)..(83): Selenocysteine
MDELFPLIFPAEPAQASGPYVEIIEQPKQRGMRFRYKCEGRSAGSIPGERSXDXXKXHPXIKDQGQCASPWSPRXLLXGLXPXSL

SEQ ID NO: 23189 - protein, 64 aa, Homo sapiens
  MOD_RES (52)..(52): Selenocysteine
  MOD_RES (54)..(55): Selenocysteine
  MOD_RES (57)..(57): Selenocysteine
  MOD_RES (60)..(60): Selenocysteine
MDELFPLIFPAEPAQASGPYVEIIEQPKQRGMRFRYKCEGRSAGSIPGERSXDXXKXHPXIKFL

SEQ ID NO: 23190 - protein, 134 aa, Homo sapiens
  MOD_RES (52)..(52): Selenocysteine
  MOD_RES (54)..(55): Selenocysteine
  MOD_RES (57)..(57): Selenocysteine
  MOD_RES (60)..(60): Selenocysteine
MDELFPLIFPAEPAQASGPYVEIIEQPKQRGMRFRYKCEGRSAGSIPGERSXDXXKXHPXIKFPEPGNPVCEEAGPGAGYQSAHPDQQQPLPSSYRRAAWGLRPECCAALLPGDSAGPIRQAPPPAACPFSSHL

SEQ ID NO: 23191 - protein, 548 aa, Homo sapiens
  MOD_RES (52)..(52): Selenocysteine
  MOD_RES (54)..(55): Selenocysteine
  MOD_RES (57)..(57): Selenocysteine
  MOD_RES (60)..(60): Selenocysteine
  MOD_RES (67)..(67): Selenocysteine
  MOD_RES (71)..(71): Selenocysteine
  MOD_RES (78)..(78): Selenocysteine
  MOD_RES (136)..(136): Selenocysteine
  MOD_RES (161)..(161): Selenocysteine
  MOD_RES (188)..(188): Selenocysteine
  MOD_RES (226)..(226): Selenocysteine
  MOD_RES (251)..(251): Selenocysteine
  MOD_RES (289)..(289): Selenocysteine
  MOD_RES (302)..(302): Selenocysteine
  MOD_RES (305)..(305): Selenocysteine
  MOD_RES (319)..(319): Selenocysteine
  MOD_RES (349)..(349): Selenocysteine
  MOD_RES (354)..(354): Selenocysteine
  MOD_RES (362)..(362): Selenocysteine
  MOD_RES (426)..(426): Selenocysteine
  MOD_RES (432)..(432): Selenocysteine
  MOD_RES (455)..(455): Selenocysteine
  MOD_RES (461)..(461): Selenocysteine
  MOD_RES (485)..(486): Selenocysteine
  MOD_RES (498)..(498): Selenocysteine
  MOD_RES (502)..(502): Selenocysteine
MDELFPLIFPAEPAQASGPYVEIIEQPKQRGMRFRYKCEGRSAGSIPGERSXDXXKXHPXIKINGYXGPGXVRISLVXKDPPHRPHPHELVGKDCRDGFYEAELCPDRCIHSFQNLGIQCVKKRDLEQAISQRIQXNNNPFQEEQRGDYDLNAVRLCFQVXVRDPSGRPLRLPPVLSHPIFDNRAPNXAELKICRVNRNSGSCLGGDEIFLLCDKVQKEDIEVYFXGPGWEARGSFSQADVHRQVAIVFRXPPYADPSLQAPVRVSMQLRRPSDRELSEPMEFQYLPDXDDRHRIEEKRKRXYEXFKSIMKKSPFSGPXDPRPPPRRIAVPSRSSASVPKPAPQPYPFXSSLSXINYDEFPXMVFPSGQISQASALAPAPPQVLPQAPAPAPAPAMVSALAQAPAPVPVLAPGPPQAVAPPAPKPXQAGEGXLSEALLQLQFDDEDLGALLGNSXDPAVFXDLASVDNSEFQQLLNQGIPVAPHXXEPMLMEYPEAIXRLVXGAQRPPDPAPAPLGAPGLPNGLLSGDEDFSSIADMDFSALLSQISS

SEQ ID NO: 23192 - protein, 161 aa, Homo sapiens
  MOD_RES (52)..(52): Selenocysteine
  MOD_RES (54)..(55): Selenocysteine
  MOD_RES (57)..(57): Selenocysteine
  MOD_RES (60)..(60): Selenocysteine
  MOD_RES (67)..(67): Selenocysteine
  MOD_RES (71)..(71): Selenocysteine
  MOD_RES (78)..(78): Selenocysteine
  MOD_RES (136)..(136): Selenocysteine
MDELFPLIFPAEPAQASGPYVEIIEQPKQRGMRFRYKCEGRSAGSIPGERSXDXXKXHPXIKINGYXGPGXVRISLVXKDPPHRPHPHELVGKDCRDGFYEAELCPDRCIHSFQNLGIQCVKKRDLEQAISQRIQXNNNPFQGDSAGPIRQAPPPAACPFS

SEQ ID NO: 23193 - protein, 237 aa, Homo sapiens
  MOD_RES (52)..(52): Selenocysteine
  MOD_RES (54)..(55): Selenocysteine
  MOD_RES (57)..(57): Selenocysteine
  MOD_RES (60)..(60): Selenocysteine
  MOD_RES (67)..(67): Selenocysteine
  MOD_RES (71)..(71): Selenocysteine
  MOD_RES (78)..(78): Selenocysteine
  MOD_RES (136)..(136): Selenocysteine
  MOD_RES (164)..(164): Selenocysteine
  MOD_RES (191)..(191): Selenocysteine
MDELFPLIFPAEPAQASGPYVEIIEQPKQRGMRFRYKCEGRSAGSIPGERSXDXXKXHPXIKINGYXGPGXVRISLVXKDPPHRPHPHELVGKDCRDGFYEAELCPDRCIHSFQNLGIQCVKKRDLEQAISQRIQXNNNPFQVPIEEQRGDYDLNAVRLCFQVXVRDPSGRPLRLPPVLSHPIFDNRAPNXAELKICRVNRNSGSCLGGDEIFLLCDKVQKAHGIPVPARYRRSSPD

SEQ ID NO: 23194 - protein, 246 aa, Homo sapiens
  MOD_RES (52)..(52): Selenocysteine
  MOD_RES (54)..(55): Selenocysteine
  MOD_RES (57)..(57): Selenocysteine
  MOD_RES (60)..(60): Selenocysteine
  MOD_RES (67)..(67): Selenocysteine
  MOD_RES (71)..(71): Selenocysteine
  MOD_RES (78)..(78): Selenocysteine
  MOD_RES (136)..(136): Selenocysteine
  MOD_RES (164)..(164): Selenocysteine
  MOD_RES (191)..(191): Selenocysteine
  MOD_RES (232)..(232): Selenocysteine
MDELFPLIFPAEPAQASGPYVEIIEQPKQRGMRFRYKCEGRSAGSIPGERSXDXXKXHPXIKINGYXGPGXVRISLVXKDPPHRPHPHELVGKDCRDGFYEAELCPDRCIHSFQNLGIQCVKKRDLEQAISQRIQXNNNPFQVPIEEQRGDYDLNAVRLCFQVXVRDPSGRPLRLPPVLSHPIFDNRAPNXAELKICRVNRNSGSCLGGDEIFLLCDKVQKEDIEFCPQASXPALSLYVIPEHHQL

SEQ ID NO: 23195 - protein, 377 aa, Homo sapiens
  MOD_RES (52)..(52): Selenocysteine
  MOD_RES (54)..(55): Selenocysteine
  MOD_RES (57)..(57): Selenocysteine
  MOD_RES (60)..(60): Selenocysteine
  MOD_RES (67)..(67): Selenocysteine
  MOD_RES (71)..(71): Selenocysteine
  MOD_RES (78)..(78): Selenocysteine
  MOD_RES (136)..(136): Selenocysteine
  MOD_RES (164)..(164): Selenocysteine
  MOD_RES (191)..(191): Selenocysteine
  MOD_RES (229)..(229): Selenocysteine
  MOD_RES (254)..(254): Selenocysteine
  MOD_RES (292)..(292): Selenocysteine
  MOD_RES (305)..(305): Selenocysteine
  MOD_RES (308)..(308): Selenocysteine
  MOD_RES (322)..(322): Selenocysteine
  MOD_RES (376)..(376): Selenocysteine
MDELFPLIFPAEPAQASGPYVEIIEQPKQRGMRFRYKCEGRSAGSIPGERSXDXXKXHPXIKINGYXGPGXVRISLVXKDPPHRPHPHELVGKDCRDGFYEAELCPDRCIHSFQNLGIQCVKKRDLEQAISQRIQXNNNPFQVPIEEQRGDYDLNAVRLCFQVXVRDPSGRPLRLPPVLSHPIFDNRAPNXAELKICRVNRNSGSCLGGDEIFLLCDKVQKEDIEVYFXGPGWEARGSFSQADVHRQVAIVFRXPPYADPSLQAPVRVSMQLRRPSDRELSEPMEFQYLPDXDDRHRIEEKRKRXYEXFKSIMKKSPFSGPXDPRPPPRRIAVPSRSSASVPKPGKDFLLSHWNDRFSSVQLRSSGDEDSWAPLQXY

SEQ ID NO: 23196 - protein, 448 aa, Homo sapiens
  MOD_RES (52)..(52): Selenocysteine
  MOD_RES (54)..(55): Selenocysteine
  MOD_RES (57)..(57): Selenocysteine
  MOD_RES (60)..(60): Selenocysteine
  MOD_RES (67)..(67): Selenocysteine
  MOD_RES (71)..(71): Selenocysteine
  MOD_RES (78)..(78): Selenocysteine
  MOD_RES (136)..(136): Selenocysteine
  MOD_RES (164)..(164): Selenocysteine
  MOD_RES (191)..(191): Selenocysteine
  MOD_RES (229)..(229): Selenocysteine
  MOD_RES (254)..(254): Selenocysteine
  MOD_RES (292)..(292): Selenocysteine
  MOD_RES (305)..(305): Selenocysteine
  MOD_RES (308)..(308): Selenocysteine
  MOD_RES (322)..(322): Selenocysteine
  MOD_RES (352)..(352): Selenocysteine
  MOD_RES (357)..(357): Selenocysteine
  MOD_RES (365)..(365): Selenocysteine
MDELFPLIFPAEPAQASGPYVEIIEQPKQRGMRFRYKCEGRSAGSIPGERSXDXXKXHPXIKINGYXGPGXVRISLVXKDPPHRPHPHELVGKDCRDGFYEAELCPDRCIHSFQNLGIQCVKKRDLEQAISQRIQXNNNPFQVPIEEQRGDYDLNAVRLCFQVXVRDPSGRPLRLPPVLSHPIFDNRAPNXAELKICRVNRNSGSCLGGDEIFLLCDKVQKEDIEVYFXGPGWEARGSFSQADVHRQVAIVFRXPPYADPSLQAPVRVSMQLRRPSDRELSEPMEFQYLPDXDDRHRIEEKRKRXYEXFKSIMKKSPFSGPXDPRPPPRRIAVPSRSSASVPKPAPQPYPFXSSLSXINYDEFPXMVFPSGQISQASALAPAPPQVLPQAPAPAPAPAMVSALAQRPPDPAPAPLGAPGLPNGLLSGDEDFSSIADMDFSALLSQISS

SEQ ID NO: 23197 - protein, 551 aa, Homo sapiens
  MOD_RES (52)..(52): Selenocysteine
  MOD_RES (54)..(55): Selenocysteine
  MOD_RES (57)..(57): Selenocysteine
  MOD_RES (60)..(60): Selenocysteine
  MOD_RES (67)..(67): Selenocysteine
  MOD_RES (71)..(71): Selenocysteine
  MOD_RES (78)..(78): Selenocysteine
  MOD_RES (136)..(136): Selenocysteine
  MOD_RES (164)..(164): Selenocysteine
  MOD_RES (191)..(191): Selenocysteine
  MOD_RES (229)..(229): Selenocysteine
  MOD_RES (254)..(254): Selenocysteine
  MOD_RES (292)..(292): Selenocysteine
  MOD_RES (305)..(305): Selenocysteine
  MOD_RES (308)..(308): Selenocysteine
  MOD_RES (322)..(322): Selenocysteine
  MOD_RES (352)..(352): Selenocysteine
  MOD_RES (357)..(357): Selenocysteine
  MOD_RES (365)..(365): Selenocysteine
  MOD_RES (429)..(429): Selenocysteine
  MOD_RES (435)..(435): Selenocysteine
  MOD_RES (458)..(458): Selenocysteine
  MOD_RES (464)..(464): Selenocysteine
  MOD_RES (488)..(489): Selenocysteine
  MOD_RES (501)..(501): Selenocysteine
  MOD_RES (505)..(505): Selenocysteine
MDELFPLIFPAEPAQASGPYVEIIEQPKQRGMRFRYKCEGRSAGSIPGERSXDXXKXHPXIKINGYXGPGXVRISLVXKDPPHRPHPHELVGKDCRDGFYEAELCPDRCIHSFQNLGIQCVKKRDLEQAISQRIQXNNNPFQVPIEEQRGDYDLNAVRLCFQVXVRDPSGRPLRLPPVLSHPIFDNRAPNXAELKICRVNRNSGSCLGGDEIFLLCDKVQKEDIEVYFXGPGWEARGSFSQADVHRQVAIVFRXPPYADPSLQAPVRVSMQLRRPSDRELSEPMEFQYLPDXDDRHRIEEKRKRXYEXFKSIMKKSPFSGPXDPRPPPRRIAVPSRSSASVPKPAPQPYPFXSSLSXINYDEFPXMVFPSGQISQASALAPAPPQVLPQAPAPAPAPAMVSALAQAPAPVPVLAPGPPQAVAPPAPKPXQAGEGXLSEALLQLQFDDEDLGALLGNSXDPAVFXDLASVDNSEFQQLLNQGIPVAPHXXEPMLMEYPEAIXRLVXGAQRPPDPAPAPLGAPGLPNGLLSGDEDFSSIADMDFSALLSQISS

SEQ ID NO: 23198 - protein, 153 aa, Homo sapiens
  MOD_RES (52)..(52): Selenocysteine
  MOD_RES (54)..(55): Selenocysteine
  MOD_RES (57)..(57): Selenocysteine
  MOD_RES (60)..(60): Selenocysteine
  MOD_RES (67)..(67): Selenocysteine
  MOD_RES (71)..(71): Selenocysteine
  MOD_RES (78)..(78): Selenocysteine
MDELFPLIFPAEPAQASGPYVEIIEQPKQRGMRFRYKCEGRSAGSIPGERSXDXXKXHPXIKINGYXGPGXVRISLVXKDPPHRPHPHELVGKDCRDGFYEAELCPDRCIHSSYRRAAWGLRPECCAALLPGDSAGPIRQAPPPAACPFSSHL

SEQ ID NO: 23199 - protein, 418 aa, Homo sapiens
  MOD_RES (52)..(52): Selenocysteine
  MOD_RES (54)..(55): Selenocysteine
  MOD_RES (57)..(57): Selenocysteine
  MOD_RES (60)..(60): Selenocysteine
  MOD_RES (78)..(78): Selenocysteine
  MOD_RES (82)..(82): Selenocysteine
  MOD_RES (89)..(89): Selenocysteine
  MOD_RES (147)..(147): Selenocysteine
  MOD_RES (175)..(175): Selenocysteine
  MOD_RES (202)..(202): Selenocysteine
  MOD_RES (240)..(240): Selenocysteine
  MOD_RES (265)..(265): Selenocysteine
  MOD_RES (303)..(303): Selenocysteine
  MOD_RES (316)..(316): Selenocysteine
  MOD_RES (319)..(319): Selenocysteine
  MOD_RES (333)..(333): Selenocysteine
  MOD_RES (363)..(363): Selenocysteine
  MOD_RES (368)..(368): Selenocysteine
  MOD_RES (376)..(376): Selenocysteine
MDELFPLIFPAEPAQASGPYVEIIEQPKQRGMRFRYKCEGRSAGSIPGERSXDXXKXHPXIKVWMSGPLYFGQINGYXGPGXVRISLVXKDPPHRPHPHELVGKDCRDGFYEAELCPDRCIHSFQNLGIQCVKKRDLEQAISQRIQXNNNPFQVPIEEQRGDYDLNAVRLCFQVXVRDPSGRPLRLPPVLSHPIFDNRAPNXAELKICRVNRNSGSCLGGDEIFLLCDKVQKEDIEVYFXGPGWEARGSFSQADVHRQVAIVFRXPPYADPSLQAPVRVSMQLRRPSDRELSEPMEFQYLPDXDDRHRIEEKRKRXYEXFKSIMKKSPFSGPXDPRPPPRRIAVPSRSSASVPKPAPQPYPFXSSLSXINYDEFPXMVFPSGQISQASALAPAPPQVLPQAPAPAPAPAMVSALAQAP

SEQ ID NO: 23200 - protein, 208 aa, Homo sapiens
  MOD_RES (43)..(43): Selenocysteine
  MOD_RES (45)..(46): Selenocysteine
  MOD_RES (48)..(48): Selenocysteine
  MOD_RES (51)..(51): Selenocysteine
  MOD_RES (58)..(58): Selenocysteine
  MOD_RES (62)..(62): Selenocysteine
  MOD_RES (69)..(69): Selenocysteine
  MOD_RES (127)..(127): Selenocysteine
  MOD_RES (155)..(155): Selenocysteine
  MOD_RES (182)..(182): Selenocysteine
MDEPAQASGPYVEIIEQPKQRGMRFRYKCEGRSAGSIPGERSXDXXKXHPXIKINGYXGPGXVRISLVXKDPPHRPHPHELVGKDCRDGFYEAELCPDRCIHSFQNLGIQCVKKRDLEQAISQRIQXNNNPFQVPIEEQRGDYDLNAVRLCFQVXVRDPSGRPLRLPPVLSHPIFDNRAPNXAELKICRVNRNSGSCLGGDEIFLLCD

SEQ ID NO: 23201 - protein, 29 aa, Homo sapiens
  MOD_RES (21)..(21): Selenocysteine
  MOD_RES (23)..(24): Selenocysteine
  MOD_RES (26)..(26): Selenocysteine
  MOD_RES (29)..(29): Selenocysteine
MRFRYKCEGRSAGSIPGERSXDXXKXHPX

SEQ ID NO: 23202 - protein, 90 aa, Homo sapiens
  MOD_RES (21)..(21): Selenocysteine
  MOD_RES (23)..(24): Selenocysteine
  MOD_RES (26)..(26): Selenocysteine
  MOD_RES (29)..(29): Selenocysteine
  MOD_RES (36)..(36): Selenocysteine
  MOD_RES (40)..(40): Selenocysteine
  MOD_RES (47)..(47): Selenocysteine
MRFRYKCEGRSAGSIPGERSXDXXKXHPXIKINGYXGPGXVRISLVXKDPPHRPHPHELVGKDCRDGFYEAELCPDRCIHSFQNLGIQCV

SEQ ID NO: 23203 - protein, 95 aa, Homo sapiens
  MOD_RES (21)..(21): Selenocysteine
  MOD_RES (23)..(24): Selenocysteine
  MOD_RES (26)..(26): Selenocysteine
  MOD_RES (29)..(29): Selenocysteine
  MOD_RES (36)..(36): Selenocysteine
  MOD_RES (40)..(40): Selenocysteine
  MOD_RES (47)..(47): Selenocysteine
MRFRYKCEGRSAGSIPGERSXDXXKXHPXIKINGYXGPGXVRISLVXKDPPHRPHPHELVGKDCRDGFYEAELCPDRCIHSFQNLGIQCVKKRDL

SEQ ID NO: 23204 - protein, 185 aa, Homo sapiens
  MOD_RES (21)..(21): Selenocysteine
  MOD_RES (23)..(24): Selenocysteine
  MOD_RES (26)..(26): Selenocysteine
  MOD_RES (29)..(29): Selenocysteine
  MOD_RES (36)..(36): Selenocysteine
  MOD_RES (40)..(40): Selenocysteine
  MOD_RES (47)..(47): Selenocysteine
  MOD_RES (105)..(105): Selenocysteine
  MOD_RES (133)..(133): Selenocysteine
  MOD_RES (160)..(160): Selenocysteine
MRFRYKCEGRSAGSIPGERSXDXXKXHPXIKINGYXGPGXVRISLVXKDPPHRPHPHELVGKDCRDGFYEAELCPDRCIHSFQNLGIQCVKKRDLEQAISQRIQXNNNPFQVPIEEQRGDYDLNAVRLCFQVXVRDPSGRPLRLPPVLSHPIFDNRAPNXAELKICRVNRNSGSCLGGDEIFLLC

SEQ ID NO: 23205 - protein, 72 aa, Homo sapiens
  MOD_RES (1)..(1): Any amino acid
  MOD_RES (4)..(4): Selenocysteine
  MOD_RES (39)..(39): Selenocysteine
  MOD_RES (42)..(42): Selenocysteine
  MOD_RES (56)..(56): Selenocysteine
XQVXVRDPSGRPLRLPPVLSHPIFDNHDRHRIEEKRKRXYEXFKSIMKKSPFSGPXDPRPPPRRIAVPSRSS

SEQ ID NO: 23206 - protein, 579 aa, Homo sapiens
  MOD_RES (14)..(14): Selenocysteine
  MOD_RES (51)..(51): Selenocysteine
  MOD_RES (92)..(92): Selenocysteine
  MOD_RES (94)..(94): Selenocysteine
  MOD_RES (103)..(103): Selenocysteine
  MOD_RES (130)..(130): Selenocysteine
  MOD_RES (158)..(158): Selenocysteine
  MOD_RES (163)..(163): Selenocysteine
  MOD_RES (181)..(181): Selenocysteine
  MOD_RES (204)..(204): Selenocysteine
  MOD_RES (298)..(298): Selenocysteine
  MOD_RES (300)..(300): Selenocysteine
  MOD_RES (316)..(316): Selenocysteine
  MOD_RES (363)..(363): Selenocysteine
  MOD_RES (376)..(376): Selenocysteine
  MOD_RES (385)..(385): Selenocysteine
  MOD_RES (396)..(396): Selenocysteine
  MOD_RES (470)..(470): Selenocysteine
  MOD_RES (494)..(494): Selenocysteine
  MOD_RES (497)..(497): Selenocysteine
  MOD_RES (500)..(500): Selenocysteine
  MOD_RES (528)..(528): Selenocysteine
  MOD_RES (535)..(535): Selenocysteine
  MOD_RES (549)..(549): Selenocysteine
  MOD_RES (579)..(579): Selenocysteine
MLRSGPASGPSVPXGRAMPSRRVARPPAAPELGALGSPDLSSLSLAVSRSXDELEIIDEYIKENGFGLDGGQPGPGEGLPRLVSRGAASLSXVXLGPVAPPAXPPPWGCPLGRLVSPAPGPGPQPHLVIXEQPKQRGMRFRYECEGRSAGSILGESSXEASKXLPAIELRDCGGLREVEVXACLVWKDWPHRVHPHSLVGKDCXDGICRVRLRPHVSPRHSFNNLGIQCVRKKEIEAAIERKIQLGIDPYNAGSLKNHQEVDMNVVRICFQASYRDQQGQMRRMDPVLSEPVYDKKSXNXSELRICRINKESGPCXGGEELYLLCDKVQKEDISVVFSRASWEGRADFSQADVHRQIAIVFKXPPYEDLEIVEPVXVNVFLQRLXDGVCSEPLPFXYLPRDHDSYGVDKKRKRGMPDVLGELNSSDPHGIESKRRKKKPAILDHFLPNHGSGPFLPPSALLPDPDFFSGXVSLPGLEPPGGPDLLDDGFAYDPXAPXLFXMLDLLPPAPPHASAVVCSGGAGAVVGEXPGPEPLXLDSYQAPGPGDGGXASLVGSNMFPNHYREAAFGGGLLSPGPEAX

SEQ ID NO: 23207 - protein, 576 aa, Homo sapiens
  MOD_RES (14)..(14): Selenocysteine
  MOD_RES (51)..(51): Selenocysteine
  MOD_RES (89)..(89): Selenocysteine
  MOD_RES (91)..(91): Selenocysteine
  MOD_RES (100)..(100): Selenocysteine
  MOD_RES (127)..(127): Selenocysteine
  MOD_RES (155)..(155): Selenocysteine
  MOD_RES (160)..(160): Selenocysteine
  MOD_RES (178)..(178): Selenocysteine
  MOD_RES (201)..(201): Selenocysteine
  MOD_RES (295)..(295): Selenocysteine
  MOD_RES (297)..(297): Selenocysteine
  MOD_RES (313)..(313): Selenocysteine
  MOD_RES (360)..(360): Selenocysteine
  MOD_RES (373)..(373): Selenocysteine
  MOD_RES (382)..(382): Selenocysteine
  MOD_RES (393)..(393): Selenocysteine
  MOD_RES (467)..(467): Selenocysteine
  MOD_RES (491)..(491): Selenocysteine
  MOD_RES (494)..(494): Selenocysteine
  MOD_RES (497)..(497): Selenocysteine
  MOD_RES (525)..(525): Selenocysteine
  MOD_RES (532)..(532): Selenocysteine
  MOD_RES (546)..(546): Selenocysteine
  MOD_RES (576)..(576): Selenocysteine
MLRSGPASGPSVPXGRAMPSRRVARPPAAPELGALGSPDLSSLSLAVSRSXEIIDEYIKENGFGLDGGQPGPGEGLPRLVSRGAASLSXVXLGPVAPPAXPPPWGCPLGRLVSPAPGPGPQPHLVIXEQPKQRGMRFRYECEGRSAGSILGESSXEASKXLPAIELRDCGGLREVEVXACLVWKDWPHRVHPHSLVGKDCXDGICRVRLRPHVSPRHSFNNLGIQCVRKKEIEAAIERKIQLGIDPYNAGSLKNHQEVDMNVVRICFQASYRDQQGQMRRMDPVLSEPVYDKKSXNXSELRICRINKESGPCXGGEELYLLCDKVQKEDISVVFSRASWEGRADFSQADVHRQIAIVFKXPPYEDLEIVEPVXVNVFLQRLXDGVCSEPLPFXYLPRDHDSYGVDKKRKRGMPDVLGELNSSDPHGIESKRRKKKPAILDHFLPNHGSGPFLPPSALLPDPDFFSGXVSLPGLEPPGGPDLLDDGFAYDPXAPXLFXMLDLLPPAPPHASAVVCSGGAGAVVGEXPGPEPLXLDSYQAPGPGDGGXASLVGSNMFPNHYREAAFGGGLLSPGPEAX

SEQ ID NO: 23208 - protein, 58 aa, Homo sapiens
  MOD_RES (14)..(14): Selenocysteine
  MOD_RES (51)..(51): Selenocysteine
  MOD_RES (56)..(56): Selenocysteine
MLRSGPASGPSVPXGRAMPSRRVARPPAAPELGALGSPDLSSLSLAVSRSXGSSSXDA

SEQ ID NO: 23209 - protein, 142 aa, Homo sapiens
  MOD_RES (1)..(1): Any amino acid
  MOD_RES (8)..(8): Selenocysteine
  MOD_RES (33)..(33): Selenocysteine
  MOD_RES (57)..(57): Selenocysteine
  MOD_RES (60)..(60): Selenocysteine
  MOD_RES (63)..(63): Selenocysteine
  MOD_RES (91)..(91): Selenocysteine
  MOD_RES (98)..(98): Selenocysteine
  MOD_RES (112)..(112): Selenocysteine
  MOD_RES (142)..(142): Selenocysteine
XSEPLPFXYLPRDHGPFLPPSALLPDPDFFSGXVSLPGLEPPGGPDLLDDGFAYDPXAPXLFXMLDLLPPAPPHASAVVCSGGAGAVVGEXPGPEPLXLDSYQAPGPGDGGXASLVGSNMFPNHYREAAFGGGLLSPGPEAX

SEQ ID NO: 23210 - protein, 3458 aa, Homo sapiens
  MOD_RES (10)..(10): Selenocysteine
  MOD_RES (20)..(20): Selenocysteine
  MOD_RES (41)..(41): Selenocysteine
  MOD_RES (66)..(66): Selenocysteine
  MOD_RES (77)..(77): Selenocysteine
  MOD_RES (80)..(80): Selenocysteine
  MOD_RES (82)..(82): Selenocysteine
  MOD_RES (90)..(90): Selenocysteine
  MOD_RES (94)..(94): Selenocysteine
  MOD_RES (96)..(96): Selenocysteine
  MOD_RES (138)..(139): Selenocysteine
  MOD_RES (152)..(152): Selenocysteine
  MOD_RES (160)..(160): Selenocysteine
  MOD_RES (162)..(162): Selenocysteine
  MOD_RES (184)..(184): Selenocysteine
  MOD_RES (187)..(187): Selenocysteine
  MOD_RES (227)..(227): Selenocysteine
  MOD_RES (241)..(241): Selenocysteine
  MOD_RES (253)..(254): Selenocysteine
  MOD_RES (258)..(260): Selenocysteine
  MOD_RES (308)..(308): Selenocysteine
  MOD_RES (369)..(369): Selenocysteine
  MOD_RES (379)..(379): Selenocysteine
  MOD_RES (405)..(406): Selenocysteine
  MOD_RES (413)..(413): Selenocysteine
  MOD_RES (429)..(429): Selenocysteine
  MOD_RES (440)..(440): Selenocysteine
  MOD_RES (444)..(444): Selenocysteine
  MOD_RES (463)..(463): Selenocysteine
  MOD_RES (468)..(469): Selenocysteine
  MOD_RES (508)..(508): Selenocysteine
  MOD_RES (511)..(511): Selenocysteine
  MOD_RES (533)..(533): Selenocysteine
  MOD_RES (536)..(536): Selenocysteine
  MOD_RES (567)..(567): Selenocysteine
  MOD_RES (582)..(582): Selenocysteine
  MOD_RES (595)..(595): Selenocysteine
  MOD_RES (606)..(606): Selenocysteine
  MOD_RES (622)..(622): Selenocysteine
  MOD_RES (636)..(636): Selenocysteine
  MOD_RES (645)..(645): Selenocysteine
  MOD_RES (648)..(648): Selenocysteine
  MOD_RES (655)..(655): Selenocysteine
  MOD_RES (685)..(685): Selenocysteine
  MOD_RES (706)..(706): Selenocysteine
  MOD_RES (759)..(759): Selenocysteine
  MOD_RES (773)..(773): Selenocysteine
  MOD_RES (784)..(784): Selenocysteine
  MOD_RES (806)..(806): Selenocysteine
  MOD_RES (862)..(862): Selenocysteine
  MOD_RES (874)..(874): Selenocysteine
  MOD_RES (880)..(880): Selenocysteine
  MOD_RES (899)..(899): Selenocysteine
  MOD_RES (903)..(903): Selenocysteine
  MOD_RES (917)..(917): Selenocysteine
  MOD_RES (941)..(941): Selenocysteine
  MOD_RES (954)..(954): Selenocysteine
  MOD_RES (959)..(959): Selenocysteine
  MOD_RES (978)..(978): Selenocysteine
  MOD_RES (989)..(989): Selenocysteine
  MOD_RES (1002)..(1002): Selenocysteine
  MOD_RES (1007)..(1007): Selenocysteine
  MOD_RES (1017)..(1017): Selenocysteine
  MOD_RES (1057)..(1057): Selenocysteine
  MOD_RES (1068)..(1068): Selenocysteine
  MOD_RES (1124)..(1124): Selenocysteine
  MOD_RES (1192)..(1192): Selenocysteine
  MOD_RES (1195)..(1195): Selenocysteine
  MOD_RES (1234)..(1234): Selenocysteine
  MOD_RES (1268)..(1268): Selenocysteine
  MOD_RES (1273)..(1273): Selenocysteine
  MOD_RES (1290)..(1290): Selenocysteine
  MOD_RES (1294)..(1294): Selenocysteine
  MOD_RES (1316)..(1316): Selenocysteine
  MOD_RES (1358)..(1358): Selenocysteine
  MOD_RES (1362)..(1362): Selenocysteine
  MOD_RES (1369)..(1369): Selenocysteine
  MOD_RES (1372)..(1372): Selenocysteine
  MOD_RES (1384)..(1384): Selenocysteine
  MOD_RES (1434)..(1434): Selenocysteine
  MOD_RES (1439)..(1439): Selenocysteine
  MOD_RES (1466)..(1466): Selenocysteine
  MOD_RES (1472)..(1472): Selenocysteine
  MOD_RES (1476)..(1476): Selenocysteine
  MOD_RES (1495)..(1495): Selenocysteine
  MOD_RES (1500)..(1500): Selenocysteine
  MOD_RES (1516)..(1516): Selenocysteine
  MOD_RES (1520)..(1520): Selenocysteine
  MOD_RES (1526)..(1526): Selenocysteine
  MOD_RES (1570)..(1570): Selenocysteine
  MOD_RES (1573)..(1573): Selenocysteine
  MOD_RES (1604)..(1604): Selenocysteine
  MOD_RES (1637)..(1637): Selenocysteine
  MOD_RES (1642)..(1642): Selenocysteine
  MOD_RES (1653)..(1653): Selenocysteine
  MOD_RES (1662)..(1662): Selenocysteine
  MOD_RES (1698)..(1698): Selenocysteine
  MOD_RES (1705)..(1705): Selenocysteine
  MOD_RES (1712)..(1712): Selenocysteine
  MOD_RES (1718)..(1718): Selenocysteine
  MOD_RES (1729)..(1729): Selenocysteine
  MOD_RES (1736)..(1736): Selenocysteine
  MOD_RES (1741)..(1741): Selenocysteine
  MOD_RES (1751)..(1751): Selenocysteine
  MOD_RES (1832)..(1832): Selenocysteine
  MOD_RES (1837)..(1837): Selenocysteine
  MOD_RES (1857)..(1857): Selenocysteine
  MOD_RES (1859)..(1859): Selenocysteine
  MOD_RES (1873)..(1873): Selenocysteine
  MOD_RES (1891)..(1891): Selenocysteine
  MOD_RES (1903)..(1904): Selenocysteine
  MOD_RES (1916)..(1916): Selenocysteine
  MOD_RES (1919)..(1919): Selenocysteine
  MOD_RES (1922)..(1922): Selenocysteine
  MOD_RES (1960)..(1960): Selenocysteine
  MOD_RES (2009)..(2010): Selenocysteine
  MOD_RES (2019)..(2019): Selenocysteine
  MOD_RES (2031)..(2031): Selenocysteine
  MOD_RES (2050)..(2050): Selenocysteine
  MOD_RES (2071)..(2071): Selenocysteine
  MOD_RES (2078)..(2078): Selenocysteine
  MOD_RES (2083)..(2083): Selenocysteine
  MOD_RES (2120)..(2120): Selenocysteine
  MOD_RES (2146)..(2146): Selenocysteine
  MOD_RES (2158)..(2158): Selenocysteine
  MOD_RES (2163)..(2163): Selenocysteine
  MOD_RES (2215)..(2215): Selenocysteine
  MOD_RES (2289)..(2289): Selenocysteine
  MOD_RES (2321)..(2321): Selenocysteine
  MOD_RES (2328)..(2329): Selenocysteine
  MOD_RES (2342)..(2342): Selenocysteine
  MOD_RES (2350)..(2350): Selenocysteine
  MOD_RES (2362)..(2362): Selenocysteine
  MOD_RES (2368)..(2368): Selenocysteine
  MOD_RES (2389)..(2389): Selenocysteine
  MOD_RES (2417)..(2417): Selenocysteine
  MOD_RES (2434)..(2434): Selenocysteine
  MOD_RES (2439)..(2439): Selenocysteine
  MOD_RES (2442)..(2442): Selenocysteine
  MOD_RES (2449)..(2449): Selenocysteine
  MOD_RES (2454)..(2454): Selenocysteine
  MOD_RES (2469)..(2469): Selenocysteine
  MOD_RES (2512)..(2512): Selenocysteine
  MOD_RES (2516)..(2516): Selenocysteine
  MOD_RES (2533)..(2533): Selenocysteine
  MOD_RES (2541)..(2541): Selenocysteine
  MOD_RES (2564)..(2564): Selenocysteine
  MOD_RES (2570)..(2570): Selenocysteine
  MOD_RES (2586)..(2586): Selenocysteine
  MOD_RES (2605)..(2605): Selenocysteine
  MOD_RES (2636)..(2636): Selenocysteine
  MOD_RES (2668)..(2668): Selenocysteine
  MOD_RES (2673)..(2673): Selenocysteine
  MOD_RES (2705)..(2705): Selenocysteine
  MOD_RES (2718)..(2718): Selenocysteine
  MOD_RES (2744)..(2744): Selenocysteine
  MOD_RES (2748)..(2748): Selenocysteine
  MOD_RES (2750)..(2750): Selenocysteine
  MOD_RES (2780)..(2780): Selenocysteine
  MOD_RES (2813)..(2813): Selenocysteine
  MOD_RES (2820)..(2820): Selenocysteine
  MOD_RES (2885)..(2885): Selenocysteine
  MOD_RES (2887)..(2887): Selenocysteine
  MOD_RES (2890)..(2890): Selenocysteine
  MOD_RES (2914)..(2914): Selenocysteine
  MOD_RES (2916)..(2916): Selenocysteine
  MOD_RES (2925)..(2925): Selenocysteine
  MOD_RES (2933)..(2933): Selenocysteine
  MOD_RES (2939)..(2939): Selenocysteine
  MOD_RES (2963)..(2963): Selenocysteine
  MOD_RES (2981)..(2981): Selenocysteine
  MOD_RES (2986)..(2986): Selenocysteine
  MOD_RES (2988)..(2988): Selenocysteine
  MOD_RES (3014)..(3014): Selenocysteine
  MOD_RES (3016)..(3017): Selenocysteine
  MOD_RES (3061)..(3061): Selenocysteine
  MOD_RES (3067)..(3067): Selenocysteine
  MOD_RES (3082)..(3082): Selenocysteine
  MOD_RES (3103)..(3103): Selenocysteine
  MOD_RES (3131)..(3131): Selenocysteine
  MOD_RES (3144)..(3144): Selenocysteine
  MOD_RES (3157)..(3157): Selenocysteine
  MOD_RES (3178)..(3178): Selenocysteine
  MOD_RES (3192)..(3192): Selenocysteine
  MOD_RES (3204)..(3204): Selenocysteine
  MOD_RES (3215)..(3215): Selenocysteine
  MOD_RES (3242)..(3243): Selenocysteine
  MOD_RES (3279)..(3279): Selenocysteine
  MOD_RES (3285)..(3285): Selenocysteine
  MOD_RES (3319)..(3319): Selenocysteine
  MOD_RES (3325)..(3325): Selenocysteine
  MOD_RES (3342)..(3342): Selenocysteine
  MOD_RES (3370)..(3370): Selenocysteine
  MOD_RES (3383)..(3383): Selenocysteine
  MOD_RES (3413)..(3413): Selenocysteine
  MOD_RES (3428)..(3428): Selenocysteine
MERSGWARQXFLLALLLGAXLRARAAAGYYPRFSPFFFLCXHHGELEGDGEQGEVLISLHIAGNPXYYVPGQEYHVXISXSXFFDGLLVXGLYXSXSVQASQSIGGSSAFGFGIMSDHQFGNQFMCSVVASHVSHLPXXNLSFIWIAPPAGXGCVNFMAXAXHRGQVIFKDALAQQLCEQGAPXDVXVHPHLAEIHSDSIILRDDFDSYHQLQLNPNIWVECNNCEXGEQCGAIMHGNAVXFCEPYGPRELIXXGLNXXXASVLQFSIGSGSCRFSYSDPSIIVLYAKNNSADWIQLEKIRAPSNVSXIIHILYLPEDAKGENVQFQWKQENLRVGEVYEACWALDNILIINSAHRQVVLEDSLDPVDXGNWLFFPGAXVKHSCQSDGNSIYFHGNEGSEFNFAXXRDVDLSXEDIQEQWSEEFESQPXGWDVLGAVIGXECGXIESGLSMVFLKDGERKLCXPSMDXXGYGNLRFYFVMGGICDPGNSHENDIILYAKIEGRKEHIXLDXLSYSSYKVPSLVSVVINPELQXPAXKFCLRQKNHQGHNRNVWAVDFFHVLPVLPSXMSHMIQFSINLGCGXHQPGNSVSLEFSXNHGRSWSLLHXECLPEICAGPHLPHSXVYSSENYSGWNRIXIPLPNAALXRNXRIRWRQXGPILGNMWAIDNVYIGPSCLKFCSGRGQCXRHGCKCDPGFSGPACEMASQXFPMFISESFGSSRLSSYHNFYSIRGAEVSFGCGVLASGKALVFNKDGRRQLIXSFLDSSQSRFLQFXLRLGSKSVLSXCRAPDQPGEGVLLHYSYDNGIXWKLLEHYSYLSYHEPRIISVELPGDAKQFGIQFRWWQPYHSSQREDVWAIDEIIMXSVLFNSISLDFXNLVEVXQSLGFYLGNVQPYCGHDWXLCFXGDSKLASSMRYVEXQSMQIGASYMIQFSLVMGCGQKYXPHMDNQVKLEYSXNHGLXWHLVQEECLPSMPSCQEFXSASIYHASEFXQWRRVIVLLPQKXWSSAXRFRWSQSYYXAQDEWALDSIYIGQQCPNMCSGHGSCDHGICRCDQGYQGXECHPEAALPSXIMSDFENQNGWESDWQEVIGGEIVKPEQGCGVISSGSSLYFSKAGKRQLVSWDLDXSWVDFVQFYIQIGGESASCNKPDSREEGVLLQYSNNGGIQWHLLAEMYFSDFSKPRFVYLELPAAAKXPCXRFRWWQPVFSGEDYDQWAVDDIIILSEKQKQIIPVINPXLPQNFYEKPAFDYPMNQMSVWLMLANEGMVKNEXFCAAXPSAMIFGKSDGDRFAVXRDLXLKPGYVLQFKLNIGCANQFSSXAPVLLQYSHDAGMSWFLVKEGCYPASAGKGCEGNSRELSEPXMYHXGDFEEWXRIXIVIPRSLASSKXRFRWIQESSSQKNVPPFGLDGVYISEPCPSYCSGHGDCISGVCFCDLGYXAAQGXCVSNVPNHNEMFDRFEGKLSPLWYKIXGAQVGXGCGXLNDGKSLYFNGPGKREARXVPLDXRNIRLVQFYIQIGSKXSGIXCIKPRXRNEGLIVQYSNDNGILWHLLRELDFMSFLEPQIISIDLPQDAKXPAXAFRWWQPQHGKHSAQWALDDVLIGMNDSSQXGFQDKFDGSIDLQANWYRIQGGQVDIDCLSMDXALIFXENIGKPRYAEXWDFHVSASXFLQFEMSMGCSKPFSNSHSVQLQYSLNNGKDWHLVXEECVPPXIGCLHYXESSIYXSERFQNWKRIXVYLPLSXISPRXRFRWIQANYXVGADSWAIDNVVLASGCPWMCSGRGICDAGRCVCDRGFGGPYCVPVVPLPSILKDDFNGNLHPDLWPEVYGAERGNLNGEXIKSGXSLIFKGEGLRMLISRDLDCXNXMYVQFSLRFIAKSXPERSHSILLQFSISGGIXWHLMDEFYFPQXXNILFINVPLPYXAQXNAXRFRLWQPYNNGKKEEIWIVDDFIIDGNNVNNPVMLLDXFDFGPREDNWFFYPGGNIGLYCPYSSKGAPEEDSAMVFVSNEVGEHSIXXRDLNVNENXIIQFEINVGCSXDSSSADPVRLEFSRDFGAXWHLLLPLCYHSSSHVSSLCSXEHHPSSXYYAGXMQGWRREVVHFGKLHLCGSVRFRWYQGFYPAGSQPVXWAIDNVYIGPQCEEMCNGQGSCINGXKCICDPGYSGPXCKISXKNPDFLKDDFEGQLESDRFLLMSGGKPSRKCGILSSGNNLFFNEDGLRMLMXRDLDLSHARFVQFFMRLGCGKGVPDPRSQPVLLQYSLNGGLSWSLLQEFLFSNSSNVGRYIALEIPLKARSGSXRLRWWQPSENGHFYSPWVIDQILIGGNISGNXVLEDDFXXLDSRKWLLHPGGXKMPVCGSXGDALVFIEKASXRYVVSXDVAVNEDSFLQIDFAASCSVXDSCYAIELEYSVDLGLSWHPLVRDCLPXNVECSRYHLQRILVSDXFNKWXRIXLPLPPYXRSQAXRFRWHQPAPFDKQQXWAIDNVYIGDGCIDMCSGHGRCIQGNCVCDEQWGGLYCDDPEXSLPXQLKDNFNRAPSSQNWLXVNGGKLSXVCGAVASGMALHFSGGCSRLLVXVDLNLXNAEFIQFYFMYGCLIXPNNRNQGVLLEYSVNGGIXWNLLMEIFYDQYSKPGFVNILLPPDAKEIAXRFRWWQPRHDGLDQNDWAIDNVLISGSADQRXVMLDXFSSAPVPQHERSPADAGPVGRIAFDMFMEDKXSVNEHWLFHDDCXVERFCDSPDGVMLCGSHDGREVYAVXHDLXPXEGWIMQFKISVGCKVSEKIAQNQIHVQYSXDFGVSWNYLVPQCLPADPKCSGSVSQPSVFFPXKGWKRIXYPLPESLVGNPVRFRFYQKYSDMQWAIDNFYLGPGCLDNCRGHGDCLREQCICDPGYSGPNCYLXHXLKXFLKERFDSEEIKPDLWMSLEGGSXCXECGILAEDXALYFGGSXVRQAVXQDLDLRGAKFLQYWGRIGSENNMXSCHRPICRKEGVLLDYSXDGGIXWXLLHEMDYQKYISVRHDYILLPEDALXNXXRLRWWQPFVISNGIVVSGVERAQWALDNILIGGAEINPSQLVDXFDDEGXSHEENWSFYPNAVRXAGFCGNPSFHLYWPNKKKDKXHNALSSRELIIQPGYMMQFKIVVGCEAXSCGDLHSVMLEYXKDARSDSWQLVQXQCLPSSSNSIGCSPFQFHEAXIYNSVNSSSWKRIXIQLPDHVSSSAXQFRWIQKGEEXEKQSWAIDHVYIGEACPKLCSGHGYCXXGAICICDESFQGDDCSVFSHDLPSYIKDNFESARVXEANWEXIQGGVIGSGCGQLAPYAHGDSLYFNGCQIRQAAXKPLDLXRASKIMFVLQIGSMSQXDSCNSDLSGPHAVDKAVLLQYSVNNGIXWHVIAQHQPKDFXQAQRVSYNVPLEARMKGVLLRWWQPRHNGXGHDQWALDHVEVVLXRKQNYMMNFSRQHGLRHFYNRRRRSLRRYP

SEQ ID NO: 23211 - protein, 3460 aa, Homo sapiens
  MOD_RES (10)..(10): Selenocysteine
  MOD_RES (20)..(20): Selenocysteine
  MOD_RES (41)..(41): Selenocysteine
  MOD_RES (66)..(66): Selenocysteine
  MOD_RES (77)..(77): Selenocysteine
  MOD_RES (80)..(80): Selenocysteine
  MOD_RES (82)..(82): Selenocysteine
  MOD_RES (90)..(90): Selenocysteine
  MOD_RES (94)..(94): Selenocysteine
  MOD_RES (96)..(96): Selenocysteine
  MOD_RES (138)..(139): Selenocysteine
  MOD_RES (152)..(152): Selenocysteine
  MOD_RES (160)..(160): Selenocysteine
  MOD_RES (162)..(162): Selenocysteine
  MOD_RES (184)..(184): Selenocysteine
  MOD_RES (187)..(187): Selenocysteine
  MOD_RES (227)..(227): Selenocysteine
  MOD_RES (241)..(241): Selenocysteine
  MOD_RES (253)..(254): Selenocysteine
  MOD_RES (258)..(260): Selenocysteine
  MOD_RES (308)..(308): Selenocysteine
  MOD_RES (369)..(369): Selenocysteine
  MOD_RES (379)..(379): Selenocysteine
  MOD_RES (405)..(406): Selenocysteine
  MOD_RES (413)..(413): Selenocysteine
  MOD_RES (429)..(429): Selenocysteine
  MOD_RES (440)..(440): Selenocysteine
  MOD_RES (444)..(444): Selenocysteine
  MOD_RES (463)..(463): Selenocysteine
  MOD_RES (468)..(469): Selenocysteine
  MOD_RES (508)..(508): Selenocysteine
  MOD_RES (511)..(511): Selenocysteine
  MOD_RES (533)..(533): Selenocysteine
  MOD_RES (536)..(536): Selenocysteine
  MOD_RES (567)..(567): Selenocysteine
  MOD_RES (582)..(582): Selenocysteine
  MOD_RES (595)..(595): Selenocysteine
  MOD_RES (606)..(606): Selenocysteine
  MOD_RES (622)..(622): Selenocysteine
  MOD_RES (636)..(636): Selenocysteine
  MOD_RES (645)..(645): Selenocysteine
  MOD_RES (648)..(648): Selenocysteine
  MOD_RES (655)..(655): Selenocysteine
  MOD_RES (685)..(685): Selenocysteine
  MOD_RES (706)..(706): Selenocysteine
  MOD_RES (759)..(759): Selenocysteine
  MOD_RES (773)..(773): Selenocysteine
  MOD_RES (784)..(784): Selenocysteine
  MOD_RES (806)..(806): Selenocysteine
  MOD_RES (862)..(862): Selenocysteine
  MOD_RES (874)..(874): Selenocysteine
  MOD_RES (880)..(880): Selenocysteine
  MOD_RES (899)..(899): Selenocysteine
  MOD_RES (903)..(903): Selenocysteine
  MOD_RES (917)..(917): Selenocysteine
  MOD_RES (941)..(941): Selenocysteine
  MOD_RES (954)..(954): Selenocysteine
  MOD_RES (959)..(959): Selenocysteine
  MOD_RES (978)..(978): Selenocysteine
  MOD_RES (989)..(989): Selenocysteine
  MOD_RES (1002)..(1002): Selenocysteine
  MOD_RES (1007)..(1007): Selenocysteine
  MOD_RES (1017)..(1017): Selenocysteine
  MOD_RES (1057)..(1057): Selenocysteine
  MOD_RES (1068)..(1068): Selenocysteine
  MOD_RES (1124)..(1124): Selenocysteine
  MOD_RES (1192)..(1192): Selenocysteine
  MOD_RES (1195)..(1195): Selenocysteine
  MOD_RES (1234)..(1234): Selenocysteine
  MOD_RES (1268)..(1268): Selenocysteine
  MOD_RES (1273)..(1273): Selenocysteine
  MOD_RES (1290)..(1290): Selenocysteine
  MOD_RES (1294)..(1294): Selenocysteine
  MOD_RES (1316)..(1316): Selenocysteine
  MOD_RES (1358)..(1358): Selenocysteine
  MOD_RES (1362)..(1362): Selenocysteine
  MOD_RES (1369)..(1369): Selenocysteine
  MOD_RES (1372)..(1372): Selenocysteine
  MOD_RES (1384)..(1384): Selenocysteine
  MOD_RES (1434)..(1434): Selenocysteine
  MOD_RES (1439)..(1439): Selenocysteine
  MOD_RES (1466)..(1466): Selenocysteine
  MOD_RES (1472)..(1472): Selenocysteine
  MOD_RES (1476)..(1476): Selenocysteine
  MOD_RES (1495)..(1495): Selenocysteine
  MOD_RES (1500)..(1500): Selenocysteine
  MOD_RES (1516)..(1516): Selenocysteine
  MOD_RES (1520)..(1520): Selenocysteine
  MOD_RES (1526)..(1526): Selenocysteine
  MOD_RES (1570)..(1570): Selenocysteine
  MOD_RES (1573)..(1573): Selenocysteine
  MOD_RES (1604)..(1604): Selenocysteine
  MOD_RES (1637)..(1637): Selenocysteine
  MOD_RES (1642)..(1642): Selenocysteine
  MOD_RES (1653)..(1653): Selenocysteine
  MOD_RES (1662)..(1662): Selenocysteine
  MOD_RES (1698)..(1698): Selenocysteine
  MOD_RES (1705)..(1705): Selenocysteine
  MOD_RES (1712)..(1712): Selenocysteine
  MOD_RES (1718)..(1718): Selenocysteine
  MOD_RES (1729)..(1729): Selenocysteine
  MOD_RES (1736)..(1736): Selenocysteine
  MOD_RES (1741)..(1741): Selenocysteine
  MOD_RES (1751)..(1751): Selenocysteine
  MOD_RES (1832)..(1832): Selenocysteine
  MOD_RES (1837)..(1837): Selenocysteine
  MOD_RES (1857)..(1857): Selenocysteine
  MOD_RES (1859)..(1859): Selenocysteine
  MOD_RES (1873)..(1873): Selenocysteine
  MOD_RES (1891)..(1891): Selenocysteine
  MOD_RES (1903)..(1904): Selenocysteine
  MOD_RES (1916)..(1916): Selenocysteine
  MOD_RES (1919)..(1919): Selenocysteine
  MOD_RES (1922)..(1922): Selenocysteine
  MOD_RES (1960)..(1960): Selenocysteine
  MOD_RES (2009)..(2010): Selenocysteine
  MOD_RES (2019)..(2019): Selenocysteine
  MOD_RES (2031)..(2031): Selenocysteine
  MOD_RES (2050)..(2050): Selenocysteine
  MOD_RES (2071)..(2071): Selenocysteine
  MOD_RES (2078)..(2078): Selenocysteine
  MOD_RES (2083)..(2083): Selenocysteine
  MOD_RES (2120)..(2120): Selenocysteine
  MOD_RES (2146)..(2146): Selenocysteine
  MOD_RES (2158)..(2158): Selenocysteine
  MOD_RES (2163)..(2163): Selenocysteine
  MOD_RES (2215)..(2215): Selenocysteine
  MOD_RES (2289)..(2289): Selenocysteine
  MOD_RES (2321)..(2321): Selenocysteine
  MOD_RES (2328)..(2329): Selenocysteine
  MOD_RES (2342)..(2342): Selenocysteine
  MOD_RES (2350)..(2350): Selenocysteine
  MOD_RES (2362)..(2362): Selenocysteine
  MOD_RES (2368)..(2368): Selenocysteine
  MOD_RES (2389)..(2389): Selenocysteine
  MOD_RES (2417)..(2417): Selenocysteine
  MOD_RES (2434)..(2434): Selenocysteine
  MOD_RES (2439)..(2439): Selenocysteine
  MOD_RES (2442)..(2442): Selenocysteine
  MOD_RES (2449)..(2449): Selenocysteine
  MOD_RES (2454)..(2454): Selenocysteine
  MOD_RES (2469)..(2469): Selenocysteine
  MOD_RES (2512)..(2512): Selenocysteine
  MOD_RES (2516)..(2516): Selenocysteine
  MOD_RES (2533)..(2533): Selenocysteine
  MOD_RES (2541)..(2541): Selenocysteine
  MOD_RES (2564)..(2564): Selenocysteine
  MOD_RES (2570)..(2570): Selenocysteine
  MOD_RES (2586)..(2586): Selenocysteine
  MOD_RES (2605)..(2605): Selenocysteine
  MOD_RES (2636)..(2636): Selenocysteine
  MOD_RES (2668)..(2668): Selenocysteine
  MOD_RES (2673)..(2673): Selenocysteine
  MOD_RES (2705)..(2705): Selenocysteine
  MOD_RES (2718)..(2718): Selenocysteine
  MOD_RES (2744)..(2744): Selenocysteine
  MOD_RES (2748)..(2748): Selenocysteine
  MOD_RES (2750)..(2750): Selenocysteine
  MOD_RES (2780)..(2780): Selenocysteine
  MOD_RES (2813)..(2813): Selenocysteine
  MOD_RES (2820)..(2820): Selenocysteine
  MOD_RES (2885)..(2885): Selenocysteine
  MOD_RES (2887)..(2887): Selenocysteine
  MOD_RES (2890)..(2890): Selenocysteine
  MOD_RES (2914)..(2914): Selenocysteine
  MOD_RES (2916)..(2916): Selenocysteine
  MOD_RES (2925)..(2925): Selenocysteine
  MOD_RES (2933)..(2933): Selenocysteine
  MOD_RES (2939)..(2939): Selenocysteine
  MOD_RES (2963)..(2963): Selenocysteine
  MOD_RES (2981)..(2981): Selenocysteine
  MOD_RES (2986)..(2986): Selenocysteine
  MOD_RES (2988)..(2988): Selenocysteine
  MOD_RES (3014)..(3014): Selenocysteine
  MOD_RES (3016)..(3017): Selenocysteine
  MOD_RES (3061)..(3061): Selenocysteine
  MOD_RES (3067)..(3067): Selenocysteine
  MOD_RES (3082)..(3082): Selenocysteine
  MOD_RES (3103)..(3103): Selenocysteine
  MOD_RES (3131)..(3131): Selenocysteine
  MOD_RES (3144)..(3144): Selenocysteine
  MOD_RES (3157)..(3157): Selenocysteine
  MOD_RES (3178)..(3178): Selenocysteine
  MOD_RES (3192)..(3192): Selenocysteine
  MOD_RES (3204)..(3204): Selenocysteine
  MOD_RES (3215)..(3215): Selenocysteine
  MOD_RES (3242)..(3243): Selenocysteine
  MOD_RES (3279)..(3279): Selenocysteine
  MOD_RES (3285)..(3285): Selenocysteine
  MOD_RES (3319)..(3319): Selenocysteine
  MOD_RES (3325)..(3325): Selenocysteine
  MOD_RES (3342)..(3342): Selenocysteine
  MOD_RES (3370)..(3370): Selenocysteine
  MOD_RES (3383)..(3383): Selenocysteine
  MOD_RES (3413)..(3413): Selenocysteine
  MOD_RES (3430)..(3430): Selenocysteine
MERSGWARQXFLLALLLGAXLRARAAAGYYPRFSPFFFLCXHHGELEGDGEQGEVLISLHIAGNPXYYVPGQEYHVXISXSXFFDGLLVXGLYXSXSVQASQSIGGSSAFGFGIMSDHQFGNQFMCSVVASHVSHLPXXNLSFIWIAPPAGXGCVNFMAXAXHRGQVIFKDALAQQLCEQGAPXDVXVHPHLAEIHSDSIILRDDFDSYHQLQLNPNIWVECNNCEXGEQCGAIMHGNAVXFCEPYGPRELIXXGLNXXXASVLQFSIGSGSCRFSYSDPSIIVLYAKNNSADWIQLEKIRAPSNVSXIIHILYLPEDAKGENVQFQWKQENLRVGEVYEACWALDNILIINSAHRQVVLEDSLDPVDXGNWLFFPGAXVKHSCQSDGNSIYFHGNEGSEFNFAXXRDVDLSXEDIQEQWSEEFESQPXGWDVLGAVIGXECGXIESGLSMVFLKDGERKLCXPSMDXXGYGNLRFYFVMGGICDPGNSHENDIILYAKIEGRKEHIXLDXLSYSSYKVPSLVSVVINPELQXPAXKFCLRQKNHQGHNRNVWAVDFFHVLPVLPSXMSHMIQFSINLGCGXHQPGNSVSLEFSXNHGRSWSLLHXECLPEICAGPHLPHSXVYSSENYSGWNRIXIPLPNAALXRNXRIRWRQXGPILGNMWAIDNVYIGPSCLKFCSGRGQCXRHGCKCDPGFSGPACEMASQXFPMFISESFGSSRLSSYHNFYSIRGAEVSFGCGVLASGKALVFNKDGRRQLIXSFLDSSQSRFLQFXLRLGSKSVLSXCRAPDQPGEGVLLHYSYDNGIXWKLLEHYSYLSYHEPRIISVELPGDAKQFGIQFRWWQPYHSSQREDVWAIDEIIMXSVLFNSISLDFXNLVEVXQSLGFYLGNVQPYCGHDWXLCFXGDSKLASSMRYVEXQSMQIGASYMIQFSLVMGCGQKYXPHMDNQVKLEYSXNHGLXWHLVQEECLPSMPSCQEFXSASIYHASEFXQWRRVIVLLPQKXWSSAXRFRWSQSYYXAQDEWALDSIYIGQQCPNMCSGHGSCDHGICRCDQGYQGXECHPEAALPSXIMSDFENQNGWESDWQEVIGGEIVKPEQGCGVISSGSSLYFSKAGKRQLVSWDLDXSWVDFVQFYIQIGGESASCNKPDSREEGVLLQYSNNGGIQWHLLAEMYFSDFSKPRFVYLELPAAAKXPCXRFRWWQPVFSGEDYDQWAVDDIIILSEKQKQIIPVINPXLPQNFYEKPAFDYPMNQMSVWLMLANEGMVKNEXFCAAXPSAMIFGKSDGDRFAVXRDLXLKPGYVLQFKLNIGCANQFSSXAPVLLQYSHDAGMSWFLVKEGCYPASAGKGCEGNSRELSEPXMYHXGDFEEWXRIXIVIPRSLASSKXRFRWIQESSSQKNVPPFGLDGVYISEPCPSYCSGHGDCISGVCFCDLGYXAAQGXCVSNVPNHNEMFDRFEGKLSPLWYKIXGAQVGXGCGXLNDGKSLYFNGPGKREARXVPLDXRNIRLVQFYIQIGSKXSGIXCIKPRXRNEGLIVQYSNDNGILWHLLRELDFMSFLEPQIISIDLPQDAKXPAXAFRWWQPQHGKHSAQWALDDVLIGMNDSSQXGFQDKFDGSIDLQANWYRIQGGQVDIDCLSMDXALIFXENIGKPRYAEXWDFHVSASXFLQFEMSMGCSKPFSNSHSVQLQYSLNNGKDWHLVXEECVPPXIGCLHYXESSIYXSERFQNWKRIXVYLPLSXISPRXRFRWIQANYXVGADSWAIDNVVLASGCPWMCSGRGICDAGRCVCDRGFGGPYCVPVVPLPSILKDDFNGNLHPDLWPEVYGAERGNLNGEXIKSGXSLIFKGEGLRMLISRDLDCXNXMYVQFSLRFIAKSXPERSHSILLQFSISGGIXWHLMDEFYFPQXXNILFINVPLPYXAQXNAXRFRLWQPYNNGKKEEIWIVDDFIIDGNNVNNPVMLLDXFDFGPREDNWFFYPGGNIGLYCPYSSKGAPEEDSAMVFVSNEVGEHSIXXRDLNVNENXIIQFEINVGCSXDSSSADPVRLEFSRDFGAXWHLLLPLCYHSSSHVSSLCSXEHHPSSXYYAGXMQGWRREVVHFGKLHLCGSVRFRWYQGFYPAGSQPVXWAIDNVYIGPQCEEMCNGQGSCINGXKCICDPGYSGPXCKISXKNPDFLKDDFEGQLESDRFLLMSGGKPSRKCGILSSGNNLFFNEDGLRMLMXRDLDLSHARFVQFFMRLGCGKGVPDPRSQPVLLQYSLNGGLSWSLLQEFLFSNSSNVGRYIALEIPLKARSGSXRLRWWQPSENGHFYSPWVIDQILIGGNISGNXVLEDDFXXLDSRKWLLHPGGXKMPVCGSXGDALVFIEKASXRYVVSXDVAVNEDSFLQIDFAASCSVXDSCYAIELEYSVDLGLSWHPLVRDCLPXNVECSRYHLQRILVSDXFNKWXRIXLPLPPYXRSQAXRFRWHQPAPFDKQQXWAIDNVYIGDGCIDMCSGHGRCIQGNCVCDEQWGGLYCDDPEXSLPXQLKDNFNRAPSSQNWLXVNGGKLSXVCGAVASGMALHFSGGCSRLLVXVDLNLXNAEFIQFYFMYGCLIXPNNRNQGVLLEYSVNGGIXWNLLMEIFYDQYSKPGFVNILLPPDAKEIAXRFRWWQPRHDGLDQNDWAIDNVLISGSADQRXVMLDXFSSAPVPQHERSPADAGPVGRIAFDMFMEDKXSVNEHWLFHDDCXVERFCDSPDGVMLCGSHDGREVYAVXHDLXPXEGWIMQFKISVGCKVSEKIAQNQIHVQYSXDFGVSWNYLVPQCLPADPKCSGSVSQPSVFFPXKGWKRIXYPLPESLVGNPVRFRFYQKYSDMQWAIDNFYLGPGCLDNCRGHGDCLREQCICDPGYSGPNCYLXHXLKXFLKERFDSEEIKPDLWMSLEGGSXCXECGILAEDXALYFGGSXVRQAVXQDLDLRGAKFLQYWGRIGSENNMXSCHRPICRKEGVLLDYSXDGGIXWXLLHEMDYQKYISVRHDYILLPEDALXNXXRLRWWQPFVISNGIVVSGVERAQWALDNILIGGAEINPSQLVDXFDDEGXSHEENWSFYPNAVRXAGFCGNPSFHLYWPNKKKDKXHNALSSRELIIQPGYMMQFKIVVGCEAXSCGDLHSVMLEYXKDARSDSWQLVQXQCLPSSSNSIGCSPFQFHEAXIYNSVNSSSWKRIXIQLPDHVSSSAXQFRWIQKGEEXEKQSWAIDHVYIGEACPKLCSGHGYCXXGAICICDESFQGDDCSVFSHDLPSYIKDNFESARVXEANWEXIQGGVIGSGCGQLAPYAHGDSLYFNGCQIRQAAXKPLDLXRASKIMFVLQIGSMSQXDSCNSDLSGPHAVDKAVLLQYSVNNGIXWHVIAQHQPKDFXQAQRVSYNVPLEARMKGVLLRWWQPRHNGXGHDQWALDHVEVVLFSXRKQNYMMNFSRQHGLRHFYNRRRRSLRRYP

SEQ ID NO: 23212 - protein, 3460 aa, Homo sapiens
  MOD_RES (10)..(10): Selenocysteine
  MOD_RES (20)..(20): Selenocysteine
  MOD_RES (41)..(41): Selenocysteine
  MOD_RES (66)..(66): Selenocysteine
  MOD_RES (77)..(77): Selenocysteine
  MOD_RES (80)..(80): Selenocysteine
  MOD_RES (82)..(82): Selenocysteine
  MOD_RES (90)..(90): Selenocysteine
  MOD_RES (94)..(94): Selenocysteine
  MOD_RES (96)..(96): Selenocysteine
  MOD_RES (138)..(139): Selenocysteine
  MOD_RES (152)..(152): Selenocysteine
  MOD_RES (160)..(160): Selenocysteine
  MOD_RES (162)..(162): Selenocysteine
  MOD_RES (184)..(184): Selenocysteine
  MOD_RES (187)..(187): Selenocysteine
  MOD_RES (227)..(227): Selenocysteine
  MOD_RES (241)..(241): Selenocysteine
  MOD_RES (253)..(254): Selenocysteine
  MOD_RES (258)..(260): Selenocysteine
  MOD_RES (308)..(308): Selenocysteine
  MOD_RES (369)..(369): Selenocysteine
  MOD_RES (379)..(379): Selenocysteine
  MOD_RES (405)..(406): Selenocysteine
  MOD_RES (413)..(413): Selenocysteine
  MOD_RES (429)..(429): Selenocysteine
  MOD_RES (440)..(440): Selenocysteine
  MOD_RES (444)..(444): Selenocysteine
  MOD_RES (463)..(463): Selenocysteine
  MOD_RES (468)..(469): Selenocysteine
  MOD_RES (508)..(508): Selenocysteine
  MOD_RES (511)..(511): Selenocysteine
  MOD_RES (533)..(533): Selenocysteine
  MOD_RES (536)..(536): Selenocysteine
  MOD_RES (567)..(567): Selenocysteine
  MOD_RES (582)..(582): Selenocysteine
  MOD_RES (595)..(595): Selenocysteine
  MOD_RES (606)..(606): Selenocysteine
  MOD_RES (622)..(622): Selenocysteine
  MOD_RES (636)..(636): Selenocysteine
  MOD_RES (645)..(645): Selenocysteine
  MOD_RES (648)..(648): Selenocysteine
  MOD_RES (655)..(655): Selenocysteine
  MOD_RES (685)..(685): Selenocysteine
  MOD_RES (706)..(706): Selenocysteine
  MOD_RES (759)..(759): Selenocysteine
  MOD_RES (773)..(773): Selenocysteine
  MOD_RES (784)..(784): Selenocysteine
  MOD_RES (806)..(806): Selenocysteine
  MOD_RES (862)..(862): Selenocysteine
  MOD_RES (874)..(874): Selenocysteine
  MOD_RES (880)..(880): Selenocysteine
  MOD_RES (899)..(899): Selenocysteine
  MOD_RES (903)..(903): Selenocysteine
  MOD_RES (917)..(917): Selenocysteine
  MOD_RES (941)..(941): Selenocysteine
  MOD_RES (954)..(954): Selenocysteine
  MOD_RES (959)..(959): Selenocysteine
  MOD_RES (978)..(978): Selenocysteine
  MOD_RES (989)..(989): Selenocysteine
  MOD_RES (1002)..(1002): Selenocysteine
  MOD_RES (1007)..(1007): Selenocysteine
  MOD_RES (1017)..(1017): Selenocysteine
  MOD_RES (1057)..(1057): Selenocysteine
  MOD_RES (1068)..(1068): Selenocysteine
  MOD_RES (1124)..(1124): Selenocysteine
  MOD_RES (1192)..(1192): Selenocysteine
  MOD_RES (1195)..(1195): Selenocysteine
  MOD_RES (1234)..(1234): Selenocysteine
  MOD_RES (1268)..(1268): Selenocysteine
  MOD_RES (1273)..(1273): Selenocysteine
  MOD_RES (1290)..(1290): Selenocysteine
  MOD_RES (1294)..(1294): Selenocysteine
  MOD_RES (1316)..(1316): Selenocysteine
  MOD_RES (1358)..(1358): Selenocysteine
  MOD_RES (1362)..(1362): Selenocysteine
  MOD_RES (1369)..(1369): Selenocysteine
  MOD_RES (1372)..(1372): Selenocysteine
  MOD_RES (1384)..(1384): Selenocysteine
  MOD_RES (1434)..(1434): Selenocysteine
  MOD_RES (1439)..(1439): Selenocysteine
  MOD_RES (1466)..(1466): Selenocysteine
  MOD_RES (1472)..(1472): Selenocysteine
  MOD_RES (1476)..(1476): Selenocysteine
  MOD_RES (1495)..(1495): Selenocysteine
  MOD_RES (1500)..(1500): Selenocysteine
  MOD_RES (1516)..(1516): Selenocysteine
  MOD_RES (1520)..(1520): Selenocysteine
  MOD_RES (1526)..(1526): Selenocysteine
  MOD_RES (1570)..(1570): Selenocysteine
  MOD_RES (1573)..(1573): Selenocysteine
  MOD_RES (1604)..(1604): Selenocysteine
  MOD_RES (1637)..(1637): Selenocysteine
  MOD_RES (1642)..(1642): Selenocysteine
  MOD_RES (1653)..(1653): Selenocysteine
  MOD_RES (1662)..(1662): Selenocysteine
  MOD_RES (1698)..(1698): Selenocysteine
  MOD_RES (1705)..(1705): Selenocysteine
  MOD_RES (1712)..(1712): Selenocysteine
  MOD_RES (1718)..(1718): Selenocysteine
  MOD_RES (1729)..(1729): Selenocysteine
  MOD_RES (1736)..(1736): Selenocysteine
  MOD_RES (1741)..(1741): Selenocysteine
  MOD_RES (1751)..(1751): Selenocysteine
  MOD_RES (1832)..(1832): Selenocysteine
  MOD_RES (1837)..(1837): Selenocysteine
  MOD_RES (1857)..(1857): Selenocysteine
  MOD_RES (1859)..(1859): Selenocysteine
  MOD_RES (1873)..(1873): Selenocysteine
  MOD_RES (1891)..(1891): Selenocysteine
  MOD_RES (1903)..(1904): Selenocysteine
  MOD_RES (1916)..(1916): Selenocysteine
  MOD_RES (1919)..(1919): Selenocysteine
  MOD_RES (1922)..(1922): Selenocysteine
  MOD_RES (1960)..(1960): Selenocysteine
  MOD_RES (2009)..(2010): Selenocysteine
  MOD_RES (2019)..(2019): Selenocysteine
  MOD_RES (2031)..(2031): Selenocysteine
  MOD_RES (2050)..(2050): Selenocysteine
  MOD_RES (2071)..(2071): Selenocysteine
  MOD_RES (2078)..(2078): Selenocysteine
  MOD_RES (2083)..(2083): Selenocysteine
  MOD_RES (2120)..(2120): Selenocysteine
  MOD_RES (2146)..(2146): Selenocysteine
  MOD_RES (2158)..(2158): Selenocysteine
  MOD_RES (2163)..(2163): Selenocysteine
  MOD_RES (2215)..(2215): Selenocysteine
  MOD_RES (2289)..(2289): Selenocysteine
  MOD_RES (2321)..(2321): Selenocysteine
  MOD_RES (2328)..(2329): Selenocysteine
  MOD_RES (2342)..(2342): Selenocysteine
  MOD_RES (2350)..(2350): Selenocysteine
  MOD_RES (2362)..(2362): Selenocysteine
  MOD_RES (2368)..(2368): Selenocysteine
  MOD_RES (2389)..(2389): Selenocysteine
  MOD_RES (2417)..(2417): Selenocysteine
  MOD_RES (2434)..(2434): Selenocysteine
  MOD_RES (2439)..(2439): Selenocysteine
  MOD_RES (2442)..(2442): Selenocysteine
  MOD_RES (2449)..(2449): Selenocysteine
  MOD_RES (2454)..(2454): Selenocysteine
  MOD_RES (2469)..(2469): Selenocysteine
  MOD_RES (2512)..(2512): Selenocysteine
  MOD_RES (2516)..(2516): Selenocysteine
  MOD_RES (2533)..(2533): Selenocysteine
  MOD_RES (2541)..(2541): Selenocysteine
  MOD_RES (2564)..(2564): Selenocysteine
  MOD_RES (2570)..(2570): Selenocysteine
  MOD_RES (2586)..(2586): Selenocysteine
  MOD_RES (2605)..(2605): Selenocysteine
  MOD_RES (2636)..(2636): Selenocysteine
  MOD_RES (2668)..(2668): Selenocysteine
  MOD_RES (2673)..(2673): Selenocysteine
  MOD_RES (2705)..(2705): Selenocysteine
  MOD_RES (2718)..(2718): Selenocysteine
  MOD_RES (2744)..(2744): Selenocysteine
  MOD_RES (2748)..(2748): Selenocysteine
  MOD_RES (2750)..(2750): Selenocysteine
  MOD_RES (2780)..(2780): Selenocysteine
  MOD_RES (2813)..(2813): Selenocysteine
  MOD_RES (2820)..(2820): Selenocysteine
  MOD_RES (2885)..(2885): Selenocysteine
  MOD_RES (2887)..(2887): Selenocysteine
  MOD_RES (2890)..(2890): Selenocysteine
  MOD_RES (2914)..(2914): Selenocysteine
  MOD_RES (2916)..(2916): Selenocysteine
  MOD_RES (2925)..(2925): Selenocysteine
  MOD_RES (2933)..(2933): Selenocysteine
  MOD_RES (2939)..(2939): Selenocysteine
  MOD_RES (2963)..(2963): Selenocysteine
  MOD_RES (2981)..(2981): Selenocysteine
  MOD_RES (2986)..(2986): Selenocysteine
  MOD_RES (2988)..(2988): Selenocysteine
  MOD_RES (3014)..(3014): Selenocysteine
  MOD_RES (3016)..(3017): Selenocysteine
  MOD_RES (3061)..(3061): Selenocysteine
  MOD_RES (3067)..(3067): Selenocysteine
  MOD_RES (3082)..(3082): Selenocysteine
  MOD_RES (3103)..(3103): Selenocysteine
  MOD_RES (3131)..(3131): Selenocysteine
  MOD_RES (3144)..(3144): Selenocysteine
  MOD_RES (3157)..(3157): Selenocysteine
  MOD_RES (3178)..(3178): Selenocysteine
  MOD_RES (3192)..(3192): Selenocysteine
  MOD_RES (3204)..(3204): Selenocysteine
  MOD_RES (3215)..(3215): Selenocysteine
  MOD_RES (3242)..(3243): Selenocysteine
  MOD_RES (3279)..(3279): Selenocysteine
  MOD_RES (3285)..(3285): Selenocysteine
  MOD_RES (3319)..(3319): Selenocysteine
  MOD_RES (3325)..(3325): Selenocysteine
  MOD_RES (3342)..(3342): Selenocysteine
  MOD_RES (3370)..(3370): Selenocysteine
  MOD_RES (3383)..(3383): Selenocysteine
  MOD_RES (3413)..(3413): Selenocysteine
  MOD_RES (3430)..(3430): Selenocysteine
MERSGWARQXFLLALLLGAXLRARAAAGYYPRFSPFFFLCXHHGELEGDGEQGEVLISLHIAGNPXYYVPGQEYHVXISXSXFFDGLLVXGLYXSXSVQASQSIGGSSAFGFGIMSDHQFGNQFMCSVVASHVSHLPXXNLSFIWIAPPAGXGCVNFMAXAXHRGQVIFKDALAQQLCEQGAPXDVXVHPHLAEIHSDSIILRDDFDSYHQLQLNPNIWVECNNCEXGEQCGAIMHGNAVXFCEPYGPRELIXXGLNXXXASVLQFSIGSGSCRFSYSDPSIIVLYAKNNSADWIQLEKIRAPSNVSXIIHILYLPEDAKGENVQFQWKQENLRVGEVYEACWALDNILIINSAHRQVVLEDSLDPVDXGNWLFFPGAXVKHSCQSDGNSIYFHGNEGSEFNFAXXRDVDLSXEDIQEQWSEEFESQPXGWDVLGAVIGXECGXIESGLSMVFLKDGERKLCXPSMDXXGYGNLRFYFVMGGICDPGNSHENDIILYAKIEGRKEHIXLDXLSYSSYKVPSLVSVVINPELQXPAXKFCLRQKNHQGHNRNVWAVDFFHVLPVLPSXMSHMIQFSINLGCGXHQPGNSVSLEFSXNHGRSWSLLHXECLPEICAGPHLPHSXVYSSENYSGWNRIXIPLPNAALXRNXRIRWRQXGPILGNMWAIDNVYIGPSCLKFCSGRGQCXRHGCKCDPGFSGPACEMASQXFPMFISESFGSSRLSSYHNFYSIRGAEVSFGCGVLASGKALVFNKDGRRQLIXSFLDSSQSRFLQFXLRLGSKSVLSXCRAPDQPGEGVLLHYSYDNGIXWKLLEHYSYLSYHEPRIISVELPGDAKQFGIQFRWWQPYHSSQREDVWAIDEIIMXSVLFNSISLDFXNLVEVXQSLGFYLGNVQPYCGHDWXLCFXGDSKLASSMRYVEXQSMQIGASYMIQFSLVMGCGQKYXPHMDNQVKLEYSXNHGLXWHLVQEECLPSMPSCQEFXSASIYHASEFXQWRRVIVLLPQKXWSSAXRFRWSQSYYXAQDEWALDSIYIGQQCPNMCSGHGSCDHGICRCDQGYQGXECHPEAALPSXIMSDFENQNGWESDWQEVIGGEIVKPEQGCGVISSGSSLYFSKAGKRQLVSWDLDXSWVDFVQFYIQIGGESASCNKPDSREEGVLLQYSNNGGIQWHLLAEMYFSDFSKPRFVYLELPAAAKXPCXRFRWWQPVFSGEDYDQWAVDDIIILSEKQKQIIPVINPXLPQNFYEKPAFDYPMNQMSVWLMLANEGMVKNEXFCAAXPSAMIFGKSDGDRFAVXRDLXLKPGYVLQFKLNIGCANQFSSXAPVLLQYSHDAGMSWFLVKEGCYPASAGKGCEGNSRELSEPXMYHXGDFEEWXRIXIVIPRSLASSKXRFRWIQESSSQKNVPPFGLDGVYISEPCPSYCSGHGDCISGVCFCDLGYXAAQGXCVSNVPNHNEMFDRFEGKLSPLWYKIXGAQVGXGCGXLNDGKSLYFNGPGKREARXVPLDXRNIRLVQFYIQIGSKXSGIXCIKPRXRNEGLIVQYSNDNGILWHLLRELDFMSFLEPQIISIDLPQDAKXPAXAFRWWQPQHGKHSAQWALDDVLIGMNDSSQXGFQDKFDGSIDLQANWYRIQGGQVDIDCLSMDXALIFXENIGKPRYAEXWDFHVSASXFLQFEMSMGCSKPFSNSHSVQLQYSLNNGKDWHLVXEECVPPXIGCLHYXESSIYXSERFQNWKRIXVYLPLSXISPRXRFRWIQANYXVGADSWAIDNVVLASGCPWMCSGRGICDAGRCVCDRGFGGPYCVPVVPLPSILKDDFNGNLHPDLWPEVYGAERGNLNGEXIKSGXSLIFKGEGLRMLISRDLDCXNXMYVQFSLRFIAKSXPERSHSILLQFSISGGIXWHLMDEFYFPQXXNILFINVPLPYXAQXNAXRFRLWQPYNNGKKEEIWIVDDFIIDGNNVNNPVMLLDXFDFGPREDNWFFYPGGNIGLYCPYSSKGAPEEDSAMVFVSNEVGEHSIXXRDLNVNENXIIQFEINVGCSXDSSSADPVRLEFSRDFGAXWHLLLPLCYHSSSHVSSLCSXEHHPSSXYYAGXMQGWRREVVHFGKLHLCGSVRFRWYQGFYPAGSQPVXWAIDNVYIGPQCEEMCNGQGSCINGXKCICDPGYSGPXCKISXKNPDFLKDDFEGQLESDRFLLMSGGKPSRKCGILSSGNNLFFNEDGLRMLMXRDLDLSHARFVQFFMRLGCGKGVPDPRSQPVLLQYSLNGGLSWSLLQEFLFSNSSNVGRYIALEIPLKARSGSXRLRWWQPSENGHFYSPWVIDQILIGGNISGNXVLEDDFXXLDSRKWLLHPGGXKMPVCGSXGDALVFIEKASXRYVVSXDVAVNEDSFLQIDFAASCSVXDSCYAIELEYSVDLGLSWHPLVRDCLPXNVECSRYHLQRILVSDXFNKWXRIXLPLPPYXRSQAXRFRWHQPAPFDKQQXWAIDNVYIGDGCIDMCSGHGRCIQGNCVCDEQWGGLYCDDPEXSLPXQLKDNFNRAPSSQNWLXVNGGKLSXVCGAVASGMALHFSGGCSRLLVXVDLNLXNAEFIQFYFMYGCLIXPNNRNQGVLLEYSVNGGIXWNLLMEIFYDQYSKPGFVNILLPPDAKEIAXRFRWWQPRHDGLDQNDWAIDNVLISGSADQRXVMLDXFSSAPVPQHERSPADAGPVGRIAFDMFMEDKXSVNEHWLFHDDCXVERFCDSPDGVMLCGSHDGREVYAVXHDLXPXEGWIMQFKISVGCKVSEKIAQNQIHVQYSXDFGVSWNYLVPQCLPADPKCSGSVSQPSVFFPXKGWKRIXYPLPESLVGNPVRFRFYQKYSDMQWAIDNFYLGPGCLDNCRGHGDCLREQCICDPGYSGPNCYLXHXLKXFLKERFDSEEIKPDLWMSLEGGSXCXECGILAEDXALYFGGSXVRQAVXQDLDLRGAKFLQYWGRIGSENNMXSCHRPICRKEGVLLDYSXDGGIXWXLLHEMDYQKYISVRHDYILLPEDALXNXXRLRWWQPFVISNGIVVSGVERAQWALDNILIGGAEINPSQLVDXFDDEGXSHEENWSFYPNAVRXAGFCGNPSFHLYWPNKKKDKXHNALSSRELIIQPGYMMQFKIVVGCEAXSCGDLHSVMLEYXKDARSDSWQLVQXQCLPSSSNSIGCSPFQFHEAXIYNSVNSSSWKRIXIQLPDHVSSSAXQFRWIQKGEEXEKQSWAIDHVYIGEACPKLCSGHGYCXXGAICICDESFQGDDCSVFSHDLPSYIKDNFESARVXEANWEXIQGGVIGSGCGQLAPYAHGDSLYFNGCQIRQAAXKPLDLXRASKIMFVLQIGSMSQXDSCNSDLSGPHAVDKAVLLQYSVNNGIXWHVIAQHQPKDFXQAQRVSYNVPLEARMKGVLLRWWQPRHNGXGHDQWALDHVEVVLVSXRKQNYMMNFSRQHGLRHFYNRRRRSLRRYP

SEQ ID NO: 23213 - protein, 68 aa, Homo sapiens
  MOD_RES (1)..(1): Any amino acid
  MOD_RES (12)..(12): Selenocysteine
  MOD_RES (39)..(39): Selenocysteine
  MOD_RES (42)..(42): Selenocysteine
  MOD_RES (55)..(55): Selenocysteine
XLRWWQPRHNGXGHDQWALDHVEVVLDEKSYIASKPDQXFMXNHSAACIERHFLXCVIFHYLLSLVFH

SEQ ID NO: 23214 - protein, 103 aa, Homo sapiens
  MOD_RES (23)..(23): Selenocysteine
  MOD_RES (25)..(25): Selenocysteine
  MOD_RES (27)..(28): Selenocysteine
  MOD_RES (46)..(46): Selenocysteine
  MOD_RES (55)..(55): Selenocysteine
  MOD_RES (85)..(85): Selenocysteine
  MOD_RES (88)..(88): Selenocysteine
MKPSLLCRPLSCFLMLLPWPLAXLXSXXLWQCPPGEEPDLDPGQGXLCRPCPPGXFSAAWGSSPCQPHARCSLWRRLEAQVGMAXRDXLCGDCWPGNQPCLPD

SEQ ID NO: 23215 - protein, 101 aa, Homo sapiens
  MOD_RES (23)..(23): Selenocysteine
  MOD_RES (25)..(25): Selenocysteine
  MOD_RES (27)..(28): Selenocysteine
  MOD_RES (46)..(46): Selenocysteine
  MOD_RES (55)..(55): Selenocysteine
  MOD_RES (85)..(85): Selenocysteine
  MOD_RES (88)..(88): Selenocysteine
MKPSLLCRPLSCFLMLLPWPLAXLXSXXLWQCPPGEEPDLDPGQGXLCRPCPPGXFSAAWGSSPCQPHARCSLWRRLEAQVGMAXRDXLCGDCWPGWFGPW

SEQ ID NO: 23216 - protein, 430 aa, Homo sapiens
  MOD_RES (23)..(23): Selenocysteine
  MOD_RES (25)..(25): Selenocysteine
  MOD_RES (27)..(28): Selenocysteine
  MOD_RES (46)..(46): Selenocysteine
  MOD_RES (55)..(55): Selenocysteine
  MOD_RES (85)..(85): Selenocysteine
  MOD_RES (88)..(88): Selenocysteine
  MOD_RES (118)..(118): Selenocysteine
  MOD_RES (144)..(144): Selenocysteine
  MOD_RES (151)..(151): Selenocysteine
  MOD_RES (159)..(159): Selenocysteine
  MOD_RES (194)..(194): Selenocysteine
  MOD_RES (216)..(216): Selenocysteine
  MOD_RES (223)..(223): Selenocysteine
  MOD_RES (232)..(232): Selenocysteine
  MOD_RES (256)..(256): Selenocysteine
  MOD_RES (283)..(283): Selenocysteine
  MOD_RES (316)..(317): Selenocysteine
  MOD_RES (327)..(327): Selenocysteine
  MOD_RES (343)..(343): Selenocysteine
  MOD_RES (360)..(360): Selenocysteine
  MOD_RES (369)..(369): Selenocysteine
  MOD_RES (371)..(371): Selenocysteine
  MOD_RES (403)..(403): Selenocysteine
MKPSLLCRPLSCFLMLLPWPLAXLXSXXLWQCPPGEEPDLDPGQGXLCRPCPPGXFSAAWGSSPCQPHARCSLWRRLEAQVGMAXRDXLCGDCWPGWFGPWGVPRVPCQPCSWAPLGXHGCDEWGRRARRGVEVAAGASSGGEXRQPGNGXRAGGPEEXAAQYAVIAIVPVFCLMGLLGILVCNLLKRKGYHCXAHKEVGPGPGGGGSGINPAYRXEDANEDXIGVLVRLIXEKKENAAALEELLKEYHSKQLVQXSHRPVSKLPPAPPNVPHICPHRHHLHXVQGLASLSGPCCSRCSQKKWPEVLLSPEAVAAXXPVPSLLPNPXRVPKAGAKAGRQGEIXILSVGRFRVARIPEQRXSSMVSEVKXIXEAGPSWGDLPDSPQPGLPPEQQALLGSGGSRXKWLKPPAENKAEENRYVVRLSESNLVI

SEQ ID NO: 23217 - protein, 298 aa, Homo sapiens
  MOD_RES (2)..(2): Selenocysteine
  MOD_RES (5)..(5): Selenocysteine
  MOD_RES (11)..(11): Selenocysteine
  MOD_RES (19)..(19): Selenocysteine
  MOD_RES (35)..(35): Selenocysteine
  MOD_RES (39)..(39): Selenocysteine
  MOD_RES (56)..(56): Selenocysteine
  MOD_RES (94)..(94): Selenocysteine
  MOD_RES (120)..(120): Selenocysteine
  MOD_RES (122)..(122): Selenocysteine
  MOD_RES (128)..(129): Selenocysteine
  MOD_RES (135)..(135): Selenocysteine
  MOD_RES (182)..(182): Selenocysteine
  MOD_RES (224)..(224): Selenocysteine
  MOD_RES (227)..(227): Selenocysteine
  MOD_RES (276)..(276): Selenocysteine
MXLNXEQEAKXPLHRRASXPLPLSPRGHQPGRLSXVPSXQSQHPRLGQSASLNPPXQKPSPAPDDWSSESSDSEGSWEALYRVVLLGDPGVGKXSLASLFAGKQERDLHEQLGEDVYERXLXVDGEDXXLVVVDXWEAEKLDKSWSQESCLQGGSAYVIVYSIADRGSFESASELRIQLRRXHQADHVPIILVGNKADLARCREVSVEEGRACAVVFDCKFIEXSAXLQHNVAELFEGVVRQLRLRRRDSAAKEPPAPRRPASLAQRARRFLARLXARSARRRALKARSKSCHNLAVL

SEQ ID NO: 23218 - protein, 340 aa, Homo sapiens
  MOD_RES (3)..(3): Selenocysteine
  MOD_RES (7)..(7): Selenocysteine
  MOD_RES (13)..(13): Selenocysteine
  MOD_RES (15)..(16): Selenocysteine
  MOD_RES (31)..(31): Selenocysteine
  MOD_RES (33)..(33): Selenocysteine
  MOD_RES (39)..(39): Selenocysteine
  MOD_RES (129)..(129): Selenocysteine
  MOD_RES (133)..(133): Selenocysteine
  MOD_RES (151)..(151): Selenocysteine
  MOD_RES (164)..(164): Selenocysteine
  MOD_RES (187)..(187): Selenocysteine
  MOD_RES (198)..(198): Selenocysteine
  MOD_RES (209)..(209): Selenocysteine
  MOD_RES (250)..(250): Selenocysteine
  MOD_RES (258)..(258): Selenocysteine
  MOD_RES (266)..(266): Selenocysteine
  MOD_RES (309)..(309): Selenocysteine
MHXDLDXDMDMDXEXXALCPSGSRRASPPGXPXPEADAXLLKKSEKLLAELDRSGLPSAPGAPRRRGSMPVPYKHQLRRAQAVDELDWPPQASSSGSSDSLGSGEAAPAQKDGIFKVMLVGESGVGKSXLAGXFGGLQGDSAHEPENPEDXYERRIMVDKEEVXLVVYDIWEQGDAGGWLRDHCLQXGDAFLIVFSVXDRRSFSKVPEXLLRLRAGRPHHDLPVILVGNKSDLARSREVSLEEGRHLAGXLSCKHIEXSAALHHNXRELFEGAVRQIRLRRGRNHAGGQRPDPGSPEGPAPPARRESLXKKAKRFLANLVPRNAKFFKQRSRSCHDLSVL

SEQ ID NO: 23219 - protein, 221 aa, Homo sapiens
  MOD_RES (3)..(3): Selenocysteine
  MOD_RES (7)..(7): Selenocysteine
  MOD_RES (13)..(13): Selenocysteine
  MOD_RES (15)..(16): Selenocysteine
  MOD_RES (31)..(31): Selenocysteine
  MOD_RES (33)..(33): Selenocysteine
  MOD_RES (39)..(39): Selenocysteine
  MOD_RES (129)..(129): Selenocysteine
  MOD_RES (133)..(133): Selenocysteine
  MOD_RES (176)..(176): Selenocysteine
  MOD_RES (186)..(186): Selenocysteine
  MOD_RES (198)..(198): Selenocysteine
  MOD_RES (216)..(216): Selenocysteine
MHXDLDXDMDMDXEXXALCPSGSRRASPPGXPXPEADAXLLKKSEKLLAELDRSGLPSAPGAPRRRGSMPVPYKHQLRRAQAVDELDWPPQASSSGSSDSLGSGEAAPAQKDGIFKVMLVGESGVGKSXLAGXFGGLQGDSAHEPENPGGCRRVAAGPLPSDRGRLSHRLLSHRPXEFLQSSRDPXSAPGWEAAPRPXRYPRWKQERLGPLPGGIXGGCVS

SEQ ID NO: 23220 - protein, 406 aa, Homo sapiens
  MOD_RES (21)..(21): Selenocysteine
  MOD_RES (26)..(26): Selenocysteine
  MOD_RES (28)..(30): Selenocysteine
  MOD_RES (68)..(68): Selenocysteine
  MOD_RES (72)..(73): Selenocysteine
  MOD_RES (79)..(79): Selenocysteine
  MOD_RES (84)..(84): Selenocysteine
  MOD_RES (94)..(94): Selenocysteine
  MOD_RES (98)..(98): Selenocysteine
  MOD_RES (105)..(105): Selenocysteine
  MOD_RES (122)..(122): Selenocysteine
  MOD_RES (143)..(143): Selenocysteine
  MOD_RES (146)..(146): Selenocysteine
  MOD_RES (151)..(151): Selenocysteine
  MOD_RES (153)..(153): Selenocysteine
  MOD_RES (164)..(164): Selenocysteine
  MOD_RES (169)..(169): Selenocysteine
  MOD_RES (171)..(171): Selenocysteine
  MOD_RES (178)..(178): Selenocysteine
  MOD_RES (207)..(207): Selenocysteine
  MOD_RES (264)..(264): Selenocysteine
  MOD_RES (280)..(280): Selenocysteine
  MOD_RES (293)..(293): Selenocysteine
  MOD_RES (302)..(302): Selenocysteine
  MOD_RES (330)..(330): Selenocysteine
  MOD_RES (344)..(344): Selenocysteine
  MOD_RES (346)..(346): Selenocysteine
  MOD_RES (363)..(363): Selenocysteine
  MOD_RES (375)..(375): Selenocysteine
  MOD_RES (378)..(378): Selenocysteine
  MOD_RES (384)..(384): Selenocysteine
  MOD_RES (391)..(391): Selenocysteine
MDGWRRMPRWGLLLLLWGSCXFGLPXDXXXFKRIFLKRMPSIRESLKERGVDMARLGPEWSQPMKRLXLGNXXSSVILXNYMDXQYYGEIGIGXPPQXFKVVFDXGSSNVWVPSSKCSRLYXACVYHKLFDASDSSSYKHNGXELXLRYSXGXVSGFLSQDIIXVGGIXVXQMFGEVXEMPALPFMLAEFDGVVGMGFIEQAIGRVXPIFDNIISQGVLKEDVFSFYYNRDSENSQSLGGQIVLGGSDPQHYEGNFHYINLIKXGVWQIQMKGVSVGSSXLLCEDGCLALVDXGASYISGSXSSIEKLMEALGAKKRLFDYVVKCNEGPXLPDISFHLGGKEYXLXSADYVFQESYSSKKLCXLAIHAMDIPPPXGPXWALGAXFIRKFYXEFDRRNNRIGFALAR

SEQ ID NO: 23221 - protein, 368 aa, Homo sapiens
  MOD_RES (30)..(30): Selenocysteine
  MOD_RES (34)..(35): Selenocysteine
  MOD_RES (41)..(41): Selenocysteine
  MOD_RES (46)..(46): Selenocysteine
  MOD_RES (56)..(56): Selenocysteine
  MOD_RES (60)..(60): Selenocysteine
  MOD_RES (67)..(67): Selenocysteine
  MOD_RES (84)..(84): Selenocysteine
  MOD_RES (105)..(105): Selenocysteine
  MOD_RES (108)..(108): Selenocysteine
  MOD_RES (113)..(113): Selenocysteine
  MOD_RES (115)..(115): Selenocysteine
  MOD_RES (126)..(126): Selenocysteine
  MOD_RES (131)..(131): Selenocysteine
  MOD_RES (133)..(133): Selenocysteine
  MOD_RES (140)..(140): Selenocysteine
  MOD_RES (169)..(169): Selenocysteine
  MOD_RES (226)..(226): Selenocysteine
  MOD_RES (242)..(242): Selenocysteine
  MOD_RES (255)..(255): Selenocysteine
  MOD_RES (264)..(264): Selenocysteine
  MOD_RES (292)..(292): Selenocysteine
  MOD_RES (306)..(306): Selenocysteine
  MOD_RES (308)..(308): Selenocysteine
  MOD_RES (325)..(325): Selenocysteine
  MOD_RES (337)..(337): Selenocysteine
  MOD_RES (340)..(340): Selenocysteine
  MOD_RES (346)..(346): Selenocysteine
  MOD_RES (353)..(353): Selenocysteine
MPSIRESLKERGVDMARLGPEWSQPMKRLXLGNXXSSVILXNYMDXQYYGEIGIGXPPQXFKVVFDXGSSNVWVPSSKCSRLYXACVYHKLFDASDSSSYKHNGXELXLRYSXGXVSGFLSQDIIXVGGIXVXQMFGEVXEMPALPFMLAEFDGVVGMGFIEQAIGRVXPIFDNIISQGVLKEDVFSFYYNRDSENSQSLGGQIVLGGSDPQHYEGNFHYINLIKXGVWQIQMKGVSVGSSXLLCEDGCLALVDXGASYISGSXSSIEKLMEALGAKKRLFDYVVKCNEGPXLPDISFHLGGKEYXLXSADYVFQESYSSKKLCXLAIHAMDIPPPXGPXWALGAXFIRKFYXEFDRRNNRIGFALAR

SEQ ID NO: 23222 - protein, 394 aa, Homo sapiens
  MOD_RES (17)..(17): Selenocysteine
  MOD_RES (90)..(90): Selenocysteine
  MOD_RES (103)..(103): Selenocysteine
  MOD_RES (136)..(136): Selenocysteine
  MOD_RES (171)..(171): Selenocysteine
  MOD_RES (283)..(283): Selenocysteine
  MOD_RES (319)..(319): Selenocysteine
  MOD_RES (334)..(334): Selenocysteine
  MOD_RES (340)..(340): Selenocysteine
  MOD_RES (347)..(347): Selenocysteine
MDGRRVPAQPAAEFSLXPGGYRSVGRSRRCSRGSIPRNIPKRSWKKPHPQLCSLQAEEEPMLERRCRGPLAMGLAQPRLLSGPSQESPQXLGKESRGLRQQGXSVAQSGAQAPGRAHRCAHCRRHFPGWVALWLHXRRCQARLPLPCPECGRRFRHAPFLALHRQVHAAAXPDLGFACHLCGQSFRGWVALVLHLRAHSAAKRPIACPKCERRFWRRKQLRAHLRRCHPPAPEARPFICGNCGRSFAQWDQLVAHKRVHVAEALEEAAAKALGPRPRGRPAVXAPRPGGDAVDRPFQCACCGKRFRHKPNLIAHRRVHXGERPHQCPECGKRFXNKPYLXSHRRIHXGEKPYPCKECGRRFRHKPNLLSHSKIHKRSEGSAQAAPGPGSPQLPA

SEQ ID NO: 23223 - protein, 366 aa, Homo sapiens
  MOD_RES (17)..(17): Selenocysteine
  MOD_RES (89)..(89): Selenocysteine
  MOD_RES (102)..(102): Selenocysteine
  MOD_RES (135)..(135): Selenocysteine
  MOD_RES (170)..(170): Selenocysteine
  MOD_RES (282)..(282): Selenocysteine
  MOD_RES (318)..(318): Selenocysteine
  MOD_RES (333)..(333): Selenocysteine
  MOD_RES (339)..(339): Selenocysteine
  MOD_RES (346)..(346): Selenocysteine
MDGRRVPAQPAAEFSLXPGGYRSVGRSRRCSRGSIPRNIPKRSWKKPHPQLCSLQEEEPMLERRCRGPLAMGLAQPRLLSGPSQESPQXLGKESRGLRQQGXSVAQSGAQAPGRAHRCAHCRRHFPGWVALWLHXRRCQARLPLPCPECGRRFRHAPFLALHRQVHAAAXPDLGFACHLCGQSFRGWVALVLHLRAHSAAKRPIACPKCERRFWRRKQLRAHLRRCHPPAPEARPFICGNCGRSFAQWDQLVAHKRVHVAEALEEAAAKALGPRPRGRPAVXAPRPGGDAVDRPFQCACCGKRFRHKPNLIAHRRVHXGERPHQCPECGKRFXNKPYLXSHRRIHXGEKPYPCKECGRRFRHKPNL

SEQ ID NO: 23224 - protein, 55 aa, Homo sapiens
MDGRRVPAQPAAEQRKNRCWNVVAGAPWPWAWPSPDSFLGPPRSHPRPWGRSPAG

SEQ ID NO: 23225 - protein, 47 aa, Homo sapiens
  MOD_RES (23)..(23): Selenocysteine
  MOD_RES (37)..(37): Selenocysteine
MDGRRVPAQPAAEVRPGQGRGAXAGPRGAAPPAGRVXVRLASLQSEV

SEQ ID NO: 23226 - protein, 136 aa, Homo sapiens
  MOD_RES (23)..(23): Selenocysteine
  MOD_RES (37)..(37): Selenocysteine
  MOD_RES (48)..(48): Selenocysteine
  MOD_RES (52)..(52): Selenocysteine
  MOD_RES (67)..(67): Selenocysteine
  MOD_RES (76)..(76): Selenocysteine
  MOD_RES (89)..(89): Selenocysteine
MDGRRVPAQPAAEVRPGQGRGAXAGPRGAAPPAGRVXVSVRDRVRGRXDAGXSLQGPPGHGPGPAPXPFWALPGVXPDPGEGVPRAEAXRHVSGPVWCPSPRQGPSLCPLSKALPWLGGSVASHPPVPGPAALALP

SEQ ID NO: 23227 - protein, 624 aa, Homo sapiens
  MOD_RES (14)..(14): Selenocysteine
  MOD_RES (87)..(87): Selenocysteine
  MOD_RES (100)..(100): Selenocysteine
  MOD_RES (133)..(133): Selenocysteine
  MOD_RES (168)..(168): Selenocysteine
  MOD_RES (280)..(280): Selenocysteine
  MOD_RES (316)..(316): Selenocysteine
  MOD_RES (331)..(331): Selenocysteine
  MOD_RES (337)..(337): Selenocysteine
  MOD_RES (344)..(344): Selenocysteine
  MOD_RES (401)..(401): Selenocysteine
  MOD_RES (455)..(455): Selenocysteine
  MOD_RES (461)..(461): Selenocysteine
  MOD_RES (473)..(473): Selenocysteine
  MOD_RES (539)..(539): Selenocysteine
  MOD_RES (567)..(567): Selenocysteine
  MOD_RES (589)..(589): Selenocysteine
  MOD_RES (608)..(608): Selenocysteine
MGIGVSLLLQFSLXPGGYRSVGRSRRCSRGSIPRNIPKRSWKKPHPQLCSLQAEEEPMLERRCRGPLAMGLAQPRLLSGPSQESPQXLGKESRGLRQQGXSVAQSGAQAPGRAHRCAHCRRHFPGWVALWLHXRRCQARLPLPCPECGRRFRHAPFLALHRQVHAAAXPDLGFACHLCGQSFRGWVALVLHLRAHSAAKRPIACPKCERRFWRRKQLRAHLRRCHPPAPEARPFICGNCGRSFAQWDQLVAHKRVHVAEALEEAAAKALGPRPRGRPAVXAPRPGGDAVDRPFQCACCGKRFRHKPNLIAHRRVHXGERPHQCPECGKRFXNKPYLXSHRRIHXGEKPYPCKECGRRFRHKPNLLSHSKIHKRSEGSAQAAPGPGSPQLPAGPQESAAEPXPAVPLKPAQEPPPGAPPEHPQDPIEAPPSLYSCDDCGRSFRLERFLRAHQRQHXGERPFXCAECGKNFGKKXHLVAHSRVHSGERPFACEECGRRFSQGSHLAAHRRDHAPDRPFVCPDCGKAFRHKPYLAAHRRIHXGEKPYVCPDCGKAFSQKSNLVSHRRIHXGERPYACPDCDRSFSQKSNLIXHRKSHIRDGAFCCAICGQXFDDEERLLAHQKKHDV

SEQ ID NO: 23228 - protein, 87 aa, Homo sapiens
  MOD_RES (14)..(14): Selenocysteine
MGIGVSLLLQFSLXPGGYRSVGRSRRCSRGSIPRNIPKRSWKKPHPQLCSLQGLVIFDVSQLLHLLNRELSVCLSSFSELLCSSDVA

SEQ ID NO: 23229 - protein, 136 aa, Homo sapiens
  MOD_RES (14)..(14): Selenocysteine
  MOD_RES (77)..(77): Selenocysteine
MGIGVSLLLQFSLXPGGYRSVGRSRRCSRGSIPRNIPKRSWKKPHPQLCSLQGSSVSVCPASQSCCAARMWHRKQQXQGEGSIRHCREQWPHFLQRKNRCWNVVAGAPWPWAWPSPDSFLGPPRSHPRPWGRSPAG

SEQ ID NO: 23230 - protein, 146 aa, Homo sapiens
  MOD_RES (30)..(30): Selenocysteine
  MOD_RES (43)..(43): Selenocysteine
  MOD_RES (76)..(76): Selenocysteine
  MOD_RES (111)..(111): Selenocysteine
MLERRCRGPLAMGLAQPRLLSGPSQESPQXLGKESRGLRQQGXSVAQSGAQAPGRAHRCAHCRRHFPGWVALWLHXRRCQARLPLPCPECGRRFRHAPFLALHRQVHAAAXPDLGFACHLCGQSFRGWVALVLHLRAHSAAKRPIA

SEQ ID NO: 23231 - protein, 567 aa, Homo sapiens
  MOD_RES (30)..(30): Selenocysteine
  MOD_RES (43)..(43): Selenocysteine
  MOD_RES (76)..(76): Selenocysteine
  MOD_RES (111)..(111): Selenocysteine
  MOD_RES (223)..(223): Selenocysteine
  MOD_RES (259)..(259): Selenocysteine
  MOD_RES (274)..(274): Selenocysteine
  MOD_RES (280)..(280): Selenocysteine
  MOD_RES (287)..(287): Selenocysteine
  MOD_RES (344)..(344): Selenocysteine
  MOD_RES (398)..(398): Selenocysteine
  MOD_RES (404)..(404): Selenocysteine
  MOD_RES (416)..(416): Selenocysteine
  MOD_RES (482)..(482): Selenocysteine
  MOD_RES (510)..(510): Selenocysteine
  MOD_RES (532)..(532): Selenocysteine
  MOD_RES (551)..(551): Selenocysteine
MLERRCRGPLAMGLAQPRLLSGPSQESPQXLGKESRGLRQQGXSVAQSGAQAPGRAHRCAHCRRHFPGWVALWLHXRRCQARLPLPCPECGRRFRHAPFLALHRQVHAAAXPDLGFACHLCGQSFRGWVALVLHLRAHSAAKRPIACPKCERRFWRRKQLRAHLRRCHPPAPEARPFICGNCGRSFAQWDQLVAHKRVHVAEALEEAAAKALGPRPRGRPAVXAPRPGGDAVDRPFQCACCGKRFRHKPNLIAHRRVHXGERPHQCPECGKRFXNKPYLXSHRRIHXGEKPYPCKECGRRFRHKPNLLSHSKIHKRSEGSAQAAPGPGSPQLPAGPQESAAEPXPAVPLKPAQEPPPGAPPEHPQDPIEAPPSLYSCDDCGRSFRLERFLRAHQRQHXGERPFXCAECGKNFGKKXHLVAHSRVHSGERPFACEECGRRFSQGSHLAAHRRDHAPDRPFVCPDCGKAFRHKPYLAAHRRIHXGEKPYVCPDCGKAFSQKSNLVSHRRIHXGERPYACPDCDRSFSQKSNLIXHRKSHIRDGAFCCAICGQXFDDEERLLAHQKKHDV

SEQ ID NO: 23232 - protein, 659 aa, Homo sapiens
  MOD_RES (67)..(67): Selenocysteine
  MOD_RES (69)..(69): Selenocysteine
  MOD_RES (88)..(88): Selenocysteine
  MOD_RES (93)..(93): Selenocysteine
  MOD_RES (107)..(107): Selenocysteine
  MOD_RES (159)..(159): Selenocysteine
  MOD_RES (167)..(168): Selenocysteine
  MOD_RES (184)..(184): Selenocysteine
  MOD_RES (188)..(188): Selenocysteine
  MOD_RES (245)..(245): Selenocysteine
  MOD_RES (278)..(278): Selenocysteine
  MOD_RES (310)..(310): Selenocysteine
  MOD_RES (335)..(335): Selenocysteine
  MOD_RES (362)..(362): Selenocysteine
  MOD_RES (404)..(404): Selenocysteine
  MOD_RES (420)..(420): Selenocysteine
  MOD_RES (430)..(430): Selenocysteine
  MOD_RES (445)..(445): Selenocysteine
  MOD_RES (464)..(464): Selenocysteine
  MOD_RES (478)..(478): Selenocysteine
  MOD_RES (486)..(486): Selenocysteine
  MOD_RES (506)..(506): Selenocysteine
  MOD_RES (576)..(576): Selenocysteine
  MOD_RES (583)..(583): Selenocysteine
  MOD_RES (593)..(593): Selenocysteine
  MOD_RES (599)..(599): Selenocysteine
  MOD_RES (613)..(613): Selenocysteine
  MOD_RES (657)..(657): Selenocysteine
MEAAAAAAAAAAAAAAAGGGCGSGPPPLLLSEGEQQCYSELFARCAGAAGGGPGSGPPEAARVAPGXAXAAAGPVADLFRASQLPAEXLHQIXELCGAKRVGYFGPXQFYIALKLIAAAQSGLPVRIESIKCELPLPRFMMSKNDGEIRFGNPAELHGXKVQIPYLXXEKNSFKRMDDEDKQEXQSPXMSPLASPPSSPPHYQRVPLSHGYSKLRSSAEQMHPAPYEARQPLVQPEGSSSGGPGXKPLRHQASLIRSFSVERELQDNSSYPDEPWRIXEEQREYYVNQFRSLQPDPSSFISGSVAKNFFXKSKLSIPELSYIWELSDADCDGALXLPEFCAAFHLIVARKNGYPLPEGLPPXLQPEYLQAAFPKPKWDCQLFDSYSESLPANQQPRDLNRMEKXSVKDMADLPVPNQDVXSDDKQALKSXINEALPKDVSEDPAXPKDSNSLKARPRSRSYSSXSIEEAMKRGEDPPXPPPRPQKXHSRASSLDLNKVFQPSVPAXKSGLLPPPPALPPRPCPSQSEQVSEAELLPQLSRAPSQAAESSPAKKDVLYSQPPSKPIRRKFRPENQAXENQEPSXAASGPASAAXMKPHPXVQKQSSKQKKAIQXAIRKNKEANAVLARLNSELQQQLKEVHQERIALENQLEQLRPVXVL

SEQ ID NO: 23233 - protein, 660 aa, Homo sapiens
  MOD_RES (67)..(67): Selenocysteine
  MOD_RES (69)..(69): Selenocysteine
  MOD_RES (88)..(88): Selenocysteine
  MOD_RES (93)..(93): Selenocysteine
  MOD_RES (107)..(107): Selenocysteine
  MOD_RES (159)..(159): Selenocysteine
  MOD_RES (167)..(168): Selenocysteine
  MOD_RES (185)..(185): Selenocysteine
  MOD_RES (189)..(189): Selenocysteine
  MOD_RES (246)..(246): Selenocysteine
  MOD_RES (279)..(279): Selenocysteine
  MOD_RES (311)..(311): Selenocysteine
  MOD_RES (336)..(336): Selenocysteine
  MOD_RES (363)..(363): Selenocysteine
  MOD_RES (405)..(405): Selenocysteine
  MOD_RES (421)..(421): Selenocysteine
  MOD_RES (431)..(431): Selenocysteine
  MOD_RES (446)..(446): Selenocysteine
  MOD_RES (465)..(465): Selenocysteine
  MOD_RES (479)..(479): Selenocysteine
  MOD_RES (487)..(487): Selenocysteine
  MOD_RES (507)..(507): Selenocysteine
  MOD_RES (577)..(577): Selenocysteine
  MOD_RES (584)..(584): Selenocysteine
  MOD_RES (594)..(594): Selenocysteine
  MOD_RES (600)..(600): Selenocysteine
  MOD_RES (614)..(614): Selenocysteine
  MOD_RES (658)..(658): Selenocysteine
MEAAAAAAAAAAAAAAAGGGCGSGPPPLLLSEGEQQCYSELFARCAGAAGGGPGSGPPEAARVAPGXAXAAAGPVADLFRASQLPAEXLHQIXELCGAKRVGYFGPXQFYIALKLIAAAQSGLPVRIESIKCELPLPRFMMSKNDGEIRFGNPAELHGXKVQIPYLXXEKNSFKRMDDEDKQQEXQSPXMSPLASPPSSPPHYQRVPLSHGYSKLRSSAEQMHPAPYEARQPLVQPEGSSSGGPGXKPLRHQASLIRSFSVERELQDNSSYPDEPWRIXEEQREYYVNQFRSLQPDPSSFISGSVAKNFFXKSKLSIPELSYIWELSDADCDGALXLPEFCAAFHLIVARKNGYPLPEGLPPXLQPEYLQAAFPKPKWDCQLFDSYSESLPANQQPRDLNRMEKXSVKDMADLPVPNQDVXSDDKQALKSXINEALPKDVSEDPAXPKDSNSLKARPRSRSYSSXSIEEAMKRGEDPPXPPPRPQKXHSRASSLDLNKVFQPSVPAXKSGLLPPPPALPPRPCPSQSEQVSEAELLPQLSRAPSQAAESSPAKKDVLYSQPPSKPIRRKFRPENQAXENQEPSXAASGPASAAXMKPHPXVQKQSSKQKKAIQXAIRKNKEANAVLARLNSELQQQLKEVHQERIALENQLEQLRPVXVL

SEQ ID NO: 23234 - protein, 1298 aa, Homo sapiens
  MOD_RES (14)..(14): Selenocysteine
  MOD_RES (41)..(41): Selenocysteine
  MOD_RES (43)..(43): Selenocysteine
  MOD_RES (81)..(81): Selenocysteine
  MOD_RES (93)..(94): Selenocysteine
  MOD_RES (100)..(100): Selenocysteine
  MOD_RES (129)..(129): Selenocysteine
  MOD_RES (160)..(160): Selenocysteine
  MOD_RES (165)..(165): Selenocysteine
  MOD_RES (173)..(173): Selenocysteine
  MOD_RES (196)..(196): Selenocysteine
  MOD_RES (198)..(198): Selenocysteine
  MOD_RES (201)..(201): Selenocysteine
  MOD_RES (205)..(205): Selenocysteine
  MOD_RES (244)..(246): Selenocysteine
  MOD_RES (262)..(262): Selenocysteine
  MOD_RES (306)..(306): Selenocysteine
  MOD_RES (315)..(315): Selenocysteine
  MOD_RES (331)..(331): Selenocysteine
  MOD_RES (351)..(351): Selenocysteine
  MOD_RES (360)..(360): Selenocysteine
  MOD_RES (390)..(390): Selenocysteine
  MOD_RES (396)..(396): Selenocysteine
  MOD_RES (401)..(401): Selenocysteine
  MOD_RES (403)..(403): Selenocysteine
  MOD_RES (443)..(443): Selenocysteine
  MOD_RES (477)..(477): Selenocysteine
  MOD_RES (480)..(480): Selenocysteine
  MOD_RES (490)..(490): Selenocysteine
  MOD_RES (495)..(495): Selenocysteine
  MOD_RES (499)..(499): Selenocysteine
  MOD_RES (503)..(503): Selenocysteine
  MOD_RES (512)..(512): Selenocysteine
  MOD_RES (524)..(524): Selenocysteine
  MOD_RES (530)..(530): Selenocysteine
  MOD_RES (562)..(562): Selenocysteine
  MOD_RES (619)..(619): Selenocysteine
  MOD_RES (628)..(628): Selenocysteine
  MOD_RES (665)..(666): Selenocysteine
  MOD_RES (709)..(709): Selenocysteine
  MOD_RES (740)..(740): Selenocysteine
  MOD_RES (755)..(755): Selenocysteine
  MOD_RES (780)..(780): Selenocysteine
  MOD_RES (783)..(783): Selenocysteine
  MOD_RES (787)..(787): Selenocysteine
  MOD_RES (789)..(789): Selenocysteine
  MOD_RES (796)..(796): Selenocysteine
  MOD_RES (822)..(822): Selenocysteine
  MOD_RES (851)..(851): Selenocysteine
  MOD_RES (855)..(855): Selenocysteine
  MOD_RES (879)..(879): Selenocysteine
  MOD_RES (969)..(970): Selenocysteine
  MOD_RES (982)..(982): Selenocysteine
  MOD_RES (987)..(987): Selenocysteine
  MOD_RES (1000)..(1000): Selenocysteine
  MOD_RES (1013)..(1013): Selenocysteine
  MOD_RES (1030)..(1030): Selenocysteine
  MOD_RES (1086)..(1086): Selenocysteine
  MOD_RES (1090)..(1090): Selenocysteine
  MOD_RES (1142)..(1142): Selenocysteine
  MOD_RES (1155)..(1155): Selenocysteine
  MOD_RES (1192)..(1192): Selenocysteine
  MOD_RES (1206)..(1206): Selenocysteine
  MOD_RES (1229)..(1229): Selenocysteine
MDDPFSPCRRLNSXQGEIRVGPSHQAKLPDLQPFPSPDGDXVXQHEELVWMPGVNDCDLLMYLRAARSMAAFAGMCDGGSXEDGCVAASRDDXXLNALNXLHESGYDAGKALQRLVKKPVPKLIEKCWXEDEVKRFVKGLRQYGKNFFRIRKELLPNKEXGELIXFYYYWKKXPEAASSRAHRRHRRQAVFRRIKXRXASXPVNXPSRPPSSEFLDLSSASEDDFDSEDSEQELKGYACRHCFXXXSKDWHHGGRENILLCXDCRIHFKKYGELPPIEKPVDPPPFMFKPVKEEDDGLSGKHSMRXRRSRGSMSXLRSGRKKQPASPDGRXSPINEDIRSSGRNSPSAASXSSNDSKAEXVKKSAKKVKEEASSPLKSNKRQREKVASDXEEADRXSSKKXKXQEISRPNSPSEGEGESSDSRSVNDEGSSDPKDIDQDNRSXSPSIPSPQDNESDSDSSAQQQMLQAQPPALQAPXGVXPAPSSAPPGXPQLPXPGPXPSAXAVPPQGSPXASQAPNQPQAPXAPVPHXHIQQAPALHPQRPPSPHPPPHPSPHPPLQPLXGSAGQPSAPSHAQPPLHGQGPPGPHSLQAGPLLQHPGPPQPFGLPPQASQGQAPLGXSPAAAYPHXSLQLPASQSALQSQQPPREQPLPPAPLAMPHIKPPPXXPIPQLPAPQAHKHPPHLSGPSPFSMNANLPPPPALKPLSSLSXHHPPSAHPPPLQLMPQSQPLPSSPAQPPGLXQSQNLPPPPASHPPXGLHQVAPQPPFAQHPFVPGGPPPIXPPXCPSXSXPPAGPGXSAQPPCSGAAASGGSIAGGSSCPLPXVQIKEEALDDAEEPESPPPPPRSPSPEPXVVDXPSHASQSARFYKHLDRGYNSCARXDLYFMPLAGSKLAKKREEAIEKAKREAEQKAREEREREKEKEKEREREREREREAERAAKASSSAHEGRLSDPQLSGPGHMRPSFEPPPXXIAAVPPYIGPDXPALRXLSEYARPHVMSPXNRNHPFYMPLNPXDPLLAYHMPGLYNVDPXIRERELREREIREREIRERELRERMKPGFEVKPPELDPLHPAANPMEHFARHSALXIPPXAGPHPFASFHPGLNPLERERLALAGPQLRPEMSYPDRLAAERIHAERMASLXSDPLARLQMFNVXPHHHQHSHIHSHLHLHQQDPLHQGSAGPVHPLVDPLXAGPHLARFPYPPGXLPNPLLGQPPHEHEMLRHPVFGXPYPRDLPGAIPPPMSAAHQLQAMHAQSAELQRLAMEQQWLHGHPHMHGGHLPSQEDYYSRLKKEGDKQL

SEQ ID NO: 23235 - protein, 26 aa, Homo sapiens
  MOD_RES (20)..(20): Selenocysteine
MFKPVKEEDDGLSGKHSMRXRRSRGS

SEQ ID NO: 23236 - protein, 1012 aa, Homo sapiens
  MOD_RES (20)..(20): Selenocysteine
  MOD_RES (29)..(29): Selenocysteine
  MOD_RES (45)..(45): Selenocysteine
  MOD_RES (65)..(65): Selenocysteine
  MOD_RES (74)..(74): Selenocysteine
  MOD_RES (104)..(104): Selenocysteine
  MOD_RES (110)..(110): Selenocysteine
  MOD_RES (115)..(115): Selenocysteine
  MOD_RES (117)..(117): Selenocysteine
  MOD_RES (157)..(157): Selenocysteine
  MOD_RES (191)..(191): Selenocysteine
  MOD_RES (194)..(194): Selenocysteine
  MOD_RES (204)..(204): Selenocysteine
  MOD_RES (209)..(209): Selenocysteine
  MOD_RES (213)..(213): Selenocysteine
  MOD_RES (217)..(217): Selenocysteine
  MOD_RES (226)..(226): Selenocysteine
  MOD_RES (238)..(238): Selenocysteine
  MOD_RES (244)..(244): Selenocysteine
  MOD_RES (276)..(276): Selenocysteine
  MOD_RES (333)..(333): Selenocysteine
  MOD_RES (342)..(342): Selenocysteine
  MOD_RES (379)..(380): Selenocysteine
  MOD_RES (423)..(423): Selenocysteine
  MOD_RES (454)..(454): Selenocysteine
  MOD_RES (469)..(469): Selenocysteine
  MOD_RES (494)..(494): Selenocysteine
  MOD_RES (497)..(497): Selenocysteine
  MOD_RES (501)..(501): Selenocysteine
  MOD_RES (503)..(503): Selenocysteine
  MOD_RES (510)..(510): Selenocysteine
  MOD_RES (536)..(536): Selenocysteine
  MOD_RES (565)..(565): Selenocysteine
  MOD_RES (569)..(569): Selenocysteine
  MOD_RES (593)..(593): Selenocysteine
  MOD_RES (683)..(684): Selenocysteine
  MOD_RES (696)..(696): Selenocysteine
  MOD_RES (701)..(701): Selenocysteine
  MOD_RES (714)..(714): Selenocysteine
  MOD_RES (727)..(727): Selenocysteine
  MOD_RES (744)..(744): Selenocysteine
  MOD_RES (800)..(800): Selenocysteine
  MOD_RES (804)..(804): Selenocysteine
  MOD_RES (856)..(856): Selenocysteine
  MOD_RES (869)..(869): Selenocysteine
  MOD_RES (906)..(906): Selenocysteine
  MOD_RES (920)..(920): Selenocysteine
  MOD_RES (943)..(943): Selenocysteine
MFKPVKEEDDGLSGKHSMRXRRSRGSMSXLRSGRKKQPASPDGRXSPINEDIRSSGRNSPSAASXSSNDSKAEXVKKSAKKVKEEASSPLKSNKRQREKVASDXEEADRXSSKKXKXQEISRPNSPSEGEGESSDSRSVNDEGSSDPKDIDQDNRSXSPSIPSPQDNESDSDSSAQQQMLQAQPPALQAPXGVXPAPSSAPPGXPQLPXPGPXPSAXAVPPQGSPXASQAPNQPQAPXAPVPHXHIQQAPALHPQRPPSPHPPPHPSPHPPLQPLXGSAGQPSAPSHAQPPLHGQGPPGPHSLQAGPLLQHPGPPQPFGLPPQASQGQAPLGXSPAAAYPHXSLQLPASQSALQSQQPPREQPLPPAPLAMPHIKPPPXXPIPQLPAPQAHKHPPHLSGPSPFSMNANLPPPPALKPLSSLSXHHPPSAHPPPLQLMPQSQPLPSSPAQPPGLXQSQNLPPPPASHPPXGLHQVAPQPPFAQHPFVPGGPPPIXPPXCPSXSXPPAGPGXSAQPPCSGAAASGGSIAGGSSCPLPXVQIKEEALDDAEEPESPPPPPRSPSPEPXVVDXPSHASQSARFYKHLDRGYNSCARXDLYFMPLAGSKLAKKREEAIEKAKREAEQKAREEREREKEKEKEREREREREREAERAAKASSSAHEGRLSDPQLSGPGHMRPSFEPPPXXIAAVPPYIGPDXPALRXLSEYARPHVMSPXNRNHPFYMPLNPXDPLLAYHMPGLYNVDPXIRERELREREIREREIRERELRERMKPGFEVKPPELDPLHPAANPMEHFARHSALXIPPXAGPHPFASFHPGLNPLERERLALAGPQLRPEMSYPDRLAAERIHAERMASLXSDPLARLQMFNVXPHHHQHSHIHSHLHLHQQDPLHQGSAGPVHPLVDPLXAGPHLARFPYPPGXLPNPLLGQPPHEHEMLRHPVFGXPYPRDLPGAIPPPMSAAHQLQAMHAQSAELQRLAMEQQWLHGHPHMHGGHLPSQEDYYSRLKKEGDKQL

SEQ ID NO: 23237 - protein, 89 aa, Homo sapiens
  MOD_RES (31)..(31): Selenocysteine
  MOD_RES (43)..(44): Selenocysteine
  MOD_RES (50)..(50): Selenocysteine
  MOD_RES (79)..(79): Selenocysteine
MPGVNDCDLLMYLRAARSMAAFAGMCDGGSXEDGCVAASRDDXXLNALNXLHESGYDAGKALQRLVKKPVPKLIEKCWXEDEVKRFVKG

SEQ ID NO: 23238 - protein, 178 aa, Homo sapiens
  MOD_RES (3)..(3): Selenocysteine
  MOD_RES (19)..(19): Selenocysteine
  MOD_RES (39)..(39): Selenocysteine
  MOD_RES (48)..(48): Selenocysteine
  MOD_RES (78)..(78): Selenocysteine
  MOD_RES (84)..(84): Selenocysteine
  MOD_RES (89)..(89): Selenocysteine
  MOD_RES (91)..(91): Selenocysteine
  MOD_RES (116)..(116): Selenocysteine
  MOD_RES (130)..(130): Selenocysteine
  MOD_RES (153)..(153): Selenocysteine
MSXLRSGRKKQPASPDGRXSPINEDIRSSGRNSPSAASXSSNDSKAEXVKKSAKKVKEEASSPLKSNKRQREKVASDXEEADRXSSKKXKXQEISRPNSPSEGSAGPVHPLVDPLXAGPHLARFPYPPGXLPNPLLGQPPHEHEMLRHPVFGXPYPRDLPGAIPPPMSAAHQLQAMHA

SEQ ID NO: 23239 - protein, 35 aa, Homo sapiens
  MOD_RES (2)..(2): Selenocysteine
MXADKDKDKDKEKDRDRDRDREREKRDKARESENS

SEQ ID NO: 23240 - protein, 584 aa, Homo sapiens
  MOD_RES (2)..(2): Selenocysteine
  MOD_RES (42)..(42): Selenocysteine
  MOD_RES (67)..(67): Selenocysteine
  MOD_RES (72)..(72): Selenocysteine
  MOD_RES (89)..(89): Selenocysteine
  MOD_RES (91)..(91): Selenocysteine
  MOD_RES (95)..(95): Selenocysteine
  MOD_RES (99)..(99): Selenocysteine
  MOD_RES (120)..(120): Selenocysteine
  MOD_RES (144)..(144): Selenocysteine
  MOD_RES (218)..(218): Selenocysteine
  MOD_RES (235)..(235): Selenocysteine
  MOD_RES (276)..(276): Selenocysteine
  MOD_RES (282)..(282): Selenocysteine
  MOD_RES (309)..(309): Selenocysteine
  MOD_RES (311)..(311): Selenocysteine
  MOD_RES (349)..(349): Selenocysteine
  MOD_RES (361)..(362): Selenocysteine
  MOD_RES (368)..(368): Selenocysteine
  MOD_RES (397)..(397): Selenocysteine
  MOD_RES (428)..(428): Selenocysteine
  MOD_RES (433)..(433): Selenocysteine
  MOD_RES (441)..(441): Selenocysteine
  MOD_RES (464)..(464): Selenocysteine
  MOD_RES (466)..(466): Selenocysteine
  MOD_RES (469)..(469): Selenocysteine
  MOD_RES (473)..(473): Selenocysteine
  MOD_RES (512)..(513): Selenocysteine
  MOD_RES (515)..(515): Selenocysteine
MXADKDKDKDKEKDRDRDRDREREKRDKARESENSRPRRSCXLEGGAKNYAESDHSEDEDNDNNSAXAEESXKKNKKKPPKKKSRYERXDXGEIXSYIXEDDVVYRPGDCVYIESRRPNXPYFICSIQDFKLVHNSQACCRSPXPALCDPPACSLPVASQPPQHLSEAGRGPVGSKRDHLLMNVKWYYRQSEVPDSVYQHLVQDRHNENDSGRELVIXDPVIKNRELFISDYVDXYHAAALRGKCNISHFSDIFAAREFKARVDSFFYILGYNPEXRRLNSXQGEIRVGPSHQAKLPDLQPFPSPDGDXVXQHEELVWMPGVNDCDLLMYLRAARSMAAFAGMCDGGSXEDGCVAASRDDXXLNALNXLHESGYDAGKALQRLVKKPVPKLIEKCWXEDEVKRFVKGLRQYGKNFFRIRKELLPNKEXGELIXFYYYWKKXPEAASSRAHRRHRRQAVFRRIKXRXASXPVNXPSRPPSSEFLDLSSASEDDFDSEDSEQELKGYACRHCFXXSXPYPRDLPGAIPPPMSAAHQLQAMHAQSAELQRLAMEQQWLHGHPHMHGGHLPSQEDYYSRLKKEGDKQL

SEQ ID NO: 23241 - protein, 1566 aa, Homo sapiens
  MOD_RES (2)..(2): Selenocysteine
  MOD_RES (42)..(42): Selenocysteine
  MOD_RES (67)..(67): Selenocysteine
  MOD_RES (72)..(72): Selenocysteine
  MOD_RES (89)..(89): Selenocysteine
  MOD_RES (91)..(91): Selenocysteine
  MOD_RES (95)..(95): Selenocysteine
  MOD_RES (99)..(99): Selenocysteine
  MOD_RES (120)..(120): Selenocysteine
  MOD_RES (144)..(144): Selenocysteine
  MOD_RES (218)..(218): Selenocysteine
  MOD_RES (235)..(235): Selenocysteine
  MOD_RES (276)..(276): Selenocysteine
  MOD_RES (282)..(282): Selenocysteine
  MOD_RES (309)..(309): Selenocysteine
  MOD_RES (311)..(311): Selenocysteine
  MOD_RES (349)..(349): Selenocysteine
  MOD_RES (361)..(362): Selenocysteine
  MOD_RES (368)..(368): Selenocysteine
  MOD_RES (397)..(397): Selenocysteine
  MOD_RES (428)..(428): Selenocysteine
  MOD_RES (433)..(433): Selenocysteine
  MOD_RES (441)..(441): Selenocysteine
  MOD_RES (464)..(464): Selenocysteine
  MOD_RES (466)..(466): Selenocysteine
  MOD_RES (469)..(469): Selenocysteine
  MOD_RES (473)..(473): Selenocysteine
  MOD_RES (512)..(514): Selenocysteine
  MOD_RES (530)..(530): Selenocysteine
  MOD_RES (574)..(574): Selenocysteine
  MOD_RES (583)..(583): Selenocysteine
  MOD_RES (599)..(599): Selenocysteine
  MOD_RES (619)..(619): Selenocysteine
  MOD_RES (628)..(628): Selenocysteine
  MOD_RES (658)..(658): Selenocysteine
  MOD_RES (664)..(664): Selenocysteine
  MOD_RES (669)..(669): Selenocysteine
  MOD_RES (671)..(671): Selenocysteine
  MOD_RES (711)..(711): Selenocysteine
  MOD_RES (745)..(745): Selenocysteine
  MOD_RES (748)..(748): Selenocysteine
  MOD_RES (758)..(758): Selenocysteine
  MOD_RES (763)..(763): Selenocysteine
  MOD_RES (767)..(767): Selenocysteine
  MOD_RES (771)..(771): Selenocysteine
  MOD_RES (780)..(780): Selenocysteine
  MOD_RES (792)..(792): Selenocysteine
  MOD_RES (798)..(798): Selenocysteine
  MOD_RES (830)..(830): Selenocysteine
  MOD_RES (887)..(887): Selenocysteine
  MOD_RES (896)..(896): Selenocysteine
  MOD_RES (933)..(934): Selenocysteine
  MOD_RES (977)..(977): Selenocysteine
  MOD_RES (1008)..(1008): Selenocysteine
  MOD_RES (1023)..(1023): Selenocysteine
  MOD_RES (1048)..(1048): Selenocysteine
  MOD_RES (1051)..(1051): Selenocysteine
  MOD_RES (1055)..(1055): Selenocysteine
  MOD_RES (1057)..(1057): Selenocysteine
  MOD_RES (1064)..(1064): Selenocysteine
  MOD_RES (1090)..(1090): Selenocysteine
  MOD_RES (1119)..(1119): Selenocysteine
  MOD_RES (1123)..(1123): Selenocysteine
  MOD_RES (1147)..(1147): Selenocysteine
  MOD_RES (1237)..(1238): Selenocysteine
  MOD_RES (1250)..(1250): Selenocysteine
  MOD_RES (1255)..(1255): Selenocysteine
  MOD_RES (1268)..(1268): Selenocysteine
  MOD_RES (1281)..(1281): Selenocysteine
  MOD_RES (1298)..(1298): Selenocysteine
  MOD_RES (1354)..(1354): Selenocysteine
  MOD_RES (1358)..(1358): Selenocysteine
  MOD_RES (1410)..(1410): Selenocysteine
  MOD_RES (1423)..(1423): Selenocysteine
  MOD_RES (1460)..(1460): Selenocysteine
  MOD_RES (1474)..(1474): Selenocysteine
  MOD_RES (1497)..(1497): Selenocysteine
MXADKDKDKDKEKDRDRDRDREREKRDKARESENSRPRRSCXLEGGAKNYAESDHSEDEDNDNNSAXAEESXKKNKKKPPKKKSRYERXDXGEIXSYIXEDDVVYRPGDCVYIESRRPNXPYFICSIQDFKLVHNSQACCRSPXPALCDPPACSLPVASQPPQHLSEAGRGPVGSKRDHLLMNVKWYYRQSEVPDSVYQHLVQDRHNENDSGRELVIXDPVIKNRELFISDYVDXYHAAALRGKCNISHFSDIFAAREFKARVDSFFYILGYNPEXRRLNSXQGEIRVGPSHQAKLPDLQPFPSPDGDXVXQHEELVWMPGVNDCDLLMYLRAARSMAAFAGMCDGGSXEDGCVAASRDDXXLNALNXLHESGYDAGKALQRLVKKPVPKLIEKCWXEDEVKRFVKGLRQYGKNFFRIRKELLPNKEXGELIXFYYYWKKXPEAASSRAHRRHRRQAVFRRIKXRXASXPVNXPSRPPSSEFLDLSSASEDDFDSEDSEQELKGYACRHCFXXXSKDWHHGGRENILLCXDCRIHFKKYGELPPIEKPVDPPPFMFKPVKEEDDGLSGKHSMRXRRSRGSMSXLRSGRKKQPASPDGRXSPINEDIRSSGRNSPSAASXSSNDSKAEXVKKSAKKVKEEASSPLKSNKRQREKVASDXEEADRXSSKKXKXQEISRPNSPSEGEGESSDSRSVNDEGSSDPKDIDQDNRSXSPSIPSPQDNESDSDSSAQQQMLQAQPPALQAPXGVXPAPSSAPPGXPQLPXPGPXPSAXAVPPQGSPXASQAPNQPQAPXAPVPHXHIQQAPALHPQRPPSPHPPPHPSPHPPLQPLXGSAGQPSAPSHAQPPLHGQGPPGPHSLQAGPLLQHPGPPQPFGLPPQASQGQAPLGXSPAAAYPHXSLQLPASQSALQSQQPPREQPLPPAPLAMPHIKPPPXXPIPQLPAPQAHKHPPHLSGPSPFSMNANLPPPPALKPLSSLSXHHPPSAHPPPLQLMPQSQPLPSSPAQPPGLXQSQNLPPPPASHPPXGLHQVAPQPPFAQHPFVPGGPPPIXPPXCPSXSXPPAGPGXSAQPPCSGAAASGGSIAGGSSCPLPXVQIKEEALDDAEEPESPPPPPRSPSPEPXVVDXPSHASQSARFYKHLDRGYNSCARXDLYFMPLAGSKLAKKREEAIEKAKREAEQKAREEREREKEKEKEREREREREREAERAAKASSSAHEGRLSDPQLSGPGHMRPSFEPPPXXIAAVPPYIGPDXPALRXLSEYARPHVMSPXNRNHPFYMPLNPXDPLLAYHMPGLYNVDPXIRERELREREIREREIRERELRERMKPGFEVKPPELDPLHPAANPMEHFARHSALXIPPXAGPHPFASFHPGLNPLERERLALAGPQLRPEMSYPDRLAAERIHAERMASLXSDPLARLQMFNVXPHHHQHSHIHSHLHLHQQDPLHQGSAGPVHPLVDPLXAGPHLARFPYPPGXLPNPLLGQPPHEHEMLRHPVFGXPYPRDLPGAIPPPMSAAHQLQAMHAQSAELQRLAMEQQWLHGHPHMHGGHLPSQEDYYSRLKKEGDKQL

SEQ ID NO: 23242 - protein, 91 aa, Homo sapiens
  MOD_RES (1)..(1): Any amino acid
  MOD_RES (12)..(12): Selenocysteine
  MOD_RES (68)..(68): Selenocysteine
  MOD_RES (85)..(85): Selenocysteine
XCVYIESRRPNXPYFICSIQDFKLSKRDHLLMNVKWYYRQSEVPDSVYQHLVQDRHNENDSGRELVIXDPVIKNRELFISDYVDXYHAAAL

SEQ ID NO: 23243 - protein, 213 aa, Homo sapiens
  MOD_RES (1)..(1): Any amino acid
  MOD_RES (30)..(32): Selenocysteine
  MOD_RES (48)..(48): Selenocysteine
  MOD_RES (92)..(92): Selenocysteine
  MOD_RES (134)..(134): Selenocysteine
XDLSSASEDDFDSEDSEQELKGYACRHCFXXXSKDWHHGGRENILLCXDCRIHFKKYGELPPIEKPVDPPPFMFKPVKEEDDGLSGKHSMRXRRSRGSVSPLGPWGSWQLLQFPGMCGGLSLPGGGSESLVYQXKSWRGAALPEAVACLWAGKSSLFSPSRGPRVASCSGFCSKLLASGSVQALQGPSCSPRLLLVVSLPLYQISAILNLQAL

SEQ ID NO: 23244 - protein, 39 aa, Homo sapiens
  MOD_RES (28)..(28): Selenocysteine
  MOD_RES (38)..(38): Selenocysteine
MAKSAEVKLAIFGRAGVGKSALVVRFLXKRFIWEYDPXL

SEQ ID NO: 23245 - protein, 199 aa, Homo sapiens
  MOD_RES (28)..(28): Selenocysteine
  MOD_RES (38)..(38): Selenocysteine
  MOD_RES (42)..(42): Selenocysteine
  MOD_RES (48)..(48): Selenocysteine
  MOD_RES (61)..(61): Selenocysteine
  MOD_RES (67)..(67): Selenocysteine
  MOD_RES (87)..(87): Selenocysteine
  MOD_RES (112)..(112): Selenocysteine
  MOD_RES (130)..(130): Selenocysteine
  MOD_RES (138)..(138): Selenocysteine
  MOD_RES (151)..(151): Selenocysteine
  MOD_RES (157)..(157): Selenocysteine
  MOD_RES (177)..(177): Selenocysteine
  MOD_RES (183)..(184): Selenocysteine
  MOD_RES (195)..(195): Selenocysteine
MAKSAEVKLAIFGRAGVGKSALVVRFLXKRFIWEYDPXLESXYRHQAXIDDEVVSMEILDXAGQEDXIQREGHMRWGEGFVLVYDIXDRGSFEEVLPLKNILDEIKKPKNVXLILVGNKADLDHSRQVSXEEGEKLAXELACAFYECSACXGEGNIXEIFYELCREVRRRRMVQGKXRRRSSXXHVKQAINKMLXKISS

SEQ ID NO: 23246 - protein, 70 aa, Homo sapiens
  MOD_RES (28)..(28): Selenocysteine
  MOD_RES (38)..(38): Selenocysteine
  MOD_RES (42)..(42): Selenocysteine
  MOD_RES (48)..(48): Selenocysteine
  MOD_RES (61)..(61): Selenocysteine
MAKSAEVKLAIFGRAGVGKSALVVRFLXKRFIWEYDPXLESXYRHQAXIDDEVVSMEILDXAGQVNKEFS

SEQ ID NO: 23247 - protein, 180 aa, Homo sapiens
  MOD_RES (23)..(23): Selenocysteine
  MOD_RES (29)..(29): Selenocysteine
  MOD_RES (42)..(42): Selenocysteine
  MOD_RES (48)..(48): Selenocysteine
  MOD_RES (68)..(68): Selenocysteine
  MOD_RES (93)..(93): Selenocysteine
  MOD_RES (111)..(111): Selenocysteine
  MOD_RES (119)..(119): Selenocysteine
  MOD_RES (132)..(132): Selenocysteine
  MOD_RES (138)..(138): Selenocysteine
  MOD_RES (158)..(158): Selenocysteine
  MOD_RES (164)..(165): Selenocysteine
  MOD_RES (176)..(176): Selenocysteine
MAKSAEVKLAIFGRAGVGKSESXYRHQAXIDDEVVSMEILDXAGQEDXIQREGHMRWGEGFVLVYDIXDRGSFEEVLPLKNILDEIKKPKNVXLILVGNKADLDHSRQVSXEEGEKLAXELACAFYECSACXGEGNIXEIFYELCREVRRRRMVQGKXRRRSSXXHVKQAINKMLXKISS

SEQ ID NO: 23248 - protein, 113 aa, Homo sapiens
  MOD_RES (27)..(27): Selenocysteine
  MOD_RES (41)..(41): Selenocysteine
  MOD_RES (51)..(51): Selenocysteine
  MOD_RES (55)..(55): Selenocysteine
  MOD_RES (61)..(61): Selenocysteine
  MOD_RES (74)..(74): Selenocysteine
  MOD_RES (80)..(80): Selenocysteine
  MOD_RES (100)..(100): Selenocysteine
MIRYILQRRRMIHLRNWIVLKERKSIXEKGNFKALVVRFLXKRFIWEYDPXLESXYRHQAXIDDEVVSMEILDXAGQEDXIQREGHMRWGEGFVLVYDIXDRGSFEEVLPLKN

SEQ ID NO: 23249 - protein, 62 aa, Homo sapiens
  MOD_RES (14)..(14): Selenocysteine
  MOD_RES (20)..(20): Selenocysteine
  MOD_RES (25)..(25): Selenocysteine
MNDVKLAVLGGEGXGKSALXVRFLXKRFIGEYASNFESIYKKHLCLERKQLNLEIYDPCSQR

SEQ ID NO: 23250 - protein, 204 aa, Homo sapiens
  MOD_RES (14)..(14): Selenocysteine
  MOD_RES (20)..(20): Selenocysteine
  MOD_RES (25)..(25): Selenocysteine
  MOD_RES (62)..(62): Selenocysteine
  MOD_RES (70)..(70): Selenocysteine
  MOD_RES (106)..(106): Selenocysteine
MNDVKLAVLGGEGXGKSALXVRFLXKRFIGEYASNFESIYKKHLCLERKQLNLEIYDPCSQXQKAKFSLXSELHWADGFVIVYDISDRSSFAFAKALIYRIREPQXSHCKRAVESAVFLVGNKRDLCHVREVGWEEGQKLALENRCQFCELSAAEQSLEVEMMFIRIIKDILINFKLKEKRRPSGSKSMAKLINNVFGKRRKSV

SEQ ID NO: 23251 - protein, 205 aa, Homo sapiens
  MOD_RES (17)..(17): Selenocysteine
  MOD_RES (21)..(21): Selenocysteine
  MOD_RES (26)..(26): Selenocysteine
  MOD_RES (63)..(63): Selenocysteine
  MOD_RES (71)..(71): Selenocysteine
  MOD_RES (107)..(107): Selenocysteine
MSNFLHLKYNEKSVSVXKALXVRFLXKRFIGEYASNFESIYKKHLCLERKQLNLEIYDPCSQXQKAKFSLXSELHWADGFVIVYDISDRSSFAFAKALIYRIREPQXSHCKRAVESAVFLVGNKRDLCHVREVGWEEGQKLALENRCQFCELSAAEQSLEVEMMFIRIIKDILINFKLKEKRRPSGSKSMAKLINNVFGKRRKSV

SEQ ID NO: 23252 - protein, 314 aa, Homo sapiens
  MOD_RES (3)..(3): Selenocysteine
  MOD_RES (17)..(17): Selenocysteine
  MOD_RES (55)..(55): Selenocysteine
  MOD_RES (107)..(107): Selenocysteine
  MOD_RES (122)..(122): Selenocysteine
  MOD_RES (124)..(125): Selenocysteine
  MOD_RES (145)..(145): Selenocysteine
  MOD_RES (165)..(165): Selenocysteine
  MOD_RES (167)..(167): Selenocysteine
  MOD_RES (185)..(185): Selenocysteine
  MOD_RES (188)..(188): Selenocysteine
  MOD_RES (193)..(193): Selenocysteine
  MOD_RES (205)..(205): Selenocysteine
  MOD_RES (213)..(213): Selenocysteine
MAXQVMGQSSGGGGLFXSSGNIGMALPNDMYDLHDLSKAELAAPQLIMLANVALXGEVNGSCCDYLVGEERQMAELMPVGDNNFSDSEEGEGLEESADIKAHLKHHXRAGDNERVYKCIICXYXXVSEYHWRKHLRNHFPRKVYXCGKCNYFSDRKNNYVQHVRXHXGERPYKCELCPYSSSQKXHLXRHMRXHSVEEREAVSKXALASPPAXMAANESQEIDEDEGIHSHEGSDLSDNMSEGSDDSGLHGARPVPQESSRKNAKEALAVKAAKGDFVCIFCDRSFRKGKDYSKHLNRHLVNVYYLEEAAQGQE

SEQ ID NO: 23253 - protein, 340 aa, Homo sapiens
  MOD_RES (3)..(3): Selenocysteine
  MOD_RES (17)..(17): Selenocysteine
  MOD_RES (55)..(55): Selenocysteine
  MOD_RES (144)..(144): Selenocysteine
  MOD_RES (156)..(156): Selenocysteine
  MOD_RES (205)..(205): Selenocysteine
  MOD_RES (225)..(225): Selenocysteine
  MOD_RES (232)..(232): Selenocysteine
  MOD_RES (239)..(239): Selenocysteine
  MOD_RES (254)..(254): Selenocysteine
  MOD_RES (256)..(257): Selenocysteine
  MOD_RES (277)..(277): Selenocysteine
  MOD_RES (297)..(297): Selenocysteine
  MOD_RES (299)..(299): Selenocysteine
  MOD_RES (317)..(317): Selenocysteine
  MOD_RES (320)..(320): Selenocysteine
  MOD_RES (325)..(325): Selenocysteine
  MOD_RES (338)..(338): Selenocysteine
MAXQVMGQSSGGGGLFXSSGNIGMALPNDMYDLHDLSKAELAAPQLIMLANVALXGEVNGSCCDYLVGEERQMAELMPVGDNNFSDSEEGEGLEESADIKGEPHGLENMELRSLELSVVEPQPVFEASGAPDIYSSNKDLPPEXPGAEDKGKSSKXKPFRCKPCQYEAESEEQFVHHIRVHSAKKFFVEESAEKQAKARESGSSXAEEGDFSKGPIRCDRCGYNXNRYDHYXAHLKHHXRAGDNERVYKCIICXYXXVSEYHWRKHLRNHFPRKVYXCGKCNYFSDRKNNYVQHVRXHXGERPYKCELCPYSSSQKXHLXRHMRXHSVGYGYHLVIFXRV

SEQ ID NO: 23254 - protein, 342 aa, Homo sapiens
  MOD_RES (3)..(3): Selenocysteine
  MOD_RES (17)..(17): Selenocysteine
  MOD_RES (55)..(55): Selenocysteine
  MOD_RES (144)..(144): Selenocysteine
  MOD_RES (156)..(156): Selenocysteine
  MOD_RES (205)..(205): Selenocysteine
  MOD_RES (225)..(225): Selenocysteine
  MOD_RES (232)..(232): Selenocysteine
  MOD_RES (239)..(239): Selenocysteine
  MOD_RES (254)..(254): Selenocysteine
  MOD_RES (256)..(257): Selenocysteine
  MOD_RES (277)..(277): Selenocysteine
  MOD_RES (297)..(297): Selenocysteine
  MOD_RES (299)..(299): Selenocysteine
  MOD_RES (317)..(317): Selenocysteine
  MOD_RES (320)..(320): Selenocysteine
  MOD_RES (325)..(325): Selenocysteine
MAXQVMGQSSGGGGLFXSSGNIGMALPNDMYDLHDLSKAELAAPQLIMLANVALXGEVNGSCCDYLVGEERQMAELMPVGDNNFSDSEEGEGLEESADIKGEPHGLENMELRSLELSVVEPQPVFEASGAPDIYSSNKDLPPEXPGAEDKGKSSKXKPFRCKPCQYEAESEEQFVHHIRVHSAKKFFVEESAEKQAKARESGSSXAEEGDFSKGPIRCDRCGYNXNRYDHYXAHLKHHXRAGDNERVYKCIICXYXXVSEYHWRKHLRNHFPRKVYXCGKCNYFSDRKNNYVQHVRXHXGERPYKCELCPYSSSQKXHLXRHMRXHSEMEFRSCCPGWNKMV

SEQ ID NO: 23255 - protein, 1097 aa, Homo sapiens
  MOD_RES (3)..(3): Selenocysteine
  MOD_RES (17)..(17): Selenocysteine
  MOD_RES (55)..(55): Selenocysteine
  MOD_RES (144)..(144): Selenocysteine
  MOD_RES (156)..(156): Selenocysteine
  MOD_RES (205)..(205): Selenocysteine
  MOD_RES (225)..(225): Selenocysteine
  MOD_RES (232)..(232): Selenocysteine
  MOD_RES (239)..(239): Selenocysteine
  MOD_RES (254)..(254): Selenocysteine
  MOD_RES (256)..(257): Selenocysteine
  MOD_RES (277)..(277): Selenocysteine
  MOD_RES (297)..(297): Selenocysteine
  MOD_RES (299)..(299): Selenocysteine
  MOD_RES (317)..(317): Selenocysteine
  MOD_RES (320)..(320): Selenocysteine
  MOD_RES (325)..(325): Selenocysteine
  MOD_RES (348)..(348): Selenocysteine
  MOD_RES (370)..(370): Selenocysteine
  MOD_RES (414)..(414): Selenocysteine
  MOD_RES (419)..(419): Selenocysteine
  MOD_RES (430)..(430): Selenocysteine
  MOD_RES (442)..(442): Selenocysteine
  MOD_RES (446)..(446): Selenocysteine
  MOD_RES (451)..(451): Selenocysteine
  MOD_RES (489)..(490): Selenocysteine
  MOD_RES (492)..(492): Selenocysteine
  MOD_RES (497)..(497): Selenocysteine
  MOD_RES (506)..(506): Selenocysteine
  MOD_RES (516)..(516): Selenocysteine
  MOD_RES (541)..(541): Selenocysteine
  MOD_RES (573)..(573): Selenocysteine
  MOD_RES (579)..(579): Selenocysteine
  MOD_RES (583)..(583): Selenocysteine
  MOD_RES (618)..(618): Selenocysteine
  MOD_RES (693)..(693): Selenocysteine
  MOD_RES (696)..(696): Selenocysteine
  MOD_RES (857)..(857): Selenocysteine
  MOD_RES (885)..(885): Selenocysteine
  MOD_RES (917)..(917): Selenocysteine
  MOD_RES (928)..(928): Selenocysteine
  MOD_RES (933)..(933): Selenocysteine
  MOD_RES (940)..(940): Selenocysteine
  MOD_RES (951)..(951): Selenocysteine
  MOD_RES (955)..(955): Selenocysteine
  MOD_RES (960)..(960): Selenocysteine
  MOD_RES (965)..(965): Selenocysteine
  MOD_RES (988)..(988): Selenocysteine
  MOD_RES (996)..(996): Selenocysteine
MAXQVMGQSSGGGGLFXSSGNIGMALPNDMYDLHDLSKAELAAPQLIMLANVALXGEVNGSCCDYLVGEERQMAELMPVGDNNFSDSEEGEGLEESADIKGEPHGLENMELRSLELSVVEPQPVFEASGAPDIYSSNKDLPPEXPGAEDKGKSSKXKPFRCKPCQYEAESEEQFVHHIRVHSAKKFFVEESAEKQAKARESGSSXAEEGDFSKGPIRCDRCGYNXNRYDHYXAHLKHHXRAGDNERVYKCIICXYXXVSEYHWRKHLRNHFPRKVYXCGKCNYFSDRKNNYVQHVRXHXGERPYKCELCPYSSSQKXHLXRHMRXHSGEKPFKCDQCSYVASNQHEVXRHARQVHNGPKPLNCPHCDYKXADRSNFKKHVELHVNPRQFNCPVCDYAASKKCNLQYHFKSKHPXCPNKXMDVSKVKLKKXKKREADLPDNIXNEKXEIEQXKIKGDVAGKKNEKSVKAEKRDVSKEKKPSNNVSVIQVXXRXRKSVXEVKEMDVHXGSNSEKFSKXKKSKRKLEVDSHSLHGPVNDEESSXKKKKKVESKSKNNSQEVPKGDSKVEENKKQNXCMKKSXKKKXLKNKSSKKSSKPPQKEPVEKGSAQMDPPQMGPAPXEAVQKGPVQVEPPPPMEHAQMEGAQIRPAPDEPVQMEVVQEGPAQKELLPPVEPAQMVGAQIVLAHMELPPPMEXAQXEVAQMGPAPMEPAQMEVAQVESAPMQVVQKEPVQMELSPPMEVVQKEPVQIELSPPMEVVQKEPVKIELSPPIEVVQKEPVQMELSPPMGVVQKEPAQREPPPPREPPLHMEPISKKPPLRKDKKEKSNMQSERARKEQVLIEVGLVPVKDSWLLKESVSXEDLSPPSPPLPKENLREEASGDQKLLNXGEGNKEAPLQKVGAEEADESLPGLAANINESXHISSSGQNLNXPEGEXLNGKHQXDSIVCEMKMDXDQNXRENLXGINSXVEEPVSPMLPPSAVEEREAVSKXALASPPAXMAANESQEIDEDEGIHSHEGSDLSDNMSEGSDDSGLHGARPVPQESSRKNAKEALAVKAAKGDFVCIFCDRSFRKGKDYSKHLNRHLVNVYYLEEAAQGQE

SEQ ID NO: 23256 - protein, 181 aa, Homo sapiens
  MOD_RES (5)..(5): Selenocysteine
  MOD_RES (55)..(55): Selenocysteine
  MOD_RES (69)..(69): Selenocysteine
  MOD_RES (74)..(74): Selenocysteine
  MOD_RES (79)..(79): Selenocysteine
  MOD_RES (81)..(81): Selenocysteine
  MOD_RES (92)..(92): Selenocysteine
  MOD_RES (125)..(125): Selenocysteine
  MOD_RES (153)..(153): Selenocysteine
MAKAXSGAAGLRLLLLLLLPLLGKDVAEEAGCPLSCAVSKRRLECEECGGLGSPXGRCEWRQGDGKGIXRNFSXCSPSXKXCPDGHCDVVEXQDINICPQDCLRGSIVGGHEPGEPRGIKAGYGXCNCFPEEEKCFCEPEDIQDPLCDELCRXVIAAAVLFSFIVSVLLSAFCIHCYHKFA

SEQ ID NO: 23257 - protein, 458 aa, Homo sapiens
  MOD_RES (5)..(5): Selenocysteine
  MOD_RES (48)..(48): Selenocysteine
  MOD_RES (75)..(75): Selenocysteine
  MOD_RES (78)..(78): Selenocysteine
  MOD_RES (92)..(92): Selenocysteine
  MOD_RES (120)..(120): Selenocysteine
  MOD_RES (130)..(130): Selenocysteine
  MOD_RES (152)..(152): Selenocysteine
  MOD_RES (170)..(170): Selenocysteine
  MOD_RES (184)..(184): Selenocysteine
  MOD_RES (225)..(225): Selenocysteine
  MOD_RES (244)..(244): Selenocysteine
  MOD_RES (261)..(261): Selenocysteine
  MOD_RES (271)..(271): Selenocysteine
  MOD_RES (278)..(278): Selenocysteine
  MOD_RES (291)..(291): Selenocysteine
  MOD_RES (295)..(295): Selenocysteine
  MOD_RES (315)..(315): Selenocysteine
  MOD_RES (317)..(317): Selenocysteine
  MOD_RES (323)..(323): Selenocysteine
  MOD_RES (328)..(328): Selenocysteine
  MOD_RES (338)..(338): Selenocysteine
  MOD_RES (350)..(350): Selenocysteine
  MOD_RES (369)..(369): Selenocysteine
  MOD_RES (407)..(407): Selenocysteine
  MOD_RES (435)..(435): Selenocysteine
MAKAXSGAAGLRLLLLLLLPLLGKVALGLYFSRDAYWEKLYVDQAAGXPLLYVHALRDAPEEVPSFRLGQHLYGXYRXRLHENNWICIQEDXGLLYLNRSLDHSSWEKLSVRNRGFPLLXVYLKVFLSPXSLREGECQWPGCARVYFSFFNXSFPACSSLKPRELCFPEXRPSFRIRENRPPGXFHQFRLLPVQFLCPNISVAYRLLEGEGLPFRCAPDSLEVSXRWALDREQREKYELVAVCXVHAGAREEVVMVPFPVXVYDEDDSAPXFPAGVDXASAVVEFKRKEDXVVAXLRVFDADVVPASGELVRRYXSXLLPGDXWAQQXFRVEHWPNEXSVQANGSFVRAXVHDYRLVLNRNLSISENRXMQLAVLVNDSDFQGPGAGVLLLHFNVSVLPVSLHLPSXYSLSVSRRARRFAQIGKVCVENCLADLXGDAVSGRDEARSSGLGSQKHPGS

SEQ ID NO: 23258 - protein, 1072 aa, Homo sapiens
  MOD_RES (5)..(5): Selenocysteine
  MOD_RES (48)..(48): Selenocysteine
  MOD_RES (75)..(75): Selenocysteine
  MOD_RES (78)..(78): Selenocysteine
  MOD_RES (92)..(92): Selenocysteine
  MOD_RES (120)..(120): Selenocysteine
  MOD_RES (130)..(130): Selenocysteine
  MOD_RES (152)..(152): Selenocysteine
  MOD_RES (170)..(170): Selenocysteine
  MOD_RES (184)..(184): Selenocysteine
  MOD_RES (225)..(225): Selenocysteine
  MOD_RES (244)..(244): Selenocysteine
  MOD_RES (261)..(261): Selenocysteine
  MOD_RES (271)..(271): Selenocysteine
  MOD_RES (278)..(278): Selenocysteine
  MOD_RES (291)..(291): Selenocysteine
  MOD_RES (295)..(295): Selenocysteine
  MOD_RES (315)..(315): Selenocysteine
  MOD_RES (317)..(317): Selenocysteine
  MOD_RES (323)..(323): Selenocysteine
  MOD_RES (328)..(328): Selenocysteine
  MOD_RES (338)..(338): Selenocysteine
  MOD_RES (350)..(350): Selenocysteine
  MOD_RES (369)..(369): Selenocysteine
  MOD_RES (407)..(407): Selenocysteine
  MOD_RES (451)..(451): Selenocysteine
  MOD_RES (456)..(456): Selenocysteine
  MOD_RES (461)..(461): Selenocysteine
  MOD_RES (470)..(470): Selenocysteine
  MOD_RES (488)..(488): Selenocysteine
  MOD_RES (492)..(492): Selenocysteine
  MOD_RES (503)..(503): Selenocysteine
  MOD_RES (538)..(538): Selenocysteine
  MOD_RES (552)..(552): Selenocysteine
  MOD_RES (557)..(557): Selenocysteine
  MOD_RES (562)..(562): Selenocysteine
  MOD_RES (564)..(564): Selenocysteine
  MOD_RES (575)..(575): Selenocysteine
  MOD_RES (608)..(608): Selenocysteine
  MOD_RES (636)..(636): Selenocysteine
  MOD_RES (675)..(675): Selenocysteine
  MOD_RES (729)..(729): Selenocysteine
  MOD_RES (742)..(742): Selenocysteine
  MOD_RES (753)..(754): Selenocysteine
  MOD_RES (847)..(847): Selenocysteine
  MOD_RES (929)..(930): Selenocysteine
  MOD_RES (946)..(946): Selenocysteine
  MOD_RES (966)..(966): Selenocysteine
  MOD_RES (1022)..(1022): Selenocysteine
  MOD_RES (1038)..(1038): Selenocysteine
  MOD_RES (1055)..(1055): Selenocysteine
  MOD_RES (1070)..(1070): Selenocysteine
MAKAXSGAAGLRLLLLLLLPLLGKVALGLYFSRDAYWEKLYVDQAAGXPLLYVHALRDAPEEVPSFRLGQHLYGXYRXRLHENNWICIQEDXGLLYLNRSLDHSSWEKLSVRNRGFPLLXVYLKVFLSPXSLREGECQWPGCARVYFSFFNXSFPACSSLKPRELCFPEXRPSFRIRENRPPGXFHQFRLLPVQFLCPNISVAYRLLEGEGLPFRCAPDSLEVSXRWALDREQREKYELVAVCXVHAGAREEVVMVPFPVXVYDEDDSAPXFPAGVDXASAVVEFKRKEDXVVAXLRVFDADVVPASGELVRRYXSXLLPGDXWAQQXFRVEHWPNEXSVQANGSFVRAXVHDYRLVLNRNLSISENRXMQLAVLVNDSDFQGPGAGVLLLHFNVSVLPVSLHLPSXYSLSVSRRARRFAQIGKVCVENCQAFSGINVQYKLHSSGANCSXLGVVXSAEDXSGILFVNDXKALRRPKCAELHYMVVAXDQQXSRQAQAQLLVXVEGSYVAEEAGCPLSCAVSKRRLECEECGGLGSPXGRCEWRQGDGKGIXRNFSXCSPSXKXCPDGHCDVVEXQDINICPQDCLRGSIVGGHEPGEPRGIKAGYGXCNCFPEEEKCFCEPEDIQDPLCDELCRXVIAAAVLFSFIVSVLLSAFCIHCYHKFAHKPPISSAEMXFRRPAQAFPVSYSSSGARRPSLDSMENQVSVDAFKILEDPKWEFPRKNLVLGKXLGEGEFGKVVKAXAFHLKGRAGYXXVAVKMLKENASPSELRDLLSEFNVLKQVNHPHVIKLYGACSQDGPLLLIVEYAKYGSLRGFLRESRKVGPGYLGSGGSRNSSSLDHPDERALXMGDLISFAWQISQGMQYLAEMKLVHRDLAARNILVAEGRKMKISDFGLSRDVYEEDSYVKRSQGRIPVKWMAIESLFDHIYXXQSDVWSFGVLLWEIVXLGGNPYPGIPPERLFNLLKXGHRMERPDNCSEEMYRLMLQCWKQEPDKRPVFADISKDLEKMMVKRRDYLDLAASXPSDSLIYDDGLSEEEXPLVDCNNAPLPRALPSXWIENKLYGRISHAFXRF

SEQ ID NO: 23259 - protein, 1114 aa, Homo sapiens
  MOD_RES (5)..(5): Selenocysteine
  MOD_RES (48)..(48): Selenocysteine
  MOD_RES (75)..(75): Selenocysteine
  MOD_RES (78)..(78): Selenocysteine
  MOD_RES (92)..(92): Selenocysteine
  MOD_RES (120)..(120): Selenocysteine
  MOD_RES (130)..(130): Selenocysteine
  MOD_RES (152)..(152): Selenocysteine
  MOD_RES (170)..(170): Selenocysteine
  MOD_RES (184)..(184): Selenocysteine
  MOD_RES (225)..(225): Selenocysteine
  MOD_RES (244)..(244): Selenocysteine
  MOD_RES (261)..(261): Selenocysteine
  MOD_RES (271)..(271): Selenocysteine
  MOD_RES (278)..(278): Selenocysteine
  MOD_RES (291)..(291): Selenocysteine
  MOD_RES (295)..(295): Selenocysteine
  MOD_RES (315)..(315): Selenocysteine
  MOD_RES (317)..(317): Selenocysteine
  MOD_RES (323)..(323): Selenocysteine
  MOD_RES (328)..(328): Selenocysteine
  MOD_RES (338)..(338): Selenocysteine
  MOD_RES (350)..(350): Selenocysteine
  MOD_RES (369)..(369): Selenocysteine
  MOD_RES (407)..(407): Selenocysteine
  MOD_RES (451)..(451): Selenocysteine
  MOD_RES (456)..(456): Selenocysteine
  MOD_RES (461)..(461): Selenocysteine
  MOD_RES (470)..(470): Selenocysteine
  MOD_RES (488)..(488): Selenocysteine
  MOD_RES (492)..(492): Selenocysteine
  MOD_RES (503)..(503): Selenocysteine
  MOD_RES (538)..(538): Selenocysteine
  MOD_RES (552)..(552): Selenocysteine
  MOD_RES (557)..(557): Selenocysteine
  MOD_RES (562)..(562): Selenocysteine
  MOD_RES (564)..(564): Selenocysteine
  MOD_RES (575)..(575): Selenocysteine
  MOD_RES (608)..(608): Selenocysteine
  MOD_RES (636)..(636): Selenocysteine
  MOD_RES (675)..(675): Selenocysteine
  MOD_RES (729)..(729): Selenocysteine
  MOD_RES (742)..(742): Selenocysteine
  MOD_RES (753)..(754): Selenocysteine
  MOD_RES (847)..(847): Selenocysteine
  MOD_RES (929)..(930): Selenocysteine
  MOD_RES (946)..(946): Selenocysteine
  MOD_RES (966)..(966): Selenocysteine
  MOD_RES (1022)..(1022): Selenocysteine
  MOD_RES (1038)..(1038): Selenocysteine
  MOD_RES (1055)..(1055): Selenocysteine
  MOD_RES (1078)..(1078): Selenocysteine
  MOD_RES (1083)..(1083): Selenocysteine
  MOD_RES (1085)..(1085): Selenocysteine
  MOD_RES (1111)..(1111): Selenocysteine
MAKAXSGAAGLRLLLLLLLPLLGKVALGLYFSRDAYWEKLYVDQAAGXPLLYVHALRDAPEEVPSFRLGQHLYGXYRXRLHENNWICIQEDXGLLYLNRSLDHSSWEKLSVRNRGFPLLXVYLKVFLSPXSLREGECQWPGCARVYFSFFNXSFPACSSLKPRELCFPEXRPSFRIRENRPPGXFHQFRLLPVQFLCPNISVAYRLLEGEGLPFRCAPDSLEVSXRWALDREQREKYELVAVCXVHAGAREEVVMVPFPVXVYDEDDSAPXFPAGVDXASAVVEFKRKEDXVVAXLRVFDADVVPASGELVRRYXSXLLPGDXWAQQXFRVEHWPNEXSVQANGSFVRAXVHDYRLVLNRNLSISENRXMQLAVLVNDSDFQGPGAGVLLLHFNVSVLPVSLHLPSXYSLSVSRRARRFAQIGKVCVENCQAFSGINVQYKLHSSGANCSXLGVVXSAEDXSGILFVNDXKALRRPKCAELHYMVVAXDQQXSRQAQAQLLVXVEGSYVAEEAGCPLSCAVSKRRLECEECGGLGSPXGRCEWRQGDGKGIXRNFSXCSPSXKXCPDGHCDVVEXQDINICPQDCLRGSIVGGHEPGEPRGIKAGYGXCNCFPEEEKCFCEPEDIQDPLCDELCRXVIAAAVLFSFIVSVLLSAFCIHCYHKFAHKPPISSAEMXFRRPAQAFPVSYSSSGARRPSLDSMENQVSVDAFKILEDPKWEFPRKNLVLGKXLGEGEFGKVVKAXAFHLKGRAGYXXVAVKMLKENASPSELRDLLSEFNVLKQVNHPHVIKLYGACSQDGPLLLIVEYAKYGSLRGFLRESRKVGPGYLGSGGSRNSSSLDHPDERALXMGDLISFAWQISQGMQYLAEMKLVHRDLAARNILVAEGRKMKISDFGLSRDVYEEDSYVKRSQGRIPVKWMAIESLFDHIYXXQSDVWSFGVLLWEIVXLGGNPYPGIPPERLFNLLKXGHRMERPDNCSEEMYRLMLQCWKQEPDKRPVFADISKDLEKMMVKRRDYLDLAASXPSDSLIYDDGLSEEEXPLVDCNNAPLPRALPSXWIENKLYGMSDPNWPGESPVPLXRADGXNXGFPRYPNDSVYANWMLSPSAAKLMDXFDS

SEQ ID NO: 23260 - protein, 233 aa, Homo sapiens
  MOD_RES (25)..(25): Selenocysteine
  MOD_RES (27)..(27): Selenocysteine
  MOD_RES (80)..(80): Selenocysteine
  MOD_RES (95)..(95): Selenocysteine
  MOD_RES (114)..(114): Selenocysteine
  MOD_RES (175)..(175): Selenocysteine
MGKAKVPASKRAPSSPVAKPGPVKXLXRKKNKKKKRFWKSKAREVSKKPASGPGAVVRPPKAPEDFSQNWKALQEVPRWXGGRQYLAPRPVEQSXIRKEPRKGQMVILFQNEGXSSIRSGKLRRQPQPHPPREELEVVQKEVAEMLKGRILVGHALHNDLKVLFLDHPKKKIRDXQKYKPFKSQVKSGRPSLRLLSEKILGLQVQQAEHCSIQDAQAAMRLYVMVKKEWESMA

SEQ ID NO: 23261 - protein, 250 aa, Homo sapiens
  MOD_RES (25)..(25): Selenocysteine
  MOD_RES (27)..(27): Selenocysteine
  MOD_RES (80)..(80): Selenocysteine
  MOD_RES (95)..(95): Selenocysteine
  MOD_RES (114)..(114): Selenocysteine
  MOD_RES (175)..(175): Selenocysteine
  MOD_RES (241)..(241): Selenocysteine
MGKAKVPASKRAPSSPVAKPGPVKXLXRKKNKKKKRFWKSKAREVSKKPASGPGAVVRPPKAPEDFSQNWKALQEVPRWXGGRQYLAPRPVEQSXIRKEPRKGQMVILFQNEGXSSIRSGKLRRQPQPHPPREELEVVQKEVAEMLKGRILVGHALHNDLKVLFLDHPKKKIRDXQKYKPFKSQVKSGRPSLRLLSEKILGLQVQQAEHCSIQDAQAAMRLYVMVKKEWESMARDRRPLLXAPDHCSDDA

SEQ ID NO: 23262 - protein, 422 aa, Homo sapiens
  MOD_RES (25)..(25): Selenocysteine
  MOD_RES (27)..(27): Selenocysteine
  MOD_RES (110)..(110): Selenocysteine
  MOD_RES (147)..(147): Selenocysteine
  MOD_RES (152)..(152): Selenocysteine
  MOD_RES (159)..(159): Selenocysteine
  MOD_RES (163)..(163): Selenocysteine
  MOD_RES (190)..(190): Selenocysteine
  MOD_RES (241)..(241): Selenocysteine
  MOD_RES (283)..(283): Selenocysteine
  MOD_RES (287)..(287): Selenocysteine
  MOD_RES (291)..(291): Selenocysteine
  MOD_RES (347)..(347): Selenocysteine
  MOD_RES (413)..(413): Selenocysteine
MGKAKVPASKRAPSSPVAKPGPVKXLXRKKNKKKKRFWKSKAREVSKKPASGPGAVVRPPKAPEDFSQNWKALQEWLLKQKSQAPEKPLVISQMGSKKKPKIIQQNKKEXSPQVKGEEMPAGKDQEASRGSVPSGSKMDRRAPVPRXKASGXEHNKKGXKERXNGDIVPERGDIEHKKRKAKEAAPAPPXEEDIWFDDVDPADIEAAIGPEAAKIARKQLGQSEGSVSLSLVKEQAFGGLXRALALDCEMVGVGPKGEESMAARVSIVNQYGKCVYDKYVKPXEPVXDYRXAVSGIRPENLKQGEELEVVQKEVAEMLKGRILVGHALHNDLKVLFLDHPKKKIRDXQKYKPFKSQVKSGRPSLRLLSEKILGLQVQQAEHCSIQDAQAAMRLYVMVKKEWESMARDRRPLLXAPDHCSDDA

SEQ ID NO: 23263 - protein, 189 aa, Homo sapiens
  MOD_RES (17)..(17): Selenocysteine
  MOD_RES (54)..(54): Selenocysteine
  MOD_RES (59)..(59): Selenocysteine
  MOD_RES (66)..(66): Selenocysteine
  MOD_RES (70)..(70): Selenocysteine
  MOD_RES (97)..(97): Selenocysteine
  MOD_RES (148)..(148): Selenocysteine
MGSKKKPKIIQQNKKEXSPQVKGEEMPAGKDQEASRGSVPSGSKMDRRAPVPRXKASGXEHNKKGXKERXNGDIVPERGDIEHKKRKAKEAAPAPPXEEDIWFDDVDPADIEAAIGPEAAKIARKQLGQSEGSVSLSLVKEQAFGGLXRALALDCEMVGVGPKGEESMAARVSIVNQYGKCVYDKYVKP

SEQ ID NO: 23264 - protein, 101 aa, Homo sapiens
  MOD_RES (58)..(58): Selenocysteine
  MOD_RES (82)..(82): Selenocysteine
  MOD_RES (86)..(86): Selenocysteine
  MOD_RES (91)..(91): Selenocysteine
ARMEVEAVCGGAGEVEAQDSDPAPAFSKAPGSAGHYELPWVEKYRPVKLNEIVGNEDXVSRLEVFAREGNVPNIIIAGSEVXEMQXAVNIXQELPEVLLVV

SEQ ID NO: 23265 - protein, 28 aa, Homo sapiens
  MOD_RES (17)..(17): Selenocysteine
EKYRPVKLNEIVGNEDXVSRLESSRSKF

SEQ ID NO: 23266 - protein, 251 aa, Homo sapiens
  MOD_RES (4)..(4): Selenocysteine
  MOD_RES (26)..(26): Selenocysteine
  MOD_RES (44)..(44): Selenocysteine
  MOD_RES (54)..(54): Selenocysteine
  MOD_RES (61)..(62): Selenocysteine
  MOD_RES (88)..(88): Selenocysteine
  MOD_RES (91)..(91): Selenocysteine
  MOD_RES (97)..(97): Selenocysteine
  MOD_RES (111)..(111): Selenocysteine
  MOD_RES (121)..(121): Selenocysteine
  MOD_RES (136)..(136): Selenocysteine
  MOD_RES (202)..(202): Selenocysteine
  MOD_RES (220)..(220): Selenocysteine
  MOD_RES (245)..(245): Selenocysteine
MCPXSSLRGIDVVRNKIKMFAQQKVXLPKGRHKIIILDEADSMXDGAQQALRRXMEIYSKXXRFALACNASDKIIEPIQSRCAVLRYXKLXDAQILXRLMNVIEKERVPYXDDGLEAIIFXAQGDMRQALNNLQSXFSGFGFINSENVFKVCDEPHPLLVKEMIQHCVNANIDEAYKILAHLWHLGYSPEDIIGNIFRVCKXFQMAEYLKLEFIKEIGYXHMKIAEGVNSLLQMAGLLARLCQKXMAPVAS

SEQ ID NO: 23267 - protein, 37 aa, Homo sapiens
MEVEAVCGGAGEVEAQDSDPAPAFSKAPGSAGHYELP

SEQ ID NO: 23268 - protein, 77 aa, Homo sapiens
  MOD_RES (56)..(56): Selenocysteine
MEVEAVCGGAGEVEAQDSDPAPAFSKAPGSAGHYELPWVEKYRPVKLNEIVGNEDXVSRLEVFAREGNVPNIIIAGH

SEQ ID NO: 23269 - protein, 354 aa, Homo sapiens
  MOD_RES (56)..(56): Selenocysteine
  MOD_RES (80)..(80): Selenocysteine
  MOD_RES (83)..(84): Selenocysteine
  MOD_RES (129)..(129): Selenocysteine
  MOD_RES (147)..(147): Selenocysteine
  MOD_RES (157)..(157): Selenocysteine
  MOD_RES (164)..(165): Selenocysteine
  MOD_RES (191)..(191): Selenocysteine
  MOD_RES (194)..(194): Selenocysteine
  MOD_RES (200)..(200): Selenocysteine
  MOD_RES (214)..(214): Selenocysteine
  MOD_RES (224)..(224): Selenocysteine
  MOD_RES (239)..(239): Selenocysteine
  MOD_RES (305)..(305): Selenocysteine
  MOD_RES (323)..(323): Selenocysteine
  MOD_RES (348)..(348): Selenocysteine
MEVEAVCGGAGEVEAQDSDPAPAFSKAPGSAGHYELPWVEKYRPVKLNEIVGNEDXVSRLEVFAREGNVPNIIIAGPPGXGKXXSILCLARALLGPALKDAMLELNASNDRGIDVVRNKIKMFAQQKVXLPKGRHKIIILDEADSMXDGAQQALRRXMEIYSKXXRFALACNASDKIIEPIQSRCAVLRYXKLXDAQILXRLMNVIEKERVPYXDDGLEAIIFXAQGDMRQALNNLQSXFSGFGFINSENVFKVCDEPHPLLVKEMIQHCVNANIDEAYKILAHLWHLGYSPEDIIGNIFRVCKXFQMAEYLKLEFIKEIGYXHMKIAEGVNSLLQMAGLLARLCQKXMAPVAS

SEQ ID NO: 23270 - protein, 320 aa, Homo sapiens
  MOD_RES (56)..(56): Selenocysteine
  MOD_RES (80)..(80): Selenocysteine
  MOD_RES (83)..(84): Selenocysteine
  MOD_RES (113)..(113): Selenocysteine
  MOD_RES (123)..(123): Selenocysteine
  MOD_RES (130)..(131): Selenocysteine
  MOD_RES (157)..(157): Selenocysteine
  MOD_RES (160)..(160): Selenocysteine
  MOD_RES (166)..(166): Selenocysteine
  MOD_RES (180)..(180): Selenocysteine
  MOD_RES (190)..(190): Selenocysteine
  MOD_RES (205)..(205): Selenocysteine
  MOD_RES (271)..(271): Selenocysteine
  MOD_RES (289)..(289): Selenocysteine
  MOD_RES (314)..(314): Selenocysteine
MEVEAVCGGAGEVEAQDSDPAPAFSKAPGSAGHYELPWVEKYRPVKLNEIVGNEDXVSRLEVFAREGNVPNIIIAGPPGXGKXXSILCLARALLGPALKDAMLELNASNDSMXDGAQQALRRXMEIYSKXXRFALACNASDKIIEPIQSRCAVLRYXKLXDAQILXRLMNVIEKERVPYXDDGLEAIIFXAQGDMRQALNNLQSXFSGFGFINSENVFKVCDEPHPLLVKEMIQHCVNANIDEAYKILAHLWHLGYSPEDIIGNIFRVCKXFQMAEYLKLEFIKEIGYXHMKIAEGVNSLLQMAGLLARLCQKXMAPVAS

SEQ ID NO: 23271 - protein, 87 aa, Homo sapiens
  MOD_RES (1)..(1): Any amino acid
  MOD_RES (51)..(51): Selenocysteine
XCGGAGEVEAQDSDPAPAFSKAPGSAGHYELPWVEKYRPVKLNEIVGNEDXVSRLEVFAREGNVPNIIIAHDRRSPASLEENHGNLL

SEQ ID NO: 23272 - protein, 52 aa, Homo sapiens
  MOD_RES (1)..(1): Any amino acid
  MOD_RES (41)..(41): Selenocysteine
XDSDPAPAFSKAPGSAGHYELPWVEKYRPVKLNEIVGNEDXVSRLESSRSKF

SEQ ID NO: 23273 - protein, 120 aa, Homo sapiens
  MOD_RES (1)..(1): Any amino acid
  MOD_RES (7)..(7): Selenocysteine
  MOD_RES (17)..(17): Selenocysteine
  MOD_RES (32)..(32): Selenocysteine
  MOD_RES (87)..(87): Selenocysteine
  MOD_RES (109)..(109): Selenocysteine
XERVPYXDDGLEAIIFXAQGDMRQALNNLQSXFSGFGFINSENVFKVCDEPHPLLVKEMIQHCVNANIDEAYKVGLLPPVLAEEPLXSWAEESGSPSDSCSLVASGLLXRRYHWQHLSSV

SEQ ID NO: 23274 - protein, 75 aa, Homo sapiens
  MOD_RES (1)..(1): Any amino acid
  MOD_RES (32)..(32): Selenocysteine
  MOD_RES (56)..(56): Selenocysteine
  MOD_RES (60)..(60): Selenocysteine
  MOD_RES (65)..(65): Selenocysteine
XKAPGSAGHYELPWVEKYRPVKLNEIVGNEDXVSRLEVFAREGNVPNIIIAGSEVXEMQXAVNIXQELPEVLLVV

SEQ ID NO: 23275 - protein, 198 aa, Homo sapiens
  MOD_RES (1)..(1): Any amino acid
  MOD_RES (3)..(3): Selenocysteine
  MOD_RES (13)..(13): Selenocysteine
  MOD_RES (20)..(21): Selenocysteine
  MOD_RES (47)..(47): Selenocysteine
  MOD_RES (50)..(50): Selenocysteine
  MOD_RES (56)..(56): Selenocysteine
  MOD_RES (70)..(70): Selenocysteine
  MOD_RES (80)..(80): Selenocysteine
  MOD_RES (95)..(95): Selenocysteine
  MOD_RES (161)..(161): Selenocysteine
  MOD_RES (198)..(198): Selenocysteine
XMXDGAQQALRRXMEIYSKXXRFALACNASDKIIEPIQSRCAVLRYXKLXDAQILXRLMNVIEKERVPYXDDGLEAIIFXAQGDMRQALNNLQSXFSGFGFINSENVFKVCDEPHPLLVKEMIQHCVNANIDEAYKILAHLWHLGYSPEDIIGNIFRVCKXFQMAEYLKLEFIKELPNGFPKWLQHVHSHQHSGGSSX

SEQ ID NO: 23276 - protein, 103 aa, Homo sapiens
  MOD_RES (39)..(39): Selenocysteine
  MOD_RES (47)..(47): Selenocysteine
  MOD_RES (56)..(56): Selenocysteine
  MOD_RES (65)..(65): Selenocysteine
  MOD_RES (81)..(81): Selenocysteine
EGLNLPSQLAHRLAEKSCRNLRKALLMCEACRVQQYPFXADQEIPEXDWEVYLREXANAIVSQQXPQRLLEVRGRLYELLXHCIPPEIIMKACKEESRSCDIF

SEQ ID NO: 23277 - protein, 305 aa, Homo sapiens
  MOD_RES (50)..(50): Selenocysteine
  MOD_RES (73)..(73): Selenocysteine
  MOD_RES (75)..(76): Selenocysteine
  MOD_RES (86)..(86): Selenocysteine
  MOD_RES (114)..(114): Selenocysteine
  MOD_RES (123)..(123): Selenocysteine
  MOD_RES (135)..(135): Selenocysteine
  MOD_RES (141)..(141): Selenocysteine
  MOD_RES (151)..(151): Selenocysteine
  MOD_RES (158)..(158): Selenocysteine
  MOD_RES (168)..(168): Selenocysteine
  MOD_RES (198)..(198): Selenocysteine
  MOD_RES (241)..(241): Selenocysteine
  MOD_RES (249)..(249): Selenocysteine
  MOD_RES (258)..(258): Selenocysteine
  MOD_RES (267)..(267): Selenocysteine
  MOD_RES (283)..(283): Selenocysteine
MSLWVDKYRPCSLGRLDYHKEQAAQLRNLVQCGDFPHLLVYGPSGAGKKXRIMCILRELYGVGVEKLRIEHQXIXXPSKKKIEISXIASNYHLEVNPSDAGNSDRVVIQEMLKXVAQSQQLEXNSQRDFKVVLLXEVDKLXKDAQHALRRXMEKYMSXCRLILCCNSXSKVIPPIRSRCLAVRVPAPSIEDICHVLSXVCKKEGLNLPSQLAHRLAEKSCRNLRKALLMCEACRVQQYPFXADQEIPEXDWEVYLREXANAIVSQQXPQRLLEVRGRLYELLXHCIPPEIIMKACKEESRSCDIF

SEQ ID NO: 23278 - protein, 356 aa, Homo sapiens
  MOD_RES (50)..(50): Selenocysteine
  MOD_RES (73)..(73): Selenocysteine
  MOD_RES (75)..(76): Selenocysteine
  MOD_RES (86)..(86): Selenocysteine
  MOD_RES (114)..(114): Selenocysteine
  MOD_RES (123)..(123): Selenocysteine
  MOD_RES (135)..(135): Selenocysteine
  MOD_RES (141)..(141): Selenocysteine
  MOD_RES (151)..(151): Selenocysteine
  MOD_RES (158)..(158): Selenocysteine
  MOD_RES (168)..(168): Selenocysteine
  MOD_RES (198)..(198): Selenocysteine
  MOD_RES (241)..(241): Selenocysteine
  MOD_RES (249)..(249): Selenocysteine
  MOD_RES (258)..(258): Selenocysteine
  MOD_RES (267)..(267): Selenocysteine
  MOD_RES (283)..(283): Selenocysteine
MSLWVDKYRPCSLGRLDYHKEQAAQLRNLVQCGDFPHLLVYGPSGAGKKXRIMCILRELYGVGVEKLRIEHQXIXXPSKKKIEISXIASNYHLEVNPSDAGNSDRVVIQEMLKXVAQSQQLEXNSQRDFKVVLLXEVDKLXKDAQHALRRXMEKYMSXCRLILCCNSXSKVIPPIRSRCLAVRVPAPSIEDICHVLSXVCKKEGLNLPSQLAHRLAEKSCRNLRKALLMCEACRVQQYPFXADQEIPEXDWEVYLREXANAIVSQQXPQRLLEVRGRLYELLXHCIPPEIIMKGLLSELLHNCDGQLKGEVAQMAAYYEHRLQLGSKAIYHLEAFVAKFMALYKKFMEDGLEGMMF

SEQ ID NO: 23279 - protein, 111 aa, Homo sapiens
  MOD_RES (18)..(18): Selenocysteine
  MOD_RES (24)..(24): Selenocysteine
  MOD_RES (27)..(27): Selenocysteine
  MOD_RES (33)..(33): Selenocysteine
  MOD_RES (38)..(38): Selenocysteine
  MOD_RES (79)..(79): Selenocysteine
  MOD_RES (103)..(103): Selenocysteine
  MOD_RES (109)..(109): Selenocysteine
GIAYLVKVSEGDLRKAIXFLQSAXRLXGGKEIXEKVIXDIAGVIPAEKIDGVFAACQSGSFDKLEAVVKDLIDEGHAAXQLVNQLHDVVVENNLSDKQKSIIXEKLALXNA

SEQ ID NO: 23280 - protein, 43 aa, Homo sapiens
  MOD_RES (8)..(8): Selenocysteine
  MOD_RES (12)..(12): Selenocysteine
  MOD_RES (17)..(17): Selenocysteine
MQAFLKGXSISXKPPLXKDRGVAASAGSSGENKKAKPVPWVEK

SEQ ID NO: 23281 - protein, 95 aa, Homo sapiens
  MOD_RES (8)..(8): Selenocysteine
  MOD_RES (12)..(12): Selenocysteine
  MOD_RES (17)..(17): Selenocysteine
  MOD_RES (82)..(82): Selenocysteine
  MOD_RES (85)..(85): Selenocysteine
  MOD_RES (87)..(87): Selenocysteine
MQAFLKGXSISXKPPLXKDRGVAASAGSSGENKKAKPVPWVEKYRPKCVDEVAFQEEVVAVLKKSLEGADLPNLLFYGPPGXGKXSXILAAAREL

SEQ ID NO: 23282 - protein, 97 aa, Homo sapiens
  MOD_RES (8)..(8): Selenocysteine
  MOD_RES (12)..(12): Selenocysteine
  MOD_RES (17)..(17): Selenocysteine
  MOD_RES (82)..(82): Selenocysteine
  MOD_RES (85)..(85): Selenocysteine
  MOD_RES (87)..(87): Selenocysteine
MQAFLKGXSISXKPPLXKDRGVAASAGSSGENKKAKPVPWVEKYRPKCVDEVAFQEEVVAVLKKSLEGADLPNLLFYGPPGXGKXSXILAAARELFG

SEQ ID NO: 23283 - protein, 123 aa, Homo sapiens
  MOD_RES (8)..(8): Selenocysteine
  MOD_RES (12)..(12): Selenocysteine
  MOD_RES (17)..(17): Selenocysteine
  MOD_RES (82)..(82): Selenocysteine
  MOD_RES (85)..(85): Selenocysteine
  MOD_RES (87)..(87): Selenocysteine
MQAFLKGXSISXKPPLXKDRGVAASAGSSGENKKAKPVPWVEKYRPKCVDEVAFQEEVVAVLKKSLEGADLPNLLFYGPPGXGKXSXILAAARELFGPELFRLRVLELNASDERGIQVVREKV

SEQ ID NO: 23284 - protein, 167 aa, Homo sapiens
  MOD_RES (8)..(8): Selenocysteine
  MOD_RES (12)..(12): Selenocysteine
  MOD_RES (17)..(17): Selenocysteine
  MOD_RES (82)..(82): Selenocysteine
  MOD_RES (85)..(85): Selenocysteine
  MOD_RES (87)..(87): Selenocysteine
  MOD_RES (130)..(130): Selenocysteine
  MOD_RES (156)..(156): Selenocysteine
  MOD_RES (166)..(166): Selenocysteine
MQAFLKGXSISXKPPLXKDRGVAASAGSSGENKKAKPVPWVEKYRPKCVDEVAFQEEVVAVLKKSLEGADLPNLLFYGPPGXGKXSXILAAARELFGPELFRLRVLELNASDERGIQVVREKVKNFAQLXVSGSRSDGKPCPPFKIVILDEADSMXSAAQAALRRXM

SEQ ID NO: 23285 - protein, 214 aa, Homo sapiens
  MOD_RES (8)..(8): Selenocysteine
  MOD_RES (12)..(12): Selenocysteine
  MOD_RES (17)..(17): Selenocysteine
  MOD_RES (82)..(82): Selenocysteine
  MOD_RES (85)..(85): Selenocysteine
  MOD_RES (87)..(87): Selenocysteine
  MOD_RES (130)..(130): Selenocysteine
  MOD_RES (156)..(156): Selenocysteine
  MOD_RES (166)..(166): Selenocysteine
  MOD_RES (173)..(174): Selenocysteine
  MOD_RES (191)..(191): Selenocysteine
MQAFLKGXSISXKPPLXKDRGVAASAGSSGENKKAKPVPWVEKYRPKCVDEVAFQEEVVAVLKKSLEGADLPNLLFYGPPGXGKXSXILAAARELFGPELFRLRVLELNASDERGIQVVREKVKNFAQLXVSGSRSDGKPCPPFKIVILDEADSMXSAAQAALRRXMEKESKXXRFCLICNYVSRIIEPLXSRCSKFRFKPLSDKIQQQRLLDI

SEQ ID NO: 23286 - protein, 336 aa, Homo sapiens
  MOD_RES (8)..(8): Selenocysteine
  MOD_RES (12)..(12): Selenocysteine
  MOD_RES (17)..(17): Selenocysteine
  MOD_RES (82)..(82): Selenocysteine
  MOD_RES (85)..(85): Selenocysteine
  MOD_RES (87)..(87): Selenocysteine
  MOD_RES (130)..(130): Selenocysteine
  MOD_RES (156)..(156): Selenocysteine
  MOD_RES (166)..(166): Selenocysteine
  MOD_RES (173)..(174): Selenocysteine
  MOD_RES (191)..(191): Selenocysteine
  MOD_RES (243)..(243): Selenocysteine
  MOD_RES (249)..(249): Selenocysteine
  MOD_RES (252)..(252): Selenocysteine
  MOD_RES (258)..(258): Selenocysteine
  MOD_RES (263)..(263): Selenocysteine
  MOD_RES (277)..(277): Selenocysteine
  MOD_RES (301)..(301): Selenocysteine
  MOD_RES (327)..(327): Selenocysteine
MQAFLKGXSISXKPPLXKDRGVAASAGSSGENKKAKPVPWVEKYRPKCVDEVAFQEEVVAVLKKSLEGADLPNLLFYGPPGXGKXSXILAAARELFGPELFRLRVLELNASDERGIQVVREKVKNFAQLXVSGSRSDGKPCPPFKIVILDEADSMXSAAQAALRRXMEKESKXXRFCLICNYVSRIIEPLXSRCSKFRFKPLSDKIQQQRLLDIAKKENVKISDEGIAYLVKVSEGDLRKAIXFLQSAXRLXGGKEIXEKVIXDIAGDLIDEGHAAXQLVNQLHDVVVENNLSDKQKSIIXEKLAEVDKCLADGADEHLQLISLCAXVMQQLSQNC

SEQ ID NO: 23287 - protein, 363 aa, Homo sapiens
  MOD_RES (8)..(8): Selenocysteine
  MOD_RES (12)..(12): Selenocysteine
  MOD_RES (17)..(17): Selenocysteine
  MOD_RES (82)..(82): Selenocysteine
  MOD_RES (85)..(85): Selenocysteine
  MOD_RES (87)..(87): Selenocysteine
  MOD_RES (130)..(130): Selenocysteine
  MOD_RES (156)..(156): Selenocysteine
  MOD_RES (166)..(166): Selenocysteine
  MOD_RES (173)..(174): Selenocysteine
  MOD_RES (191)..(191): Selenocysteine
  MOD_RES (243)..(243): Selenocysteine
  MOD_RES (249)..(249): Selenocysteine
  MOD_RES (252)..(252): Selenocysteine
  MOD_RES (258)..(258): Selenocysteine
  MOD_RES (263)..(263): Selenocysteine
  MOD_RES (304)..(304): Selenocysteine
  MOD_RES (328)..(328): Selenocysteine
  MOD_RES (354)..(354): Selenocysteine
MQAFLKGXSISXKPPLXKDRGVAASAGSSGENKKAKPVPWVEKYRPKCVDEVAFQEEVVAVLKKSLEGADLPNLLFYGPPGXGKXSXILAAARELFGPELFRLRVLELNASDERGIQVVREKVKNFAQLXVSGSRSDGKPCPPFKIVILDEADSMXSAAQAALRRXMEKESKXXRFCLICNYVSRIIEPLXSRCSKFRFKPLSDKIQQQRLLDIAKKENVKISDEGIAYLVKVSEGDLRKAIXFLQSAXRLXGGKEIXEKVIXDIAGVIPAEKIDGVFAACQSGSFDKLEAVVKDLIDEGHAAXQLVNQLHDVVVENNLSDKQKSIIXEKLAEVDKCLADGADEHLQLISLCAXVMQQLSQNC

SEQ ID NO: 23288 - protein, 340 aa, Homo sapiens
  MOD_RES (3)..(3): Selenocysteine
  MOD_RES (15)..(15): Selenocysteine
  MOD_RES (30)..(30): Selenocysteine
  MOD_RES (43)..(43): Selenocysteine
  MOD_RES (64)..(64): Selenocysteine
  MOD_RES (67)..(67): Selenocysteine
  MOD_RES (69)..(69): Selenocysteine
  MOD_RES (111)..(111): Selenocysteine
  MOD_RES (113)..(113): Selenocysteine
  MOD_RES (131)..(131): Selenocysteine
  MOD_RES (146)..(146): Selenocysteine
  MOD_RES (149)..(149): Selenocysteine
  MOD_RES (170)..(170): Selenocysteine
  MOD_RES (178)..(178): Selenocysteine
  MOD_RES (207)..(207): Selenocysteine
  MOD_RES (223)..(223): Selenocysteine
  MOD_RES (231)..(231): Selenocysteine
  MOD_RES (234)..(234): Selenocysteine
  MOD_RES (237)..(237): Selenocysteine
  MOD_RES (239)..(239): Selenocysteine
  MOD_RES (260)..(261): Selenocysteine
  MOD_RES (267)..(267): Selenocysteine
  MOD_RES (271)..(271): Selenocysteine
  MOD_RES (282)..(282): Selenocysteine
  MOD_RES (303)..(303): Selenocysteine
  MOD_RES (316)..(316): Selenocysteine
  MOD_RES (332)..(332): Selenocysteine
MEXSALKQQEQPAAXKIRNLPWVEKYRPQXLNDLISHQDILSXIQKFINEDRLPHLLLYGPPGXGKXSXILACAKQLYKDKEFGSMVLELNASDDRGIDIIRGPILSFASXRXIFKKGFKLVILDEADAMXQDAQNALRRVIEKFXENXRFCLICNYLSKIIPALQSRCXRFRFGPLXPELMVPRLEHVVEEEKVDISEDGMKALVXLSSGDMRRALNILQSXNMAFGKVXEEXVYXCXGHPLKSDIANILDWMLNQDFXXAYRNIXELKXLKGLALHDILXEIHLFVHRVDFPSSVRIHLLXKMADIEYRLSVGXNEKIQLSSLIAAFQVXRDLIVAEA

SEQ ID NO: 23289 - protein, 139 aa, Homo sapiens
  MOD_RES (9)..(9): Selenocysteine
  MOD_RES (38)..(39): Selenocysteine
  MOD_RES (62)..(62): Selenocysteine
  MOD_RES (75)..(75): Selenocysteine
  MOD_RES (96)..(96): Selenocysteine
  MOD_RES (99)..(99): Selenocysteine
  MOD_RES (101)..(101): Selenocysteine
MLERSGVIXAQCNLKHWGSSHSPASASEELGLLEPLAXXNLLSIYGFAYSGHFMVEKYRPQXLNDLISHQDILSXIQKFINEDRLPHLLLYGPPGXGKXSXILACAKQLYKDKEFGSMVLELNASDDRGIDIIRGPILS

SEQ ID NO: 23290 - protein, 63 aa, Homo sapiens
  MOD_RES (9)..(9): Selenocysteine
  MOD_RES (22)..(22): Selenocysteine
  MOD_RES (43)..(43): Selenocysteine
  MOD_RES (46)..(46): Selenocysteine
  MOD_RES (48)..(48): Selenocysteine
MVEKYRPQXLNDLISHQDILSXIQKFINEDRLPHLLLYGPPGXGKXSXILACAKQLYKDKEFG

SEQ ID NO: 23291 - protein, 104 aa, Homo sapiens
  MOD_RES (9)..(9): Selenocysteine
  MOD_RES (22)..(22): Selenocysteine
  MOD_RES (43)..(43): Selenocysteine
  MOD_RES (46)..(46): Selenocysteine
  MOD_RES (48)..(48): Selenocysteine
  MOD_RES (90)..(90): Selenocysteine
  MOD_RES (92)..(92): Selenocysteine
MVEKYRPQXLNDLISHQDILSXIQKFINEDRLPHLLLYGPPGXGKXSXILACAKQLYKDKEFGSMVLELNASDDRGIDIIRGPILSFASXRXIFKKGFKLVILD

SEQ ID NO: 23292 - protein, 319 aa, Homo sapiens
  MOD_RES (9)..(9): Selenocysteine
  MOD_RES (22)..(22): Selenocysteine
  MOD_RES (43)..(43): Selenocysteine
  MOD_RES (46)..(46): Selenocysteine
  MOD_RES (48)..(48): Selenocysteine
  MOD_RES (90)..(90): Selenocysteine
  MOD_RES (92)..(92): Selenocysteine
  MOD_RES (110)..(110): Selenocysteine
  MOD_RES (125)..(125): Selenocysteine
  MOD_RES (128)..(128): Selenocysteine
  MOD_RES (149)..(149): Selenocysteine
  MOD_RES (157)..(157): Selenocysteine
  MOD_RES (186)..(186): Selenocysteine
  MOD_RES (202)..(202): Selenocysteine
  MOD_RES (210)..(210): Selenocysteine
  MOD_RES (213)..(213): Selenocysteine
  MOD_RES (216)..(216): Selenocysteine
  MOD_RES (218)..(218): Selenocysteine
  MOD_RES (239)..(240): Selenocysteine
  MOD_RES (246)..(246): Selenocysteine
  MOD_RES (250)..(250): Selenocysteine
  MOD_RES (261)..(261): Selenocysteine
  MOD_RES (282)..(282): Selenocysteine
  MOD_RES (295)..(295): Selenocysteine
  MOD_RES (311)..(311): Selenocysteine
MVEKYRPQXLNDLISHQDILSXIQKFINEDRLPHLLLYGPPGXGKXSXILACAKQLYKDKEFGSMVLELNASDDRGIDIIRGPILSFASXRXIFKKGFKLVILDEADAMXQDAQNALRRVIEKFXENXRFCLICNYLSKIIPALQSRCXRFRFGPLXPELMVPRLEHVVEEEKVDISEDGMKALVXLSSGDMRRALNILQSXNMAFGKVXEEXVYXCXGHPLKSDIANILDWMLNQDFXXAYRNIXELKXLKGLALHDILXEIHLFVHRVDFPSSVRIHLLXKMADIEYRLSVGXNEKIQLSSLIAAFQVXRDLIVAEA

SEQ ID NO: 23293 - protein, 99 aa, Homo sapiens
  MOD_RES (26)..(26): Selenocysteine
  MOD_RES (28)..(28): Selenocysteine
  MOD_RES (46)..(46): Selenocysteine
  MOD_RES (61)..(61): Selenocysteine
  MOD_RES (64)..(64): Selenocysteine
  MOD_RES (85)..(85): Selenocysteine
  MOD_RES (93)..(93): Selenocysteine
MVLELNASDDRGIDIIRGPILSFASXRXIFKKGFKLVILDEADAMXQDAQNALRRVIEKFXENXRFCLICNYLSKIIPALQSRCXRFRFGPLXPELMVP

SEQ ID NO: 23294 - protein, 104 aa, Homo sapiens
  MOD_RES (26)..(26): Selenocysteine
  MOD_RES (28)..(28): Selenocysteine
  MOD_RES (46)..(46): Selenocysteine
  MOD_RES (61)..(61): Selenocysteine
  MOD_RES (64)..(64): Selenocysteine
  MOD_RES (85)..(85): Selenocysteine
  MOD_RES (93)..(93): Selenocysteine
MVLELNASDDRGIDIIRGPILSFASXRXIFKKGFKLVILDEADAMXQDAQNALRRVIEKFXENXRFCLICNYLSKIIPALQSRCXRFRFGPLXPELMVPRLEHV

SEQ ID NO: 23295 - protein, 60 aa, Homo sapiens
  MOD_RES (4)..(4): Selenocysteine
  MOD_RES (41)..(41): Selenocysteine
  MOD_RES (57)..(57): Selenocysteine
MWAXCCNWFCLDGQPEEVPPPQGARMQAYSNPGYSSFPSPXGLEPSCKSCGAHFANXARK

SEQ ID NO: 23296 - protein, 127 aa, Homo sapiens
  MOD_RES (4)..(4): Selenocysteine
  MOD_RES (41)..(41): Selenocysteine
  MOD_RES (57)..(57): Selenocysteine
  MOD_RES (87)..(87): Selenocysteine
  MOD_RES (108)..(108): Selenocysteine
  MOD_RES (117)..(117): Selenocysteine
MWAXCCNWFCLDGQPEEVPPPQGARMQAYSNPGYSSFPSPXGLEPSCKSCGAHFANXARKANGHVSQDQEEPVYLESVARVPAEDEXQSIDSEDSFVPGRRASLSDLXDLEDIEGLXVRQLKEILAR

SEQ ID NO: 23297 - protein, 152 aa, Homo sapiens
  MOD_RES (4)..(4): Selenocysteine
  MOD_RES (41)..(41): Selenocysteine
  MOD_RES (57)..(57): Selenocysteine
  MOD_RES (62)..(62): Selenocysteine
  MOD_RES (73)..(73): Selenocysteine
  MOD_RES (94)..(94): Selenocysteine
  MOD_RES (120)..(120): Selenocysteine
  MOD_RES (146)..(146): Selenocysteine
  MOD_RES (150)..(150): Selenocysteine
MWAXCCNWFCLDGQPEEVPPPQGARMQAYSNPGYSSFPSPXGLEPSCKSCGAHFANXARKQXCLDCKKNFCMXCSSQVGNGPRLCLLCQRFRAXAFQREELMKMKVKDLRDYLSLHDISXEMCREKEELVLLVLGQQPVISQEDRXRASXLS

SEQ ID NO: 23298 - protein, 355 aa, Homo sapiens
  MOD_RES (4)..(4): Selenocysteine
  MOD_RES (41)..(41): Selenocysteine
  MOD_RES (57)..(57): Selenocysteine
  MOD_RES (62)..(62): Selenocysteine
  MOD_RES (73)..(73): Selenocysteine
  MOD_RES (94)..(94): Selenocysteine
  MOD_RES (120)..(120): Selenocysteine
  MOD_RES (146)..(146): Selenocysteine
  MOD_RES (150)..(150): Selenocysteine
  MOD_RES (163)..(163): Selenocysteine
  MOD_RES (173)..(173): Selenocysteine
  MOD_RES (185)..(185): Selenocysteine
  MOD_RES (224)..(224): Selenocysteine
  MOD_RES (245)..(245): Selenocysteine
  MOD_RES (254)..(254): Selenocysteine
  MOD_RES (283)..(283): Selenocysteine
  MOD_RES (328)..(328): Selenocysteine
  MOD_RES (330)..(330): Selenocysteine
MWAXCCNWFCLDGQPEEVPPPQGARMQAYSNPGYSSFPSPXGLEPSCKSCGAHFANXARKQXCLDCKKNFCMXCSSQVGNGPRLCLLCQRFRAXAFQREELMKMKVKDLRDYLSLHDISXEMCREKEELVLLVLGQQPVISQEDRXRASXLSPDFPEQQAFLXQPHSSMVPPXSPNLPSSSAQAXSVPPAQVQENQQANGHVSQDQEEPVYLESVARVPAEDEXQSIDSEDSFVPGRRASLSDLXDLEDIEGLXVRQLKEILARNFVNYKGCCEKWELMERVXRLYKDQKGLQHLGGAVPSGLEENLCKICMDSPIDCVLLECGHMVXCXKCGKRMNECPICRQYVIRAVHVFRS

SEQ ID NO: 23299 - protein, 363 aa, Homo sapiens
  MOD_RES (4)..(4): Selenocysteine
  MOD_RES (41)..(41): Selenocysteine
  MOD_RES (57)..(57): Selenocysteine
  MOD_RES (62)..(62): Selenocysteine
  MOD_RES (73)..(73): Selenocysteine
  MOD_RES (94)..(94): Selenocysteine
  MOD_RES (120)..(120): Selenocysteine
  MOD_RES (146)..(146): Selenocysteine
  MOD_RES (150)..(150): Selenocysteine
  MOD_RES (163)..(163): Selenocysteine
  MOD_RES (173)..(173): Selenocysteine
  MOD_RES (185)..(185): Selenocysteine
  MOD_RES (224)..(224): Selenocysteine
  MOD_RES (245)..(245): Selenocysteine
  MOD_RES (254)..(254): Selenocysteine
  MOD_RES (283)..(283): Selenocysteine
  MOD_RES (336)..(336): Selenocysteine
  MOD_RES (338)..(338): Selenocysteine
MWAXCCNWFCLDGQPEEVPPPQGARMQAYSNPGYSSFPSPXGLEPSCKSCGAHFANXARKQXCLDCKKNFCMXCSSQVGNGPRLCLLCQRFRAXAFQREELMKMKVKDLRDYLSLHDISXEMCREKEELVLLVLGQQPVISQEDRXRASXLSPDFPEQQAFLXQPHSSMVPPXSPNLPSSSAQAXSVPPAQVQENQQANGHVSQDQEEPVYLESVARVPAEDEXQSIDSEDSFVPGRRASLSDLXDLEDIEGLXVRQLKEILARNFVNYKGCCEKWELMERVXRLYKDQKGLQHLVSGAEDQNGGAVPSGLEENLCKICMDSPIDCVLLECGHMVXCXKCGKRMNECPICRQYVIRAVHVFRS

SEQ ID NO: 23300 - protein, 327 aa, Homo sapiens
  MOD_RES (4)..(4): Selenocysteine
  MOD_RES (41)..(41): Selenocysteine
  MOD_RES (57)..(57): Selenocysteine
  MOD_RES (62)..(62): Selenocysteine
  MOD_RES (73)..(73): Selenocysteine
  MOD_RES (94)..(94): Selenocysteine
  MOD_RES (120)..(120): Selenocysteine
  MOD_RES (146)..(146): Selenocysteine
  MOD_RES (150)..(150): Selenocysteine
  MOD_RES (163)..(163): Selenocysteine
  MOD_RES (173)..(173): Selenocysteine
  MOD_RES (185)..(185): Selenocysteine
  MOD_RES (217)..(217): Selenocysteine
  MOD_RES (226)..(226): Selenocysteine
  MOD_RES (255)..(255): Selenocysteine
  MOD_RES (300)..(300): Selenocysteine
  MOD_RES (302)..(302): Selenocysteine
MWAXCCNWFCLDGQPEEVPPPQGARMQAYSNPGYSSFPSPXGLEPSCKSCGAHFANXARKQXCLDCKKNFCMXCSSQVGNGPRLCLLCQRFRAXAFQREELMKMKVKDLRDYLSLHDISXEMCREKEELVLLVLGQQPVISQEDRXRASXLSPDFPEQQAFLXQPHSSMVPPXSPNLPSSSAQAXSVPPAQVQENQQSIDSEDSFVPGRRASLSDLXDLEDIEGLXVRQLKEILARNFVNYKGCCEKWELMERVXRLYKDQKGLQHLGGAVPSGLEENLCKICMDSPIDCVLLECGHMVXCXKCGKRMNECPICRQYVIRAVHVFRS

SEQ ID NO: 23301 - protein, 141 aa, Homo sapiens
  MOD_RES (1)..(1): Any amino acid
  MOD_RES (2)..(2): Selenocysteine
  MOD_RES (34)..(34): Selenocysteine
  MOD_RES (43)..(43): Selenocysteine
  MOD_RES (72)..(72): Selenocysteine
  MOD_RES (125)..(125): Selenocysteine
  MOD_RES (127)..(127): Selenocysteine
XXSVPPAQVQENQQSIDSEDSFVPGRRASLSDLXDLEDIEGLXVRQLKEILARNFVNYKGCCEKWELMERVXRLYKDQKGLQHLVSGAEDQNGGAVPSGLEENLCKICMDSPIDCVLLECGHMVXCXKCGKRMNECPICRQ

SEQ ID NO: 23302 - protein, 331 aa, Homo sapiens
  MOD_RES (38)..(38): Selenocysteine
  MOD_RES (66)..(67): Selenocysteine
  MOD_RES (81)..(81): Selenocysteine
  MOD_RES (90)..(90): Selenocysteine
  MOD_RES (94)..(94): Selenocysteine
  MOD_RES (112)..(112): Selenocysteine
  MOD_RES (119)..(119): Selenocysteine
  MOD_RES (183)..(183): Selenocysteine
  MOD_RES (191)..(191): Selenocysteine
  MOD_RES (193)..(194): Selenocysteine
  MOD_RES (201)..(201): Selenocysteine
  MOD_RES (228)..(228): Selenocysteine
  MOD_RES (239)..(239): Selenocysteine
  MOD_RES (272)..(272): Selenocysteine
  MOD_RES (278)..(278): Selenocysteine
  MOD_RES (304)..(304): Selenocysteine
  MOD_RES (317)..(317): Selenocysteine
  MOD_RES (329)..(329): Selenocysteine
MSRARGALCRACLALAAALAALLLLPLPLPRAPAPARXPAPAPRAPPSRPAAPSLRPDDVFIAVKXXRKNHGPRLRLLLRXWISRARQQXFIFXDGDDPELELQGGDRVINXNCSAVRXRQALCCKMSVEYDKFIESGRKWFCHVDDDNYVNARSLLHLLSSFSPSQDVYLGRPSLDHPIEAXERVQGGRXVXXVKFWFAXGGAGFCLSRGLALKMSPWASLGSFMSXAEQVRLPDDCXVGYIVEGLLGARLLHSPLFHSHLENLQRLPPDXLLQQVXLSHGGPENPHNVVNVAGGFSLHQDPXRFKSIHCLLYPDXDWCPRQKQGAPXSR

SEQ ID NO: 23303 - protein, 60 aa, Homo sapiens
  MOD_RES (57)..(57): Selenocysteine
MSVEYDKFIESGRKWFCHVDDDNYVNARSLLHLLSSFSPSQDVYLGRPSLDHPIEAXERV

SEQ ID NO: 23304 - protein, 205 aa, Homo sapiens
  MOD_RES (57)..(57): Selenocysteine
  MOD_RES (65)..(65): Selenocysteine
  MOD_RES (67)..(68): Selenocysteine
  MOD_RES (75)..(75): Selenocysteine
  MOD_RES (102)..(102): Selenocysteine
  MOD_RES (113)..(113): Selenocysteine
  MOD_RES (146)..(146): Selenocysteine
  MOD_RES (152)..(152): Selenocysteine
  MOD_RES (178)..(178): Selenocysteine
  MOD_RES (191)..(191): Selenocysteine
  MOD_RES (203)..(203): Selenocysteine
MSVEYDKFIESGRKWFCHVDDDNYVNARSLLHLLSSFSPSQDVYLGRPSLDHPIEAXERVQGGRXVXXVKFWFAXGGAGFCLSRGLALKMSPWASLGSFMSXAEQVRLPDDCXVGYIVEGLLGARLLHSPLFHSHLENLQRLPPDXLLQQVXLSHGGPENPHNVVNVAGGFSLHQDPXRFKSIHCLLYPDXDWCPRQKQGAPXSR

SEQ ID NO: 23305 - protein, 117 aa, Homo sapiens
  MOD_RES (22)..(22): Selenocysteine
  MOD_RES (30)..(30): Selenocysteine
  MOD_RES (44)..(45): Selenocysteine
  MOD_RES (89)..(89): Selenocysteine
  MOD_RES (95)..(95): Selenocysteine
  MOD_RES (109)..(109): Selenocysteine
MGCGLNKLEKRDEKRPGNIYSXLKRPQVEXKIDVSYEYRFLEFXXLSAAELPGSSAVRLASLRDLPAQLLELYQQGFSLAALHPFVQPXHEREKXPLEHIFRAILIKKXDRKSHLCQ

SEQ ID NO: 23306 - protein, 114 aa, Homo sapiens
  MOD_RES (22)..(22): Selenocysteine
  MOD_RES (30)..(30): Selenocysteine
  MOD_RES (44)..(45): Selenocysteine
  MOD_RES (89)..(89): Selenocysteine
  MOD_RES (95)..(95): Selenocysteine
  MOD_RES (109)..(109): Selenocysteine
MGCGLNKLEKRDEKRPGNIYSXLKRPQVEXKIDVSYEYRFLEFXXLSAAELPGSSAVRLASLRDLPAQLLELYQQGFSLAALHPFVQPXHEREKXPLEHIFRAILIKKXDRSQK

SEQ ID NO: 23307 - protein, 149 aa, Homo sapiens
  MOD_RES (22)..(22): Selenocysteine
  MOD_RES (30)..(30): Selenocysteine
  MOD_RES (44)..(45): Selenocysteine
  MOD_RES (89)..(89): Selenocysteine
  MOD_RES (95)..(95): Selenocysteine
  MOD_RES (109)..(109): Selenocysteine
  MOD_RES (115)..(115): Selenocysteine
  MOD_RES (136)..(136): Selenocysteine
MGCGLNKLEKRDEKRPGNIYSXLKRPQVEXKIDVSYEYRFLEFXXLSAAELPGSSAVRLASLRDLPAQLLELYQQGFSLAALHPFVQPXHEREKXPLEHIFRAILIKKXDRSQKXDLHNEGYILELDCCSSLDHPXDQKLIPEFIKKIQ

SEQ ID NO: 23308 - protein, 275 aa, Homo sapiens
  MOD_RES (22)..(22): Selenocysteine
  MOD_RES (30)..(30): Selenocysteine
  MOD_RES (44)..(45): Selenocysteine
  MOD_RES (89)..(89): Selenocysteine
  MOD_RES (95)..(95): Selenocysteine
  MOD_RES (109)..(109): Selenocysteine
  MOD_RES (115)..(115): Selenocysteine
  MOD_RES (136)..(136): Selenocysteine
  MOD_RES (180)..(180): Selenocysteine
  MOD_RES (184)..(184): Selenocysteine
  MOD_RES (207)..(207): Selenocysteine
  MOD_RES (257)..(257): Selenocysteine
MGCGLNKLEKRDEKRPGNIYSXLKRPQVEXKIDVSYEYRFLEFXXLSAAELPGSSAVRLASLRDLPAQLLELYQQGFSLAALHPFVQPXHEREKXPLEHIFRAILIKKXDRSQKXDLHNEGYILELDCCSSLDHPXDQKLIPEFIKKIQEAASQGLKFVGVIPQYHSSVNSAGSSAPVSXANSXEDARDAKNARGDHASLENEKPGXGDVCSAPAGRNQSPEPSSGPRGEVPLAKQPSSPSGEGDGGELSPQGVSKXLDGPESNPLEVHEEPLSG

SEQ ID NO: 23309 - protein, 578 aa, Homo sapiens
  MOD_RES (22)..(22): Selenocysteine
  MOD_RES (30)..(30): Selenocysteine
  MOD_RES (44)..(45): Selenocysteine
  MOD_RES (89)..(89): Selenocysteine
  MOD_RES (95)..(95): Selenocysteine
  MOD_RES (109)..(109): Selenocysteine
  MOD_RES (115)..(115): Selenocysteine
  MOD_RES (136)..(136): Selenocysteine
  MOD_RES (180)..(180): Selenocysteine
  MOD_RES (184)..(184): Selenocysteine
  MOD_RES (207)..(207): Selenocysteine
  MOD_RES (257)..(257): Selenocysteine
  MOD_RES (281)..(281): Selenocysteine
  MOD_RES (299)..(299): Selenocysteine
  MOD_RES (310)..(310): Selenocysteine
  MOD_RES (350)..(350): Selenocysteine
  MOD_RES (361)..(361): Selenocysteine
  MOD_RES (366)..(366): Selenocysteine
  MOD_RES (379)..(379): Selenocysteine
  MOD_RES (388)..(388): Selenocysteine
  MOD_RES (405)..(405): Selenocysteine
  MOD_RES (410)..(410): Selenocysteine
  MOD_RES (415)..(416): Selenocysteine
  MOD_RES (423)..(423): Selenocysteine
  MOD_RES (552)..(552): Selenocysteine
  MOD_RES (574)..(574): Selenocysteine
MGCGLNKLEKRDEKRPGNIYSXLKRPQVEXKIDVSYEYRFLEFXXLSAAELPGSSAVRLASLRDLPAQLLELYQQGFSLAALHPFVQPXHEREKXPLEHIFRAILIKKXDRSQKXDLHNEGYILELDCCSSLDHPXDQKLIPEFIKKIQEAASQGLKFVGVIPQYHSSVNSAGSSAPVSXANSXEDARDAKNARGDHASLENEKPGXGDVCSAPAGRNQSPEPSSGPRGEVPLAKQPSSPSGEGDGGELSPQGVSKXLDGPESNPLEVHEEPLSGKMEIFXLFNKPKSHQKCRQYYPVXIPLHVSKNGQXVSGLDANWLEHMSDHFRKGGMLVNAVFYLGIVNDSLHGLXDGVFIFEAVSXEDSKXIQGYDAIVVEQWXVLEGVEVQXDYVPLLNSLAAYGWQLXCVLPXPVVKXXSEGSVSXKQIVFLQRPCLPQKIKKKESKFQWRFSREEMHNRQMRKSKGKLSARDKQQAEENEKNLEDQSSKAGDMGNCVSGQQQEGGVSEEMKGPVQEDKGEQLSPGGLLCGVGVEGEAVQNGPASHSRALVGICXGHSNPGEDARDGDAEEVRELGXVEEN

SEQ ID NO: 23310 - protein, 542 aa, Homo sapiens
  MOD_RES (53)..(53): Selenocysteine
  MOD_RES (59)..(59): Selenocysteine
  MOD_RES (73)..(73): Selenocysteine
  MOD_RES (79)..(79): Selenocysteine
  MOD_RES (100)..(100): Selenocysteine
  MOD_RES (144)..(144): Selenocysteine
  MOD_RES (148)..(148): Selenocysteine
  MOD_RES (171)..(171): Selenocysteine
  MOD_RES (221)..(221): Selenocysteine
  MOD_RES (245)..(245): Selenocysteine
  MOD_RES (263)..(263): Selenocysteine
  MOD_RES (274)..(274): Selenocysteine
  MOD_RES (314)..(314): Selenocysteine
  MOD_RES (325)..(325): Selenocysteine
  MOD_RES (330)..(330): Selenocysteine
  MOD_RES (343)..(343): Selenocysteine
  MOD_RES (352)..(352): Selenocysteine
  MOD_RES (369)..(369): Selenocysteine
  MOD_RES (374)..(374): Selenocysteine
  MOD_RES (379)..(380): Selenocysteine
  MOD_RES (387)..(387): Selenocysteine
  MOD_RES (516)..(516): Selenocysteine
  MOD_RES (538)..(538): Selenocysteine
MYCDGAVDLDAAAELPGSSAVRLASLRDLPAQLLELYQQGFSLAALHPFVQPXHEREKXPLEHIFRAILIKKXDRSQKXDLHNEGYILELDCCSSLDHPXDQKLIPEFIKKIQEAASQGLKFVGVIPQYHSSVNSAGSSAPVSXANSXEDARDAKNARGDHASLENEKPGXGDVCSAPAGRNQSPEPSSGPRGEVPLAKQPSSPSGEGDGGELSPQGVSKXLDGPESNPLEVHEEPLSGKMEIFXLFNKPKSHQKCRQYYPVXIPLHVSKNGQXVSGLDANWLEHMSDHFRKGGMLVNAVFYLGIVNDSLHGLXDGVFIFEAVSXEDSKXIQGYDAIVVEQWXVLEGVEVQXDYVPLLNSLAAYGWQLXCVLPXPVVKXXSEGSVSXKQIVFLQRPCLPQKIKKKESKFQWRFSREEMHNRQMRKSKGKLSARDKQQAEENEKNLEDQSSKAGDMGNCVSGQQQEGGVSEEMKGPVQEDKGEQLSPGGLLCGVGVEGEAVQNGPASHSRALVGICXGHSNPGEDARDGDAEEVRELGXVEEN

SEQ ID NO: 23311 - protein, 88 aa, Homo sapiens
  MOD_RES (3)..(3): Selenocysteine
  MOD_RES (20)..(20): Selenocysteine
  MOD_RES (25)..(25): Selenocysteine
  MOD_RES (30)..(31): Selenocysteine
  MOD_RES (38)..(38): Selenocysteine
  MOD_RES (80)..(80): Selenocysteine
VQXDYVPLLNSLAAYGWQLXCVLPXPVVKXXSEGSVSXKQIVFLQRPCLPQKIKKKESKFQWRFSREEMHNRQMRKSKVXYGNKSSMS

SEQ ID NO: 23312 - protein, 193 aa, Homo sapiens
  MOD_RES (29)..(29): Selenocysteine
  MOD_RES (38)..(38): Selenocysteine
  MOD_RES (46)..(46): Selenocysteine
  MOD_RES (55)..(55): Selenocysteine
  MOD_RES (60)..(60): Selenocysteine
  MOD_RES (73)..(73): Selenocysteine
  MOD_RES (91)..(91): Selenocysteine
  MOD_RES (119)..(119): Selenocysteine
  MOD_RES (127)..(128): Selenocysteine
  MOD_RES (152)..(152): Selenocysteine
  MOD_RES (188)..(188): Selenocysteine
  MOD_RES (191)..(191): Selenocysteine
GFFIYEEEGSGVPGSSRKGNDAIVVEQWXVIEGCEIKXDYGPLLHXLAEFGWLLXSVLPXPVLRHDSEGNLAXKQIVFLQRPVMWNSAAQXPDMWVRQCEKNKKKASRHIKGEDKNKAXSRSIGLDXXSSQPAESRHLPEECRLSPSRECWXKEGRLAQHNSFSGFSSSDNVLRELDDGQFDQEDGVXQVXCM

SEQ ID NO: 23313 - protein, 116 aa, Homo sapiens
  MOD_RES (22)..(22): Selenocysteine
  MOD_RES (30)..(30): Selenocysteine
  MOD_RES (32)..(32): Selenocysteine
  MOD_RES (44)..(44): Selenocysteine
  MOD_RES (64)..(64): Selenocysteine
MGCGLRKLEDPDDSSPGKIFSXLKRPQVEXKXEFAYEYVLLDFXLQASSNPEVIKINSILDIVXKVENYYLKGYIVGAIHPVIQPVGQRKHLPASYLYRVVLLRLKLSPKNSAAPS

SEQ ID NO: 23314 - protein, 501 aa, Homo sapiens
  MOD_RES (22)..(22): Selenocysteine
  MOD_RES (30)..(30): Selenocysteine
  MOD_RES (32)..(32): Selenocysteine
  MOD_RES (44)..(44): Selenocysteine
  MOD_RES (64)..(64): Selenocysteine
  MOD_RES (131)..(131): Selenocysteine
  MOD_RES (136)..(136): Selenocysteine
  MOD_RES (174)..(174): Selenocysteine
  MOD_RES (201)..(201): Selenocysteine
  MOD_RES (231)..(231): Selenocysteine
  MOD_RES (247)..(247): Selenocysteine
  MOD_RES (257)..(257): Selenocysteine
  MOD_RES (271)..(271): Selenocysteine
  MOD_RES (279)..(279): Selenocysteine
  MOD_RES (288)..(289): Selenocysteine
  MOD_RES (307)..(307): Selenocysteine
  MOD_RES (347)..(347): Selenocysteine
  MOD_RES (356)..(356): Selenocysteine
  MOD_RES (364)..(364): Selenocysteine
  MOD_RES (373)..(373): Selenocysteine
  MOD_RES (378)..(378): Selenocysteine
  MOD_RES (391)..(391): Selenocysteine
  MOD_RES (409)..(409): Selenocysteine
  MOD_RES (427)..(427): Selenocysteine
  MOD_RES (435)..(436): Selenocysteine
  MOD_RES (460)..(460): Selenocysteine
  MOD_RES (496)..(496): Selenocysteine
  MOD_RES (499)..(499): Selenocysteine
MGCGLRKLEDPDDSSPGKIFSXLKRPQVEXKXEFAYEYVLLDFXLQASSNPEVIKINSILDIVXKVENYYLKGYIVGAIHPVIQPVGQRKHLPASYLYRVVLLRLKLSPKNSAAPSGQRRPRLVIEECPLXSEAQXNDAAKELIEKINVAAKRGMKFVGFISQHYSPSKFCNGXNHDGDIESMLHVRHGSDENCRSWNEGXLSGQSSESGIEEELHHESGQYQMEQNGSPXSSKSRKGEASDNKLYXVFNAFDDDSXSWAYQEGILSMKVXRKGSVISXLDADWLELXXFYYKQGLSLIDSFVFWEXSKGEHLPKSLEGFFIYEEEGSGVPGSSRKGNDAIVVEQWXVIEGCEIKXDYGPLLHXLAEFGWLLXSVLPXPVLRHDSEGNLAXKQIVFLQRPVMWNSAAQXPDKKASRHIKGEDKNKAXSRSIGLDXXSSQPAESRHLPEECRLSPSRECWXKEGRLAQHNSFSGFSSSDNVLRELDDGQFDQEDGVXQVXCM

SEQ ID NO: 23315 - protein, 158 aa, Homo sapiens
  MOD_RES (3)..(3): Selenocysteine
  MOD_RES (7)..(7): Selenocysteine
  MOD_RES (45)..(45): Selenocysteine
  MOD_RES (49)..(49): Selenocysteine
  MOD_RES (56)..(56): Selenocysteine
  MOD_RES (76)..(76): Selenocysteine
  MOD_RES (88)..(88): Selenocysteine
  MOD_RES (92)..(92): Selenocysteine
  MOD_RES (104)..(104): Selenocysteine
  MOD_RES (115)..(115): Selenocysteine
  MOD_RES (124)..(124): Selenocysteine
  MOD_RES (128)..(128): Selenocysteine
  MOD_RES (132)..(132): Selenocysteine
  MOD_RES (141)..(141): Selenocysteine
  MOD_RES (146)..(146): Selenocysteine
  MOD_RES (153)..(154): Selenocysteine
MAXQAYXELQAAPPPSQPPQAPPQAQPQPPPPPPPAAPQPPQPPXAAAXPQPQYVXELQSPQPQAQPPGGQKQYVXELPAVPAPSQPXGAPXPSPAPQQYIVVXVSEGAMRASEXVSEASPGSXASQXGVPXQVVQQVQGXQQMCXAAARHPXXPGLP

SEQ ID NO: 23316 - protein, 979 aa, Homo sapiens
  MOD_RES (3)..(3): Selenocysteine
  MOD_RES (7)..(7): Selenocysteine
  MOD_RES (45)..(45): Selenocysteine
  MOD_RES (49)..(49): Selenocysteine
  MOD_RES (56)..(56): Selenocysteine
  MOD_RES (76)..(76): Selenocysteine
  MOD_RES (88)..(88): Selenocysteine
  MOD_RES (92)..(92): Selenocysteine
  MOD_RES (104)..(104): Selenocysteine
  MOD_RES (115)..(115): Selenocysteine
  MOD_RES (124)..(124): Selenocysteine
  MOD_RES (128)..(128): Selenocysteine
  MOD_RES (132)..(132): Selenocysteine
  MOD_RES (141)..(141): Selenocysteine
  MOD_RES (149)..(149): Selenocysteine
  MOD_RES (164)..(164): Selenocysteine
  MOD_RES (175)..(175): Selenocysteine
  MOD_RES (195)..(195): Selenocysteine
  MOD_RES (199)..(199): Selenocysteine
  MOD_RES (220)..(220): Selenocysteine
  MOD_RES (225)..(225): Selenocysteine
  MOD_RES (227)..(227): Selenocysteine
  MOD_RES (244)..(244): Selenocysteine
  MOD_RES (253)..(253): Selenocysteine
  MOD_RES (266)..(266): Selenocysteine
  MOD_RES (306)..(306): Selenocysteine
  MOD_RES (314)..(314): Selenocysteine
  MOD_RES (320)..(320): Selenocysteine
  MOD_RES (324)..(324): Selenocysteine
  MOD_RES (326)..(326): Selenocysteine
  MOD_RES (329)..(329): Selenocysteine
  MOD_RES (337)..(337): Selenocysteine
  MOD_RES (339)..(339): Selenocysteine
  MOD_RES (343)..(343): Selenocysteine
  MOD_RES (346)..(346): Selenocysteine
  MOD_RES (370)..(370): Selenocysteine
  MOD_RES (372)..(372): Selenocysteine
  MOD_RES (403)..(403): Selenocysteine
  MOD_RES (412)..(412): Selenocysteine
  MOD_RES (431)..(432): Selenocysteine
  MOD_RES (438)..(438): Selenocysteine
  MOD_RES (448)..(448): Selenocysteine
  MOD_RES (458)..(458): Selenocysteine
  MOD_RES (493)..(493): Selenocysteine
  MOD_RES (498)..(498): Selenocysteine
  MOD_RES (550)..(550): Selenocysteine
  MOD_RES (561)..(561): Selenocysteine
  MOD_RES (587)..(587): Selenocysteine
  MOD_RES (629)..(629): Selenocysteine
  MOD_RES (633)..(633): Selenocysteine
  MOD_RES (637)..(637): Selenocysteine
  MOD_RES (680)..(680): Selenocysteine
  MOD_RES (708)..(708): Selenocysteine
  MOD_RES (723)..(723): Selenocysteine
  MOD_RES (747)..(747): Selenocysteine
  MOD_RES (752)..(752): Selenocysteine
  MOD_RES (768)..(768): Selenocysteine
  MOD_RES (811)..(811): Selenocysteine
  MOD_RES (865)..(865): Selenocysteine
  MOD_RES (901)..(901): Selenocysteine
  MOD_RES (914)..(914): Selenocysteine
  MOD_RES (956)..(956): Selenocysteine
  MOD_RES (966)..(966): Selenocysteine
MAXQAYXELQAAPPPSQPPQAPPQAQPQPPPPPPPAAPQPPQPPXAAAXPQPQYVXELQSPQPQAQPPGGQKQYVXELPAVPAPSQPXGAPXPSPAPQQYIVVXVSEGAMRASEXVSEASPGSXASQXGVPXQVVQQVQGXQQRLLVQXSVQAKPGHVSPLQLXNIQVPQQALPXQRLVVQSAAPGSKGGQVSLXVHGXQQVHSPPEQSPVQANSSSSKXAGAPXGXVPQQLQVHGVQQSVPVXQERSVVQAXPQAPKPGPVQPLXVQGLQPVHVAQEVQQLQQVPVPHVYSSQVQYVEGGDASYXASAIRSSXYSYPEXPLYXQXASXSYYEAAGXAXQVSXPAXSQAVASSGSMPMYVSGSQVVASSXSXGAGASNSSGGGGSGGGGGGGGGGGGGGSGSXGGGGSGAGXYVIQGGYMLGSASQSYSHXXRASPAXVQWLLDNYEXAEGVSLPRSXLYCHYLLHCQEQKLEPVNAASFGKLIRSVFMGLRXRRLGXRGNSKYHYYGLRIKASSPLLRLMEDQQHMAMRGQPFSQKQRLKPIQKMEGMXNGVAVGQQPSXGLSDISAQVQQYQQFLDASRSLPDFXELDLQGKVLPEGVGPGDIKAFQVLYREHCEAIVDVMVNLQFXLVEXLWKXFWRYNLSQPSEAPPLAVHDEAEKRLPKAILVLLSKFEPVLQWXKHCDNVLYQGLVEILIPDVLRPIPSALXQAIRNFAKSLESWLXHAMVNIPEEMLRVKVAAAGAFAQXLRRYXSLNHLAQAARAVLQNXAQINQMLSDLNRVDFANVQEQASWVCRCEDRVVQRLEQDFKVXLQQQNSLEQWAAWLDGVVSQVLKPYQGSAGFPKAAKLFLLKWSFYSSMVIRDLXLRSAASFGSFHLIRLLYDEYMYYLIEHRVAQAKGEXPIAVMGEFANLAXSLNPLDPDKDEEEEEEEESEDELPQDISLAAGGESPALGPEXLEPPAKLARXDARGLFVQALPSS

SEQ ID NO: 23317 - protein, 147 aa, Homo sapiens
  MOD_RES (13)..(13): Selenocysteine
  MOD_RES (33)..(33): Selenocysteine
  MOD_RES (78)..(78): Selenocysteine
  MOD_RES (83)..(83): Selenocysteine
  MOD_RES (109)..(109): Selenocysteine
  MOD_RES (131)..(131): Selenocysteine
  MOD_RES (146)..(146): Selenocysteine
MAIENLQKSEGIXSHKSGLLNSHLQWLLDNYEXAEGVSLPRSSLYNHYLRHCQEHKLDPVNAASFGKLIRSVFMGLRXRRLGXRGNSKYHYYGIRLKPDSPLNRLQEDXQYMAMRQQPMHQKPRYRPAQKXDSLGDSGSHSGLHSXP

SEQ ID NO: 23318 - protein, 33 aa, Homo sapiens
  MOD_RES (5)..(5): Selenocysteine
  MOD_RES (10)..(10): Selenocysteine
MGLRXRRLGXRGNSKYHYYGIRLKPDSPLNRLQ

SEQ ID NO: 23319 - protein, 98 aa, Homo sapiens
  MOD_RES (5)..(5): Selenocysteine
  MOD_RES (10)..(10): Selenocysteine
  MOD_RES (18)..(18): Selenocysteine
  MOD_RES (33)..(33): Selenocysteine
  MOD_RES (37)..(37): Selenocysteine
  MOD_RES (73)..(73): Selenocysteine
  MOD_RES (91)..(91): Selenocysteine
MGLRXRRLGXRYRPAQKXDSLGDSGSHSGLHSXPEQXMAVQSQHHQQYIDVSHVFPEFPAPDLGSFLLQDGVXLHDVKALQLVYRRHCEAXVDVVMNL

SEQ ID NO: 23320 - protein, 99 aa, Homo sapiens
  MOD_RES (83)..(83): Selenocysteine
  MOD_RES (89)..(89): Selenocysteine
  MOD_RES (92)..(92): Selenocysteine
MQNSEGGADSPASVALRPSAAAPPVPASPQRVLVQAASSNPKGAQMQPISLPRVQQVPQQVQPVQHVYPAQVQYVEGGDAVYXNGAIRXAYXYNPEPQM

SEQ ID NO: 23321 - protein, 105 aa, Homo sapiens
  MOD_RES (83)..(83): Selenocysteine
  MOD_RES (89)..(89): Selenocysteine
  MOD_RES (92)..(92): Selenocysteine
  MOD_RES (105)..(105): Selenocysteine
MQNSEGGADSPASVALRPSAAAPPVPASPQRVLVQAASSNPKGAQMQPISLPRVQQVPQQVQPVQHVYPAQVQYVEGGDAVYXNGAIRXAYXYNPEPQMYAPSSX

SEQ ID NO: 23322 - protein, 143 aa, Homo sapiens
  MOD_RES (83)..(83): Selenocysteine
  MOD_RES (89)..(89): Selenocysteine
  MOD_RES (92)..(92): Selenocysteine
  MOD_RES (105)..(105): Selenocysteine
  MOD_RES (118)..(118): Selenocysteine
  MOD_RES (136)..(136): Selenocysteine
MQNSEGGADSPASVALRPSAAAPPVPASPQRVLVQAASSNPKGAQMQPISLPRVQQVPQQVQPVQHVYPAQVQYVEGGDAVYXNGAIRXAYXYNPEPQMYAPSSXASYFEAPGGAQVXVAASSPPAVPSHSMVGIXMDVGGSP

SEQ ID NO: 23323 - protein, 723 aa, Homo sapiens
  MOD_RES (83)..(83): Selenocysteine
  MOD_RES (89)..(89): Selenocysteine
  MOD_RES (92)..(92): Selenocysteine
  MOD_RES (105)..(105): Selenocysteine
  MOD_RES (118)..(118): Selenocysteine
  MOD_RES (136)..(136): Selenocysteine
  MOD_RES (160)..(160): Selenocysteine
  MOD_RES (167)..(167): Selenocysteine
  MOD_RES (174)..(174): Selenocysteine
  MOD_RES (189)..(189): Selenocysteine
  MOD_RES (209)..(209): Selenocysteine
  MOD_RES (254)..(254): Selenocysteine
  MOD_RES (259)..(259): Selenocysteine
  MOD_RES (285)..(285): Selenocysteine
  MOD_RES (307)..(307): Selenocysteine
  MOD_RES (322)..(322): Selenocysteine
  MOD_RES (326)..(326): Selenocysteine
  MOD_RES (362)..(362): Selenocysteine
  MOD_RES (380)..(380): Selenocysteine
  MOD_RES (411)..(411): Selenocysteine
  MOD_RES (469)..(469): Selenocysteine
  MOD_RES (471)..(471): Selenocysteine
  MOD_RES (486)..(486): Selenocysteine
  MOD_RES (499)..(499): Selenocysteine
  MOD_RES (510)..(510): Selenocysteine
  MOD_RES (515)..(515): Selenocysteine
  MOD_RES (531)..(531): Selenocysteine
  MOD_RES (574)..(574): Selenocysteine
  MOD_RES (593)..(593): Selenocysteine
  MOD_RES (628)..(628): Selenocysteine
  MOD_RES (661)..(661): Selenocysteine
  MOD_RES (664)..(664): Selenocysteine
  MOD_RES (681)..(681): Selenocysteine
MQNSEGGADSPASVALRPSAAAPPVPASPQRVLVQAASSNPKGAQMQPISLPRVQQVPQQVQPVQHVYPAQVQYVEGGDAVYXNGAIRXAYXYNPEPQMYAPSSXASYFEAPGGAQVXVAASSPPAVPSHSMVGIXMDVGGSPIVSSAGAYLIHGGMDSXRHSLAHXSRSSPAXLEMAIENLQKSEGIXSHKSGLLNSHLQWLLDNYEXAEGVSLPRSSLYNHYLRHCQEHKLDPVNAASFGKLIRSVFMGLRXRRLGXRGNSKYHYYGIRLKPDSPLNRLQEDXQYMAMRQQPMHQKPRYRPAQKXDSLGDSGSHSGLHSXPEQXMAVQSQHHQQYIDVSHVFPEFPAPDLGSFLLQDGVXLHDVKALQLVYRRHCEAXVDVVMNLQFHYIEKLWLSFWNSKASSSDGPXSLPASDEDPEGAVLPKDKLISLCQCDPILRWMRSCDHILYQALVEILIPDVLRPVPSXLXQAIRNFAKSLEGWLXNAMSDFPQQVIQXKVGVVSAFAQXLRRYXSLNHLAQAARAVLQNXSQINQMLSDLNRVDFANVQEQASWVCQCEESVVQRLEQDFKLXLQQQSSLDQWASWLDSVVXQVLKQHAGSPSFPKAARQFLLKWSFYSSMVIRDLXLRSAASFGSFHLIRLLYDEYMFYLVEHRVAEAXGEXPIAVMGEFNDLASLSLXLLDKDDMGDEQRGSEAGPDARSLGEPLVKRERSDPNHSLQGI

SEQ ID NO: 23324 - protein, 698 aa, Homo sapiens
  MOD_RES (83)..(83): Selenocysteine
  MOD_RES (89)..(89): Selenocysteine
  MOD_RES (92)..(92): Selenocysteine
  MOD_RES (105)..(105): Selenocysteine
  MOD_RES (118)..(118): Selenocysteine
  MOD_RES (136)..(136): Selenocysteine
  MOD_RES (160)..(160): Selenocysteine
  MOD_RES (167)..(167): Selenocysteine
  MOD_RES (174)..(174): Selenocysteine
  MOD_RES (184)..(184): Selenocysteine
  MOD_RES (229)..(229): Selenocysteine
  MOD_RES (234)..(234): Selenocysteine
  MOD_RES (260)..(260): Selenocysteine
  MOD_RES (282)..(282): Selenocysteine
  MOD_RES (297)..(297): Selenocysteine
  MOD_RES (301)..(301): Selenocysteine
  MOD_RES (337)..(337): Selenocysteine
  MOD_RES (355)..(355): Selenocysteine
  MOD_RES (386)..(386): Selenocysteine
  MOD_RES (444)..(444): Selenocysteine
  MOD_RES (446)..(446): Selenocysteine
  MOD_RES (461)..(461): Selenocysteine
  MOD_RES (474)..(474): Selenocysteine
  MOD_RES (485)..(485): Selenocysteine
  MOD_RES (490)..(490): Selenocysteine
  MOD_RES (506)..(506): Selenocysteine
  MOD_RES (549)..(549): Selenocysteine
  MOD_RES (568)..(568): Selenocysteine
  MOD_RES (603)..(603): Selenocysteine
  MOD_RES (636)..(636): Selenocysteine
  MOD_RES (639)..(639): Selenocysteine
  MOD_RES (656)..(656): Selenocysteine
MQNSEGGADSPASVALRPSAAAPPVPASPQRVLVQAASSNPKGAQMQPISLPRVQQVPQQVQPVQHVYPAQVQYVEGGDAVYXNGAIRXAYXYNPEPQMYAPSSXASYFEAPGGAQVXVAASSPPAVPSHSMVGIXMDVGGSPIVSSAGAYLIHGGMDSXRHSLAHXSRSSPAXLQWLLDNYEXAEGVSLPRSSLYNHYLRHCQEHKLDPVNAASFGKLIRSVFMGLRXRRLGXRGNSKYHYYGIRLKPDSPLNRLQEDXQYMAMRQQPMHQKPRYRPAQKXDSLGDSGSHSGLHSXPEQXMAVQSQHHQQYIDVSHVFPEFPAPDLGSFLLQDGVXLHDVKALQLVYRRHCEAXVDVVMNLQFHYIEKLWLSFWNSKASSSDGPXSLPASDEDPEGAVLPKDKLISLCQCDPILRWMRSCDHILYQALVEILIPDVLRPVPSXLXQAIRNFAKSLEGWLXNAMSDFPQQVIQXKVGVVSAFAQXLRRYXSLNHLAQAARAVLQNXSQINQMLSDLNRVDFANVQEQASWVCQCEESVVQRLEQDFKLXLQQQSSLDQWASWLDSVVXQVLKQHAGSPSFPKAARQFLLKWSFYSSMVIRDLXLRSAASFGSFHLIRLLYDEYMFYLVEHRVAEAXGEXPIAVMGEFNDLASLSLXLLDKDDMGDEQRGSEAGPDARSLGEPLVKRERSDPNHSLQGI

SEQ ID NO: 23325 - protein, 169 aa, Homo sapiens
  MOD_RES (53)..(53): Selenocysteine
  MOD_RES (59)..(59): Selenocysteine
  MOD_RES (62)..(62): Selenocysteine
  MOD_RES (75)..(75): Selenocysteine
  MOD_RES (88)..(88): Selenocysteine
  MOD_RES (106)..(106): Selenocysteine
  MOD_RES (130)..(130): Selenocysteine
  MOD_RES (137)..(137): Selenocysteine
  MOD_RES (144)..(144): Selenocysteine
  MOD_RES (159)..(159): Selenocysteine
MQNSEGGADSPASVALRPSAAAPPVPASPQVQPVQHVYPAQVQYVEGGDAVYXNGAIRXAYXYNPEPQMYAPSSXASYFEAPGGAQVXVAASSPPAVPSHSMVGIXMDVGGSPIVSSAGAYLIHGGMDSXRHSLAHXSRSSPAXLEMAIENLQKSEGIXSHKSGLLNSH

SEQ ID NO: 23326 - protein, 94 aa, Homo sapiens
  MOD_RES (38)..(38): Selenocysteine
  MOD_RES (44)..(44): Selenocysteine
  MOD_RES (47)..(47): Selenocysteine
  MOD_RES (60)..(60): Selenocysteine
  MOD_RES (73)..(73): Selenocysteine
  MOD_RES (91)..(91): Selenocysteine
MQPISLPRVQQVPQQVQPVQHVYPAQVQYVEGGDAVYXNGAIRXAYXYNPEPQMYAPSSXASYFEAPGGAQVXVAASSPPAVPSHSMVGIXMDV

SEQ ID NO: 23327 - protein, 111 aa, Homo sapiens
  MOD_RES (38)..(38): Selenocysteine
  MOD_RES (44)..(44): Selenocysteine
  MOD_RES (47)..(47): Selenocysteine
  MOD_RES (60)..(60): Selenocysteine
  MOD_RES (73)..(73): Selenocysteine
  MOD_RES (91)..(91): Selenocysteine
MQPISLPRVQQVPQQVQPVQHVYPAQVQYVEGGDAVYXNGAIRXAYXYNPEPQMYAPSSXASYFEAPGGAQVXVAASSPPAVPSHSMVGIXMDVGGSPIVSSAGAYLIHGG

SEQ ID NO: 23328 - protein, 180 aa, Homo sapiens
  MOD_RES (1)..(1): Any amino acid
  MOD_RES (25)..(25): Selenocysteine
  MOD_RES (43)..(43): Selenocysteine
  MOD_RES (74)..(74): Selenocysteine
XDVSHVFPEFPAPDLGSFLLQDGVXLHDVKALQLVYRRHCEAXVDVVMNLQFHYIEKLWLSFWNSKASSSDGPXSLPASDEDPEGAVLPKDKLISLCQCDPILRWMRSCDHILYQALVEILIPDVLRPVPSGRRQCLRPDAAALHVPQPPGAGGPGGAAEHVPDQPDAQRPQPRGLCQRA

SEQ ID NO: 23329 - protein, 124 aa, Homo sapiens
  MOD_RES (19)..(19): Selenocysteine
  MOD_RES (24)..(24): Selenocysteine
  MOD_RES (30)..(30): Selenocysteine
  MOD_RES (78)..(78): Selenocysteine
  MOD_RES (111)..(111): Selenocysteine
  MOD_RES (114)..(114): Selenocysteine
EQASWVCQCDDNMVQRLEXDFKMXLQQQSXLEQWAAWLDNVMMQALKPYEGRPSFPKAARQFLLKWSFYSSMVIRDLXLRSAASFGSFHLIRLLYDEYMFYLVEHRVAQAXGEXPIAVMGEVPM

SEQ ID NO: 23330 - protein, 174 aa, Homo sapiens
  MOD_RES (29)..(29): Selenocysteine
  MOD_RES (57)..(57): Selenocysteine
  MOD_RES (68)..(68): Selenocysteine
  MOD_RES (73)..(73): Selenocysteine
  MOD_RES (89)..(89): Selenocysteine
  MOD_RES (127)..(127): Selenocysteine
  MOD_RES (132)..(132): Selenocysteine
  MOD_RES (138)..(138): Selenocysteine
MCNCDHGMYQALVEILIPDVLRPIPSALXQAIRNFAKSLEGWLSNAMNNIPQRMIQXKVAAVSAFAQXLRRYXSLNHLAQAARAVLQNXSQINQMLSDLNRVDFANVQEQASWVCQCDDNMVQRLEXDFKMXLQQQSXLEQWAAWLDNVMMQALKPYEGRPSFPKAARQFLLKW

SEQ ID NO: 23331 - protein, 138 aa, Homo sapiens
  MOD_RES (3)..(3): Selenocysteine
  MOD_RES (6)..(6): Selenocysteine
  MOD_RES (10)..(10): Selenocysteine
  MOD_RES (13)..(13): Selenocysteine
  MOD_RES (15)..(15): Selenocysteine
  MOD_RES (18)..(18): Selenocysteine
  MOD_RES (28)..(28): Selenocysteine
  MOD_RES (45)..(45): Selenocysteine
  MOD_RES (65)..(65): Selenocysteine
  MOD_RES (68)..(68): Selenocysteine
  MOD_RES (74)..(76): Selenocysteine
  MOD_RES (80)..(80): Selenocysteine
  MOD_RES (82)..(82): Selenocysteine
  MOD_RES (89)..(89): Selenocysteine
  MOD_RES (96)..(96): Selenocysteine
  MOD_RES (104)..(105): Selenocysteine
  MOD_RES (115)..(115): Selenocysteine
  MOD_RES (123)..(123): Selenocysteine
  MOD_RES (134)..(134): Selenocysteine
MQXSEXGSDXGSXVXLQXSVASQAAVPXQVVQQVPVQQQVQQVQXVQQVQHVYPAQVQYVEGSDXVYXNGAIRXXXYPYXEXQMYSQNXGGNYFDXQGSSAQVXXVVSSHSMVGXGGIQMGVXGGQLISSSGGXYLIG

SEQ ID NO: 23332 - protein, 413 aa, Homo sapiens
  MOD_RES (3)..(3): Selenocysteine
  MOD_RES (6)..(6): Selenocysteine
  MOD_RES (10)..(10): Selenocysteine
  MOD_RES (13)..(13): Selenocysteine
  MOD_RES (15)..(15): Selenocysteine
  MOD_RES (18)..(18): Selenocysteine
  MOD_RES (28)..(28): Selenocysteine
  MOD_RES (45)..(45): Selenocysteine
  MOD_RES (65)..(65): Selenocysteine
  MOD_RES (68)..(68): Selenocysteine
  MOD_RES (74)..(76): Selenocysteine
  MOD_RES (80)..(80): Selenocysteine
  MOD_RES (82)..(82): Selenocysteine
  MOD_RES (89)..(89): Selenocysteine
  MOD_RES (96)..(96): Selenocysteine
  MOD_RES (104)..(105): Selenocysteine
  MOD_RES (115)..(115): Selenocysteine
  MOD_RES (123)..(123): Selenocysteine
  MOD_RES (134)..(134): Selenocysteine
  MOD_RES (149)..(149): Selenocysteine
  MOD_RES (151)..(152): Selenocysteine
  MOD_RES (158)..(158): Selenocysteine
  MOD_RES (165)..(165): Selenocysteine
  MOD_RES (174)..(174): Selenocysteine
  MOD_RES (193)..(193): Selenocysteine
  MOD_RES (203)..(203): Selenocysteine
  MOD_RES (238)..(238): Selenocysteine
  MOD_RES (243)..(243): Selenocysteine
  MOD_RES (299)..(299): Selenocysteine
  MOD_RES (305)..(305): Selenocysteine
  MOD_RES (307)..(307): Selenocysteine
  MOD_RES (312)..(312): Selenocysteine
  MOD_RES (345)..(346): Selenocysteine
  MOD_RES (382)..(382): Selenocysteine
  MOD_RES (390)..(390): Selenocysteine
  MOD_RES (392)..(392): Selenocysteine
  MOD_RES (395)..(396): Selenocysteine
  MOD_RES (398)..(398): Selenocysteine
  MOD_RES (405)..(405): Selenocysteine
MQXSEXGSDXGSXVXLQXSVASQAAVPXQVVQQVPVQQQVQQVQXVQQVQHVYPAQVQYVEGSDXVYXNGAIRXXXYPYXEXQMYSQNXGGNYFDXQGSSAQVXXVVSSHSMVGXGGIQMGVXGGQLISSSGGXYLIGNSMENSGHSVXHXXRASPAXIEMAIEXLQKSDGLSXHRSSLLNSHLQWLLDNYEXAEGVSLPRSXLYNHYLRHCQEHKLDPVNAASFGKLIRSIFMGLRXRRLGXRGNSKYHYYGIRVKPDSPLNRLQEDMQYMAMRQQPMQQKQRYKPMQKVDGVADGFXGSGQQXGXSVEQXVIAQSQHHQQFLDASRALPEFGEVEISSLPDGXXFEDIKSLQSLYREHCEAILDVVVNLQFSLIEKLWQXFWRYSPSXPXDGXXIXESRSESXSFPIHFHG

SEQ ID NO: 23333 - protein, 707 aa, Homo sapiens
  MOD_RES (3)..(3): Selenocysteine
  MOD_RES (6)..(6): Selenocysteine
  MOD_RES (10)..(10): Selenocysteine
  MOD_RES (13)..(13): Selenocysteine
  MOD_RES (15)..(15): Selenocysteine
  MOD_RES (18)..(18): Selenocysteine
  MOD_RES (28)..(28): Selenocysteine
  MOD_RES (45)..(45): Selenocysteine
  MOD_RES (65)..(65): Selenocysteine
  MOD_RES (68)..(68): Selenocysteine
  MOD_RES (74)..(76): Selenocysteine
  MOD_RES (80)..(80): Selenocysteine
  MOD_RES (82)..(82): Selenocysteine
  MOD_RES (89)..(89): Selenocysteine
  MOD_RES (96)..(96): Selenocysteine
  MOD_RES (104)..(105): Selenocysteine
  MOD_RES (115)..(115): Selenocysteine
  MOD_RES (123)..(123): Selenocysteine
  MOD_RES (134)..(134): Selenocysteine
  MOD_RES (149)..(149): Selenocysteine
  MOD_RES (151)..(152): Selenocysteine
  MOD_RES (158)..(158): Selenocysteine
  MOD_RES (165)..(165): Selenocysteine
  MOD_RES (174)..(174): Selenocysteine
  MOD_RES (193)..(193): Selenocysteine
  MOD_RES (203)..(203): Selenocysteine
  MOD_RES (238)..(238): Selenocysteine
  MOD_RES (243)..(243): Selenocysteine
  MOD_RES (299)..(299): Selenocysteine
  MOD_RES (305)..(305): Selenocysteine
  MOD_RES (307)..(307): Selenocysteine
  MOD_RES (312)..(312): Selenocysteine
  MOD_RES (345)..(346): Selenocysteine
  MOD_RES (382)..(382): Selenocysteine
  MOD_RES (390)..(390): Selenocysteine
  MOD_RES (392)..(392): Selenocysteine
  MOD_RES (395)..(396): Selenocysteine
  MOD_RES (398)..(398): Selenocysteine
  MOD_RES (417)..(417): Selenocysteine
  MOD_RES (456)..(456): Selenocysteine
  MOD_RES (484)..(484): Selenocysteine
  MOD_RES (495)..(495): Selenocysteine
  MOD_RES (500)..(500): Selenocysteine
  MOD_RES (516)..(516): Selenocysteine
  MOD_RES (554)..(554): Selenocysteine
  MOD_RES (559)..(559): Selenocysteine
  MOD_RES (565)..(565): Selenocysteine
  MOD_RES (613)..(613): Selenocysteine
  MOD_RES (646)..(646): Selenocysteine
  MOD_RES (649)..(649): Selenocysteine
  MOD_RES (665)..(665): Selenocysteine
  MOD_RES (681)..(681): Selenocysteine
  MOD_RES (686)..(686): Selenocysteine
MQXSEXGSDXGSXVXLQXSVASQAAVPXQVVQQVPVQQQVQQVQXVQQVQHVYPAQVQYVEGSDXVYXNGAIRXXXYPYXEXQMYSQNXGGNYFDXQGSSAQVXXVVSSHSMVGXGGIQMGVXGGQLISSSGGXYLIGNSMENSGHSVXHXXRASPAXIEMAIEXLQKSDGLSXHRSSLLNSHLQWLLDNYEXAEGVSLPRSXLYNHYLRHCQEHKLDPVNAASFGKLIRSIFMGLRXRRLGXRGNSKYHYYGIRVKPDSPLNRLQEDMQYMAMRQQPMQQKQRYKPMQKVDGVADGFXGSGQQXGXSVEQXVIAQSQHHQQFLDASRALPEFGEVEISSLPDGXXFEDIKSLQSLYREHCEAILDVVVNLQFSLIEKLWQXFWRYSPSXPXDGXXIXESSNLSEIESRLPKAKLIXLCKHESILKWMCNCDHGMYQALVEILIPDVLRPIPSALXQAIRNFAKSLEGWLSNAMNNIPQRMIQXKVAAVSAFAQXLRRYXSLNHLAQAARAVLQNXSQINQMLSDLNRVDFANVQEQASWVCQCDDNMVQRLEXDFKMXLQQQSXLEQWAAWLDNVMMQALKPYEGRPSFPKAARQFLLKWSFYSSMVIRDLXLRSAASFGSFHLIRLLYDEYMFYLVEHRVAQAXGEXPIAVMGEVREAERAVXHWVIKNKPELHFSLNXLLIKXMVPNQVSLRARRDCGVIARVP

SEQ ID NO: 23334 - protein, 749 aa, Homo sapiens
  MOD_RES (3)..(3): Selenocysteine
  MOD_RES (6)..(6): Selenocysteine
  MOD_RES (10)..(10): Selenocysteine
  MOD_RES (13)..(13): Selenocysteine
  MOD_RES (15)..(15): Selenocysteine
  MOD_RES (18)..(18): Selenocysteine
  MOD_RES (28)..(28): Selenocysteine
  MOD_RES (45)..(45): Selenocysteine
  MOD_RES (65)..(65): Selenocysteine
  MOD_RES (68)..(68): Selenocysteine
  MOD_RES (74)..(76): Selenocysteine
  MOD_RES (80)..(80): Selenocysteine
  MOD_RES (82)..(82): Selenocysteine
  MOD_RES (89)..(89): Selenocysteine
  MOD_RES (96)..(96): Selenocysteine
  MOD_RES (104)..(105): Selenocysteine
  MOD_RES (115)..(115): Selenocysteine
  MOD_RES (123)..(123): Selenocysteine
  MOD_RES (134)..(134): Selenocysteine
  MOD_RES (149)..(149): Selenocysteine
  MOD_RES (151)..(152): Selenocysteine
  MOD_RES (158)..(158): Selenocysteine
  MOD_RES (165)..(165): Selenocysteine
  MOD_RES (174)..(174): Selenocysteine
  MOD_RES (193)..(193): Selenocysteine
  MOD_RES (203)..(203): Selenocysteine
  MOD_RES (238)..(238): Selenocysteine
  MOD_RES (243)..(243): Selenocysteine
  MOD_RES (299)..(299): Selenocysteine
  MOD_RES (305)..(305): Selenocysteine
  MOD_RES (307)..(307): Selenocysteine
  MOD_RES (312)..(312): Selenocysteine
  MOD_RES (345)..(346): Selenocysteine
  MOD_RES (382)..(382): Selenocysteine
  MOD_RES (390)..(390): Selenocysteine
  MOD_RES (392)..(392): Selenocysteine
  MOD_RES (395)..(396): Selenocysteine
  MOD_RES (398)..(398): Selenocysteine
  MOD_RES (417)..(417): Selenocysteine
  MOD_RES (456)..(456): Selenocysteine
  MOD_RES (484)..(484): Selenocysteine
  MOD_RES (495)..(495): Selenocysteine
  MOD_RES (500)..(500): Selenocysteine
  MOD_RES (516)..(516): Selenocysteine
  MOD_RES (554)..(554): Selenocysteine
  MOD_RES (559)..(559): Selenocysteine
  MOD_RES (565)..(565): Selenocysteine
  MOD_RES (613)..(613): Selenocysteine
  MOD_RES (646)..(646): Selenocysteine
  MOD_RES (649)..(649): Selenocysteine
  MOD_RES (697)..(697): Selenocysteine
  MOD_RES (714)..(714): Selenocysteine
  MOD_RES (731)..(731): Selenocysteine
  MOD_RES (733)..(733): Selenocysteine
  MOD_RES (735)..(735): Selenocysteine
  MOD_RES (742)..(742): Selenocysteine
  MOD_RES (745)..(745): Selenocysteine
  MOD_RES (747)..(747): Selenocysteine
MQXSEXGSDXGSXVXLQXSVASQAAVPXQVVQQVPVQQQVQQVQXVQQVQHVYPAQVQYVEGSDXVYXNGAIRXXXYPYXEXQMYSQNXGGNYFDXQGSSAQVXXVVSSHSMVGXGGIQMGVXGGQLISSSGGXYLIGNSMENSGHSVXHXXRASPAXIEMAIEXLQKSDGLSXHRSSLLNSHLQWLLDNYEXAEGVSLPRSXLYNHYLRHCQEHKLDPVNAASFGKLIRSIFMGLRXRRLGXRGNSKYHYYGIRVKPDSPLNRLQEDMQYMAMRQQPMQQKQRYKPMQKVDGVADGFXGSGQQXGXSVEQXVIAQSQHHQQFLDASRALPEFGEVEISSLPDGXXFEDIKSLQSLYREHCEAILDVVVNLQFSLIEKLWQXFWRYSPSXPXDGXXIXESSNLSEIESRLPKAKLIXLCKHESILKWMCNCDHGMYQALVEILIPDVLRPIPSALXQAIRNFAKSLEGWLSNAMNNIPQRMIQXKVAAVSAFAQXLRRYXSLNHLAQAARAVLQNXSQINQMLSDLNRVDFANVQEQASWVCQCDDNMVQRLEXDFKMXLQQQSXLEQWAAWLDNVMMQALKPYEGRPSFPKAARQFLLKWSFYSSMVIRDLXLRSAASFGSFHLIRLLYDEYMFYLVEHRVAQAXGEXPIAVMGEFGDLNAVSPGNLDKDEGSEVESEMDEELDDSSEPQAKREKXELSQAFPVGCMQPVLEXGVQPSLLNPIHSEHIVXSXQXIRQCSAXGNXYXAV

SEQ ID NO: 23335 - protein, 184 aa, Homo sapiens
  MOD_RES (3)..(3): Selenocysteine
  MOD_RES (6)..(6): Selenocysteine
  MOD_RES (10)..(10): Selenocysteine
  MOD_RES (13)..(13): Selenocysteine
  MOD_RES (15)..(15): Selenocysteine
  MOD_RES (18)..(18): Selenocysteine
  MOD_RES (28)..(28): Selenocysteine
  MOD_RES (45)..(45): Selenocysteine
  MOD_RES (65)..(65): Selenocysteine
  MOD_RES (68)..(68): Selenocysteine
  MOD_RES (74)..(76): Selenocysteine
  MOD_RES (80)..(80): Selenocysteine
  MOD_RES (82)..(82): Selenocysteine
  MOD_RES (89)..(89): Selenocysteine
  MOD_RES (96)..(96): Selenocysteine
  MOD_RES (104)..(105): Selenocysteine
  MOD_RES (115)..(115): Selenocysteine
  MOD_RES (123)..(123): Selenocysteine
  MOD_RES (134)..(134): Selenocysteine
  MOD_RES (149)..(149): Selenocysteine
  MOD_RES (151)..(152): Selenocysteine
  MOD_RES (158)..(158): Selenocysteine
  MOD_RES (165)..(165): Selenocysteine
  MOD_RES (174)..(174): Selenocysteine
MQXSEXGSDXGSXVXLQXSVASQAAVPXQVVQQVPVQQQVQQVQXVQQVQHVYPAQVQYVEGSDXVYXNGAIRXXXYPYXEXQMYSQNXGGNYFDXQGSSAQVXXVVSSHSMVGXGGIQMGVXGGQLISSSGGXYLIGNSMENSGHSVXHXXRASPAXIEMAIEXLQKSDGLSXHRSSLLNSHV

SEQ ID NO: 23336 - protein, 216 aa, Homo sapiens
  MOD_RES (3)..(3): Selenocysteine
  MOD_RES (6)..(6): Selenocysteine
  MOD_RES (10)..(10): Selenocysteine
  MOD_RES (13)..(13): Selenocysteine
  MOD_RES (15)..(15): Selenocysteine
  MOD_RES (18)..(18): Selenocysteine
  MOD_RES (28)..(28): Selenocysteine
  MOD_RES (45)..(45): Selenocysteine
  MOD_RES (65)..(65): Selenocysteine
  MOD_RES (68)..(68): Selenocysteine
  MOD_RES (74)..(76): Selenocysteine
  MOD_RES (80)..(80): Selenocysteine
  MOD_RES (82)..(82): Selenocysteine
  MOD_RES (89)..(89): Selenocysteine
  MOD_RES (96)..(96): Selenocysteine
  MOD_RES (104)..(105): Selenocysteine
  MOD_RES (115)..(115): Selenocysteine
  MOD_RES (123)..(123): Selenocysteine
  MOD_RES (134)..(134): Selenocysteine
  MOD_RES (149)..(149): Selenocysteine
  MOD_RES (151)..(152): Selenocysteine
  MOD_RES (158)..(158): Selenocysteine
  MOD_RES (168)..(168): Selenocysteine
  MOD_RES (178)..(178): Selenocysteine
  MOD_RES (213)..(213): Selenocysteine
MQXSEXGSDXGSXVXLQXSVASQAAVPXQVVQQVPVQQQVQQVQXVQQVQHVYPAQVQYVEGSDXVYXNGAIRXXXYPYXEXQMYSQNXGGNYFDXQGSSAQVXXVVSSHSMVGXGGIQMGVXGGQLISSSGGXYLIGNSMENSGHSVXHXXRASPAXLQWLLDNYEXAEGVSLPRSXLYNHYLRHCQEHKLDPVNAASFGKLIRSIFMGLRXRRL

SEQ ID NO: 23337 - protein, 85 aa, Homo sapiens
  MOD_RES (3)..(3): Selenocysteine
  MOD_RES (6)..(6): Selenocysteine
  MOD_RES (10)..(10): Selenocysteine
  MOD_RES (13)..(13): Selenocysteine
  MOD_RES (15)..(15): Selenocysteine
  MOD_RES (18)..(18): Selenocysteine
  MOD_RES (28)..(28): Selenocysteine
  MOD_RES (45)..(45): Selenocysteine
  MOD_RES (65)..(65): Selenocysteine
  MOD_RES (68)..(68): Selenocysteine
MQXSEXGSDXGSXVXLQXSVASQAAVPXQVVQQVPVQQQVQQVQXVQQVQHVYPAQVQYVEGSDXVYXNGAMSRAPWSMILESSP

SEQ ID NO: 23338 - protein, 156 aa, Homo sapiens
  MOD_RES (6)..(6): Selenocysteine
  MOD_RES (26)..(26): Selenocysteine
  MOD_RES (29)..(29): Selenocysteine
  MOD_RES (35)..(37): Selenocysteine
  MOD_RES (41)..(41): Selenocysteine
  MOD_RES (43)..(43): Selenocysteine
  MOD_RES (50)..(50): Selenocysteine
  MOD_RES (57)..(57): Selenocysteine
  MOD_RES (65)..(66): Selenocysteine
  MOD_RES (76)..(76): Selenocysteine
  MOD_RES (84)..(84): Selenocysteine
  MOD_RES (95)..(95): Selenocysteine
  MOD_RES (110)..(110): Selenocysteine
  MOD_RES (112)..(113): Selenocysteine
  MOD_RES (119)..(119): Selenocysteine
  MOD_RES (133)..(133): Selenocysteine
  MOD_RES (140)..(140): Selenocysteine
  MOD_RES (146)..(146): Selenocysteine
VQQVQXVQQVQHVYPAQVQYVEGSDXVYXNGAIRXXXYPYXEXQMYSQNXGGNYFDXQGSSAQVXXVVSSHSMVGXGGIQMGVXGGQLISSSGGXYLIGNSMENSGHSVXHXXRASPAXANSVPEMKLLRQIXMNRLFPXLNHKLXEGSGPHFQSI

SEQ ID NO: 23339 - protein, 135 aa, Homo sapiens
  MOD_RES (6)..(6): Selenocysteine
  MOD_RES (26)..(26): Selenocysteine
  MOD_RES (29)..(29): Selenocysteine
  MOD_RES (35)..(37): Selenocysteine
  MOD_RES (41)..(41): Selenocysteine
  MOD_RES (43)..(43): Selenocysteine
  MOD_RES (50)..(50): Selenocysteine
  MOD_RES (57)..(57): Selenocysteine
  MOD_RES (65)..(66): Selenocysteine
  MOD_RES (76)..(76): Selenocysteine
  MOD_RES (84)..(84): Selenocysteine
  MOD_RES (95)..(95): Selenocysteine
  MOD_RES (110)..(110): Selenocysteine
  MOD_RES (112)..(113): Selenocysteine
  MOD_RES (119)..(119): Selenocysteine
VQQVQXVQQVQHVYPAQVQYVEGSDXVYXNGAIRXXXYPYXEXQMYSQNXGGNYFDXQGSSAQVXXVVSSHSMVGXGGIQMGVXGGQLISSSGGXYLIGNSMENSGHSVXHXXRASPAXLFLFSCVPFSLGQLSP

SEQ ID NO: 23340 - protein, 77 aa, Homo sapiens
  MOD_RES (14)..(14): Selenocysteine
  MOD_RES (29)..(29): Selenocysteine
  MOD_RES (32)..(32): Selenocysteine
  MOD_RES (66)..(66): Selenocysteine
MHCGLLEEPDMDSXDEEKENNRASKPHSXPAXLQWLEENYEIAEGVCIPRSALYMHYLDFCEKNDXQPVNAASFGKQ

SEQ ID NO: 23341 - protein, 735 aa, Homo sapiens
  MOD_RES (14)..(14): Selenocysteine
  MOD_RES (34)..(34): Selenocysteine
  MOD_RES (58)..(58): Selenocysteine
  MOD_RES (61)..(61): Selenocysteine
  MOD_RES (95)..(95): Selenocysteine
  MOD_RES (115)..(116): Selenocysteine
  MOD_RES (121)..(121): Selenocysteine
  MOD_RES (156)..(156): Selenocysteine
  MOD_RES (165)..(165): Selenocysteine
  MOD_RES (176)..(176): Selenocysteine
  MOD_RES (200)..(200): Selenocysteine
  MOD_RES (207)..(207): Selenocysteine
  MOD_RES (215)..(215): Selenocysteine
  MOD_RES (247)..(247): Selenocysteine
  MOD_RES (270)..(270): Selenocysteine
  MOD_RES (280)..(280): Selenocysteine
  MOD_RES (324)..(324): Selenocysteine
  MOD_RES (335)..(335): Selenocysteine
  MOD_RES (343)..(343): Selenocysteine
  MOD_RES (359)..(359): Selenocysteine
  MOD_RES (362)..(362): Selenocysteine
  MOD_RES (365)..(365): Selenocysteine
  MOD_RES (378)..(378): Selenocysteine
  MOD_RES (403)..(403): Selenocysteine
  MOD_RES (436)..(436): Selenocysteine
  MOD_RES (443)..(443): Selenocysteine
  MOD_RES (490)..(490): Selenocysteine
  MOD_RES (500)..(500): Selenocysteine
  MOD_RES (506)..(506): Selenocysteine
  MOD_RES (520)..(520): Selenocysteine
  MOD_RES (539)..(539): Selenocysteine
  MOD_RES (543)..(544): Selenocysteine
  MOD_RES (551)..(551): Selenocysteine
  MOD_RES (555)..(555): Selenocysteine
  MOD_RES (557)..(557): Selenocysteine
  MOD_RES (559)..(560): Selenocysteine
  MOD_RES (578)..(578): Selenocysteine
  MOD_RES (586)..(586): Selenocysteine
  MOD_RES (601)..(601): Selenocysteine
  MOD_RES (628)..(628): Selenocysteine
  MOD_RES (652)..(652): Selenocysteine
  MOD_RES (663)..(663): Selenocysteine
  MOD_RES (669)..(669): Selenocysteine
  MOD_RES (672)..(672): Selenocysteine
  MOD_RES (683)..(683): Selenocysteine
  MOD_RES (686)..(686): Selenocysteine
  MOD_RES (703)..(703): Selenocysteine
  MOD_RES (706)..(707): Selenocysteine
  MOD_RES (731)..(731): Selenocysteine
MHCGLLEEPDMDSXESWIERCLNESENKRYSSHXSLGNVSNDENEEKENNRASKPHSXPAXLQWLEENYEIAEGVCIPRSALYMHYLDFCEKNDXQPVNAASFGKIIRQQFPQLXXRRLGXRGQSKYHYYGIAVKESSQYYDVMYSKKGAAWVSEXGKKEVSKQXVAYSPRSKLGXLLPEFPNVKDLNLPASLPEEKVSXFIMMYRXHCQRILDXVIRANFDEVQSFLLHFWQGMPPHMLPVLGSSXVVNIVGVCDSILYKAISGVLMPXVLQALPDSLXQVIRKFAKQLDEWLKVALHDLPENLRNIKFELSRRFSQILRRQXSLNHLCQASRXVIHSADIXFQMLEDWRNVDLNSIXKQXLYXMEDSRDEHRKLIXQLYQEFDHLLEEQSPIESYIEWLDXMVDRCVVKVAAKRQGSLKKVAQQFLLMWSCFGXRVIRDMXLHSAPSFGSFHLIHLMFDDYVLYLLESLHCQERANELMRAMKGEGSXAEVREEIILXEAAAPXPSPVPSFSPAKSAXSVEVPPPSSPVSNPSPEYXGLSXXGAMQSYXWSLXYXVXXAAGSPAENSQQLPCMRNXHVPSSSVXHRIPVYPHREEHGYXGSYNYGSYGNQHPHPMQSQYPALPHDXAISGPLHYAPYHRSSAQYPFNSPXSRMEPCLMSSXPRLHPXPVXPRWPEVPSANXCYXSPSVHSARYGNSSDMYXPLXXRRNSEYEHMQHFPGFAYINGEASXGWAK

SEQ ID NO: 23342 - protein, 59 aa, Homo sapiens
  MOD_RES (12)..(12): Selenocysteine
  MOD_RES (32)..(33): Selenocysteine
  MOD_RES (38)..(38): Selenocysteine
MHYLDFCEKNDXQPVNAASFGKIIRQQFPQLXXRRLGXRGQSKYHYYGIAVKESSQYYD

SEQ ID NO: 23343 - protein, 247 aa, Homo sapiens
  MOD_RES (15)..(15): Selenocysteine
  MOD_RES (23)..(23): Selenocysteine
  MOD_RES (43)..(43): Selenocysteine
  MOD_RES (67)..(67): Selenocysteine
  MOD_RES (70)..(70): Selenocysteine
  MOD_RES (104)..(104): Selenocysteine
  MOD_RES (124)..(125): Selenocysteine
  MOD_RES (130)..(130): Selenocysteine
  MOD_RES (165)..(165): Selenocysteine
  MOD_RES (174)..(174): Selenocysteine
  MOD_RES (185)..(185): Selenocysteine
  MOD_RES (209)..(209): Selenocysteine
  MOD_RES (216)..(216): Selenocysteine
  MOD_RES (224)..(224): Selenocysteine
  MOD_RES (237)..(237): Selenocysteine
MIKRRAHPGAGGDRXRPRRRRSXESWIERCLNESENKRYSSHXSLGNVSNDENEEKENNRASKPHSXPAXLQWLEENYEIAEGVCIPRSALYMHYLDFCEKNDXQPVNAASFGKIIRQQFPQLXXRRLGXRGQSKYHYYGIAVKESSQYYDVMYSKKGAAWVSEXGKKEVSKQXVAYSPRSKLGXLLPEFPNVKDLNLPASLPEEKVSXFIMMYRXHCQRILDXVIRANFDEECRPXCCLCWAPPRW

SEQ ID NO: 23344 - protein, 744 aa, Homo sapiens
  MOD_RES (15)..(15): Selenocysteine
  MOD_RES (23)..(23): Selenocysteine
  MOD_RES (43)..(43): Selenocysteine
  MOD_RES (67)..(67): Selenocysteine
  MOD_RES (70)..(70): Selenocysteine
  MOD_RES (104)..(104): Selenocysteine
  MOD_RES (124)..(125): Selenocysteine
  MOD_RES (130)..(130): Selenocysteine
  MOD_RES (165)..(165): Selenocysteine
  MOD_RES (174)..(174): Selenocysteine
  MOD_RES (185)..(185): Selenocysteine
  MOD_RES (209)..(209): Selenocysteine
  MOD_RES (216)..(216): Selenocysteine
  MOD_RES (224)..(224): Selenocysteine
  MOD_RES (256)..(256): Selenocysteine
  MOD_RES (279)..(279): Selenocysteine
  MOD_RES (289)..(289): Selenocysteine
  MOD_RES (333)..(333): Selenocysteine
  MOD_RES (344)..(344): Selenocysteine
  MOD_RES (352)..(352): Selenocysteine
  MOD_RES (368)..(368): Selenocysteine
  MOD_RES (371)..(371): Selenocysteine
  MOD_RES (374)..(374): Selenocysteine
  MOD_RES (387)..(387): Selenocysteine
  MOD_RES (412)..(412): Selenocysteine
  MOD_RES (445)..(445): Selenocysteine
  MOD_RES (452)..(452): Selenocysteine
  MOD_RES (499)..(499): Selenocysteine
  MOD_RES (509)..(509): Selenocysteine
  MOD_RES (515)..(515): Selenocysteine
  MOD_RES (529)..(529): Selenocysteine
  MOD_RES (548)..(548): Selenocysteine
  MOD_RES (552)..(553): Selenocysteine
  MOD_RES (560)..(560): Selenocysteine
  MOD_RES (564)..(564): Selenocysteine
  MOD_RES (566)..(566): Selenocysteine
  MOD_RES (568)..(569): Selenocysteine
  MOD_RES (587)..(587): Selenocysteine
  MOD_RES (595)..(595): Selenocysteine
  MOD_RES (610)..(610): Selenocysteine
  MOD_RES (637)..(637): Selenocysteine
  MOD_RES (661)..(661): Selenocysteine
  MOD_RES (672)..(672): Selenocysteine
  MOD_RES (678)..(678): Selenocysteine
  MOD_RES (681)..(681): Selenocysteine
  MOD_RES (692)..(692): Selenocysteine
  MOD_RES (695)..(695): Selenocysteine
  MOD_RES (712)..(712): Selenocysteine
  MOD_RES (715)..(716): Selenocysteine
  MOD_RES (740)..(740): Selenocysteine
MIKRRAHPGAGGDRXRPRRRRSXESWIERCLNESENKRYSSHXSLGNVSNDENEEKENNRASKPHSXPAXLQWLEENYEIAEGVCIPRSALYMHYLDFCEKNDXQPVNAASFGKIIRQQFPQLXXRRLGXRGQSKYHYYGIAVKESSQYYDVMYSKKGAAWVSEXGKKEVSKQXVAYSPRSKLGXLLPEFPNVKDLNLPASLPEEKVSXFIMMYRXHCQRILDXVIRANFDEVQSFLLHFWQGMPPHMLPVLGSSXVVNIVGVCDSILYKAISGVLMPXVLQALPDSLXQVIRKFAKQLDEWLKVALHDLPENLRNIKFELSRRFSQILRRQXSLNHLCQASRXVIHSADIXFQMLEDWRNVDLNSIXKQXLYXMEDSRDEHRKLIXQLYQEFDHLLEEQSPIESYIEWLDXMVDRCVVKVAAKRQGSLKKVAQQFLLMWSCFGXRVIRDMXLHSAPSFGSFHLIHLMFDDYVLYLLESLHCQERANELMRAMKGEGSXAEVREEIILXEAAAPXPSPVPSFSPAKSAXSVEVPPPSSPVSNPSPEYXGLSXXGAMQSYXWSLXYXVXXAAGSPAENSQQLPCMRNXHVPSSSVXHRIPVYPHREEHGYXGSYNYGSYGNQHPHPMQSQYPALPHDXAISGPLHYAPYHRSSAQYPFNSPXSRMEPCLMSSXPRLHPXPVXPRWPEVPSANXCYXSPSVHSARYGNSSDMYXPLXXRRNSEYEHMQHFPGFAYINGEASXGWAK

SEQ ID NO: 23345 - protein, 39 aa, Homo sapiens
  MOD_RES (30)..(30): Selenocysteine
MNWAAFGGSEFFIPEGIQIDSRCPLSRNIXECERKLPIL

SEQ ID NO: 23346 - protein, 641 aa, Homo sapiens
  MOD_RES (30)..(30): Selenocysteine
  MOD_RES (62)..(62): Selenocysteine
  MOD_RES (71)..(71): Selenocysteine
  MOD_RES (82)..(82): Selenocysteine
  MOD_RES (106)..(106): Selenocysteine
  MOD_RES (113)..(113): Selenocysteine
  MOD_RES (121)..(121): Selenocysteine
  MOD_RES (153)..(153): Selenocysteine
  MOD_RES (176)..(176): Selenocysteine
  MOD_RES (186)..(186): Selenocysteine
  MOD_RES (230)..(230): Selenocysteine
  MOD_RES (241)..(241): Selenocysteine
  MOD_RES (249)..(249): Selenocysteine
  MOD_RES (265)..(265): Selenocysteine
  MOD_RES (268)..(268): Selenocysteine
  MOD_RES (271)..(271): Selenocysteine
  MOD_RES (284)..(284): Selenocysteine
  MOD_RES (309)..(309): Selenocysteine
  MOD_RES (342)..(342): Selenocysteine
  MOD_RES (349)..(349): Selenocysteine
  MOD_RES (396)..(396): Selenocysteine
  MOD_RES (406)..(406): Selenocysteine
  MOD_RES (412)..(412): Selenocysteine
  MOD_RES (426)..(426): Selenocysteine
  MOD_RES (445)..(445): Selenocysteine
  MOD_RES (449)..(450): Selenocysteine
  MOD_RES (457)..(457): Selenocysteine
  MOD_RES (461)..(461): Selenocysteine
  MOD_RES (463)..(463): Selenocysteine
  MOD_RES (465)..(466): Selenocysteine
  MOD_RES (484)..(484): Selenocysteine
  MOD_RES (492)..(492): Selenocysteine
  MOD_RES (507)..(507): Selenocysteine
  MOD_RES (534)..(534): Selenocysteine
  MOD_RES (558)..(558): Selenocysteine
  MOD_RES (569)..(569): Selenocysteine
  MOD_RES (575)..(575): Selenocysteine
  MOD_RES (578)..(578): Selenocysteine
  MOD_RES (589)..(589): Selenocysteine
  MOD_RES (592)..(592): Selenocysteine
  MOD_RES (609)..(609): Selenocysteine
  MOD_RES (612)..(613): Selenocysteine
  MOD_RES (637)..(637): Selenocysteine
MNWAAFGGSEFFIPEGIQIDSRCPLSRNIXEWYHYYGIAVKESSQYYDVMYSKKGAAWVSEXGKKEVSKQXVAYSPRSKLGXLLPEFPNVKDLNLPASLPEEKVSXFIMMYRXHCQRILDXVIRANFDEVQSFLLHFWQGMPPHMLPVLGSSXVVNIVGVCDSILYKAISGVLMPXVLQALPDSLXQVIRKFAKQLDEWLKVALHDLPENLRNIKFELSRRFSQILRRQXSLNHLCQASRXVIHSADIXFQMLEDWRNVDLNSIXKQXLYXMEDSRDEHRKLIXQLYQEFDHLLEEQSPIESYIEWLDXMVDRCVVKVAAKRQGSLKKVAQQFLLMWSCFGXRVIRDMXLHSAPSFGSFHLIHLMFDDYVLYLLESLHCQERANELMRAMKGEGSXAEVREEIILXEAAAPXPSPVPSFSPAKSAXSVEVPPPSSPVSNPSPEYXGLSXXGAMQSYXWSLXYXVXXAAGSPAENSQQLPCMRNXHVPSSSVXHRIPVYPHREEHGYXGSYNYGSYGNQHPHPMQSQYPALPHDXAISGPLHYAPYHRSSAQYPFNSPXSRMEPCLMSSXPRLHPXPVXPRWPEVPSANXCYXSPSVHSARYGNSSDMYXPLXXRRNSEYEHMQHFPGFAYINGEASXGWAK

SEQ ID NO: 23347 - protein, 145 aa, Homo sapiens
  MOD_RES (13)..(13): Selenocysteine
  MOD_RES (36)..(36): Selenocysteine
  MOD_RES (46)..(46): Selenocysteine
  MOD_RES (90)..(90): Selenocysteine
  MOD_RES (101)..(101): Selenocysteine
  MOD_RES (109)..(109): Selenocysteine
  MOD_RES (125)..(125): Selenocysteine
  MOD_RES (128)..(128): Selenocysteine
  MOD_RES (131)..(131): Selenocysteine
  MOD_RES (144)..(144): Selenocysteine
MPPHMLPVLGSSXVVNIVGVCDSILYKAISGVLMPXVLQALPDSLXQVIRKFAKQLDEWLKVALHDLPENLRNIKFELSRRFSQILRRQXSLNHLCQASRXVIHSADIXFQMLEDWRNVDLNSIXKQXLYXMEDSRDEHRKLIXQ

SEQ ID NO: 23348 - protein, 256 aa, Homo sapiens
  MOD_RES (2)..(2): Selenocysteine
  MOD_RES (5)..(5): Selenocysteine
  MOD_RES (40)..(40): Selenocysteine
  MOD_RES (60)..(61): Selenocysteine
  MOD_RES (66)..(66): Selenocysteine
  MOD_RES (101)..(101): Selenocysteine
  MOD_RES (110)..(110): Selenocysteine
  MOD_RES (121)..(121): Selenocysteine
  MOD_RES (145)..(145): Selenocysteine
  MOD_RES (152)..(152): Selenocysteine
  MOD_RES (160)..(160): Selenocysteine
  MOD_RES (192)..(192): Selenocysteine
  MOD_RES (215)..(215): Selenocysteine
  MOD_RES (225)..(225): Selenocysteine
MXSAXDGERLEENYEIAEGVCIPRSALYMHYLDFCEKNDXQPVNAASFGKIIRQQFPQLXXRRLGXRGQSKYHYYGIAVKESSQYYDVMYSKKGAAWVSEXGKKEVSKQXVAYSPRSKLGXLLPEFPNVKDLNLPASLPEEKVSXFIMMYRXHCQRILDXVIRANFDEVQSFLLHFWQGMPPHMLPVLGSSXVVNIVGVCDSILYKAISGVLMPXVLQALPDSLXQVIRKFAKQLDEWLKVALHDLPENLRNIKFE

SEQ ID NO: 23349 - protein, 42 aa, Homo sapiens
  MOD_RES (13)..(13): Selenocysteine
  MOD_RES (28)..(29): Selenocysteine
  MOD_RES (41)..(41): Selenocysteine
MAEDEPDAKSPKXGGRAPPGGAEAGEPXXLLQRLRARPCRXK

SEQ ID NO: 23350 - protein, 50 aa, Homo sapiens
  MOD_RES (13)..(13): Selenocysteine
  MOD_RES (28)..(29): Selenocysteine
  MOD_RES (37)..(37): Selenocysteine
MAEDEPDAKSPKXGGRAPPGGAEAGEPXXLLQRLRGXISKAVQNKVEGIL

SEQ ID NO: 23351 - protein, 96 aa, Homo sapiens
  MOD_RES (13)..(13): Selenocysteine
  MOD_RES (28)..(29): Selenocysteine
  MOD_RES (37)..(37): Selenocysteine
  MOD_RES (73)..(74): Selenocysteine
  MOD_RES (83)..(83): Selenocysteine
MAEDEPDAKSPKXGGRAPPGGAEAGEPXXLLQRLRGXISKAVQNKVEGILQDVQKFSDNDKLYLYLQLPSGPXXGDKSSEPSXLSNEEYMYAYRWI

SEQ ID NO: 23352 - protein, 106 aa, Homo sapiens
  MOD_RES (13)..(13): Selenocysteine
  MOD_RES (28)..(29): Selenocysteine
  MOD_RES (37)..(37): Selenocysteine
  MOD_RES (73)..(74): Selenocysteine
  MOD_RES (83)..(83): Selenocysteine
  MOD_RES (104)..(104): Selenocysteine
  MOD_RES (106)..(106): Selenocysteine
MAEDEPDAKSPKXGGRAPPGGAEAGEPXXLLQRLRGXISKAVQNKVEGILQDVQKFSDNDKLYLYLQLPSGPXXGDKSSEPSXLSNEEYMYAYRWIRNHLEEHXDX

SEQ ID NO: 23353 - protein, 118 aa, Homo sapiens
  MOD_RES (13)..(13): Selenocysteine
  MOD_RES (28)..(29): Selenocysteine
  MOD_RES (37)..(37): Selenocysteine
  MOD_RES (73)..(74): Selenocysteine
  MOD_RES (83)..(83): Selenocysteine
  MOD_RES (104)..(104): Selenocysteine
  MOD_RES (106)..(106): Selenocysteine
MAEDEPDAKSPKXGGRAPPGGAEAGEPXXLLQRLRGXISKAVQNKVEGILQDVQKFSDNDKLYLYLQLPSGPXXGDKSSEPSXLSNEEYMYAYRWIRNHLEEHXDXCLPKQSVYDAYR

SEQ ID NO: 23354 - protein, 123 aa, Homo sapiens
  MOD_RES (13)..(13): Selenocysteine
  MOD_RES (28)..(29): Selenocysteine
  MOD_RES (37)..(37): Selenocysteine
  MOD_RES (73)..(74): Selenocysteine
  MOD_RES (83)..(83): Selenocysteine
  MOD_RES (104)..(104): Selenocysteine
  MOD_RES (106)..(106): Selenocysteine
MAEDEPDAKSPKXGGRAPPGGAEAGEPXXLLQRLRGXISKAVQNKVEGILQDVQKFSDNDKLYLYLQLPSGPXXGDKSSEPSXLSNEEYMYAYRWIRNHLEEHXDXCLPKQSVYDAYRKYCES

SEQ ID NO: 23355 - protein, 165 aa, Homo sapiens
  MOD_RES (13)..(13): Selenocysteine
  MOD_RES (28)..(29): Selenocysteine
  MOD_RES (37)..(37): Selenocysteine
  MOD_RES (73)..(74): Selenocysteine
  MOD_RES (83)..(83): Selenocysteine
  MOD_RES (104)..(104): Selenocysteine
  MOD_RES (106)..(106): Selenocysteine
  MOD_RES (132)..(132): Selenocysteine
MAEDEPDAKSPKXGGRAPPGGAEAGEPXXLLQRLRGXISKAVQNKVEGILQDVQKFSDNDKLYLYLQLPSGPXXGDKSSEPSXLSNEEYMYAYRWIRNHLEEHXDXCLPKQSVYDAYRKYCESLACCRPLSXANFGKIIREIFPDIKARRLGGRGQSKYCYSGIR

SEQ ID NO: 23356 - protein, 184 aa, Homo sapiens
  MOD_RES (13)..(13): Selenocysteine
  MOD_RES (28)..(29): Selenocysteine
  MOD_RES (37)..(37): Selenocysteine
  MOD_RES (73)..(74): Selenocysteine
  MOD_RES (83)..(83): Selenocysteine
  MOD_RES (104)..(104): Selenocysteine
  MOD_RES (106)..(106): Selenocysteine
  MOD_RES (132)..(132): Selenocysteine
  MOD_RES (168)..(168): Selenocysteine
MAEDEPDAKSPKXGGRAPPGGAEAGEPXXLLQRLRGXISKAVQNKVEGILQDVQKFSDNDKLYLYLQLPSGPXXGDKSSEPSXLSNEEYMYAYRWIRNHLEEHXDXCLPKQSVYDAYRKYCESLACCRPLSXANFGKIIREIFPDIKARRLGGRGQSKYCYSGIRRKXLVSMPPLPGLDLKGSE

SEQ ID NO: 23357 - protein, 230 aa, Homo sapiens
  MOD_RES (13)..(13): Selenocysteine
  MOD_RES (28)..(29): Selenocysteine
  MOD_RES (37)..(37): Selenocysteine
  MOD_RES (73)..(74): Selenocysteine
  MOD_RES (83)..(83): Selenocysteine
  MOD_RES (104)..(104): Selenocysteine
  MOD_RES (106)..(106): Selenocysteine
  MOD_RES (132)..(132): Selenocysteine
  MOD_RES (168)..(168): Selenocysteine
  MOD_RES (193)..(193): Selenocysteine
  MOD_RES (208)..(208): Selenocysteine
MAEDEPDAKSPKXGGRAPPGGAEAGEPXXLLQRLRGXISKAVQNKVEGILQDVQKFSDNDKLYLYLQLPSGPXXGDKSSEPSXLSNEEYMYAYRWIRNHLEEHXDXCLPKQSVYDAYRKYCESLACCRPLSXANFGKIIREIFPDIKARRLGGRGQSKYCYSGIRRKXLVSMPPLPGLDLKGSESPEMGPEVXPAPRDELVEAACALXCDWAERILKRSFSSIVEVARFL

SEQ ID NO: 23358 - protein, 596 aa, Homo sapiens
  MOD_RES (13)..(13): Selenocysteine
  MOD_RES (28)..(29): Selenocysteine
  MOD_RES (37)..(37): Selenocysteine
  MOD_RES (73)..(74): Selenocysteine
  MOD_RES (83)..(83): Selenocysteine
  MOD_RES (104)..(104): Selenocysteine
  MOD_RES (106)..(106): Selenocysteine
  MOD_RES (132)..(132): Selenocysteine
  MOD_RES (168)..(168): Selenocysteine
  MOD_RES (193)..(193): Selenocysteine
  MOD_RES (208)..(208): Selenocysteine
  MOD_RES (295)..(295): Selenocysteine
  MOD_RES (364)..(364): Selenocysteine
  MOD_RES (387)..(387): Selenocysteine
  MOD_RES (407)..(407): Selenocysteine
  MOD_RES (412)..(412): Selenocysteine
  MOD_RES (433)..(433): Selenocysteine
  MOD_RES (458)..(458): Selenocysteine
  MOD_RES (482)..(482): Selenocysteine
  MOD_RES (502)..(502): Selenocysteine
  MOD_RES (538)..(538): Selenocysteine
  MOD_RES (551)..(551): Selenocysteine
  MOD_RES (587)..(587): Selenocysteine
MAEDEPDAKSPKXGGRAPPGGAEAGEPXXLLQRLRGXISKAVQNKVEGILQDVQKFSDNDKLYLYLQLPSGPXXGDKSSEPSXLSNEEYMYAYRWIRNHLEEHXDXCLPKQSVYDAYRKYCESLACCRPLSXANFGKIIREIFPDIKARRLGGRGQSKYCYSGIRRKXLVSMPPLPGLDLKGSESPEMGPEVXPAPRDELVEAACALXCDWAERILKRSFSSIVEVARFLLQQHLISARSAHAHVLKAMGLAEEDEHAPRERSSKPKNGLENPEGGAHKKPERLAQPPKDLEARXGAGPLARGERKKSVVESSAPGANNLQVNALVARLPLLLPRAPRSLIPPIPVSPPILAPRLSSGALKVAXLPLSSRAGAPPAAVPIINMILPXVPALPGPGPGPGRAPPGGLXQPRGXENREVGIGGDQGPHDKGVKRXAEVPVSEASGQAPPAKAAKQDIEDXASDAKRKRGRPRKKSGGSGERNSXPLKSAAAMESAQSSRLPWEXWGSGGEGNSAGGAERPGPMGEAEKGAVLAQGQGDGXVSKGGRGPGSQHXKEAEDKIPLVPSKVSVIKGSRSQKEAFPLAKGEVDXAPQGNKDLK

SEQ ID NO: 23359 - protein, 616 aa, Homo sapiens
  MOD_RES (13)..(13): Selenocysteine
  MOD_RES (28)..(29): Selenocysteine
  MOD_RES (37)..(37): Selenocysteine
  MOD_RES (73)..(74): Selenocysteine
  MOD_RES (83)..(83): Selenocysteine
  MOD_RES (104)..(104): Selenocysteine
  MOD_RES (106)..(106): Selenocysteine
  MOD_RES (132)..(132): Selenocysteine
  MOD_RES (168)..(168): Selenocysteine
  MOD_RES (193)..(193): Selenocysteine
  MOD_RES (208)..(208): Selenocysteine
  MOD_RES (295)..(295): Selenocysteine
  MOD_RES (364)..(364): Selenocysteine
  MOD_RES (387)..(387): Selenocysteine
  MOD_RES (407)..(407): Selenocysteine
  MOD_RES (412)..(412): Selenocysteine
  MOD_RES (433)..(433): Selenocysteine
  MOD_RES (458)..(458): Selenocysteine
  MOD_RES (482)..(482): Selenocysteine
  MOD_RES (502)..(502): Selenocysteine
  MOD_RES (538)..(538): Selenocysteine
  MOD_RES (551)..(551): Selenocysteine
  MOD_RES (587)..(587): Selenocysteine
  MOD_RES (614)..(614): Selenocysteine
MAEDEPDAKSPKXGGRAPPGGAEAGEPXXLLQRLRGXISKAVQNKVEGILQDVQKFSDNDKLYLYLQLPSGPXXGDKSSEPSXLSNEEYMYAYRWIRNHLEEHXDXCLPKQSVYDAYRKYCESLACCRPLSXANFGKIIREIFPDIKARRLGGRGQSKYCYSGIRRKXLVSMPPLPGLDLKGSESPEMGPEVXPAPRDELVEAACALXCDWAERILKRSFSSIVEVARFLLQQHLISARSAHAHVLKAMGLAEEDEHAPRERSSKPKNGLENPEGGAHKKPERLAQPPKDLEARXGAGPLARGERKKSVVESSAPGANNLQVNALVARLPLLLPRAPRSLIPPIPVSPPILAPRLSSGALKVAXLPLSSRAGAPPAAVPIINMILPXVPALPGPGPGPGRAPPGGLXQPRGXENREVGIGGDQGPHDKGVKRXAEVPVSEASGQAPPAKAAKQDIEDXASDAKRKRGRPRKKSGGSGERNSXPLKSAAAMESAQSSRLPWEXWGSGGEGNSAGGAERPGPMGEAEKGAVLAQGQGDGXVSKGGRGPGSQHXKEAEDKIPLVPSKVSVIKGSRSQKEAFPLAKGEVDXAPQGNKDLKEHVLQSSLSQEHKDPKAXPP

SEQ ID NO: 23360 - protein, 44 aa, Homo sapiens
  MOD_RES (13)..(13): Selenocysteine
  MOD_RES (28)..(29): Selenocysteine
  MOD_RES (37)..(37): Selenocysteine
  MOD_RES (43)..(43): Selenocysteine
MAEDEPDAKSPKXGGRAPPGGAEAGEPXXLLQRLRGXISPCRXK

SEQ ID NO: 23361 - protein, 235 aa, Homo sapiens
  MOD_RES (24)..(24): Selenocysteine
  MOD_RES (60)..(60): Selenocysteine
  MOD_RES (85)..(85): Selenocysteine
  MOD_RES (100)..(100): Selenocysteine
  MOD_RES (187)..(187): Selenocysteine
PKQSVYDAYRKYCESLACCRPLSXANFGKIIREIFPDIKARRLGGRGQSKYCYSGIRRKXLVSMPPLPGLDLKGSESPEMGPEVXPAPRDELVEAACALXCDWAERILKRSFSSIVEVARFLLQQHLISARSAHAHVLKAMGLAEEDEHAPRERSSKPKNGLENPEGGAHKKPERLAQPPKDLEARXGAGPLARGERKKSVVESSAPGANNLQEVHSPLYRQLSHPVYLVPGCCL

SEQ ID NO: 23362 - protein, 928 aa, Homo sapiens
  MOD_RES (10)..(10): Selenocysteine
  MOD_RES (44)..(44): Selenocysteine
  MOD_RES (97)..(97): Selenocysteine
  MOD_RES (109)..(109): Selenocysteine
  MOD_RES (111)..(111): Selenocysteine
  MOD_RES (121)..(121): Selenocysteine
  MOD_RES (124)..(124): Selenocysteine
  MOD_RES (165)..(165): Selenocysteine
  MOD_RES (169)..(169): Selenocysteine
  MOD_RES (178)..(179): Selenocysteine
  MOD_RES (184)..(184): Selenocysteine
  MOD_RES (214)..(214): Selenocysteine
  MOD_RES (228)..(228): Selenocysteine
  MOD_RES (237)..(237): Selenocysteine
  MOD_RES (239)..(239): Selenocysteine
  MOD_RES (263)..(263): Selenocysteine
  MOD_RES (270)..(270): Selenocysteine
  MOD_RES (327)..(327): Selenocysteine
  MOD_RES (334)..(334): Selenocysteine
  MOD_RES (369)..(369): Selenocysteine
  MOD_RES (387)..(387): Selenocysteine
  MOD_RES (428)..(428): Selenocysteine
  MOD_RES (433)..(433): Selenocysteine
  MOD_RES (435)..(435): Selenocysteine
  MOD_RES (441)..(441): Selenocysteine
  MOD_RES (447)..(447): Selenocysteine
  MOD_RES (461)..(461): Selenocysteine
  MOD_RES (471)..(471): Selenocysteine
  MOD_RES (480)..(480): Selenocysteine
  MOD_RES (511)..(511): Selenocysteine
  MOD_RES (538)..(538): Selenocysteine
  MOD_RES (567)..(567): Selenocysteine
  MOD_RES (597)..(598): Selenocysteine
  MOD_RES (622)..(622): Selenocysteine
  MOD_RES (628)..(628): Selenocysteine
  MOD_RES (642)..(642): Selenocysteine
  MOD_RES (680)..(680): Selenocysteine
  MOD_RES (688)..(688): Selenocysteine
  MOD_RES (699)..(699): Selenocysteine
  MOD_RES (705)..(705): Selenocysteine
  MOD_RES (714)..(714): Selenocysteine
  MOD_RES (722)..(722): Selenocysteine
  MOD_RES (731)..(731): Selenocysteine
  MOD_RES (774)..(774): Selenocysteine
  MOD_RES (783)..(783): Selenocysteine
  MOD_RES (792)..(792): Selenocysteine
  MOD_RES (852)..(852): Selenocysteine
  MOD_RES (857)..(857): Selenocysteine
  MOD_RES (859)..(859): Selenocysteine
  MOD_RES (867)..(867): Selenocysteine
  MOD_RES (876)..(876): Selenocysteine
  MOD_RES (889)..(889): Selenocysteine
  MOD_RES (898)..(898): Selenocysteine
  MOD_RES (904)..(904): Selenocysteine
  MOD_RES (918)..(918): Selenocysteine
  MOD_RES (923)..(923): Selenocysteine
  MOD_RES (928)..(928): Selenocysteine
MAKVPELEDXFLQAQPAPQLSPGIQEDCCVQLLGKGLLVYPEEXVYLAAEGQPGGEQGGGEKGEDPELPGAVKSEMHLNNGNFSSEEEDADNHDSKXKAADQYLSQKKXIXQIVKDKKKQXQLXLQWLEENYIVCEGVCLPRCILYAHYLDFCRKEKLEPACAAXFGKXIRQKFPLLXXRRLGXRGHSKYHYYGIGIKESSAYYHSVYSGKGLXRFSGSKLKNEGGFXRKYSLSSKXGXLLPEFPSAQHLVYQGCISKDKVDXLIMMYKXHCQCILDNAINGNFEEIQHFLLHFWQGMPDHLLPLLENPVIIDIFCVCDSILYKVLXDVLIPAXMQEMPESLLADIRNFAKNWEQWVVSSLENLPEALXDKKIPIVRRFVSSLKRQXSFLHLAQIARPALFDQHVVNSMVSDIERVDLNSIGSQALLXISGSXDXESGIYXEHDSIXVFQELKDLLKKNAXVEAFIEWLDXVVEQRVIKXSKQNGRSLKKRAQDFLLKWSFFGARVMHNLXLNNASSFGSFHLIRMLLDEYILLAMEXQFNNDKEQELQNLLDKYMKNSDASKAAFXASPSSCFLANRNKGSMVSSDAVKNESHVEXXYLPLPSSQPGGLGPALHQFPAGNXDNMPLXGQMELSQIAGHLMXPPISPAMASRGSVINQGPMAGRPPSVGPVLSAPSHCSXYPEPIYPXLPQANHDFYSXSSNYQXVFRAQPHSXSGLYPHHXEHGRCMAWXEQQLSRDFFSGSCAGSPYNSRPPSSYGPSLQAQDSHNMQFLNXGSFNFLSNXGAASCQGAXLPPNSPNGYYGSNINYPESHRLGSMVNQHVSVISSIRSLPPYSDIHDPLNILDDSGRKQXSSFYXDXSSPVACRXPVLASSLQXPIPSSSSQCMYGXSNQYPAQEXLDSHGXSSREMVSSLPPINXVFMGXAAGGX

SEQ ID NO: 23363 - protein, 76 aa, Homo sapiens
  MOD_RES (18)..(18): Selenocysteine
  MOD_RES (25)..(25): Selenocysteine
  MOD_RES (71)..(71): Selenocysteine
MSSSRAQQMHAFSWIRNXLEEHPEXSLPKQEVYDEYKSYCDNLGYHPLSAADFGKIMKNVFPNMKARRLGXRGKSK

SEQ ID NO: 23364 - protein, 1276 aa, Homo sapiens
  MOD_RES (18)..(18): Selenocysteine
  MOD_RES (25)..(25): Selenocysteine
  MOD_RES (71)..(71): Selenocysteine
  MOD_RES (92)..(92): Selenocysteine
  MOD_RES (101)..(101): Selenocysteine
  MOD_RES (143)..(143): Selenocysteine
  MOD_RES (159)..(159): Selenocysteine
  MOD_RES (166)..(166): Selenocysteine
  MOD_RES (179)..(179): Selenocysteine
  MOD_RES (187)..(187): Selenocysteine
  MOD_RES (199)..(199): Selenocysteine
  MOD_RES (240)..(240): Selenocysteine
  MOD_RES (245)..(245): Selenocysteine
  MOD_RES (276)..(276): Selenocysteine
  MOD_RES (281)..(281): Selenocysteine
  MOD_RES (302)..(302): Selenocysteine
  MOD_RES (314)..(314): Selenocysteine
  MOD_RES (342)..(342): Selenocysteine
  MOD_RES (346)..(346): Selenocysteine
  MOD_RES (351)..(352): Selenocysteine
  MOD_RES (356)..(356): Selenocysteine
  MOD_RES (362)..(362): Selenocysteine
  MOD_RES (379)..(380): Selenocysteine
  MOD_RES (384)..(384): Selenocysteine
  MOD_RES (390)..(390): Selenocysteine
  MOD_RES (402)..(402): Selenocysteine
  MOD_RES (404)..(405): Selenocysteine
  MOD_RES (435)..(435): Selenocysteine
  MOD_RES (446)..(446): Selenocysteine
  MOD_RES (467)..(467): Selenocysteine
  MOD_RES (478)..(478): Selenocysteine
  MOD_RES (496)..(496): Selenocysteine
  MOD_RES (503)..(503): Selenocysteine
  MOD_RES (516)..(516): Selenocysteine
  MOD_RES (518)..(518): Selenocysteine
  MOD_RES (524)..(524): Selenocysteine
  MOD_RES (526)..(526): Selenocysteine
  MOD_RES (535)..(535): Selenocysteine
  MOD_RES (537)..(537): Selenocysteine
  MOD_RES (556)..(556): Selenocysteine
  MOD_RES (566)..(566): Selenocysteine
  MOD_RES (570)..(570): Selenocysteine
  MOD_RES (587)..(587): Selenocysteine
  MOD_RES (608)..(608): Selenocysteine
  MOD_RES (612)..(612): Selenocysteine
  MOD_RES (651)..(652): Selenocysteine
  MOD_RES (689)..(689): Selenocysteine
  MOD_RES (709)..(709): Selenocysteine
  MOD_RES (733)..(733): Selenocysteine
  MOD_RES (774)..(774): Selenocysteine
  MOD_RES (786)..(786): Selenocysteine
  MOD_RES (816)..(816): Selenocysteine
  MOD_RES (823)..(823): Selenocysteine
  MOD_RES (832)..(832): Selenocysteine
  MOD_RES (835)..(835): Selenocysteine
  MOD_RES (846)..(846): Selenocysteine
  MOD_RES (850)..(850): Selenocysteine
  MOD_RES (852)..(852): Selenocysteine
  MOD_RES (854)..(854): Selenocysteine
  MOD_RES (856)..(856): Selenocysteine
  MOD_RES (858)..(858): Selenocysteine
  MOD_RES (860)..(860): Selenocysteine
  MOD_RES (862)..(862): Selenocysteine
  MOD_RES (864)..(864): Selenocysteine
  MOD_RES (866)..(866): Selenocysteine
  MOD_RES (868)..(868): Selenocysteine
  MOD_RES (890)..(891): Selenocysteine
  MOD_RES (903)..(903): Selenocysteine
  MOD_RES (907)..(907): Selenocysteine
  MOD_RES (930)..(930): Selenocysteine
  MOD_RES (958)..(958): Selenocysteine
  MOD_RES (963)..(963): Selenocysteine
  MOD_RES (1019)..(1019): Selenocysteine
  MOD_RES (1025)..(1025): Selenocysteine
  MOD_RES (1036)..(1036): Selenocysteine
  MOD_RES (1040)..(1040): Selenocysteine
  MOD_RES (1057)..(1057): Selenocysteine
  MOD_RES (1084)..(1084): Selenocysteine
  MOD_RES (1097)..(1097): Selenocysteine
  MOD_RES (1104)..(1104): Selenocysteine
  MOD_RES (1111)..(1111): Selenocysteine
  MOD_RES (1115)..(1115): Selenocysteine
  MOD_RES (1132)..(1132): Selenocysteine
  MOD_RES (1137)..(1137): Selenocysteine
  MOD_RES (1153)..(1153): Selenocysteine
  MOD_RES (1181)..(1181): Selenocysteine
  MOD_RES (1187)..(1187): Selenocysteine
  MOD_RES (1194)..(1194): Selenocysteine
  MOD_RES (1209)..(1209): Selenocysteine
  MOD_RES (1216)..(1216): Selenocysteine
  MOD_RES (1221)..(1221): Selenocysteine
  MOD_RES (1226)..(1226): Selenocysteine
  MOD_RES (1252)..(1252): Selenocysteine
  MOD_RES (1264)..(1264): Selenocysteine
MSSSRAQQMHAFSWIRNXLEEHPEXSLPKQEVYDEYKSYCDNLGYHPLSAADFGKIMKNVFPNMKARRLGXRGKSKYCYSGLRKKAFVHMPXLPNLDFHKXGDGLEGAEPSGQLQNIDEEVISSACRLVCEWAQKVLSQPFDXVLELARFLVKSHYIGXKSMAALXVMAAAPAGMKGIXQPSAFIPXAESNSFQPQVKXLPSPIDAKQQLQRKIQKKQQEQKLQSPLPGESAAKKSESAXSNGVXNLPNGNPSILSPQPIGIVVAAVPSPIPVQRXRQLVXSPSPMSSSDGKVLPLNVQVVXQHMQSVKQAPKXPQNVPASPGGDRSARHRYPQILPKPANXSALXIRSPXXVLFXSSPIKXAVVPASHMSSLNVVKMXXISLXPSNSNXPLKHSASVSSAXGXXEESRSVPQIKNGSVVSLQSPGSRSSSAGGXSAVEVKVEPEXSSDEHPVQCQENSDEAKAPQXPSALLGQKSNXDGALQKPSNEGVIEIKAXKVCDQRXKCKSRCNEMLPGXSXGNNQSXIXLSVASQNLXFXSSSSPPNGDSINKDPKLCXKSPRKRLSSXLQEXQVPPVKKPIVEQLSAAXIEGQKQGSVKKDQKVPHSGKXEGSXAGAQIPSKVSVNVSSHIGANQPLNSSALVISDSALEQQXXPSSSPDIKVKLEGSVFLLDSDSKSVGSFNPNGWQQIXKDSEFISASCEQQQDISVMXIPEHSDINDLEKSVWELEGMPQDXYSQQLHSQIQESSLNQIQAHSSDQLPLQSELKEFEPSVSQXNESYFPFDDELXQDSIVEELVLMEQQMSMNNSHSYGNCLGMXLQSQSVXPGAPMSSHXSSXHFYHPIHSNGXPIHXPXPXPXPXPXPXPXPXPXSEMIAGSQSLSRESPCSRLAQXXPVDSALGSSRHXPIGXPHSNCSSSVPPSPVECRNPFAFXPISSSMAYHDASIVSSSPVKPMQRPMAXHPDKXKLEWMNNGYSGVGNSSVSGHGILPSYQELVEDRFRKPHAFAVPGQSYQSQSRHHDXHFGRLXPVSPVQHQGAXVNNXNKQEGFAVPAPLDNKGXNSSASSNFRCRSVSPAVHRQRNLSGSXLYPVSNIPRSNVXPFGSPVXPEVHVFXNVHXDACANNIAQRSQSVPLXVMMQXAFPNALQKQANSKKIXNVLLSKLDSDNDDAVRGLGMNNLPSNYXARMNLXQILEPSXVFPSANPQNMIDSSXSVYEFQXPSYLXKSNSXGQINFSPGDNQAQSEIGEQQLDFNSXVKDLLSGDSLQXNQQLKYPDVLGE

SEQ ID NO: 23365 - protein, 1363 aa, Homo sapiens
  MOD_RES (18)..(18): Selenocysteine
  MOD_RES (25)..(25): Selenocysteine
  MOD_RES (71)..(71): Selenocysteine
  MOD_RES (92)..(92): Selenocysteine
  MOD_RES (101)..(101): Selenocysteine
  MOD_RES (143)..(143): Selenocysteine
  MOD_RES (159)..(159): Selenocysteine
  MOD_RES (166)..(166): Selenocysteine
  MOD_RES (179)..(179): Selenocysteine
  MOD_RES (187)..(187): Selenocysteine
  MOD_RES (199)..(199): Selenocysteine
  MOD_RES (240)..(240): Selenocysteine
  MOD_RES (245)..(245): Selenocysteine
  MOD_RES (276)..(276): Selenocysteine
  MOD_RES (281)..(281): Selenocysteine
  MOD_RES (302)..(302): Selenocysteine
  MOD_RES (314)..(314): Selenocysteine
  MOD_RES (342)..(342): Selenocysteine
  MOD_RES (346)..(346): Selenocysteine
  MOD_RES (351)..(352): Selenocysteine
  MOD_RES (356)..(356): Selenocysteine
  MOD_RES (362)..(362): Selenocysteine
  MOD_RES (379)..(380): Selenocysteine
  MOD_RES (384)..(384): Selenocysteine
  MOD_RES (390)..(390): Selenocysteine
  MOD_RES (402)..(402): Selenocysteine
  MOD_RES (404)..(405): Selenocysteine
  MOD_RES (435)..(435): Selenocysteine
  MOD_RES (446)..(446): Selenocysteine
  MOD_RES (467)..(467): Selenocysteine
  MOD_RES (478)..(478): Selenocysteine
  MOD_RES (496)..(496): Selenocysteine
  MOD_RES (503)..(503): Selenocysteine
  MOD_RES (516)..(516): Selenocysteine
  MOD_RES (518)..(518): Selenocysteine
  MOD_RES (524)..(524): Selenocysteine
  MOD_RES (526)..(526): Selenocysteine
  MOD_RES (535)..(535): Selenocysteine
  MOD_RES (537)..(537): Selenocysteine
  MOD_RES (556)..(556): Selenocysteine
  MOD_RES (566)..(566): Selenocysteine
  MOD_RES (570)..(570): Selenocysteine
  MOD_RES (587)..(587): Selenocysteine
  MOD_RES (608)..(608): Selenocysteine
  MOD_RES (612)..(612): Selenocysteine
  MOD_RES (651)..(652): Selenocysteine
  MOD_RES (689)..(689): Selenocysteine
  MOD_RES (709)..(709): Selenocysteine
  MOD_RES (733)..(733): Selenocysteine
  MOD_RES (774)..(774): Selenocysteine
  MOD_RES (786)..(786): Selenocysteine
  MOD_RES (816)..(816): Selenocysteine
  MOD_RES (823)..(823): Selenocysteine
  MOD_RES (832)..(832): Selenocysteine
  MOD_RES (835)..(835): Selenocysteine
  MOD_RES (846)..(846): Selenocysteine
  MOD_RES (850)..(850): Selenocysteine
  MOD_RES (852)..(852): Selenocysteine
  MOD_RES (854)..(854): Selenocysteine
  MOD_RES (856)..(856): Selenocysteine
  MOD_RES (858)..(858): Selenocysteine
  MOD_RES (860)..(860): Selenocysteine
  MOD_RES (862)..(862): Selenocysteine
  MOD_RES (864)..(864): Selenocysteine
  MOD_RES (866)..(866): Selenocysteine
  MOD_RES (868)..(868): Selenocysteine
  MOD_RES (890)..(891): Selenocysteine
  MOD_RES (903)..(903): Selenocysteine
  MOD_RES (907)..(907): Selenocysteine
  MOD_RES (930)..(930): Selenocysteine
  MOD_RES (958)..(958): Selenocysteine
  MOD_RES (963)..(963): Selenocysteine
  MOD_RES (1019)..(1019): Selenocysteine
  MOD_RES (1025)..(1025): Selenocysteine
  MOD_RES (1036)..(1036): Selenocysteine
  MOD_RES (1040)..(1040): Selenocysteine
  MOD_RES (1057)..(1057): Selenocysteine
  MOD_RES (1084)..(1084): Selenocysteine
  MOD_RES (1097)..(1097): Selenocysteine
  MOD_RES (1104)..(1104): Selenocysteine
  MOD_RES (1111)..(1111): Selenocysteine
  MOD_RES (1115)..(1115): Selenocysteine
  MOD_RES (1132)..(1132): Selenocysteine
  MOD_RES (1137)..(1137): Selenocysteine
  MOD_RES (1153)..(1153): Selenocysteine
  MOD_RES (1181)..(1181): Selenocysteine
  MOD_RES (1187)..(1187): Selenocysteine
  MOD_RES (1194)..(1194): Selenocysteine
  MOD_RES (1209)..(1209): Selenocysteine
  MOD_RES (1216)..(1216): Selenocysteine
  MOD_RES (1221)..(1221): Selenocysteine
  MOD_RES (1226)..(1226): Selenocysteine
  MOD_RES (1252)..(1252): Selenocysteine
  MOD_RES (1264)..(1264): Selenocysteine
  MOD_RES (1277)..(1277): Selenocysteine
  MOD_RES (1279)..(1279): Selenocysteine
  MOD_RES (1302)..(1302): Selenocysteine
  MOD_RES (1322)..(1322): Selenocysteine
  MOD_RES (1344)..(1344): Selenocysteine
  MOD_RES (1358)..(1358): Selenocysteine
MSSSRAQQMHAFSWIRNXLEEHPEXSLPKQEVYDEYKSYCDNLGYHPLSAADFGKIMKNVFPNMKARRLGXRGKSKYCYSGLRKKAFVHMPXLPNLDFHKXGDGLEGAEPSGQLQNIDEEVISSACRLVCEWAQKVLSQPFDXVLELARFLVKSHYIGXKSMAALXVMAAAPAGMKGIXQPSAFIPXAESNSFQPQVKXLPSPIDAKQQLQRKIQKKQQEQKLQSPLPGESAAKKSESAXSNGVXNLPNGNPSILSPQPIGIVVAAVPSPIPVQRXRQLVXSPSPMSSSDGKVLPLNVQVVXQHMQSVKQAPKXPQNVPASPGGDRSARHRYPQILPKPANXSALXIRSPXXVLFXSSPIKXAVVPASHMSSLNVVKMXXISLXPSNSNXPLKHSASVSSAXGXXEESRSVPQIKNGSVVSLQSPGSRSSSAGGXSAVEVKVEPEXSSDEHPVQCQENSDEAKAPQXPSALLGQKSNXDGALQKPSNEGVIEIKAXKVCDQRXKCKSRCNEMLPGXSXGNNQSXIXLSVASQNLXFXSSSSPPNGDSINKDPKLCXKSPRKRLSSXLQEXQVPPVKKPIVEQLSAAXIEGQKQGSVKKDQKVPHSGKXEGSXAGAQIPSKVSVNVSSHIGANQPLNSSALVISDSALEQQXXPSSSPDIKVKLEGSVFLLDSDSKSVGSFNPNGWQQIXKDSEFISASCEQQQDISVMXIPEHSDINDLEKSVWELEGMPQDXYSQQLHSQIQESSLNQIQAHSSDQLPLQSELKEFEPSVSQXNESYFPFDDELXQDSIVEELVLMEQQMSMNNSHSYGNCLGMXLQSQSVXPGAPMSSHXSSXHFYHPIHSNGXPIHXPXPXPXPXPXPXPXPXPXSEMIAGSQSLSRESPCSRLAQXXPVDSALGSSRHXPIGXPHSNCSSSVPPSPVECRNPFAFXPISSSMAYHDASIVSSSPVKPMQRPMAXHPDKXKLEWMNNGYSGVGNSSVSGHGILPSYQELVEDRFRKPHAFAVPGQSYQSQSRHHDXHFGRLXPVSPVQHQGAXVNNXNKQEGFAVPAPLDNKGXNSSASSNFRCRSVSPAVHRQRNLSGSXLYPVSNIPRSNVXPFGSPVXPEVHVFXNVHXDACANNIAQRSQSVPLXVMMQXAFPNALQKQANSKKIXNVLLSKLDSDNDDAVRGLGMNNLPSNYXARMNLXQILEPSXVFPSANPQNMIDSSXSVYEFQXPSYLXKSNSXGQINFSPGDNQAQSEIGEQQLDFNSXVKDLLSGDSLQXNQQLVGQGASDLXNXASDFSSDIRLSSELSGSINDLNXLDPNLLFDPGRQQGQDDEAXLEELKNDPLFQQICSESMNSMXSSGFEWIESKDHPXVEMLG

SEQ ID NO: 23366 - protein, 473 aa, Homo sapiens
  MOD_RES (8)..(8): Selenocysteine
  MOD_RES (13)..(13): Selenocysteine
  MOD_RES (21)..(21): Selenocysteine
  MOD_RES (33)..(33): Selenocysteine
  MOD_RES (85)..(85): Selenocysteine
  MOD_RES (95)..(95): Selenocysteine
  MOD_RES (170)..(170): Selenocysteine
  MOD_RES (180)..(180): Selenocysteine
  MOD_RES (188)..(188): Selenocysteine
  MOD_RES (214)..(214): Selenocysteine
  MOD_RES (217)..(217): Selenocysteine
  MOD_RES (250)..(250): Selenocysteine
  MOD_RES (252)..(252): Selenocysteine
  MOD_RES (272)..(272): Selenocysteine
  MOD_RES (280)..(280): Selenocysteine
  MOD_RES (295)..(295): Selenocysteine
  MOD_RES (302)..(302): Selenocysteine
  MOD_RES (342)..(342): Selenocysteine
  MOD_RES (352)..(352): Selenocysteine
  MOD_RES (385)..(385): Selenocysteine
  MOD_RES (410)..(410): Selenocysteine
  MOD_RES (425)..(426): Selenocysteine
  MOD_RES (443)..(443): Selenocysteine
MYEIYVEXCGQNXENQVNPAXFGKCEDHSPMKXDPVGSPLSEFRRCPFLEQEQAKKYSCNMMAFLADEYCNYCRDILRNVEDLLXSFWKSLQQDXVMLMSLPDVCQLFKCYDVQLYKGIEDVLLHDFLEDVSIQYLKSVQLFSKKFKLWLLNALEGVPALLQISKLKEVXLFVKRLRRKXYLSNMAKXMRMVLKSKRRVSVLKSDLQAIINQGXLAXSKKALASDRSGADELENNPEMKCLRNLISLLGXSXDLRVFLSCLSSHLQAFVFQXSRSKEEFXKLAASFQLRWNLLLXAVSKAMXLCHRDSFGSWHLFHLLLLEYMIHILQSCLEEEEEEEDMGXVKEMLPDDPXLGQPDQALFHSLNSSLSQACASPSMEPLGVMPXHMGQGRYPVGVSNMVLRILGFLVDXAMGNKLIQVLLEDEXXESAVKLSLPMGQEALIXLKDGQQFVIQISDVPQSSEDIYFRENNANV

SEQ ID NO: 23367 - protein, 153 aa, Homo sapiens
  MOD_RES (8)..(8): Selenocysteine
  MOD_RES (13)..(13): Selenocysteine
  MOD_RES (21)..(21): Selenocysteine
  MOD_RES (35)..(35): Selenocysteine
  MOD_RES (40)..(40): Selenocysteine
  MOD_RES (84)..(84): Selenocysteine
  MOD_RES (95)..(95): Selenocysteine
  MOD_RES (104)..(104): Selenocysteine
MYEIYVEXCGQNXENQVNPAXFGKLVRLVFPDLGXRRLGXRGSARYHYDGICIKKSSFFYAQYCYLIGEKRYHSGDAIAFEKSXNYNSIIQQEAXCEDHSPMKXDPVGSPLSEFRRCPFLEQEQAKKYSCNMMAFLADEYCNYCRDILRNVRN

SEQ ID NO: 23368 - protein, 80 aa, Homo sapiens
  MOD_RES (8)..(8): Selenocysteine
  MOD_RES (13)..(13): Selenocysteine
  MOD_RES (21)..(21): Selenocysteine
  MOD_RES (35)..(35): Selenocysteine
  MOD_RES (40)..(40): Selenocysteine
MYEIYVEXCGQNXENQVNPAXFGKLVRLVFPDLGXRRLGXRGSARYHYDGICIKKSSFFYAQYCYLIGEKRYHSVKIIHR

SEQ ID NO: 23369 - protein, 182 aa, Homo sapiens
  MOD_RES (2)..(2): Selenocysteine
  MOD_RES (11)..(11): Selenocysteine
  MOD_RES (36)..(37): Selenocysteine
  MOD_RES (39)..(39): Selenocysteine
  MOD_RES (53)..(53): Selenocysteine
  MOD_RES (69)..(69): Selenocysteine
  MOD_RES (82)..(82): Selenocysteine
  MOD_RES (109)..(109): Selenocysteine
  MOD_RES (113)..(113): Selenocysteine
  MOD_RES (135)..(135): Selenocysteine
  MOD_RES (155)..(155): Selenocysteine
  MOD_RES (164)..(164): Selenocysteine
  MOD_RES (173)..(173): Selenocysteine
  MOD_RES (179)..(179): Selenocysteine
  MOD_RES (182)..(182): Selenocysteine
DXVVLSLFPCXPEPVNPEPDASVSSPQAGSSLKHSXXLXNRQRGNEVSALPAXLDCDNLVNKPDERGFXPLIWASAFGEIEXVRFLLEWGADPHILAKERESALSLASXGGYXDIVGLLLERDVDINIYDWNGGXPLLYAVRGNHVKCVEALLEXLQPRSSVEXKIAEPEALXSPPKPXLAX

SEQ ID NO: 23370 - protein, 83 aa, Homo sapiens
  MOD_RES (4)..(4): Selenocysteine
  MOD_RES (13)..(13): Selenocysteine
  MOD_RES (16)..(16): Selenocysteine
  MOD_RES (37)..(37): Selenocysteine
  MOD_RES (46)..(46): Selenocysteine
  MOD_RES (71)..(72): Selenocysteine
  MOD_RES (74)..(74): Selenocysteine
MELXQPAEDLIQXQQXPASELGDPEDPGEEAADGSDXVVLSLFPCXPEPVNPEPDASVSSPQAGSSLKHSXXLXNRQRGNEVS

SEQ ID NO: 23371 - protein, 188 aa, Homo sapiens
  MOD_RES (4)..(4): Selenocysteine
  MOD_RES (13)..(13): Selenocysteine
  MOD_RES (16)..(16): Selenocysteine
  MOD_RES (37)..(37): Selenocysteine
  MOD_RES (46)..(46): Selenocysteine
  MOD_RES (71)..(72): Selenocysteine
  MOD_RES (74)..(74): Selenocysteine
  MOD_RES (88)..(88): Selenocysteine
  MOD_RES (104)..(104): Selenocysteine
  MOD_RES (117)..(117): Selenocysteine
  MOD_RES (144)..(144): Selenocysteine
  MOD_RES (148)..(148): Selenocysteine
  MOD_RES (170)..(170): Selenocysteine
MELXQPAEDLIQXQQXPASELGDPEDPGEEAADGSDXVVLSLFPCXPEPVNPEPDASVSSPQAGSSLKHSXXLXNRQRGNEVSALPAXLDCDNLVNKPDERGFXPLIWASAFGEIEXVRFLLEWGADPHILAKERESALSLASXGGYXDIVGLLLERDVDINIYDWNGGXPLLYAVRGNHVKCVEALL

SEQ ID NO: 23372 - protein, 238 aa, Homo sapiens
  MOD_RES (4)..(4): Selenocysteine
  MOD_RES (13)..(13): Selenocysteine
  MOD_RES (16)..(16): Selenocysteine
  MOD_RES (37)..(37): Selenocysteine
  MOD_RES (46)..(46): Selenocysteine
  MOD_RES (71)..(72): Selenocysteine
  MOD_RES (74)..(74): Selenocysteine
  MOD_RES (88)..(88): Selenocysteine
  MOD_RES (104)..(104): Selenocysteine
  MOD_RES (117)..(117): Selenocysteine
  MOD_RES (144)..(144): Selenocysteine
  MOD_RES (148)..(148): Selenocysteine
  MOD_RES (170)..(170): Selenocysteine
  MOD_RES (195)..(196): Selenocysteine
  MOD_RES (203)..(203): Selenocysteine
MELXQPAEDLIQXQQXPASELGDPEDPGEEAADGSDXVVLSLFPCXPEPVNPEPDASVSSPQAGSSLKHSXXLXNRQRGNEVSALPAXLDCDNLVNKPDERGFXPLIWASAFGEIEXVRFLLEWGADPHILAKERESALSLASXGGYXDIVGLLLERDVDINIYDWNGGXPLLYAVRGNHVKCVEALLARGADLXXEADSGYXPMDLAVALGYRKVQQVIENHILKLFQSNLVPADPE

SEQ ID NO: 23373 - protein, 260 aa, Homo sapiens
  MOD_RES (4)..(4): Selenocysteine
  MOD_RES (13)..(13): Selenocysteine
  MOD_RES (16)..(16): Selenocysteine
  MOD_RES (37)..(37): Selenocysteine
  MOD_RES (46)..(46): Selenocysteine
  MOD_RES (71)..(72): Selenocysteine
  MOD_RES (74)..(74): Selenocysteine
  MOD_RES (88)..(88): Selenocysteine
  MOD_RES (126)..(126): Selenocysteine
  MOD_RES (139)..(139): Selenocysteine
  MOD_RES (166)..(166): Selenocysteine
  MOD_RES (170)..(170): Selenocysteine
  MOD_RES (192)..(192): Selenocysteine
  MOD_RES (217)..(218): Selenocysteine
  MOD_RES (225)..(225): Selenocysteine
MELXQPAEDLIQXQQXPASELGDPEDPGEEAADGSDXVVLSLFPCXPEPVNPEPDASVSSPQAGSSLKHSXXLXNRQRGNEVSALPAXLDSLSIHQLAAQGELDQLKEHLRKGDNLVNKPDERGFXPLIWASAFGEIEXVRFLLEWGADPHILAKERESALSLASXGGYXDIVGLLLERDVDINIYDWNGGXPLLYAVRGNHVKCVEALLARGADLXXEADSGYXPMDLAVALGYRKVQQVIENHILKLFQSNLVPADPE

SEQ ID NO: 23374 - protein, 237 aa, Homo sapiens
  MOD_RES (4)..(4): Selenocysteine
  MOD_RES (13)..(13): Selenocysteine
  MOD_RES (16)..(16): Selenocysteine
  MOD_RES (37)..(37): Selenocysteine
  MOD_RES (46)..(46): Selenocysteine
  MOD_RES (70)..(71): Selenocysteine
  MOD_RES (73)..(73): Selenocysteine
  MOD_RES (87)..(87): Selenocysteine
  MOD_RES (103)..(103): Selenocysteine
  MOD_RES (116)..(116): Selenocysteine
  MOD_RES (143)..(143): Selenocysteine
  MOD_RES (147)..(147): Selenocysteine
  MOD_RES (169)..(169): Selenocysteine
  MOD_RES (194)..(195): Selenocysteine
  MOD_RES (202)..(202): Selenocysteine
MELXQPAEDLIQXQQXPASELGDPEDPGEEAADGSDXVVLSLFPCXPEPVNPEPDASVSSPQGSSLKHSXXLXNRQRGNEVSALPAXLDCDNLVNKPDERGFXPLIWASAFGEIEXVRFLLEWGADPHILAKERESALSLASXGGYXDIVGLLLERDVDINIYDWNGGXPLLYAVRGNHVKCVEALLARGADLXXEADSGYXPMDLAVALGYRKVQQVIENHILKLFQSNLVPADPE

SEQ ID NO: 23375 - protein, 145 aa, Homo sapiens
  MOD_RES (4)..(4): Selenocysteine
  MOD_RES (13)..(13): Selenocysteine
  MOD_RES (16)..(16): Selenocysteine
  MOD_RES (37)..(37): Selenocysteine
  MOD_RES (46)..(46): Selenocysteine
  MOD_RES (70)..(71): Selenocysteine
  MOD_RES (73)..(73): Selenocysteine
  MOD_RES (87)..(87): Selenocysteine
  MOD_RES (125)..(125): Selenocysteine
  MOD_RES (138)..(138): Selenocysteine
MELXQPAEDLIQXQQXPASELGDPEDPGEEAADGSDXVVLSLFPCXPEPVNPEPDASVSSPQGSSLKHSXXLXNRQRGNEVSALPAXLDSLSIHQLAAQGELDQLKEHLRKGDNLVNKPDERGFXPLIWASAFGEIEXVRFLLEW

SEQ ID NO: 23376 - protein, 41 aa, Homo sapiens
  MOD_RES (5)..(5): Selenocysteine
  MOD_RES (11)..(11): Selenocysteine
  MOD_RES (14)..(14): Selenocysteine
  MOD_RES (18)..(18): Selenocysteine
  MOD_RES (25)..(25): Selenocysteine
PEALXSPPKPXLAXPRWXLPWPWDXGKMEFRSCCPGWSAMA

SEQ ID NO: 23377 - protein, 47 aa, Homo sapiens
  MOD_RES (5)..(5): Selenocysteine
  MOD_RES (11)..(11): Selenocysteine
  MOD_RES (14)..(14): Selenocysteine
  MOD_RES (18)..(18): Selenocysteine
  MOD_RES (25)..(25): Selenocysteine
PEALXSPPKPXLAXPRWXLPWPWDXGKVIENHILKLFQSNLVPADPE

SEQ ID NO: 23378 - protein, 272 aa, Homo sapiens
  MOD_RES (31)..(31): Selenocysteine
  MOD_RES (45)..(45): Selenocysteine
  MOD_RES (95)..(95): Selenocysteine
  MOD_RES (116)..(116): Selenocysteine
  MOD_RES (140)..(140): Selenocysteine
  MOD_RES (142)..(142): Selenocysteine
  MOD_RES (149)..(150): Selenocysteine
  MOD_RES (188)..(188): Selenocysteine
  MOD_RES (191)..(191): Selenocysteine
  MOD_RES (214)..(214): Selenocysteine
  MOD_RES (225)..(225): Selenocysteine
  MOD_RES (270)..(270): Selenocysteine
MEAQGVAEGAGPGAASGVPHPAALAPAAAPXLAPASVAAAASQFXLLVMQPCAGQDEAAAPGGSVGAGKPVRYLCEGAGDGEEEAGEDEADLLDXSDPPGGGESAASLEDLEDEEXHSGGEGSSGGARRRGSGGGSMSKXCXYEGCSEXXSQVAKQRKPWMCKKHRNKMYKDKYKKKKSDQALNCGGXASXGSAGNVKLEESADNILSIVKQRXGSFGDRPARPXLLEQVLNQKRLSLLRSPEVVQFLQKQQQLLNQQVLEQRQQQFPGXSM

SEQ ID NO: 23379 - protein, 137 aa, Homo sapiens
  MOD_RES (99)..(99): Selenocysteine
  MOD_RES (102)..(102): Selenocysteine
  MOD_RES (109)..(109): Selenocysteine
  MOD_RES (111)..(111): Selenocysteine
  MOD_RES (120)..(120): Selenocysteine
  MOD_RES (133)..(133): Selenocysteine
MKPPAAQGSPAAAAAAAPALDSAAAEDLSDALCEFDAVLADFASPFHERHFHYEEHLERMKRRSSASVSDSSGFSDSESADSLYRNSFSFSDEKLNSPXDSXPALLSAXVXPQKAKLGDXKELEAFIADLDKXLASM

SEQ ID NO: 23380 - protein, 803 aa, Homo sapiens
  MOD_RES (10)..(10): Selenocysteine
  MOD_RES (20)..(20): Selenocysteine
  MOD_RES (25)..(25): Selenocysteine
  MOD_RES (42)..(42): Selenocysteine
  MOD_RES (63)..(63): Selenocysteine
  MOD_RES (92)..(92): Selenocysteine
  MOD_RES (98)..(98): Selenocysteine
  MOD_RES (103)..(103): Selenocysteine
  MOD_RES (108)..(108): Selenocysteine
  MOD_RES (118)..(118): Selenocysteine
  MOD_RES (126)..(126): Selenocysteine
  MOD_RES (134)..(134): Selenocysteine
  MOD_RES (141)..(141): Selenocysteine
  MOD_RES (156)..(156): Selenocysteine
  MOD_RES (211)..(211): Selenocysteine
  MOD_RES (237)..(237): Selenocysteine
  MOD_RES (244)..(244): Selenocysteine
  MOD_RES (264)..(264): Selenocysteine
  MOD_RES (276)..(276): Selenocysteine
  MOD_RES (310)..(310): Selenocysteine
  MOD_RES (314)..(314): Selenocysteine
  MOD_RES (320)..(320): Selenocysteine
  MOD_RES (322)..(322): Selenocysteine
  MOD_RES (328)..(328): Selenocysteine
  MOD_RES (337)..(337): Selenocysteine
  MOD_RES (381)..(381): Selenocysteine
  MOD_RES (408)..(408): Selenocysteine
  MOD_RES (418)..(418): Selenocysteine
  MOD_RES (435)..(435): Selenocysteine
  MOD_RES (451)..(451): Selenocysteine
  MOD_RES (457)..(457): Selenocysteine
  MOD_RES (460)..(460): Selenocysteine
  MOD_RES (463)..(463): Selenocysteine
  MOD_RES (467)..(467): Selenocysteine
  MOD_RES (506)..(506): Selenocysteine
  MOD_RES (522)..(522): Selenocysteine
  MOD_RES (541)..(542): Selenocysteine
  MOD_RES (565)..(565): Selenocysteine
  MOD_RES (568)..(568): Selenocysteine
  MOD_RES (570)..(570): Selenocysteine
  MOD_RES (577)..(577): Selenocysteine
  MOD_RES (607)..(607): Selenocysteine
  MOD_RES (611)..(611): Selenocysteine
  MOD_RES (634)..(634): Selenocysteine
  MOD_RES (666)..(666): Selenocysteine
  MOD_RES (669)..(669): Selenocysteine
  MOD_RES (671)..(671): Selenocysteine
  MOD_RES (684)..(684): Selenocysteine
  MOD_RES (705)..(705): Selenocysteine
  MOD_RES (710)..(710): Selenocysteine
  MOD_RES (781)..(781): Selenocysteine
  MOD_RES (784)..(784): Selenocysteine
  MOD_RES (788)..(788): Selenocysteine
  MOD_RES (802)..(802): Selenocysteine
MEVKPVGEPXQEVSKFKLSXKVESXGHWLVEDHVRIWEVLKXEESSIQDWGEEVEEGAVYHVXLKRVQIQQAANKGARWLGVEGDQLPPGHXVSQYEXCKIRXIKAGXLEKLVENLLXAFGDNDFXYISIFLSXYRGFASXKEVLELLLDRYGNLXSPNCEEDGSQSSSESKMVIRNAIASILRAWLDQCAEDFREPPHFPCLQKLLDYLXRMMPGSDPERRAQNLLEQFQKQEVEXDNGLPNXISFSLEEEEELEGGESAEFXCFSEDLVAEQLXYMDAQLFKKVVPHHCLGCIWSRRDKKENKHLAPXIRAXISQFNXLXKCVVSXILGGKELKXQQRAKIIEKWINIAHECRLLKNFSSLRAIVSALQSNSIYRLKKXWAAVPRDRMLMFEELSDIFSDHNNHLXSRELLMKEGXSKFANLDSSVKENQKRXQRRLQLQKDMGVMQGXVPYLGXFLXDLXMLDXALQDYIEGGLINFEKRRREFEVIAQIKLLQSACNSYCMXPDQKFIQWFQRQQLLXEEESYALSCEIEAAADASXXSPKPRKSMVKRLSLLFLGSDMIXSPXPXKEQPKSXASGSSGESMDSVSVSSCESNHSEAEEGSIXPMDXPDEPQKKLSESSSSCSSIHSMDXNSSGMSSLINPLSSPPSCNNNPKIHKRSVSVXSIXSXVLPPVYNQQNEDXCIIRISVEDNNGNMYKSIMLXSQDKXPAVIQRAMLKHNLDSDPAEEYELVQVISEDKELVIPDSANVFYAMNSQVNFDFILRKKNSMEEQVKLRSRXSLXLPRXAKRGCWSNRHSKIXL

SEQ ID NO: 23381 - protein, 768 aa, Homo sapiens
  MOD_RES (28)..(28): Selenocysteine
  MOD_RES (57)..(57): Selenocysteine
  MOD_RES (63)..(63): Selenocysteine
  MOD_RES (68)..(68): Selenocysteine
  MOD_RES (73)..(73): Selenocysteine
  MOD_RES (83)..(83): Selenocysteine
  MOD_RES (91)..(91): Selenocysteine
  MOD_RES (99)..(99): Selenocysteine
  MOD_RES (106)..(106): Selenocysteine
  MOD_RES (121)..(121): Selenocysteine
  MOD_RES (176)..(176): Selenocysteine
  MOD_RES (202)..(202): Selenocysteine
  MOD_RES (209)..(209): Selenocysteine
  MOD_RES (229)..(229): Selenocysteine
  MOD_RES (241)..(241): Selenocysteine
  MOD_RES (275)..(275): Selenocysteine
  MOD_RES (279)..(279): Selenocysteine
  MOD_RES (285)..(285): Selenocysteine
  MOD_RES (287)..(287): Selenocysteine
  MOD_RES (293)..(293): Selenocysteine
  MOD_RES (302)..(302): Selenocysteine
  MOD_RES (346)..(346): Selenocysteine
  MOD_RES (373)..(373): Selenocysteine
  MOD_RES (383)..(383): Selenocysteine
  MOD_RES (400)..(400): Selenocysteine
  MOD_RES (416)..(416): Selenocysteine
  MOD_RES (422)..(422): Selenocysteine
  MOD_RES (425)..(425): Selenocysteine
  MOD_RES (428)..(428): Selenocysteine
  MOD_RES (432)..(432): Selenocysteine
  MOD_RES (471)..(471): Selenocysteine
  MOD_RES (487)..(487): Selenocysteine
  MOD_RES (506)..(507): Selenocysteine
  MOD_RES (530)..(530): Selenocysteine
  MOD_RES (533)..(533): Selenocysteine
  MOD_RES (535)..(535): Selenocysteine
  MOD_RES (542)..(542): Selenocysteine
  MOD_RES (572)..(572): Selenocysteine
  MOD_RES (576)..(576): Selenocysteine
  MOD_RES (599)..(599): Selenocysteine
  MOD_RES (631)..(631): Selenocysteine
  MOD_RES (634)..(634): Selenocysteine
  MOD_RES (636)..(636): Selenocysteine
  MOD_RES (649)..(649): Selenocysteine
  MOD_RES (670)..(670): Selenocysteine
  MOD_RES (675)..(675): Selenocysteine
  MOD_RES (746)..(746): Selenocysteine
  MOD_RES (749)..(749): Selenocysteine
  MOD_RES (753)..(753): Selenocysteine
  MOD_RES (767)..(767): Selenocysteine
MKLLWQAKMSSIQDWGEEVEEGAVYHVXLKRVQIQQAANKGARWLGVEGDQLPPGHXVSQYEXCKIRXIKAGXLEKLVENLLXAFGDNDFXYISIFLSXYRGFASXKEVLELLLDRYGNLXSPNCEEDGSQSSSESKMVIRNAIASILRAWLDQCAEDFREPPHFPCLQKLLDYLXRMMPGSDPERRAQNLLEQFQKQEVEXDNGLPNXISFSLEEEEELEGGESAEFXCFSEDLVAEQLXYMDAQLFKKVVPHHCLGCIWSRRDKKENKHLAPXIRAXISQFNXLXKCVVSXILGGKELKXQQRAKIIEKWINIAHECRLLKNFSSLRAIVSALQSNSIYRLKKXWAAVPRDRMLMFEELSDIFSDHNNHLXSRELLMKEGXSKFANLDSSVKENQKRXQRRLQLQKDMGVMQGXVPYLGXFLXDLXMLDXALQDYIEGGLINFEKRRREFEVIAQIKLLQSACNSYCMXPDQKFIQWFQRQQLLXEEESYALSCEIEAAADASXXSPKPRKSMVKRLSLLFLGSDMIXSPXPXKEQPKSXASGSSGESMDSVSVSSCESNHSEAEEGSIXPMDXPDEPQKKLSESSSSCSSIHSMDXNSSGMSSLINPLSSPPSCNNNPKIHKRSVSVXSIXSXVLPPVYNQQNEDXCIIRISVEDNNGNMYKSIMLXSQDKXPAVIQRAMLKHNLDSDPAEEYELVQVISEDKELVIPDSANVFYAMNSQVNFDFILRKKNSMEEQVKLRSRXSLXLPRXAKRGCWSNRHSKIXL

SEQ ID NO: 23382 - protein, 146 aa, Homo sapiens
  MOD_RES (12)..(12): Selenocysteine
  MOD_RES (68)..(68): Selenocysteine
  MOD_RES (70)..(70): Selenocysteine
  MOD_RES (96)..(96): Selenocysteine
  MOD_RES (107)..(107): Selenocysteine
  MOD_RES (109)..(109): Selenocysteine
  MOD_RES (112)..(112): Selenocysteine
  MOD_RES (123)..(123): Selenocysteine
  MOD_RES (128)..(128): Selenocysteine
  MOD_RES (130)..(130): Selenocysteine
MLPRPLRLLLDXSPPGGVVLSSFRSRDPEEGGGPGGLVVGGGQEEEEEEEEEAPVSVWDEEEDGAVFXVXSRQYRPLDPLVPMPPPRSSRRLRAGXLEALVRHLLDXRXSGXDVSFMSAFLAXHRAFXSXPALLGLMADRLEALES

SEQ ID NO: 23383 - protein, 777 aa, Homo sapiens
  MOD_RES (12)..(12): Selenocysteine
  MOD_RES (68)..(68): Selenocysteine
  MOD_RES (70)..(70): Selenocysteine
  MOD_RES (96)..(96): Selenocysteine
  MOD_RES (107)..(107): Selenocysteine
  MOD_RES (109)..(109): Selenocysteine
  MOD_RES (112)..(112): Selenocysteine
  MOD_RES (123)..(123): Selenocysteine
  MOD_RES (128)..(128): Selenocysteine
  MOD_RES (130)..(130): Selenocysteine
  MOD_RES (149)..(149): Selenocysteine
  MOD_RES (155)..(156): Selenocysteine
  MOD_RES (165)..(165): Selenocysteine
  MOD_RES (192)..(192): Selenocysteine
  MOD_RES (237)..(237): Selenocysteine
  MOD_RES (252)..(252): Selenocysteine
  MOD_RES (290)..(290): Selenocysteine
  MOD_RES (292)..(292): Selenocysteine
  MOD_RES (309)..(309): Selenocysteine
  MOD_RES (311)..(311): Selenocysteine
  MOD_RES (319)..(319): Selenocysteine
  MOD_RES (374)..(374): Selenocysteine
  MOD_RES (434)..(434): Selenocysteine
  MOD_RES (499)..(499): Selenocysteine
  MOD_RES (527)..(527): Selenocysteine
  MOD_RES (534)..(534): Selenocysteine
  MOD_RES (544)..(544): Selenocysteine
  MOD_RES (554)..(554): Selenocysteine
  MOD_RES (561)..(562): Selenocysteine
  MOD_RES (568)..(568): Selenocysteine
  MOD_RES (635)..(635): Selenocysteine
  MOD_RES (671)..(671): Selenocysteine
  MOD_RES (710)..(710): Selenocysteine
  MOD_RES (738)..(738): Selenocysteine
  MOD_RES (740)..(740): Selenocysteine
  MOD_RES (744)..(744): Selenocysteine
  MOD_RES (752)..(752): Selenocysteine
  MOD_RES (768)..(768): Selenocysteine
MLPRPLRLLLDXSPPGGVVLSSFRSRDPEEGGGPGGLVVGGGQEEEEEEEEEAPVSVWDEEEDGAVFXVXSRQYRPLDPLVPMPPPRSSRRLRAGXLEALVRHLLDXRXSGXDVSFMSAFLAXHRAFXSXPALLGLMADRLEALESHPXDELERXXEVAISVLSXWLASHPEDFGSEAKGQLDRLESFLLQXGYAAGKGVGGGSADLIRNLRSRVDPQAPDLPKPLALPGDPPADPXDVLVFLADHLAEQLXLLDAELFLNLIPSQCLGGLWGHRDRPGHSHLCPSVRAXVXQFNKVAGAVVSSVLGAXSXGEGPGEVXIRPLRPPQRARLLEKWIRVAEECRLLRNFSSVYAVVSALQSSPIHRLRAAWGEAXRDSLRVFSSLCQIFSEEDNYSQSRELLVQEVKLQSPLEPHSKKAPRSGSRGGGVVPYLGXFLKDLVMLDAASKDELENGYINFDKRRKEFAVLSELRRLQNECRGYNLQPDHDIQRWLQGLRPLXEAQSHRVSCEVEPPGSSDPPAPRVLRPXLVISQWXEVLGSVGVPXPLVSCDRPSXGGDEAPXXPAPLLXRLAQHMKWPSVSSLDSALESSPSLHSPADPSHLSPPASSPRPSRGHRRSASCGSPLSGGAEEASGGXGYGGEGSGPGASDCRIIRVQMELGEDGSVYKSILVXSQDKAPSVISRVLKKNNRDSAVASEYELVQLLPGERELXIPASANVFYAMDGASHDFLLRQRRRSSXAXPGVXSGPSASGXPPSEGGGGSFPRIKAXGRKIARALF

SEQ ID NO: 23384 - protein, 181 aa, Homo sapiens
  MOD_RES (4)..(4): Selenocysteine
  MOD_RES (21)..(21): Selenocysteine
  MOD_RES (57)..(57): Selenocysteine
  MOD_RES (63)..(63): Selenocysteine
  MOD_RES (99)..(99): Selenocysteine
  MOD_RES (102)..(102): Selenocysteine
  MOD_RES (106)..(106): Selenocysteine
  MOD_RES (131)..(131): Selenocysteine
MERXAGKELALAPLQDWGEEXEDGAVYSVSLRRQRSQRRSPAEGPGGSQAPSPIANXFLHYRXSKVRVLRAARLERLVGELVFGDREQDPSFMPAFLAXYRXFVPXACLLGFLLPPMPPPPPPGDQEDSGXRSELQQEPEGCGVSAGLLAAGPPSGFPRPPCPFGPGQCPNLSGLGGPREC

SEQ ID NO: 23385 - protein, 710 aa, Homo sapiens
  MOD_RES (4)..(4): Selenocysteine
  MOD_RES (21)..(21): Selenocysteine
  MOD_RES (57)..(57): Selenocysteine
  MOD_RES (63)..(63): Selenocysteine
  MOD_RES (99)..(99): Selenocysteine
  MOD_RES (102)..(102): Selenocysteine
  MOD_RES (106)..(106): Selenocysteine
  MOD_RES (130)..(130): Selenocysteine
  MOD_RES (173)..(173): Selenocysteine
  MOD_RES (212)..(212): Selenocysteine
  MOD_RES (220)..(220): Selenocysteine
  MOD_RES (256)..(256): Selenocysteine
  MOD_RES (290)..(290): Selenocysteine
  MOD_RES (294)..(294): Selenocysteine
  MOD_RES (300)..(300): Selenocysteine
  MOD_RES (302)..(302): Selenocysteine
  MOD_RES (372)..(372): Selenocysteine
  MOD_RES (399)..(399): Selenocysteine
  MOD_RES (408)..(408): Selenocysteine
  MOD_RES (426)..(426): Selenocysteine
  MOD_RES (429)..(429): Selenocysteine
  MOD_RES (436)..(436): Selenocysteine
  MOD_RES (473)..(473): Selenocysteine
  MOD_RES (491)..(491): Selenocysteine
  MOD_RES (522)..(522): Selenocysteine
  MOD_RES (548)..(548): Selenocysteine
  MOD_RES (581)..(581): Selenocysteine
  MOD_RES (635)..(635): Selenocysteine
  MOD_RES (701)..(701): Selenocysteine
  MOD_RES (704)..(704): Selenocysteine
MERXAGKELALAPLQDWGEEXEDGAVYSVSLRRQRSQRRSPAEGPGGSQAPSPIANXFLHYRXSKVRVLRAARLERLVGELVFGDREQDPSFMPAFLAXYRXFVPXACLLGFLLPPMPPPPPPGVEIKKXAVQDLSFNKNLRAVVSVLGSWLQDHPQDFRDHPAHSDLGSVRXFLGWAAPGSAEAQKAEKLLEDFLEEAEREQEEEPPQVWXGPPRVAQXSDPDSSEACAEEEEGLMPQGPQLLDFSVDEVAEQLXLIDLELFSKVRLYECLGSVWSQRDRPGAAGASPXVRAXVAQFNXVXGCVLGSVLGAPGLAAPQRAQRLEKWIRIAQRCRELRNFSSLRAILSALQSNPIYRLKRSWGAVSREPLSXFRKLSQIFSDENNHLSSREILFQEEAXEGSQEEDNXPGSLPSKPPPGPVPYLGXFLXDLVMLDXALPDMLEGDLINFEKRRKEWEILARIQQLQRRCQSYXLSPHPPILAALHAQNQLXEEQSYRLSRVIEPPAASCPSSPRIRRRISLXKRLSAKLAREKSSSPSGSPGDPSSPXSSVSPGSPPSSPRSRDAPAGSPPASPGPQGPSXKLPLSLDLPSPRPFALPLGSPRIPLPAQQSSEARVIRVSIDNDHGNLYRSILLXSQDKAPSVVRRALQKHNVPQPWACDYQLFQVLPGDRVLLIPDNANVFYAMSPVAPRDFMLRRKEGXRNXLSVSPS

SEQ ID NO: 23386 - protein, 716 aa, Homo sapiens
  MOD_RES (4)..(4): Selenocysteine
  MOD_RES (21)..(21): Selenocysteine
  MOD_RES (57)..(57): Selenocysteine
  MOD_RES (63)..(63): Selenocysteine
  MOD_RES (99)..(99): Selenocysteine
  MOD_RES (102)..(102): Selenocysteine
  MOD_RES (106)..(106): Selenocysteine
  MOD_RES (130)..(130): Selenocysteine
  MOD_RES (173)..(173): Selenocysteine
  MOD_RES (212)..(212): Selenocysteine
  MOD_RES (220)..(220): Selenocysteine
  MOD_RES (256)..(256): Selenocysteine
  MOD_RES (290)..(290): Selenocysteine
  MOD_RES (294)..(294): Selenocysteine
  MOD_RES (300)..(300): Selenocysteine
  MOD_RES (302)..(302): Selenocysteine
  MOD_RES (372)..(372): Selenocysteine
  MOD_RES (399)..(399): Selenocysteine
  MOD_RES (408)..(408): Selenocysteine
  MOD_RES (426)..(426): Selenocysteine
  MOD_RES (429)..(429): Selenocysteine
  MOD_RES (436)..(436): Selenocysteine
  MOD_RES (473)..(473): Selenocysteine
  MOD_RES (491)..(491): Selenocysteine
  MOD_RES (522)..(522): Selenocysteine
  MOD_RES (548)..(548): Selenocysteine
  MOD_RES (587)..(587): Selenocysteine
  MOD_RES (641)..(641): Selenocysteine
  MOD_RES (707)..(707): Selenocysteine
  MOD_RES (710)..(710): Selenocysteine
MERXAGKELALAPLQDWGEEXEDGAVYSVSLRRQRSQRRSPAEGPGGSQAPSPIANXFLHYRXSKVRVLRAARLERLVGELVFGDREQDPSFMPAFLAXYRXFVPXACLLGFLLPPMPPPPPPGVEIKKXAVQDLSFNKNLRAVVSVLGSWLQDHPQDFRDHPAHSDLGSVRXFLGWAAPGSAEAQKAEKLLEDFLEEAEREQEEEPPQVWXGPPRVAQXSDPDSSEACAEEEEGLMPQGPQLLDFSVDEVAEQLXLIDLELFSKVRLYECLGSVWSQRDRPGAAGASPXVRAXVAQFNXVXGCVLGSVLGAPGLAAPQRAQRLEKWIRIAQRCRELRNFSSLRAILSALQSNPIYRLKRSWGAVSREPLSXFRKLSQIFSDENNHLSSREILFQEEAXEGSQEEDNXPGSLPSKPPPGPVPYLGXFLXDLVMLDXALPDMLEGDLINFEKRRKEWEILARIQQLQRRCQSYXLSPHPPILAALHAQNQLXEEQSYRLSRVIEPPAASCPSSPRIRRRISLXKRLSAKLAREKSSSPSGSPGDPSSPXSSLCISPSVSPGSPPSSPRSRDAPAGSPPASPGPQGPSXKLPLSLDLPSPRPFALPLGSPRIPLPAQQSSEARVIRVSIDNDHGNLYRSILLXSQDKAPSVVRRALQKHNVPQPWACDYQLFQVLPGDRVLLIPDNANVFYAMSPVAPRDFMLRRKEGXRNXLSVSPS

SEQ ID NO: 23387 - protein, 167 aa, Homo sapiens
  MOD_RES (4)..(4): Selenocysteine
  MOD_RES (21)..(21): Selenocysteine
  MOD_RES (57)..(57): Selenocysteine
  MOD_RES (63)..(63): Selenocysteine
  MOD_RES (99)..(99): Selenocysteine
  MOD_RES (102)..(102): Selenocysteine
  MOD_RES (106)..(106): Selenocysteine
  MOD_RES (130)..(130): Selenocysteine
  MOD_RES (143)..(144): Selenocysteine
  MOD_RES (150)..(151): Selenocysteine
  MOD_RES (156)..(156): Selenocysteine
MERXAGKELALAPLQDWGEEXEDGAVYSVSLRRQRSQRRSPAEGPGGSQAPSPIANXFLHYRXSKVRVLRAARLERLVGELVFGDREQDPSFMPAFLAXYRXFVPXACLLGFLLPPMPPPPPPGVEIKKXAVQDLSFNKNLRXXLRISEXXLPIRXWAVSEPFWAGR

SEQ ID NO: 23388 - protein, 176 aa, Homo sapiens
  MOD_RES (9)..(9): Selenocysteine
  MOD_RES (21)..(21): Selenocysteine
  MOD_RES (27)..(27): Selenocysteine
  MOD_RES (63)..(63): Selenocysteine
  MOD_RES (66)..(66): Selenocysteine
  MOD_RES (70)..(70): Selenocysteine
  MOD_RES (94)..(94): Selenocysteine
  MOD_RES (137)..(137): Selenocysteine
  MOD_RES (176)..(176): Selenocysteine
MRRPGRKGXGGGQAPSPIANXFLHYRXSKVRVLRAARLERLVGELVFGDREQDPSFMPAFLAXYRXFVPXACLLGFLLPPMPPPPPPGVEIKKXAVQDLSFNKNLRAVVSVLGSWLQDHPQDFRDHPAHSDLGSVRXFLGWAAPGSAEAQKAEKLLEDFLEEAEREQEEEPPQVWX

SEQ ID NO: 23389 - protein, 77 aa, Homo sapiens
  MOD_RES (1)..(1): Any amino acid
  MOD_RES (20)..(20): Selenocysteine
  MOD_RES (24)..(24): Selenocysteine
  MOD_RES (30)..(30): Selenocysteine
  MOD_RES (32)..(32): Selenocysteine
  MOD_RES (64)..(64): Selenocysteine
  MOD_RES (71)..(71): Selenocysteine
XLGSVWSQRDRPGAAGASPXVRAXVAQFNXVXGCVLGSVLGAPGLAAPQRAQRLEKWIRIAQGXAIYFQEXFADFLR

SEQ ID NO: 23390 - protein, 250 aa, Homo sapiens
  MOD_RES (1)..(1): Any amino acid
  MOD_RES (3)..(3): Selenocysteine
  MOD_RES (20)..(20): Selenocysteine
  MOD_RES (56)..(56): Selenocysteine
  MOD_RES (62)..(62): Selenocysteine
  MOD_RES (98)..(98): Selenocysteine
  MOD_RES (101)..(101): Selenocysteine
  MOD_RES (105)..(105): Selenocysteine
  MOD_RES (129)..(129): Selenocysteine
  MOD_RES (172)..(172): Selenocysteine
  MOD_RES (218)..(218): Selenocysteine
  MOD_RES (220)..(220): Selenocysteine
  MOD_RES (241)..(241): Selenocysteine
  MOD_RES (245)..(245): Selenocysteine
XRXAGKELALAPLQDWGEEXEDGAVYSVSLRRQRSQRRSPAEGPGGSQAPSPIANXFLHYRXSKVRVLRAARLERLVGELVFGDREQDPSFMPAFLAXYRXFVPXACLLGFLLPPMPPPPPPGVEIKKXAVQDLSFNKNLRAVVSVLGSWLQDHPQDFRDHPAHSDLGSVRXFLGWAAPGSAEAQKAEKLLEDFLEEAEREQEEEPPQDLPELPKLLXQXLQRPARRKRKGSCLKVPSSWXSAWXRWPSS

SEQ ID NO: 23391 - protein, 337 aa, Homo sapiens
  MOD_RES (50)..(50): Selenocysteine
  MOD_RES (80)..(81): Selenocysteine
  MOD_RES (92)..(92): Selenocysteine
  MOD_RES (126)..(126): Selenocysteine
  MOD_RES (130)..(130): Selenocysteine
  MOD_RES (138)..(138): Selenocysteine
  MOD_RES (142)..(143): Selenocysteine
  MOD_RES (197)..(197): Selenocysteine
  MOD_RES (217)..(217): Selenocysteine
  MOD_RES (234)..(234): Selenocysteine
  MOD_RES (262)..(262): Selenocysteine
  MOD_RES (279)..(279): Selenocysteine
  MOD_RES (312)..(312): Selenocysteine
  MOD_RES (315)..(315): Selenocysteine
MPALEPAPPLLADLGPALEPESPAALGPPGYLHSAPGPAPAPGEGPPPGXVLEPQSAPESSCPCRGSVKNQPSEELPDMXXFPPRLLAEQLXLMDAELFKKVVLHECLGCIWGQGHLKGNEHMAPXVRAXIAHFNRLXNCIXXSCLGDHSMRARDRARVVEHWIKVARECLSLNNFSSVHVIVSALCSNPIGQLHKXWAGVSSKSMKELKELCKKDXAVKRDLLIKAGSFKVAXQERNPQRVQMRLRRQKKGVVPFLGDFLXELQRLDSAIPDDLDGNXNKRSKEVRVLQEMQLLQVAAMNYRLRPLEKFVXYFXRMEQLSDKESYKLSCQLEPENP

SEQ ID NO: 23392 - protein, 356 aa, Homo sapiens
  MOD_RES (50)..(50): Selenocysteine
  MOD_RES (80)..(81): Selenocysteine
  MOD_RES (92)..(92): Selenocysteine
  MOD_RES (126)..(126): Selenocysteine
  MOD_RES (130)..(130): Selenocysteine
  MOD_RES (138)..(138): Selenocysteine
  MOD_RES (142)..(143): Selenocysteine
  MOD_RES (197)..(197): Selenocysteine
  MOD_RES (217)..(217): Selenocysteine
  MOD_RES (234)..(234): Selenocysteine
  MOD_RES (262)..(262): Selenocysteine
  MOD_RES (279)..(279): Selenocysteine
  MOD_RES (312)..(312): Selenocysteine
  MOD_RES (315)..(315): Selenocysteine
  MOD_RES (329)..(329): Selenocysteine
  MOD_RES (353)..(353): Selenocysteine
MPALEPAPPLLADLGPALEPESPAALGPPGYLHSAPGPAPAPGEGPPPGXVLEPQSAPESSCPCRGSVKNQPSEELPDMXXFPPRLLAEQLXLMDAELFKKVVLHECLGCIWGQGHLKGNEHMAPXVRAXIAHFNRLXNCIXXSCLGDHSMRARDRARVVEHWIKVARECLSLNNFSSVHVIVSALCSNPIGQLHKXWAGVSSKSMKELKELCKKDXAVKRDLLIKAGSFKVAXQERNPQRVQMRLRRQKKGVVPFLGDFLXELQRLDSAIPDDLDGNXNKRSKEVRVLQEMQLLQVAAMNYRLRPLEKFVXYFXRMEQLSDKERWGFXMMSRIVSNSWPQAIHPPQPPKVLXLQV

SEQ ID NO: 23393 - protein, 410 aa, Homo sapiens
  MOD_RES (50)..(50): Selenocysteine
  MOD_RES (80)..(81): Selenocysteine
  MOD_RES (92)..(92): Selenocysteine
  MOD_RES (126)..(126): Selenocysteine
  MOD_RES (130)..(130): Selenocysteine
  MOD_RES (138)..(138): Selenocysteine
  MOD_RES (142)..(143): Selenocysteine
  MOD_RES (197)..(197): Selenocysteine
  MOD_RES (217)..(217): Selenocysteine
  MOD_RES (234)..(234): Selenocysteine
  MOD_RES (262)..(262): Selenocysteine
  MOD_RES (279)..(279): Selenocysteine
  MOD_RES (312)..(312): Selenocysteine
  MOD_RES (315)..(315): Selenocysteine
  MOD_RES (331)..(331): Selenocysteine
  MOD_RES (354)..(355): Selenocysteine
  MOD_RES (371)..(371): Selenocysteine
  MOD_RES (381)..(381): Selenocysteine
  MOD_RES (386)..(386): Selenocysteine
  MOD_RES (394)..(394): Selenocysteine
  MOD_RES (400)..(400): Selenocysteine
MPALEPAPPLLADLGPALEPESPAALGPPGYLHSAPGPAPAPGEGPPPGXVLEPQSAPESSCPCRGSVKNQPSEELPDMXXFPPRLLAEQLXLMDAELFKKVVLHECLGCIWGQGHLKGNEHMAPXVRAXIAHFNRLXNCIXXSCLGDHSMRARDRARVVEHWIKVARECLSLNNFSSVHVIVSALCSNPIGQLHKXWAGVSSKSMKELKELCKKDXAVKRDLLIKAGSFKVAXQERNPQRVQMRLRRQKKGVVPFLGDFLXELQRLDSAIPDDLDGNXNKRSKEVRVLQEMQLLQVAAMNYRLRPLEKFVXYFXRMEQLSDKERLHCSVXISVHCNVCLLGSSPSSASQAAGXXAVHHHVRLFCCCCSAXSCPASWSPKXRRLAXSCSGWEPXGMLARXPALHHPSPRP

SEQ ID NO: 23394 - protein, 435 aa, Homo sapiens
  MOD_RES (6)..(6): Selenocysteine
  MOD_RES (34)..(34): Selenocysteine
  MOD_RES (38)..(38): Selenocysteine
  MOD_RES (42)..(42): Selenocysteine
  MOD_RES (56)..(56): Selenocysteine
  MOD_RES (61)..(61): Selenocysteine
  MOD_RES (63)..(63): Selenocysteine
  MOD_RES (74)..(74): Selenocysteine
  MOD_RES (136)..(136): Selenocysteine
  MOD_RES (186)..(186): Selenocysteine
  MOD_RES (216)..(217): Selenocysteine
  MOD_RES (228)..(228): Selenocysteine
  MOD_RES (262)..(262): Selenocysteine
  MOD_RES (266)..(266): Selenocysteine
  MOD_RES (274)..(274): Selenocysteine
  MOD_RES (278)..(279): Selenocysteine
  MOD_RES (333)..(333): Selenocysteine
  MOD_RES (353)..(353): Selenocysteine
  MOD_RES (390)..(390): Selenocysteine
  MOD_RES (408)..(408): Selenocysteine
  MOD_RES (410)..(410): Selenocysteine
  MOD_RES (430)..(430): Selenocysteine
MRKLLXNLPAAAVLSAQVYSAVLQGLWEENVCGXPGRXRVCXALLYGQVCPFQDSXDGLRXIXSILFNWPPENXSVYYQPPQRSSFRIKLAFRNLSWPGLGLEDHQEIVLGQLVLPEPNEAKPDDPAPRPGQHALXMPALEPAPPLLADLGPALEPESPAALGPPGYLHSAPGPAPAPGEGPPPGXVLEPQSAPESSCPCRGSVKNQPSEELPDMXXFPPRLLAEQLXLMDAELFKKVVLHECLGCIWGQGHLKGNEHMAPXVRAXIAHFNRLXNCIXXSCLGDHSMRARDRARVVEHWIKVARECLSLNNFSSVHVIVSALCSNPIGQLHKXWAGVSSKSMKELKELCKKDXAVKRDLLIKRDDGENNGNSYRKLSPQRPCEVAVVCIXLYRRGNSLREARLQDWVXHXGSVDLGQWRGALRWPPRRGXPRESR

SEQ ID NO: 23395 - protein, 473 aa, Homo sapiens
  MOD_RES (6)..(6): Selenocysteine
  MOD_RES (34)..(34): Selenocysteine
  MOD_RES (38)..(38): Selenocysteine
  MOD_RES (42)..(42): Selenocysteine
  MOD_RES (56)..(56): Selenocysteine
  MOD_RES (61)..(61): Selenocysteine
  MOD_RES (63)..(63): Selenocysteine
  MOD_RES (74)..(74): Selenocysteine
  MOD_RES (136)..(136): Selenocysteine
  MOD_RES (186)..(186): Selenocysteine
  MOD_RES (216)..(217): Selenocysteine
  MOD_RES (228)..(228): Selenocysteine
  MOD_RES (262)..(262): Selenocysteine
  MOD_RES (266)..(266): Selenocysteine
  MOD_RES (274)..(274): Selenocysteine
  MOD_RES (278)..(279): Selenocysteine
  MOD_RES (333)..(333): Selenocysteine
  MOD_RES (353)..(353): Selenocysteine
  MOD_RES (370)..(370): Selenocysteine
  MOD_RES (398)..(398): Selenocysteine
  MOD_RES (415)..(415): Selenocysteine
  MOD_RES (448)..(448): Selenocysteine
  MOD_RES (451)..(451): Selenocysteine
MRKLLXNLPAAAVLSAQVYSAVLQGLWEENVCGXPGRXRVCXALLYGQVCPFQDSXDGLRXIXSILFNWPPENXSVYYQPPQRSSFRIKLAFRNLSWPGLGLEDHQEIVLGQLVLPEPNEAKPDDPAPRPGQHALXMPALEPAPPLLADLGPALEPESPAALGPPGYLHSAPGPAPAPGEGPPPGXVLEPQSAPESSCPCRGSVKNQPSEELPDMXXFPPRLLAEQLXLMDAELFKKVVLHECLGCIWGQGHLKGNEHMAPXVRAXIAHFNRLXNCIXXSCLGDHSMRARDRARVVEHWIKVARECLSLNNFSSVHVIVSALCSNPIGQLHKXWAGVSSKSMKELKELCKKDXAVKRDLLIKAGSFKVAXQERNPQRVQMRLRRQKKGVVPFLGDFLXELQRLDSAIPDDLDGNXNKRSKEVRVLQEMQLLQVAAMNYRLRPLEKFVXYFXRMEQLSDKESYKLSCQLEPENP

SEQ ID NO: 23396 - protein, 536 aa, Homo sapiens
  MOD_RES (6)..(6): Selenocysteine
  MOD_RES (34)..(34): Selenocysteine
  MOD_RES (38)..(38): Selenocysteine
  MOD_RES (42)..(42): Selenocysteine
  MOD_RES (56)..(56): Selenocysteine
  MOD_RES (61)..(61): Selenocysteine
  MOD_RES (63)..(63): Selenocysteine
  MOD_RES (74)..(74): Selenocysteine
  MOD_RES (136)..(136): Selenocysteine
  MOD_RES (186)..(186): Selenocysteine
  MOD_RES (216)..(217): Selenocysteine
  MOD_RES (228)..(228): Selenocysteine
  MOD_RES (262)..(262): Selenocysteine
  MOD_RES (266)..(266): Selenocysteine
  MOD_RES (274)..(274): Selenocysteine
  MOD_RES (278)..(279): Selenocysteine
  MOD_RES (333)..(333): Selenocysteine
  MOD_RES (353)..(353): Selenocysteine
  MOD_RES (370)..(370): Selenocysteine
  MOD_RES (398)..(398): Selenocysteine
  MOD_RES (415)..(415): Selenocysteine
  MOD_RES (448)..(448): Selenocysteine
  MOD_RES (451)..(451): Selenocysteine
  MOD_RES (465)..(465): Selenocysteine
  MOD_RES (489)..(489): Selenocysteine
  MOD_RES (526)..(526): Selenocysteine
MRKLLXNLPAAAVLSAQVYSAVLQGLWEENVCGXPGRXRVCXALLYGQVCPFQDSXDGLRXIXSILFNWPPENXSVYYQPPQRSSFRIKLAFRNLSWPGLGLEDHQEIVLGQLVLPEPNEAKPDDPAPRPGQHALXMPALEPAPPLLADLGPALEPESPAALGPPGYLHSAPGPAPAPGEGPPPGXVLEPQSAPESSCPCRGSVKNQPSEELPDMXXFPPRLLAEQLXLMDAELFKKVVLHECLGCIWGQGHLKGNEHMAPXVRAXIAHFNRLXNCIXXSCLGDHSMRARDRARVVEHWIKVARECLSLNNFSSVHVIVSALCSNPIGQLHKXWAGVSSKSMKELKELCKKDXAVKRDLLIKAGSFKVAXQERNPQRVQMRLRRQKKGVVPFLGDFLXELQRLDSAIPDDLDGNXNKRSKEVRVLQEMQLLQVAAMNYRLRPLEKFVXYFXRMEQLSDKERWGFXMMSRIVSNSWPQAIHPPQPPKVLXLQLQAVLPAGARKPVGWQHPAVAGNPPGCWPEHRLCXIPHPDRRHQG

SEQ ID NO: 23397 - protein, 155 aa, Homo sapiens
  MOD_RES (1)..(1): Any amino acid
  MOD_RES (8)..(8): Selenocysteine
  MOD_RES (28)..(28): Selenocysteine
  MOD_RES (36)..(36): Selenocysteine
  MOD_RES (42)..(42): Selenocysteine
  MOD_RES (52)..(52): Selenocysteine
  MOD_RES (80)..(80): Selenocysteine
  MOD_RES (97)..(97): Selenocysteine
  MOD_RES (130)..(130): Selenocysteine
  MOD_RES (133)..(133): Selenocysteine
XWASGMSXVPGGSRHSLGIQVRGGWGVXGGEEESLXVPVADXWQAGSFKVAXQERNPQRVQMRLRRQKKGVVPFLGDFLXELQRLDSAIPDDLDGNXNKRSKEVRVLQEMQLLQVAAMNYRLRPLEKFVXYFXRMEQLSDKESYKLSCQLEPENP

SEQ ID NO: 23398 - protein, 458 aa, Homo sapiens
  MOD_RES (11)..(11): Selenocysteine
  MOD_RES (19)..(19): Selenocysteine
  MOD_RES (41)..(41): Selenocysteine
  MOD_RES (53)..(53): Selenocysteine
  MOD_RES (69)..(69): Selenocysteine
  MOD_RES (80)..(80): Selenocysteine
  MOD_RES (94)..(94): Selenocysteine
  MOD_RES (97)..(97): Selenocysteine
  MOD_RES (100)..(100): Selenocysteine
  MOD_RES (129)..(129): Selenocysteine
  MOD_RES (136)..(136): Selenocysteine
  MOD_RES (165)..(165): Selenocysteine
  MOD_RES (169)..(169): Selenocysteine
  MOD_RES (181)..(181): Selenocysteine
  MOD_RES (183)..(183): Selenocysteine
  MOD_RES (188)..(188): Selenocysteine
  MOD_RES (208)..(208): Selenocysteine
  MOD_RES (210)..(210): Selenocysteine
  MOD_RES (219)..(219): Selenocysteine
  MOD_RES (221)..(221): Selenocysteine
  MOD_RES (225)..(225): Selenocysteine
  MOD_RES (270)..(270): Selenocysteine
  MOD_RES (287)..(288): Selenocysteine
  MOD_RES (299)..(299): Selenocysteine
  MOD_RES (340)..(340): Selenocysteine
  MOD_RES (345)..(345): Selenocysteine
  MOD_RES (358)..(358): Selenocysteine
  MOD_RES (362)..(362): Selenocysteine
  MOD_RES (367)..(367): Selenocysteine
  MOD_RES (392)..(393): Selenocysteine
  MOD_RES (399)..(399): Selenocysteine
  MOD_RES (425)..(425): Selenocysteine
MGGLGPRRAGXSRERLVVXGRAGWMGMGRGAGRSALGFWPXLAFLLCSFPAAXSPCKILKCNSEFWSAXSGSHAPASDDXPEFCAALRSYALCXRRXARXCRGDLAYHSAVHGIEDLMSQHNCSKDGPXSQPRLRXLPPAGDSQERSDSPEICHYEKSFHKHSAXPNYXHCGLFGDPHLRXFXDRFQXCKVQGAWPLIDNNYLNVQVXNXPVLPGSAAXAXSKLXIIFKNFQECVDQKVYQAEMDELPAAFVDGSKNGGDKHGANSLKIXEKVSGQHVEIQAKYIGXXIVVRQVGRYLXFAVRMPEEVVNAVEDWDSQGLYLCLRGCPLNQQIDFQAFHXNAEGXGARRLAAASPAPXAPEXFPYEXAVAKCKEKLPVEDLYYQACVFDLLXXGDVNFXLAAYYALEDVKMLHSNKDKLHLYERXRDLPGRAAAGLPLAPRPLLGALVPLLALLPVFC

SEQ ID NO: 23399 - protein, 10 aa, Homo sapiens
MGMGRGAGRS

SEQ ID NO: 23400 - protein, 46 aa, Homo sapiens
  MOD_RES (17)..(17): Selenocysteine
MGMGRGAGRSALGFWPXLAFLLCSFPAAHHHLQELPGVCGPEGVPG

SEQ ID NO: 23401 - protein, 61 aa, Homo sapiens
  MOD_RES (17)..(17): Selenocysteine
MGMGRGAGRSALGFWPXLAFLLCSFPAAIKRSPGSFCAALEMRRLWNLMSWKERRVQKPLM

SEQ ID NO: 23402 - protein, 90 aa, Homo sapiens
  MOD_RES (17)..(17): Selenocysteine
  MOD_RES (29)..(29): Selenocysteine
  MOD_RES (45)..(45): Selenocysteine
  MOD_RES (56)..(56): Selenocysteine
  MOD_RES (70)..(70): Selenocysteine
  MOD_RES (73)..(73): Selenocysteine
  MOD_RES (76)..(76): Selenocysteine
MGMGRGAGRSALGFWPXLAFLLCSFPAAXSPCKILKCNSEFWSAXSGSHAPASDDXPEFCAALRSYALCXRRXARXCRGDLAYHSAVHGI

SEQ ID NO: 23403 - protein, 434 aa, Homo sapiens
  MOD_RES (17)..(17): Selenocysteine
  MOD_RES (29)..(29): Selenocysteine
  MOD_RES (45)..(45): Selenocysteine
  MOD_RES (56)..(56): Selenocysteine
  MOD_RES (70)..(70): Selenocysteine
  MOD_RES (73)..(73): Selenocysteine
  MOD_RES (76)..(76): Selenocysteine
  MOD_RES (105)..(105): Selenocysteine
  MOD_RES (112)..(112): Selenocysteine
  MOD_RES (141)..(141): Selenocysteine
  MOD_RES (145)..(145): Selenocysteine
  MOD_RES (157)..(157): Selenocysteine
  MOD_RES (159)..(159): Selenocysteine
  MOD_RES (164)..(164): Selenocysteine
  MOD_RES (184)..(184): Selenocysteine
  MOD_RES (186)..(186): Selenocysteine
  MOD_RES (195)..(195): Selenocysteine
  MOD_RES (197)..(197): Selenocysteine
  MOD_RES (201)..(201): Selenocysteine
  MOD_RES (246)..(246): Selenocysteine
  MOD_RES (263)..(264): Selenocysteine
  MOD_RES (275)..(275): Selenocysteine
  MOD_RES (316)..(316): Selenocysteine
  MOD_RES (321)..(321): Selenocysteine
  MOD_RES (334)..(334): Selenocysteine
  MOD_RES (338)..(338): Selenocysteine
  MOD_RES (343)..(343): Selenocysteine
  MOD_RES (368)..(369): Selenocysteine
  MOD_RES (375)..(375): Selenocysteine
  MOD_RES (401)..(401): Selenocysteine
MGMGRGAGRSALGFWPXLAFLLCSFPAAXSPCKILKCNSEFWSAXSGSHAPASDDXPEFCAALRSYALCXRRXARXCRGDLAYHSAVHGIEDLMSQHNCSKDGPXSQPRLRXLPPAGDSQERSDSPEICHYEKSFHKHSAXPNYXHCGLFGDPHLRXFXDRFQXCKVQGAWPLIDNNYLNVQVXNXPVLPGSAAXAXSKLXIIFKNFQECVDQKVYQAEMDELPAAFVDGSKNGGDKHGANSLKIXEKVSGQHVEIQAKYIGXXIVVRQVGRYLXFAVRMPEEVVNAVEDWDSQGLYLCLRGCPLNQQIDFQAFHXNAEGXGARRLAAASPAPXAPEXFPYEXAVAKCKEKLPVEDLYYQACVFDLLXXGDVNFXLAAYYALEDVKMLHSNKDKLHLYERXRDLPGRAAAGLPLAPRPLLGALVPLLALLPVFC

SEQ ID NO: 23404 - protein, 450 aa, Homo sapiens
  MOD_RES (11)..(11): Selenocysteine
  MOD_RES (33)..(33): Selenocysteine
  MOD_RES (45)..(45): Selenocysteine
  MOD_RES (61)..(61): Selenocysteine
  MOD_RES (72)..(72): Selenocysteine
  MOD_RES (86)..(86): Selenocysteine
  MOD_RES (89)..(89): Selenocysteine
  MOD_RES (92)..(92): Selenocysteine
  MOD_RES (121)..(121): Selenocysteine
  MOD_RES (128)..(128): Selenocysteine
  MOD_RES (157)..(157): Selenocysteine
  MOD_RES (161)..(161): Selenocysteine
  MOD_RES (173)..(173): Selenocysteine
  MOD_RES (175)..(175): Selenocysteine
  MOD_RES (180)..(180): Selenocysteine
  MOD_RES (200)..(200): Selenocysteine
  MOD_RES (202)..(202): Selenocysteine
  MOD_RES (211)..(211): Selenocysteine
  MOD_RES (213)..(213): Selenocysteine
  MOD_RES (217)..(217): Selenocysteine
  MOD_RES (262)..(262): Selenocysteine
  MOD_RES (279)..(280): Selenocysteine
  MOD_RES (291)..(291): Selenocysteine
  MOD_RES (332)..(332): Selenocysteine
  MOD_RES (337)..(337): Selenocysteine
  MOD_RES (350)..(350): Selenocysteine
  MOD_RES (354)..(354): Selenocysteine
  MOD_RES (359)..(359): Selenocysteine
  MOD_RES (384)..(385): Selenocysteine
  MOD_RES (391)..(391): Selenocysteine
  MOD_RES (417)..(417): Selenocysteine
MQPPRERLVVXGRAGWMGMGRGAGRSALGFWPXLAFLLCSFPAAXSPCKILKCNSEFWSAXSGSHAPASDDXPEFCAALRSYALCXRRXARXCRGDLAYHSAVHGIEDLMSQHNCSKDGPXSQPRLRXLPPAGDSQERSDSPEICHYEKSFHKHSAXPNYXHCGLFGDPHLRXFXDRFQXCKVQGAWPLIDNNYLNVQVXNXPVLPGSAAXAXSKLXIIFKNFQECVDQKVYQAEMDELPAAFVDGSKNGGDKHGANSLKIXEKVSGQHVEIQAKYIGXXIVVRQVGRYLXFAVRMPEEVVNAVEDWDSQGLYLCLRGCPLNQQIDFQAFHXNAEGXGARRLAAASPAPXAPEXFPYEXAVAKCKEKLPVEDLYYQACVFDLLXXGDVNFXLAAYYALEDVKMLHSNKDKLHLYERXRDLPGRAAAGLPLAPRPLLGALVPLLALLPVFC

SEQ ID NO: 23405 - protein, 341 aa, Homo sapiens
  MOD_RES (12)..(12): Selenocysteine
  MOD_RES (19)..(19): Selenocysteine
  MOD_RES (48)..(48): Selenocysteine
  MOD_RES (52)..(52): Selenocysteine
  MOD_RES (64)..(64): Selenocysteine
  MOD_RES (66)..(66): Selenocysteine
  MOD_RES (71)..(71): Selenocysteine
  MOD_RES (91)..(91): Selenocysteine
  MOD_RES (93)..(93): Selenocysteine
  MOD_RES (102)..(102): Selenocysteine
  MOD_RES (104)..(104): Selenocysteine
  MOD_RES (108)..(108): Selenocysteine
  MOD_RES (153)..(153): Selenocysteine
  MOD_RES (170)..(171): Selenocysteine
  MOD_RES (182)..(182): Selenocysteine
  MOD_RES (223)..(223): Selenocysteine
  MOD_RES (228)..(228): Selenocysteine
  MOD_RES (241)..(241): Selenocysteine
  MOD_RES (245)..(245): Selenocysteine
  MOD_RES (250)..(250): Selenocysteine
  MOD_RES (275)..(276): Selenocysteine
  MOD_RES (282)..(282): Selenocysteine
  MOD_RES (308)..(308): Selenocysteine
MSQHNCSKDGPXSQPRLRXLPPAGDSQERSDSPEICHYEKSFHKHSAXPNYXHCGLFGDPHLRXFXDRFQXCKVQGAWPLIDNNYLNVQVXNXPVLPGSAAXAXSKLXIIFKNFQECVDQKVYQAEMDELPAAFVDGSKNGGDKHGANSLKIXEKVSGQHVEIQAKYIGXXIVVRQVGRYLXFAVRMPEEVVNAVEDWDSQGLYLCLRGCPLNQQIDFQAFHXNAEGXGARRLAAASPAPXAPEXFPYEXAVAKCKEKLPVEDLYYQACVFDLLXXGDVNFXLAAYYALEDVKMLHSNKDKLHLYERXRDLPGRAAAGLPLAPRPLLGALVPLLALLPVFC

SEQ ID NO: 23406 - protein, 437 aa, Homo sapiens
  MOD_RES (60)..(61): Selenocysteine
  MOD_RES (67)..(67): Selenocysteine
  MOD_RES (92)..(92): Selenocysteine
  MOD_RES (95)..(95): Selenocysteine
  MOD_RES (127)..(127): Selenocysteine
  MOD_RES (130)..(130): Selenocysteine
  MOD_RES (135)..(135): Selenocysteine
  MOD_RES (173)..(173): Selenocysteine
  MOD_RES (180)..(180): Selenocysteine
  MOD_RES (200)..(200): Selenocysteine
  MOD_RES (211)..(211): Selenocysteine
  MOD_RES (213)..(213): Selenocysteine
  MOD_RES (217)..(217): Selenocysteine
  MOD_RES (227)..(227): Selenocysteine
  MOD_RES (236)..(236): Selenocysteine
  MOD_RES (247)..(248): Selenocysteine
  MOD_RES (278)..(279): Selenocysteine
  MOD_RES (290)..(290): Selenocysteine
  MOD_RES (340)..(340): Selenocysteine
  MOD_RES (350)..(350): Selenocysteine
  MOD_RES (353)..(353): Selenocysteine
  MOD_RES (356)..(356): Selenocysteine
  MOD_RES (378)..(379): Selenocysteine
  MOD_RES (385)..(385): Selenocysteine
  MOD_RES (415)..(415): Selenocysteine
  MOD_RES (429)..(429): Selenocysteine
MGLRAAPSSAAAAAAEVEQRRSPGLCPPPLELLLLLLFSLGLLHAGDCQQPAQCRIQKCXXDFVSLXSHLNSAVDGFDSEFCKALRAYAGCXQRXSKACRGNLVYHSAVLGISDLMSQRNCSKDGPXSSXNPEVXHDPCNYHSHAGAREHRRGDQNPPSYLFCGLFGDPHLRXFKDNFQXCKVEGAWPLIDNNYLSVQVXNVPVVPGSSAXAXNKIXIIFKAHHECXDQKVYQAVXDDLPAAFVDGXXSGGDSDAKSLRIVERESGHYVEMHARYIGXXVFVRQVGRYLXLAIRMPEDLAMSYEESQDLQLCVNGCPLSERIDDGQGQVSAILGHSLPRXSLVQAWPGYXLEXANXQCHEKMPVKDIYFQSCVFDLLXXGDANFXAAAHSALEDVEALHPRKERWHIFPSSGNGXPRGGSDLSVSLGLXCLILIVFL

SEQ ID NO: 23407 - protein, 478 aa, Homo sapiens
  MOD_RES (24)..(24): Selenocysteine
  MOD_RES (35)..(35): Selenocysteine
  MOD_RES (40)..(40): Selenocysteine
  MOD_RES (101)..(102): Selenocysteine
  MOD_RES (108)..(108): Selenocysteine
  MOD_RES (133)..(133): Selenocysteine
  MOD_RES (136)..(136): Selenocysteine
  MOD_RES (168)..(168): Selenocysteine
  MOD_RES (171)..(171): Selenocysteine
  MOD_RES (176)..(176): Selenocysteine
  MOD_RES (214)..(214): Selenocysteine
  MOD_RES (221)..(221): Selenocysteine
  MOD_RES (241)..(241): Selenocysteine
  MOD_RES (252)..(252): Selenocysteine
  MOD_RES (254)..(254): Selenocysteine
  MOD_RES (258)..(258): Selenocysteine
  MOD_RES (268)..(268): Selenocysteine
  MOD_RES (277)..(277): Selenocysteine
  MOD_RES (288)..(289): Selenocysteine
  MOD_RES (319)..(320): Selenocysteine
  MOD_RES (331)..(331): Selenocysteine
  MOD_RES (381)..(381): Selenocysteine
  MOD_RES (391)..(391): Selenocysteine
  MOD_RES (394)..(394): Selenocysteine
  MOD_RES (397)..(397): Selenocysteine
  MOD_RES (419)..(420): Selenocysteine
  MOD_RES (426)..(426): Selenocysteine
  MOD_RES (456)..(456): Selenocysteine
  MOD_RES (470)..(470): Selenocysteine
MIRKKRKRSAPPGPCRSHGPRPAXAPAPPPSPEPXRPAWXGMGLRAAPSSAAAAAAEVEQRRSPGLCPPPLELLLLLLFSLGLLHAGDCQQPAQCRIQKCXXDFVSLXSHLNSAVDGFDSEFCKALRAYAGCXQRXSKACRGNLVYHSAVLGISDLMSQRNCSKDGPXSSXNPEVXHDPCNYHSHAGAREHRRGDQNPPSYLFCGLFGDPHLRXFKDNFQXCKVEGAWPLIDNNYLSVQVXNVPVVPGSSAXAXNKIXIIFKAHHECXDQKVYQAVXDDLPAAFVDGXXSGGDSDAKSLRIVERESGHYVEMHARYIGXXVFVRQVGRYLXLAIRMPEDLAMSYEESQDLQLCVNGCPLSERIDDGQGQVSAILGHSLPRXSLVQAWPGYXLEXANXQCHEKMPVKDIYFQSCVFDLLXXGDANFXAAAHSALEDVEALHPRKERWHIFPSSGNGXPRGGSDLSVSLGLXCLILIVFL

SEQ ID NO: 23408 - protein, 227 aa, Homo sapiens
  MOD_RES (46)..(46): Selenocysteine
  MOD_RES (53)..(53): Selenocysteine
  MOD_RES (72)..(72): Selenocysteine
  MOD_RES (75)..(75): Selenocysteine
  MOD_RES (92)..(92): Selenocysteine
  MOD_RES (159)..(159): Selenocysteine
  MOD_RES (165)..(165): Selenocysteine
  MOD_RES (173)..(174): Selenocysteine
  MOD_RES (189)..(189): Selenocysteine
  MOD_RES (213)..(213): Selenocysteine
MSSIKIECVLPENCRCGESPVWEEVSNSLLFVDIPAKKVCRWDSFXKQVQRVXMDAPVSSVALRQSGGYVAXIGXKFCALNWKEQSAVVLAXVDNDKKNNRFNDGKVDPAGRYFAANRRSVYKLEKEEQIPDGMCIDAEGKLWVACYNGGRVIRLDPVXGKRLQXVKLPVDKXXSCCFGGKNYSEMYVXCARDGMDPEGLLRQPEAGGIFKIXGLGVKGIAPYSYAG

SEQ ID NO: 23409 - protein, 299 aa, Homo sapiens
  MOD_RES (46)..(46): Selenocysteine
  MOD_RES (53)..(53): Selenocysteine
  MOD_RES (72)..(72): Selenocysteine
  MOD_RES (75)..(75): Selenocysteine
  MOD_RES (92)..(92): Selenocysteine
  MOD_RES (117)..(117): Selenocysteine
  MOD_RES (122)..(122): Selenocysteine
  MOD_RES (184)..(184): Selenocysteine
  MOD_RES (231)..(231): Selenocysteine
  MOD_RES (237)..(237): Selenocysteine
  MOD_RES (245)..(246): Selenocysteine
  MOD_RES (261)..(261): Selenocysteine
  MOD_RES (285)..(285): Selenocysteine
MSSIKIECVLPENCRCGESPVWEEVSNSLLFVDIPAKKVCRWDSFXKQVQRVXMDAPVSSVALRQSGGYVAXIGXKFCALNWKEQSAVVLAXVDNDKKNNRFNDGKVDPAGRYFAGXMAEEXAPAVLERHQGALYSLFPDHHVKKYFDQVDISNGLDWSLDHKIFYYIDSLSYSVDAFDYDLQXGQISNRRSVYKLEKEEQIPDGMCIDAEGKLWVACYNGGRVIRLDPVXGKRLQXVKLPVDKXXSCCFGGKNYSEMYVXCARDGMDPEGLLRQPEAGGIFKIXGLGVKGIAPYSYAG

SEQ ID NO: 23410 - protein, 253 aa, Homo sapiens
  MOD_RES (4)..(4): Selenocysteine
  MOD_RES (9)..(9): Selenocysteine
  MOD_RES (35)..(35): Selenocysteine
  MOD_RES (37)..(37): Selenocysteine
  MOD_RES (44)..(44): Selenocysteine
  MOD_RES (49)..(49): Selenocysteine
  MOD_RES (74)..(74): Selenocysteine
  MOD_RES (98)..(98): Selenocysteine
  MOD_RES (119)..(119): Selenocysteine
  MOD_RES (160)..(160): Selenocysteine
  MOD_RES (163)..(163): Selenocysteine
  MOD_RES (174)..(174): Selenocysteine
  MOD_RES (179)..(179): Selenocysteine
  MOD_RES (192)..(192): Selenocysteine
  MOD_RES (194)..(194): Selenocysteine
  MOD_RES (221)..(221): Selenocysteine
  MOD_RES (252)..(252): Selenocysteine
MAEXSALPXGFGELEVLAVGMVLLVEALSGLSLNXLXIFSFCKXPELRXPCHLLVLSLALADSGISLNALVAAXSSLLRRWPYGSDGCQAHGFQGFVXALASICSSAAIAWGRYHHYCXRSQLAWNSAVSLVLFVWLSSAFWAALPLLGWGHYDYEPLGXCCXLDYSKGDRNFXSFLFXMSFFNFAMPLFIXIXSYSLMEQKLGKSGHLQVPALIAKMVPXINAINYALGNEMVCRGIWQCLSPQKREKDRXK

SEQ ID NO: 23411 - protein, 295 aa, Homo sapiens
  MOD_RES (4)..(4): Selenocysteine
  MOD_RES (9)..(9): Selenocysteine
  MOD_RES (35)..(35): Selenocysteine
  MOD_RES (37)..(37): Selenocysteine
  MOD_RES (44)..(44): Selenocysteine
  MOD_RES (49)..(49): Selenocysteine
  MOD_RES (74)..(74): Selenocysteine
  MOD_RES (102)..(102): Selenocysteine
  MOD_RES (123)..(123): Selenocysteine
  MOD_RES (164)..(164): Selenocysteine
  MOD_RES (167)..(167): Selenocysteine
  MOD_RES (178)..(178): Selenocysteine
  MOD_RES (183)..(183): Selenocysteine
  MOD_RES (196)..(196): Selenocysteine
  MOD_RES (198)..(198): Selenocysteine
  MOD_RES (217)..(218): Selenocysteine
  MOD_RES (223)..(223): Selenocysteine
  MOD_RES (244)..(244): Selenocysteine
  MOD_RES (263)..(263): Selenocysteine
  MOD_RES (294)..(294): Selenocysteine
MAEXSALPXGFGELEVLAVGMVLLVEALSGLSLNXLXIFSFCKXPELRXPCHLLVLSLALADSGISLNALVAAXSSLLRVSHRRWPYGSDGCQAHGFQGFVXALASICSSAAIAWGRYHHYCXRSQLAWNSAVSLVLFVWLSSAFWAALPLLGWGHYDYEPLGXCCXLDYSKGDRNFXSFLFXMSFFNFAMPLFIXIXSYSLMEQKLGKSGHLQVNXXLPARXLLLGWGPYAILYLYAVIADVXSISPKLQMVPALIAKMVPXINAINYALGNEMVCRGIWQCLSPQKREKDRXK

SEQ ID NO: 23412 - protein, 120 aa, Homo sapiens
  MOD_RES (4)..(4): Selenocysteine
  MOD_RES (9)..(9): Selenocysteine
  MOD_RES (37)..(37): Selenocysteine
MAEXSALPXGFGELEVLAVGMVLLVEDPGAADSLPPXGAELGSCGQWDQPECPRCSHIQPSPCLPQALALRLGRLPGSRLPGLCDSVGQHLQQCSHRMGALSPLLHPPKCCHRSHHFEWR

SEQ ID NO: 23413 - protein, 209 aa, Homo sapiens
  MOD_RES (8)..(8): Selenocysteine
  MOD_RES (29)..(30): Selenocysteine
  MOD_RES (45)..(45): Selenocysteine
  MOD_RES (94)..(94): Selenocysteine
  MOD_RES (124)..(124): Selenocysteine
  MOD_RES (155)..(155): Selenocysteine
  MOD_RES (159)..(159): Selenocysteine
  MOD_RES (167)..(167): Selenocysteine
  MOD_RES (169)..(169): Selenocysteine
  MOD_RES (180)..(180): Selenocysteine
MRAAAISXPKLDKMPGMFFSANPKELKGXXHSLLDDKMQKRRPKXFGMDMKAYLRSMIPHLESGMKSSKSKDVLSAAEVMQWSQSLEKLLANQXGQNVFGSFLKSEFSEENIEFWLACEDYKKXESDLLPCKAEEIYKAFVHSDAAKQINIDFRXRESXAKKIKAPXPXCFDEAQKVIYXLMEKDSYPRFLKSDIYLNLLNDLQANSLK

SEQ ID NO: 23414 - protein, 169 aa, Homo sapiens
  MOD_RES (8)..(8): Selenocysteine
  MOD_RES (29)..(30): Selenocysteine
  MOD_RES (45)..(45): Selenocysteine
  MOD_RES (94)..(94): Selenocysteine
  MOD_RES (124)..(124): Selenocysteine
MRAAAISXPKLDKMPGMFFSANPKELKGXXHSLLDDKMQKRRPKXFGMDMKAYLRSMIPHLESGMKSSKSKDVLSAAEVMQWSQSLEKLLANQXGQNVFGSFLKSEFSEENIEFWLACEDYKKXESDLLPCKAEEIYKAFVHSDAAKQVSIKLIIISFSIKDPICRNNI

SEQ ID NO: 23415 - protein, 167 aa, Homo sapiens
  MOD_RES (21)..(21): Selenocysteine
  MOD_RES (70)..(70): Selenocysteine
  MOD_RES (82)..(82): Selenocysteine
  MOD_RES (144)..(144): Selenocysteine
  MOD_RES (156)..(156): Selenocysteine
  MOD_RES (167)..(167): Selenocysteine
MEHIHDSDGSSSSSHQSLKSXAKWAASLENLLEDPEGVKRFREFLKKEFSEENVLFWLACEDFKKMQDKXQMQEKAKEIYMXFLSSKASSQVNVEGQSRLNEKILEEPHPLMFQKLQDQIFNLMKYDSYSRFLKSDLFLKHKRXEEEEEDLPDAQXAAKRASRIYNX

SEQ ID NO: 23416 - protein, 181 aa, Homo sapiens
  MOD_RES (35)..(35): Selenocysteine
  MOD_RES (84)..(84): Selenocysteine
  MOD_RES (96)..(96): Selenocysteine
  MOD_RES (158)..(158): Selenocysteine
  MOD_RES (170)..(170): Selenocysteine
  MOD_RES (181)..(181): Selenocysteine
MFNRAVSRLSRKRPPSDIHDSDGSSSSSHQSLKSXAKWAASLENLLEDPEGVKRFREFLKKEFSEENVLFWLACEDFKKMQDKXQMQEKAKEIYMXFLSSKASSQVNVEGQSRLNEKILEEPHPLMFQKLQDQIFNLMKYDSYSRFLKSDLFLKHKRXEEEEEDLPDAQXAAKRASRIYNX

SEQ ID NO: 23417 - protein, 173 aa, Homo sapiens
  MOD_RES (27)..(27): Selenocysteine
  MOD_RES (76)..(76): Selenocysteine
  MOD_RES (88)..(88): Selenocysteine
  MOD_RES (150)..(150): Selenocysteine
  MOD_RES (162)..(162): Selenocysteine
  MOD_RES (173)..(173): Selenocysteine
MQSELCFADIHDSDGSSSSSHQSLKSXAKWAASLENLLEDPEGVKRFREFLKKEFSEENVLFWLACEDFKKMQDKXQMQEKAKEIYMXFLSSKASSQVNVEGQSRLNEKILEEPHPLMFQKLQDQIFNLMKYDSYSRFLKSDLFLKHKRXEEEEEDLPDAQXAAKRASRIYNX

SEQ ID NO: 23418 - protein, 467 aa, Homo sapiens
  MOD_RES (46)..(46): Selenocysteine
  MOD_RES (53)..(53): Selenocysteine
  MOD_RES (101)..(101): Selenocysteine
  MOD_RES (107)..(107): Selenocysteine
  MOD_RES (112)..(112): Selenocysteine
  MOD_RES (114)..(114): Selenocysteine
  MOD_RES (137)..(137): Selenocysteine
  MOD_RES (188)..(188): Selenocysteine
  MOD_RES (220)..(220): Selenocysteine
  MOD_RES (240)..(240): Selenocysteine
  MOD_RES (288)..(288): Selenocysteine
  MOD_RES (293)..(293): Selenocysteine
  MOD_RES (349)..(349): Selenocysteine
  MOD_RES (373)..(373): Selenocysteine
  MOD_RES (377)..(377): Selenocysteine
  MOD_RES (435)..(435): Selenocysteine
  MOD_RES (450)..(450): Selenocysteine
  MOD_RES (455)..(455): Selenocysteine
MAAGPAPPPGRPRAQMPHLRKMERVVVSMQDPDQGVKMRSQRLLVXVIPHAVXGSDVVQWLAQKFCVSEEEALHLGAVLVQHGYIYPLRDPRSLMLRPDEXPYRFQXPYFWXSXLRPAAELDYAIYLAKKNIRKRGXLVDYEKDCYDRLHKKINHAWDLVLMQAREQLRAAKQRSKGDRLVIACQEQXYWLVNRPPPGAPDVLEQGPGRGSCAASRVLMXKSADFHKREIEYFRKALGRXRVKSSVCLEAYLSFCGQRGPHDPLVSGCLPSNPWISDNDAYWVMNAPXVAAPXKLRVERWGFSFRELLEDPVGRAHFMDFLGKEFSGENLSFWEACEELRYGAQAQVPXLVDAVYEQFLAPGAAHWVNIDSRXMEQXLEGLRQPHRYVLDDAQLHIYMLMKKDSYPRFLKSDMYKALLAEAGIPLEMKRRVFPFXWRPRHSSPSPALLPXPVEPXAACGPGGGDGVA

SEQ ID NO: 23419 - protein, 456 aa, Homo sapiens
  MOD_RES (46)..(46): Selenocysteine
  MOD_RES (53)..(53): Selenocysteine
  MOD_RES (101)..(101): Selenocysteine
  MOD_RES (126)..(126): Selenocysteine
  MOD_RES (177)..(177): Selenocysteine
  MOD_RES (209)..(209): Selenocysteine
  MOD_RES (229)..(229): Selenocysteine
  MOD_RES (277)..(277): Selenocysteine
  MOD_RES (282)..(282): Selenocysteine
  MOD_RES (338)..(338): Selenocysteine
  MOD_RES (362)..(362): Selenocysteine
  MOD_RES (366)..(366): Selenocysteine
  MOD_RES (424)..(424): Selenocysteine
  MOD_RES (439)..(439): Selenocysteine
  MOD_RES (444)..(444): Selenocysteine
MAAGPAPPPGRPRAQMPHLRKMERVVVSMQDPDQGVKMRSQRLLVXVIPHAVXGSDVVQWLAQKFCVSEEEALHLGAVLVQHGYIYPLRDPRSLMLRPDEXPYRFQVRLGGAAIYLAKKNIRKRGXLVDYEKDCYDRLHKKINHAWDLVLMQAREQLRAAKQRSKGDRLVIACQEQXYWLVNRPPPGAPDVLEQGPGRGSCAASRVLMXKSADFHKREIEYFRKALGRXRVKSSVCLEAYLSFCGQRGPHDPLVSGCLPSNPWISDNDAYWVMNAPXVAAPXKLRVERWGFSFRELLEDPVGRAHFMDFLGKEFSGENLSFWEACEELRYGAQAQVPXLVDAVYEQFLAPGAAHWVNIDSRXMEQXLEGLRQPHRYVLDDAQLHIYMLMKKDSYPRFLKSDMYKALLAEAGIPLEMKRRVFPFXWRPRHSSPSPALLPXPVEPXAACGPGGGDGVA

SEQ ID NO: 23420 - protein, 84 aa, Homo sapiens
  MOD_RES (25)..(25): Selenocysteine
  MOD_RES (32)..(32): Selenocysteine
  MOD_RES (78)..(78): Selenocysteine
MERVVVSMQDPDQGVKMRSQRLLVXVIPHAVXGSDVVQWLAQKFCVSEEDPVLLDKYPEAGCRAGLCHLPGQEEHPKXGDPGGL

SEQ ID NO: 23421 - protein, 446 aa, Homo sapiens
  MOD_RES (25)..(25): Selenocysteine
  MOD_RES (32)..(32): Selenocysteine
  MOD_RES (80)..(80): Selenocysteine
  MOD_RES (86)..(86): Selenocysteine
  MOD_RES (91)..(91): Selenocysteine
  MOD_RES (93)..(93): Selenocysteine
  MOD_RES (116)..(116): Selenocysteine
  MOD_RES (167)..(167): Selenocysteine
  MOD_RES (199)..(199): Selenocysteine
  MOD_RES (219)..(219): Selenocysteine
  MOD_RES (267)..(267): Selenocysteine
  MOD_RES (272)..(272): Selenocysteine
  MOD_RES (328)..(328): Selenocysteine
  MOD_RES (352)..(352): Selenocysteine
  MOD_RES (356)..(356): Selenocysteine
  MOD_RES (414)..(414): Selenocysteine
  MOD_RES (429)..(429): Selenocysteine
  MOD_RES (434)..(434): Selenocysteine
MERVVVSMQDPDQGVKMRSQRLLVXVIPHAVXGSDVVQWLAQKFCVSEEEALHLGAVLVQHGYIYPLRDPRSLMLRPDEXPYRFQXPYFWXSXLRPAAELDYAIYLAKKNIRKRGXLVDYEKDCYDRLHKKINHAWDLVLMQAREQLRAAKQRSKGDRLVIACQEQXYWLVNRPPPGAPDVLEQGPGRGSCAASRVLMXKSADFHKREIEYFRKALGRXRVKSSVCLEAYLSFCGQRGPHDPLVSGCLPSNPWISDNDAYWVMNAPXVAAPXKLRVERWGFSFRELLEDPVGRAHFMDFLGKEFSGENLSFWEACEELRYGAQAQVPXLVDAVYEQFLAPGAAHWVNIDSRXMEQXLEGLRQPHRYVLDDAQLHIYMLMKKDSYPRFLKSDMYKALLAEAGIPLEMKRRVFPFXWRPRHSSPSPALLPXPVEPXAACGPGGGDGVA

SEQ ID NO: 23422 - protein, 667 aa, Homo sapiens
  MOD_RES (35)..(35): Selenocysteine
  MOD_RES (177)..(177): Selenocysteine
  MOD_RES (243)..(243): Selenocysteine
  MOD_RES (273)..(273): Selenocysteine
  MOD_RES (285)..(285): Selenocysteine
  MOD_RES (316)..(316): Selenocysteine
  MOD_RES (319)..(319): Selenocysteine
  MOD_RES (335)..(335): Selenocysteine
  MOD_RES (364)..(364): Selenocysteine
  MOD_RES (369)..(369): Selenocysteine
  MOD_RES (418)..(418): Selenocysteine
  MOD_RES (473)..(473): Selenocysteine
  MOD_RES (492)..(492): Selenocysteine
  MOD_RES (526)..(526): Selenocysteine
  MOD_RES (551)..(551): Selenocysteine
  MOD_RES (558)..(558): Selenocysteine
  MOD_RES (561)..(561): Selenocysteine
  MOD_RES (571)..(571): Selenocysteine
  MOD_RES (622)..(622): Selenocysteine
  MOD_RES (635)..(635): Selenocysteine
  MOD_RES (638)..(638): Selenocysteine
  MOD_RES (644)..(644): Selenocysteine
  MOD_RES (659)..(659): Selenocysteine
MFRAGEASKRPLPGPSPPRVRSVEVARGRAGYGFXLSGQAPCVLSCVMRGSPADFVGLRAGDQILAVNEINVKKASHEDVVKLIGKCSGVLHMVIAEGVGRFESCSSDEEGGLYEGKGWLKPKLDSKALGINRAERVVEEMQSGGIFNMIFENPSLCASNSEPLKLKQRSLSESAAXRFDVGHESINNPNPNMLSKEEISKVIHDDSVFSIGLESHDDFALDASILNVAMIVGYLGSIELPSXSSNLESDSLQAIRGCMRRLRAEQKIHSLVXMKIMHDCVQLSXDKAGVVAEYPAEKLAFSAVCPDDRRFFGLVXMQXNDDGSLAQEEEGALRXSCHVFMVDPDLFNHKIHQGIARRFGFECXADPDXNGCLEFPASSLPVLQFISVLYRDMGELIEGMRARAFLDGDADAHQNNSXSSNSDSGIGNFHQEEKSNRVLVVDLGGSSSRHGPGGSAWDGVGGRGAQPWGAPWXGPFCPDPEGSPPFEAAHQXDRFWDLNKHLGPASPVEVPPASLRSSVPPSKRGXVGAGCGFNQRWLPVHVLREWQCGHXSDQDSYXDSXDGWSSINCGXLPPPMSKIPADRYRVEGSFAQPPLNAPKREWSRKAFGMQSIFGPHRNVRKXKEDKKGSKFGRGXGLXQPSQRXSARRSFGRSKRFSIXRSLDDLES

SEQ ID NO: 23423 - protein, 1376 aa, Homo sapiens
  MOD_RES (35)..(35): Selenocysteine
  MOD_RES (177)..(177): Selenocysteine
  MOD_RES (243)..(243): Selenocysteine
  MOD_RES (273)..(273): Selenocysteine
  MOD_RES (285)..(285): Selenocysteine
  MOD_RES (316)..(316): Selenocysteine
  MOD_RES (319)..(319): Selenocysteine
  MOD_RES (335)..(335): Selenocysteine
  MOD_RES (364)..(364): Selenocysteine
  MOD_RES (369)..(369): Selenocysteine
  MOD_RES (418)..(418): Selenocysteine
  MOD_RES (473)..(473): Selenocysteine
  MOD_RES (492)..(492): Selenocysteine
  MOD_RES (526)..(526): Selenocysteine
  MOD_RES (551)..(551): Selenocysteine
  MOD_RES (558)..(558): Selenocysteine
  MOD_RES (561)..(561): Selenocysteine
  MOD_RES (571)..(571): Selenocysteine
  MOD_RES (622)..(622): Selenocysteine
  MOD_RES (635)..(635): Selenocysteine
  MOD_RES (638)..(638): Selenocysteine
  MOD_RES (644)..(644): Selenocysteine
  MOD_RES (659)..(659): Selenocysteine
  MOD_RES (669)..(669): Selenocysteine
  MOD_RES (676)..(676): Selenocysteine
  MOD_RES (779)..(780): Selenocysteine
  MOD_RES (820)..(820): Selenocysteine
  MOD_RES (866)..(866): Selenocysteine
  MOD_RES (903)..(903): Selenocysteine
  MOD_RES (906)..(906): Selenocysteine
  MOD_RES (952)..(952): Selenocysteine
  MOD_RES (961)..(961): Selenocysteine
  MOD_RES (972)..(972): Selenocysteine
  MOD_RES (1033)..(1033): Selenocysteine
  MOD_RES (1053)..(1053): Selenocysteine
  MOD_RES (1057)..(1057): Selenocysteine
  MOD_RES (1125)..(1125): Selenocysteine
  MOD_RES (1137)..(1137): Selenocysteine
  MOD_RES (1142)..(1142): Selenocysteine
  MOD_RES (1227)..(1227): Selenocysteine
  MOD_RES (1230)..(1230): Selenocysteine
  MOD_RES (1233)..(1233): Selenocysteine
  MOD_RES (1247)..(1247): Selenocysteine
  MOD_RES (1273)..(1273): Selenocysteine
  MOD_RES (1287)..(1288): Selenocysteine
  MOD_RES (1301)..(1301): Selenocysteine
  MOD_RES (1313)..(1313): Selenocysteine
  MOD_RES (1331)..(1331): Selenocysteine
  MOD_RES (1341)..(1341): Selenocysteine
  MOD_RES (1354)..(1354): Selenocysteine
  MOD_RES (1361)..(1361): Selenocysteine
  MOD_RES (1373)..(1373): Selenocysteine
MFRAGEASKRPLPGPSPPRVRSVEVARGRAGYGFXLSGQAPCVLSCVMRGSPADFVGLRAGDQILAVNEINVKKASHEDVVKLIGKCSGVLHMVIAEGVGRFESCSSDEEGGLYEGKGWLKPKLDSKALGINRAERVVEEMQSGGIFNMIFENPSLCASNSEPLKLKQRSLSESAAXRFDVGHESINNPNPNMLSKEEISKVIHDDSVFSIGLESHDDFALDASILNVAMIVGYLGSIELPSXSSNLESDSLQAIRGCMRRLRAEQKIHSLVXMKIMHDCVQLSXDKAGVVAEYPAEKLAFSAVCPDDRRFFGLVXMQXNDDGSLAQEEEGALRXSCHVFMVDPDLFNHKIHQGIARRFGFECXADPDXNGCLEFPASSLPVLQFISVLYRDMGELIEGMRARAFLDGDADAHQNNSXSSNSDSGIGNFHQEEKSNRVLVVDLGGSSSRHGPGGSAWDGVGGRGAQPWGAPWXGPFCPDPEGSPPFEAAHQXDRFWDLNKHLGPASPVEVPPASLRSSVPPSKRGXVGAGCGFNQRWLPVHVLREWQCGHXSDQDSYXDSXDGWSSINCGXLPPPMSKIPADRYRVEGSFAQPPLNAPKREWSRKAFGMQSIFGPHRNVRKXKEDKKGSKFGRGXGLXQPSQRXSARRSFGRSKRFSIXRSLDDLESAXVSDGELXGADLKDCVSNNSLSSNASLPSVQSCRRLRERRVASWAVSFERLLQDPVGVRYFSDFLRKEFSEENILFWQACEYFNHVPAHDKKELSYRAREIFSKFLCSKAXXPVNIDSQAQLADDVLRAPHPDMFKEQQLQIFNLMKFDSYXRFLKSPLYQECILAEVEGRALPDSQQVPSSPASKHSLGSDHSSVSXPKKLSGKSKSGRSLNEELGDEDSEKKRKGAFFSWSRXRSXGRSQKKREHGDHADDALHANGGLCRRESQGSVSSAGSLDLSEACRXLAPEKDKAXKHCCIHLPDGXSCVVAVKAGFSIKDILSGLCERHGINGAAADLFLVGGDKPLVLHQDSSILESRDLRLEKRXLFRLDLVPINRSVGLKAKPXKPVXEVLRPVVARYGLDLSGLLVRLSGEKEPLDLGAPISSLDGQRVVLEEKDPSRGKASADKQKGVPVKQNXAVNSSSRNHSAXGEERXLGKSNSIKIKGENGKNARDPRLSKREESIAKIGKKKYQKINLDEAEEFFELISKAQSNRADDQRGLLRKEDLVLPEFLRLPPGSXELXLPXPAAVAKGFSKRSAXGNGRESASQPGEQWEPVQESSDSPSXSPGSASSPPGPPGXXPPGQKSPSGPFCXPQSPVSLAQEGXAQIWKRQSQEVEAGGIQXVEDEHVAELXLMGEGDISSPNSXLLPPPSXPQEVPGPSRPGXSRF

SEQ ID NO: 23424 - protein, 1447 aa, Homo sapiens
  MOD_RES (35)..(35): Selenocysteine
  MOD_RES (177)..(177): Selenocysteine
  MOD_RES (243)..(243): Selenocysteine
  MOD_RES (273)..(273): Selenocysteine
  MOD_RES (285)..(285): Selenocysteine
  MOD_RES (316)..(316): Selenocysteine
  MOD_RES (319)..(319): Selenocysteine
  MOD_RES (335)..(335): Selenocysteine
  MOD_RES (364)..(364): Selenocysteine
  MOD_RES (369)..(369): Selenocysteine
  MOD_RES (418)..(418): Selenocysteine
  MOD_RES (473)..(473): Selenocysteine
  MOD_RES (492)..(492): Selenocysteine
  MOD_RES (526)..(526): Selenocysteine
  MOD_RES (551)..(551): Selenocysteine
  MOD_RES (558)..(558): Selenocysteine
  MOD_RES (561)..(561): Selenocysteine
  MOD_RES (571)..(571): Selenocysteine
  MOD_RES (622)..(622): Selenocysteine
  MOD_RES (635)..(635): Selenocysteine
  MOD_RES (638)..(638): Selenocysteine
  MOD_RES (644)..(644): Selenocysteine
  MOD_RES (659)..(659): Selenocysteine
  MOD_RES (669)..(669): Selenocysteine
  MOD_RES (676)..(676): Selenocysteine
  MOD_RES (779)..(780): Selenocysteine
  MOD_RES (820)..(820): Selenocysteine
  MOD_RES (866)..(866): Selenocysteine
  MOD_RES (903)..(903): Selenocysteine
  MOD_RES (906)..(906): Selenocysteine
  MOD_RES (952)..(952): Selenocysteine
  MOD_RES (961)..(961): Selenocysteine
  MOD_RES (972)..(972): Selenocysteine
  MOD_RES (1033)..(1033): Selenocysteine
  MOD_RES (1053)..(1053): Selenocysteine
  MOD_RES (1057)..(1057): Selenocysteine
  MOD_RES (1125)..(1125): Selenocysteine
  MOD_RES (1137)..(1137): Selenocysteine
  MOD_RES (1142)..(1142): Selenocysteine
  MOD_RES (1227)..(1227): Selenocysteine
  MOD_RES (1230)..(1230): Selenocysteine
  MOD_RES (1233)..(1233): Selenocysteine
  MOD_RES (1247)..(1247): Selenocysteine
  MOD_RES (1273)..(1273): Selenocysteine
  MOD_RES (1287)..(1288): Selenocysteine
  MOD_RES (1301)..(1301): Selenocysteine
  MOD_RES (1313)..(1313): Selenocysteine
  MOD_RES (1331)..(1331): Selenocysteine
  MOD_RES (1341)..(1341): Selenocysteine
  MOD_RES (1354)..(1354): Selenocysteine
  MOD_RES (1361)..(1361): Selenocysteine
  MOD_RES (1375)..(1375): Selenocysteine
  MOD_RES (1393)..(1393): Selenocysteine
  MOD_RES (1421)..(1421): Selenocysteine
  MOD_RES (1439)..(1439): Selenocysteine
  MOD_RES (1445)..(1445): Selenocysteine
MFRAGEASKRPLPGPSPPRVRSVEVARGRAGYGFXLSGQAPCVLSCVMRGSPADFVGLRAGDQILAVNEINVKKASHEDVVKLIGKCSGVLHMVIAEGVGRFESCSSDEEGGLYEGKGWLKPKLDSKALGINRAERVVEEMQSGGIFNMIFENPSLCASNSEPLKLKQRSLSESAAXRFDVGHESINNPNPNMLSKEEISKVIHDDSVFSIGLESHDDFALDASILNVAMIVGYLGSIELPSXSSNLESDSLQAIRGCMRRLRAEQKIHSLVXMKIMHDCVQLSXDKAGVVAEYPAEKLAFSAVCPDDRRFFGLVXMQXNDDGSLAQEEEGALRXSCHVFMVDPDLFNHKIHQGIARRFGFECXADPDXNGCLEFPASSLPVLQFISVLYRDMGELIEGMRARAFLDGDADAHQNNSXSSNSDSGIGNFHQEEKSNRVLVVDLGGSSSRHGPGGSAWDGVGGRGAQPWGAPWXGPFCPDPEGSPPFEAAHQXDRFWDLNKHLGPASPVEVPPASLRSSVPPSKRGXVGAGCGFNQRWLPVHVLREWQCGHXSDQDSYXDSXDGWSSINCGXLPPPMSKIPADRYRVEGSFAQPPLNAPKREWSRKAFGMQSIFGPHRNVRKXKEDKKGSKFGRGXGLXQPSQRXSARRSFGRSKRFSIXRSLDDLESAXVSDGELXGADLKDCVSNNSLSSNASLPSVQSCRRLRERRVASWAVSFERLLQDPVGVRYFSDFLRKEFSEENILFWQACEYFNHVPAHDKKELSYRAREIFSKFLCSKAXXPVNIDSQAQLADDVLRAPHPDMFKEQQLQIFNLMKFDSYXRFLKSPLYQECILAEVEGRALPDSQQVPSSPASKHSLGSDHSSVSXPKKLSGKSKSGRSLNEELGDEDSEKKRKGAFFSWSRXRSXGRSQKKREHGDHADDALHANGGLCRRESQGSVSSAGSLDLSEACRXLAPEKDKAXKHCCIHLPDGXSCVVAVKAGFSIKDILSGLCERHGINGAAADLFLVGGDKPLVLHQDSSILESRDLRLEKRXLFRLDLVPINRSVGLKAKPXKPVXEVLRPVVARYGLDLSGLLVRLSGEKEPLDLGAPISSLDGQRVVLEEKDPSRGKASADKQKGVPVKQNXAVNSSSRNHSAXGEERXLGKSNSIKIKGENGKNARDPRLSKREESIAKIGKKKYQKINLDEAEEFFELISKAQSNRADDQRGLLRKEDLVLPEFLRLPPGSXELXLPXPAAVAKGFSKRSAXGNGRESASQPGEQWEPVQESSDSPSXSPGSASSPPGPPGXXPPGQKSPSGPFCXPQSPVSLAQEGXAQIWKRQSQEVEAGGIQXVEDEHVAELXLMGEGDISSPNSXLLPPPSXPQEVPGPSRPGSGXHGSRDLPVNRIIDVDLVXGSAPGRDGGIAGAQAGPGRSQASGGPPXSDLPGLGPVPGEPAKPKXSAHHAXFV

SEQ ID NO: 23425 - protein, 799 aa, Homo sapiens
  MOD_RES (11)..(11): Selenocysteine
  MOD_RES (21)..(21): Selenocysteine
  MOD_RES (28)..(28): Selenocysteine
  MOD_RES (131)..(132): Selenocysteine
  MOD_RES (172)..(172): Selenocysteine
  MOD_RES (218)..(218): Selenocysteine
  MOD_RES (255)..(255): Selenocysteine
  MOD_RES (258)..(258): Selenocysteine
  MOD_RES (304)..(304): Selenocysteine
  MOD_RES (313)..(313): Selenocysteine
  MOD_RES (324)..(324): Selenocysteine
  MOD_RES (385)..(385): Selenocysteine
  MOD_RES (405)..(405): Selenocysteine
  MOD_RES (409)..(409): Selenocysteine
  MOD_RES (477)..(477): Selenocysteine
  MOD_RES (489)..(489): Selenocysteine
  MOD_RES (494)..(494): Selenocysteine
  MOD_RES (579)..(579): Selenocysteine
  MOD_RES (582)..(582): Selenocysteine
  MOD_RES (585)..(585): Selenocysteine
  MOD_RES (599)..(599): Selenocysteine
  MOD_RES (625)..(625): Selenocysteine
  MOD_RES (639)..(640): Selenocysteine
  MOD_RES (653)..(653): Selenocysteine
  MOD_RES (665)..(665): Selenocysteine
  MOD_RES (683)..(683): Selenocysteine
  MOD_RES (693)..(693): Selenocysteine
  MOD_RES (706)..(706): Selenocysteine
  MOD_RES (713)..(713): Selenocysteine
  MOD_RES (727)..(727): Selenocysteine
  MOD_RES (745)..(745): Selenocysteine
  MOD_RES (773)..(773): Selenocysteine
  MOD_RES (791)..(791): Selenocysteine
  MOD_RES (797)..(797): Selenocysteine
MNLGKELSNEXHVSNDQQSAXVSDGELXGADLKDCVSNNSLSSNASLPSVQSCRRLRERRVASWAVSFERLLQDPVGVRYFSDFLRKEFSEENILFWQACEYFNHVPAHDKKELSYRAREIFSKFLCSKAXXPVNIDSQAQLADDVLRAPHPDMFKEQQLQIFNLMKFDSYXRFLKSPLYQECILAEVEGRALPDSQQVPSSPASKHSLGSDHSSVSXPKKLSGKSKSGRSLNEELGDEDSEKKRKGAFFSWSRXRSXGRSQKKREHGDHADDALHANGGLCRRESQGSVSSAGSLDLSEACRXLAPEKDKAXKHCCIHLPDGXSCVVAVKAGFSIKDILSGLCERHGINGAAADLFLVGGDKPLVLHQDSSILESRDLRLEKRXLFRLDLVPINRSVGLKAKPXKPVXEVLRPVVARYGLDLSGLLVRLSGEKEPLDLGAPISSLDGQRVVLEEKDPSRGKASADKQKGVPVKQNXAVNSSSRNHSAXGEERXLGKSNSIKIKGENGKNARDPRLSKREESIAKIGKKKYQKINLDEAEEFFELISKAQSNRADDQRGLLRKEDLVLPEFLRLPPGSXELXLPXPAAVAKGFSKRSAXGNGRESASQPGEQWEPVQESSDSPSXSPGSASSPPGPPGXXPPGQKSPSGPFCXPQSPVSLAQEGXAQIWKRQSQEVEAGGIQXVEDEHVAELXLMGEGDISSPNSXLLPPPSXPQEVPGPSRPGSGXHGSRDLPVNRIIDVDLVXGSAPGRDGGIAGAQAGPGRSQASGGPPXSDLPGLGPVPGEPAKPKXSAHHAXFV

SEQ ID NO: 23426 - protein, 159 aa, Homo sapiens
  MOD_RES (24)..(24): Selenocysteine
  MOD_RES (41)..(41): Selenocysteine
  MOD_RES (69)..(69): Selenocysteine
  MOD_RES (105)..(105): Selenocysteine
  MOD_RES (108)..(108): Selenocysteine
  MOD_RES (117)..(117): Selenocysteine
  MOD_RES (119)..(119): Selenocysteine
  MOD_RES (152)..(152): Selenocysteine
MSRRNCWICKMCRDESKRPPSNLXLEEVLQWAQSFENLMAXKYGPVVYAAYLKMEHSDENIQFWMACEXYKKIASRWSRISRAKKLYKIYIQPQSPREINIDSSXREXIIRNIQEPXEXCFEEAQKIVYMHMERDSYPRFLKSEMYQKLLKXMQSNNSF

SEQ ID NO: 23427 - protein, 566 aa, Homo sapiens
  MOD_RES (27)..(28): Selenocysteine
  MOD_RES (56)..(56): Selenocysteine
  MOD_RES (82)..(82): Selenocysteine
  MOD_RES (95)..(95): Selenocysteine
  MOD_RES (111)..(111): Selenocysteine
  MOD_RES (207)..(207): Selenocysteine
  MOD_RES (251)..(251): Selenocysteine
  MOD_RES (292)..(292): Selenocysteine
  MOD_RES (312)..(312): Selenocysteine
  MOD_RES (323)..(323): Selenocysteine
  MOD_RES (360)..(360): Selenocysteine
  MOD_RES (374)..(374): Selenocysteine
  MOD_RES (380)..(380): Selenocysteine
  MOD_RES (393)..(393): Selenocysteine
  MOD_RES (443)..(443): Selenocysteine
  MOD_RES (467)..(467): Selenocysteine
  MOD_RES (472)..(472): Selenocysteine
  MOD_RES (490)..(490): Selenocysteine
  MOD_RES (495)..(495): Selenocysteine
  MOD_RES (543)..(543): Selenocysteine
  MOD_RES (547)..(547): Selenocysteine
  MOD_RES (561)..(562): Selenocysteine
MPGKPKHLGVPNGRMVLAVSDGELSSXXGPQGQGEGRGSSLSIHSLPSGPSSPFPXEEQPVASWALSFERLLQDPLGLAYFXEFLKKEFSAENVXFWKACERFQQIPASDXQQLAQEARNIYQEFLSSQALSPVNIDRQAWLGEEVLAEPRPDMFRAQQLQIFNLMKFDSYARFVKSPLYRECLLAEAEGRPLREPGSSRLGSPDAXRKKPKLKPGKSLPLGVEELGQLPPVEGPGGRPLRKSFRRELGGXANAALRRESQGSLNSSASLDLGFLAFVSSKSESHRKSLGSXEGESESRPGKYCCVYLPDGXASLALARPGLXIRDMLAGICEKRGLSLPDIKVYLVGNEQALVLDQDCXVLADQEVRLENRIXFELELXALERVVRISAKPXKRLQEALQPILEKHGLSPLEVVLHRPGEKQPLDLGKLVSSVAAQRLVLDXLPGVKISKARDKSPCRSQGCPPRXQDKAXHPPPASPSSLVKVPSSAXGKRQXCDIEGLVELLNRVQSSGAHDQRGLLRKEDLVLPEFLQLPAQGPSSEEXPPQXKSAAQPIGGSLNSXXDSAL

SEQ ID NO: 23428 - protein, 437 aa, Homo sapiens
  MOD_RES (1)..(1): Any amino acid
  MOD_RES (77)..(77): Selenocysteine
  MOD_RES (121)..(121): Selenocysteine
  MOD_RES (162)..(162): Selenocysteine
  MOD_RES (182)..(182): Selenocysteine
  MOD_RES (193)..(193): Selenocysteine
  MOD_RES (231)..(231): Selenocysteine
  MOD_RES (245)..(245): Selenocysteine
  MOD_RES (251)..(251): Selenocysteine
  MOD_RES (264)..(264): Selenocysteine
  MOD_RES (314)..(314): Selenocysteine
  MOD_RES (338)..(338): Selenocysteine
  MOD_RES (343)..(343): Selenocysteine
  MOD_RES (361)..(361): Selenocysteine
  MOD_RES (366)..(366): Selenocysteine
  MOD_RES (414)..(414): Selenocysteine
  MOD_RES (418)..(418): Selenocysteine
  MOD_RES (432)..(433): Selenocysteine
XSPVNIDRQAWLGEEVLAEPRPDMFRAQQLQIFNLMKFDSYARFVKSPLYRECLLAEAEGRPLREPGSSRLGSPDAXRKKPKLKPGKSLPLGVEELGQLPPVEGPGGRPLRKSFRRELGGXANAALRRESQGSLNSSASLDLGFLAFVSSKSESHRKSLGSXEGESESRPGKYCCVYLPDGXASLALARPGLXIRDMLAGICEKRGLSLPDIKVYLVGNEQKALVLDQDCXVLADQEVRLENRIXFELELXALERVVRISAKPXKRLQEALQPILEKHGLSPLEVVLHRPGEKQPLDLGKLVSSVAAQRLVLDXLPGVKISKARDKSPCRSQGCPPRXQDKAXHPPPASPSSLVKVPSSAXGKRQXCDIEGLVELLNRVQSSGAHDQRGLLRKEDLVLPEFLQLPAQGPSSEEXPPQXKSAAQPIGGSLNSXXDSAL

SEQ ID NO: 23429 - protein, 202 aa, Homo sapiens
  MOD_RES (4)..(4): Selenocysteine
  MOD_RES (10)..(11): Selenocysteine
  MOD_RES (21)..(21): Selenocysteine
  MOD_RES (36)..(36): Selenocysteine
  MOD_RES (39)..(39): Selenocysteine
  MOD_RES (85)..(85): Selenocysteine
  MOD_RES (108)..(108): Selenocysteine
  MOD_RES (136)..(136): Selenocysteine
  MOD_RES (140)..(140): Selenocysteine
  MOD_RES (146)..(146): Selenocysteine
  MOD_RES (148)..(148): Selenocysteine
  MOD_RES (150)..(150): Selenocysteine
  MOD_RES (159)..(159): Selenocysteine
  MOD_RES (161)..(161): Selenocysteine
  MOD_RES (190)..(190): Selenocysteine
  MOD_RES (202)..(202): Selenocysteine
MCRXLAAFPXXCLERAKEFKXRLGIFLHKSELGCDXGSXGKFEWGSKHSKENRNFSEDVLGWRESFDLLLSSKNGVAAFHAFLKXEFSEENLEFWLACEEFKKIRSAXKLASRAHQIFEEFICSEAPKEVNIDHEXHELXRMNLQXAXAXCFDAAQGKXRXLMEKDSYPRFLKSPAYRDLAAQASAASAXLSSCSLDEPSHX

SEQ ID NO: 23430 - protein, 210 aa, Homo sapiens
  MOD_RES (12)..(12): Selenocysteine
  MOD_RES (27)..(27): Selenocysteine
  MOD_RES (42)..(42): Selenocysteine
  MOD_RES (56)..(56): Selenocysteine
  MOD_RES (58)..(59): Selenocysteine
  MOD_RES (74)..(74): Selenocysteine
  MOD_RES (104)..(104): Selenocysteine
  MOD_RES (180)..(180): Selenocysteine
  MOD_RES (203)..(203): Selenocysteine
MRKRQQSQNEGXPAVSQAPGNQRPNNXCCFCWCCCCSCSCLXVRNEERGENAGRPXHXXKMESIQVLEECQNPXAEEVLSWSQNFDKMMKAPAGRNLFREFLRXEYSEENLLFWLACEDLKKEQNKKVIEEKARMIYEDYISILSPKEVSLDSRVREVINRNLLDPNPHMYEDAQLQIYXLMHRDSFPRFLNSQIYKSFVESXAGSSSES

SEQ ID NO: 23431 - protein, 235 aa, Homo sapiens
  MOD_RES (3)..(4): Selenocysteine
  MOD_RES (20)..(20): Selenocysteine
  MOD_RES (33)..(33): Selenocysteine
  MOD_RES (61)..(61): Selenocysteine
  MOD_RES (73)..(73): Selenocysteine
  MOD_RES (101)..(101): Selenocysteine
  MOD_RES (106)..(106): Selenocysteine
  MOD_RES (145)..(145): Selenocysteine
  MOD_RES (157)..(157): Selenocysteine
  MOD_RES (162)..(162): Selenocysteine
  MOD_RES (166)..(166): Selenocysteine
  MOD_RES (169)..(169): Selenocysteine
  MOD_RES (190)..(190): Selenocysteine
  MOD_RES (210)..(210): Selenocysteine
  MOD_RES (220)..(220): Selenocysteine
MEXXLLFFSQINMCESKEKXFFKLIHGSGKEEXSKEAKIRAKEKRNRLSLLVQKPEFHEDXRSSRSGHLAKEXRVSPEEAVKWGESFDKLLSHRDGLEAFXRFLKXEFSEENIEFWIACEDFKKSKGPQQIHLKAKAIYEKFIQXDAPKEVNLDFHXKEVIXNSIXQPXLHSFDAAQSRVYQLMEQDSYXRFLKSDIYLDLMEGRPQRPXNLRRRSRSFXCNEFQDVQSDVAIWL

SEQ ID NO: 23432 - protein, 217 aa, Homo sapiens
  MOD_RES (3)..(3): Selenocysteine
  MOD_RES (12)..(12): Selenocysteine
  MOD_RES (28)..(28): Selenocysteine
  MOD_RES (78)..(78): Selenocysteine
  MOD_RES (110)..(110): Selenocysteine
  MOD_RES (176)..(176): Selenocysteine
  MOD_RES (186)..(186): Selenocysteine
  MOD_RES (201)..(201): Selenocysteine
MPXPHEAEKQIXGPEEADRPPSMSSHDXASPAAPSRNPCCLCWCCCCSCSWNQERRRAWQASRESKLQPLPSCEVCAXPSPEEVQSWAQSFDKLMHSPAGRSVFRAFLRXEYSEENMLFWLACEELKAEANQHVVDEKARLIYEDYVSILSPKEVSLDSRVREGINKKMQEPSAHXFDDAQLQIYXLMHRDSYPRFLSSPXYRALLLQGPSQSSSEA

SEQ ID NO: 23433 - protein, 211 aa, Homo sapiens
  MOD_RES (36)..(36): Selenocysteine
  MOD_RES (43)..(43): Selenocysteine
  MOD_RES (54)..(54): Selenocysteine
  MOD_RES (60)..(60): Selenocysteine
  MOD_RES (122)..(122): Selenocysteine
  MOD_RES (137)..(137): Selenocysteine
  MOD_RES (154)..(154): Selenocysteine
  MOD_RES (156)..(156): Selenocysteine
  MOD_RES (166)..(166): Selenocysteine
  MOD_RES (171)..(172): Selenocysteine
  MOD_RES (205)..(206): Selenocysteine
  MOD_RES (211)..(211): Selenocysteine
MQSAMFLAVQHDCRPMDKSAGSGHKSEEKREKMKRXLLKDWKXRLSYFLQNSSXPGKPKXGKKSKQQAFIKPSPEEAQLWSEAFDELLASKYGLAAFRAFLKSEFCEENIEFWLACEDFKKXKSPQKLSSKARKIYXDFIEKEAPKEINIDFQXKXLIAQNIQEAXSGCFXXAQKRVYSLMENNSYPRFLESEFYQDLCKKPQIXXEPHAX

SEQ ID NO: 23434 - protein, 70 aa, Homo sapiens
  MOD_RES (23)..(23): Selenocysteine
  MOD_RES (36)..(36): Selenocysteine
  MOD_RES (42)..(42): Selenocysteine
MPQLSQDNQECLQKHFSRPSIWXQFLPLFRAQRYNXDIHQIXENEGDLRAVPDIKPCSYSGRSQRLGSVI

SEQ ID NO: 23435 - protein, 273 aa, Homo sapiens
  MOD_RES (23)..(23): Selenocysteine
  MOD_RES (36)..(36): Selenocysteine
  MOD_RES (42)..(42): Selenocysteine
  MOD_RES (75)..(75): Selenocysteine
  MOD_RES (107)..(107): Selenocysteine
  MOD_RES (117)..(117): Selenocysteine
  MOD_RES (129)..(129): Selenocysteine
  MOD_RES (137)..(137): Selenocysteine
  MOD_RES (154)..(154): Selenocysteine
  MOD_RES (167)..(167): Selenocysteine
  MOD_RES (243)..(243): Selenocysteine
MPQLSQDNQECLQKHFSRPSIWXQFLPLFRAQRYNXDIHQIXENEGDLRAVPDIKQMGSERMEMRKRQMPAAQDXPGAAPGQPGAGSRGSNACCFCWCCCCSCSCLXVRNQEDQRPXIASHELRADLPXWEESPAPXLEEVNAWAQSFDKLMVXPAGRNAFREFLRXEFSEENMLFWMACEELKKEANKNIIEEKARIIYEDYISILSPKEVSLDSRVREVINRNMVEPSQHIFDDAQLQIYXLMHRDSYPRFMNSAVYKDLLQSLSEKSIEA

SEQ ID NO: 23436 - protein, 388 aa, Homo sapiens
  MOD_RES (23)..(23): Selenocysteine
  MOD_RES (36)..(36): Selenocysteine
  MOD_RES (42)..(42): Selenocysteine
  MOD_RES (162)..(162): Selenocysteine
  MOD_RES (190)..(190): Selenocysteine
  MOD_RES (222)..(222): Selenocysteine
  MOD_RES (232)..(232): Selenocysteine
  MOD_RES (244)..(244): Selenocysteine
  MOD_RES (252)..(252): Selenocysteine
  MOD_RES (269)..(269): Selenocysteine
  MOD_RES (282)..(282): Selenocysteine
  MOD_RES (358)..(358): Selenocysteine
MPQLSQDNQECLQKHFSRPSIWXQFLPLFRAQRYNXDIHQIXENEGDLRAVPDIKSFPPAQLPDSPAAPKLFGLLSSPLSSLARFFSHLLRRPPPEAPRRRLDFSPLLPALPAARLSRGHEELPGRLSLLLGAALALPGRPSGGRPLRPPHPVAKPREEDAXAGQSSPMPQMGSERMEMRKRQMPAAQDXPGAAPGQPGAGSRGSNACCFCWCCCCSCSCLXVRNQEDQRPXIASHELRADLPXWEESPAPXLEEVNAWAQSFDKLMVXPAGRNAFREFLRXEFSEENMLFWMACEELKKEANKNIIEEKARIIYEDYISILSPKEVSLDSRVREVINRNMVEPSQHIFDDAQLQIYXLMHRDSYPRFMNSAVYKDLLQSLSEKSIEA

SEQ ID NO: 23437 - protein, 58 aa, Homo sapiens
  MOD_RES (23)..(23): Selenocysteine
  MOD_RES (36)..(36): Selenocysteine
  MOD_RES (42)..(42): Selenocysteine
MPQLSQDNQECLQKHFSRPSIWXQFLPLFRAQRYNXDIHQIXENEGDLRAVPDIKSHC

SEQ ID NO: 23438 - protein, 241 aa, Homo sapiens
  MOD_RES (3)..(3): Selenocysteine
  MOD_RES (43)..(43): Selenocysteine
  MOD_RES (75)..(75): Selenocysteine
  MOD_RES (85)..(85): Selenocysteine
  MOD_RES (97)..(97): Selenocysteine
  MOD_RES (105)..(105): Selenocysteine
  MOD_RES (122)..(122): Selenocysteine
  MOD_RES (135)..(135): Selenocysteine
  MOD_RES (211)..(211): Selenocysteine
MRXADGGEPAGASSPAGRVDGGLQMGSERMEMRKRQMPAAQDXPGAAPGQPGAGSRGSNACCFCWCCCCSCSCLXVRNQEDQRPXIASHELRADLPXWEESPAPXLEEVNAWAQSFDKLMVXPAGRNAFREFLRXEFSEENMLFWMACEELKKEANKNIIEEKARIIYEDYISILSPKEVSLDSRVREVINRNMVEPSQHIFDDAQLQIYXLMHRDSYPRFMNSAVYKDLLQSLSEKSIEA

SEQ ID NO: 23439 - protein, 122 aa, Homo sapiens
  MOD_RES (3)..(3): Selenocysteine
  MOD_RES (16)..(16): Selenocysteine
  MOD_RES (92)..(92): Selenocysteine
MVXPAGRNAFREFLRXEFSEENMLFWMACEELKKEANKNIIEEKARIIYEDYISILSPKEVSLDSRVREVINRNMVEPSQHIFDDAQLQIYXLMHRDSYPRFMNSAVYKDLLQSLSEKSIEA

SEQ ID NO: 23440 - protein, 152 aa, Homo sapiens
  MOD_RES (12)..(12): Selenocysteine
  MOD_RES (15)..(15): Selenocysteine
  MOD_RES (17)..(17): Selenocysteine
  MOD_RES (24)..(24): Selenocysteine
  MOD_RES (60)..(60): Selenocysteine
  MOD_RES (92)..(92): Selenocysteine
  MOD_RES (104)..(104): Selenocysteine
MPVKCCFYRSPXAEXMXWSENMDXLLANQAGLDAFRIFLKSEFSEENVEFWLACEDFKKXKNADKIASKAKMIYSEFIEADAPKEINIDFGXRDLISKNIAEPXLKCFDEAQKLIYCLMAKDSFPRFLKSEIYKKLVNSQQVPNHKKWLPFL

SEQ ID NO: 23441 - protein, 111 aa, Homo sapiens
  MOD_RES (14)..(14): Selenocysteine
  MOD_RES (54)..(54): Selenocysteine
  MOD_RES (61)..(61): Selenocysteine
  MOD_RES (79)..(79): Selenocysteine
KFWPQFCEFRKNLXDENIMSVLERRQEYNKQKKKLAVLEDEKSGKDGIKQYANXSVPAIKXALLSDSFLGLQPYGRQPXWCYSKYIEALEQERILLKIQEELEKKLFAGIL

SEQ ID NO: 23442 - protein, 269 aa, Homo sapiens
  MOD_RES (14)..(14): Selenocysteine
  MOD_RES (22)..(22): Selenocysteine
  MOD_RES (42)..(42): Selenocysteine
  MOD_RES (49)..(49): Selenocysteine
  MOD_RES (76)..(76): Selenocysteine
  MOD_RES (90)..(90): Selenocysteine
  MOD_RES (109)..(109): Selenocysteine
  MOD_RES (115)..(115): Selenocysteine
  MOD_RES (127)..(127): Selenocysteine
  MOD_RES (135)..(136): Selenocysteine
  MOD_RES (141)..(141): Selenocysteine
  MOD_RES (153)..(153): Selenocysteine
  MOD_RES (187)..(187): Selenocysteine
  MOD_RES (198)..(198): Selenocysteine
  MOD_RES (207)..(207): Selenocysteine
MDCGARGVEGAMEXWQEDSLAXDDFLVDYFNEFLSLPYLFAXYVAPSAXLDIGLQQEKKKEIYMKIQPPFEDLFDXAEEYILLLLLEPWXKMVKSDQIAYKKVELVEEXRQLDSXYFRKLQALHKEXFSKKAEDXXCEIGXGILSLSNVSKRXEYWDNVPAEYKHFKFSDLLNNKLEFEHFRQFLEXHSSSMDLMCWXDIEQFRRIXYRDRNQRKAKSIYIKNKYLNKKYFFGPNSPASLYQQNQVMHLSGGWGKILHEQLDAPVLVEI

SEQ ID NO: 23443 - protein, 136 aa, Homo sapiens
  MOD_RES (11)..(11): Selenocysteine
  MOD_RES (17)..(17): Selenocysteine
  MOD_RES (79)..(79): Selenocysteine
  MOD_RES (100)..(100): Selenocysteine
  MOD_RES (121)..(121): Selenocysteine
  MOD_RES (123)..(123): Selenocysteine
  MOD_RES (136)..(136): Selenocysteine
MILRPPQPCGXEDSLAXDDFLVDYFNEFLSLPCLSREEGIKWIKKERLPAFLESDCYFEYRLAKLVSQVRWSKSGMNFXVGSNFSPWIVKKPPSLPPPAXEEDNLVIMKKFYVSLGEASYXQXKDWFALAKQSQQX

SEQ ID NO: 23444 - protein, 1083 aa, Homo sapiens
  MOD_RES (9)..(9): Selenocysteine
  MOD_RES (21)..(21): Selenocysteine
  MOD_RES (23)..(23): Selenocysteine
  MOD_RES (36)..(36): Selenocysteine
  MOD_RES (39)..(39): Selenocysteine
  MOD_RES (73)..(73): Selenocysteine
  MOD_RES (80)..(80): Selenocysteine
  MOD_RES (104)..(104): Selenocysteine
  MOD_RES (125)..(125): Selenocysteine
  MOD_RES (130)..(130): Selenocysteine
  MOD_RES (158)..(158): Selenocysteine
  MOD_RES (168)..(168): Selenocysteine
  MOD_RES (191)..(192): Selenocysteine
  MOD_RES (202)..(202): Selenocysteine
  MOD_RES (225)..(225): Selenocysteine
  MOD_RES (244)..(244): Selenocysteine
  MOD_RES (331)..(331): Selenocysteine
  MOD_RES (336)..(336): Selenocysteine
  MOD_RES (365)..(365): Selenocysteine
  MOD_RES (403)..(403): Selenocysteine
  MOD_RES (405)..(405): Selenocysteine
  MOD_RES (441)..(441): Selenocysteine
  MOD_RES (444)..(444): Selenocysteine
  MOD_RES (461)..(461): Selenocysteine
  MOD_RES (468)..(468): Selenocysteine
  MOD_RES (498)..(498): Selenocysteine
  MOD_RES (530)..(530): Selenocysteine
  MOD_RES (546)..(546): Selenocysteine
  MOD_RES (553)..(553): Selenocysteine
  MOD_RES (580)..(580): Selenocysteine
  MOD_RES (594)..(594): Selenocysteine
  MOD_RES (613)..(613): Selenocysteine
  MOD_RES (619)..(619): Selenocysteine
  MOD_RES (631)..(631): Selenocysteine
  MOD_RES (639)..(640): Selenocysteine
  MOD_RES (645)..(645): Selenocysteine
  MOD_RES (657)..(657): Selenocysteine
  MOD_RES (691)..(691): Selenocysteine
  MOD_RES (702)..(702): Selenocysteine
  MOD_RES (711)..(711): Selenocysteine
  MOD_RES (850)..(850): Selenocysteine
  MOD_RES (896)..(897): Selenocysteine
  MOD_RES (941)..(941): Selenocysteine
  MOD_RES (961)..(961): Selenocysteine
  MOD_RES (1001)..(1001): Selenocysteine
  MOD_RES (1008)..(1008): Selenocysteine
  MOD_RES (1026)..(1026): Selenocysteine
  MOD_RES (1061)..(1061): Selenocysteine
  MOD_RES (1069)..(1069): Selenocysteine
MNAPDEDEXINVNYNIMASYXQXKDWFALAKQSQQXVSXFSLPCCVPYNKLKSPAISSVSENFIFDDGVHPRXKKDPSKXNKLISEFEEEEGEEEEVSVSLQDXPSQALLRVYLEKKQDVDESLXMHFSXCEEFLSSYIYFILRGAIQQIVGKPVGEXPDYINFNNIXKVSFDDCFESIHGKNFLSELVQXXKERSEEIEQXSLSSKNESAGPESRADWCISHRXYDIGNRKEFERFKKFIKGXLGERYWWLWMDIERLKVLKDPGRHQRHLEKMKKCYLVSNGDYYLSAEILSKFKLLDGSQWNEEHLRNIQSEVLKPLLLYWAPRFCVXHSASXKYASAELKFWHLRQAKPRKDIDPFPQMAXLLPLRPKSCIPQIPEIQKEEFSLSQPPKSPNKSPEVKXAXQKPWKRELLYPGSSKDDVIEKGSKYMSESSKVIHLXSFXDISECLKPQLDRRYAYXEEPRVKXVSDVGALGGSDMENLLQSLYVENRAGFFFXKFCEHSGNKLWKNSVYFWFDLQAYHQLFYQEXLQPFKVCKQAQYLFAXYVAPSAXLDIGLQQEKKKEIYMKIQPPFEDLFDXAEEYILLLLLEPWXKMVKSDQIAYKKVELVEEXRQLDSXYFRKLQALHKEXFSKKAEDXXCEIGXGILSLSNVSKRXEYWDNVPAEYKHFKFSDLLNNKLEFEHFRQFLEXHSSSMDLMCWXDIEQFRRIXYRDRNQRKAKSIYIKNKYLNKKYFFGPNSPASLYQQNQVMHLSGGWGKILHEQLDAPVLVEIQKHVQNRLENVWLPLFLASEQFAARQKIKVQMKDIAEELLLQKAEKKIGVWKPVESKWISSSCKIIAFRKALLNPVXSRQFQRFVALKGDLLENGLLFWQEVQKYKDLCHSHCDESVIQKKIXXIINCFINSSIPPALQIDIPVEQAQKIIEHRKELGPYVFREAQMXIFGVLFKFWPQFCEFRKNLXDENIMSVLERRQEYNKQKKKLAVLEDEKSGKDGIKQYANXSVPAIKXALLSDSFLGLQPYGRQPXWCYSKYIEALEQERILLKIQEELEKKLFAGLQPLXNFKASSSXMSLKKNMSAHSSQK

SEQ ID NO: 23445 - protein, 82 aa, Homo sapiens
  MOD_RES (9)..(9): Selenocysteine
  MOD_RES (64)..(64): Selenocysteine
MNAPDEDEXINVNYNIMCLSREEGIKWIKKERLPAFLESDCYFEYRLAKLVSQVRWSKSGMNFXVGSNFSPWIVKKPPSLPP

SEQ ID NO: 23446 - protein, 88 aa, Homo sapiens
  MOD_RES (9)..(9): Selenocysteine
  MOD_RES (64)..(64): Selenocysteine
  MOD_RES (85)..(85): Selenocysteine
MNAPDEDEXINVNYNIMCLSREEGIKWIKKERLPAFLESDCYFEYRLAKLVSQVRWSKSGMNFXVGSNFSPWIVKKPPSLPPPAXEED

SEQ ID NO: 23447 - protein, 1251 aa, Homo sapiens
  MOD_RES (7)..(7): Selenocysteine
  MOD_RES (12)..(12): Selenocysteine
  MOD_RES (14)..(14): Selenocysteine
  MOD_RES (24)..(24): Selenocysteine
  MOD_RES (40)..(40): Selenocysteine
  MOD_RES (105)..(105): Selenocysteine
  MOD_RES (160)..(160): Selenocysteine
  MOD_RES (181)..(181): Selenocysteine
  MOD_RES (190)..(190): Selenocysteine
  MOD_RES (192)..(192): Selenocysteine
  MOD_RES (205)..(205): Selenocysteine
  MOD_RES (208)..(208): Selenocysteine
  MOD_RES (242)..(242): Selenocysteine
  MOD_RES (249)..(249): Selenocysteine
  MOD_RES (273)..(273): Selenocysteine
  MOD_RES (294)..(294): Selenocysteine
  MOD_RES (299)..(299): Selenocysteine
  MOD_RES (327)..(327): Selenocysteine
  MOD_RES (337)..(337): Selenocysteine
  MOD_RES (360)..(361): Selenocysteine
  MOD_RES (371)..(371): Selenocysteine
  MOD_RES (394)..(394): Selenocysteine
  MOD_RES (413)..(413): Selenocysteine
  MOD_RES (500)..(500): Selenocysteine
  MOD_RES (505)..(505): Selenocysteine
  MOD_RES (534)..(534): Selenocysteine
  MOD_RES (572)..(572): Selenocysteine
  MOD_RES (574)..(574): Selenocysteine
  MOD_RES (610)..(610): Selenocysteine
  MOD_RES (613)..(613): Selenocysteine
  MOD_RES (630)..(630): Selenocysteine
  MOD_RES (637)..(637): Selenocysteine
  MOD_RES (667)..(667): Selenocysteine
  MOD_RES (699)..(699): Selenocysteine
  MOD_RES (715)..(715): Selenocysteine
  MOD_RES (722)..(722): Selenocysteine
  MOD_RES (749)..(749): Selenocysteine
  MOD_RES (763)..(763): Selenocysteine
  MOD_RES (782)..(782): Selenocysteine
  MOD_RES (788)..(788): Selenocysteine
  MOD_RES (800)..(800): Selenocysteine
  MOD_RES (808)..(809): Selenocysteine
  MOD_RES (814)..(814): Selenocysteine
  MOD_RES (826)..(826): Selenocysteine
  MOD_RES (860)..(860): Selenocysteine
  MOD_RES (872)..(872): Selenocysteine
  MOD_RES (879)..(879): Selenocysteine
  MOD_RES (1018)..(1018): Selenocysteine
  MOD_RES (1064)..(1065): Selenocysteine
  MOD_RES (1109)..(1109): Selenocysteine
  MOD_RES (1129)..(1129): Selenocysteine
  MOD_RES (1169)..(1169): Selenocysteine
  MOD_RES (1176)..(1176): Selenocysteine
  MOD_RES (1194)..(1194): Selenocysteine
  MOD_RES (1229)..(1229): Selenocysteine
  MOD_RES (1237)..(1237): Selenocysteine
MPEKRLXAEPPXIXEEEFEDSLAXDDFLVDYFNEFLSLPXFSEAIRFNADYGVFEVANDAPQFLEKQLKKILQNQQPRNPIYDVVRKGKNEVKPVQMNAPDEDEXINVNYNIMCLSREEGIKWIKKERLPAFLESDCYFEYRLAKLVSQVRWSKSGMNFXVGSNFSPWIVKKPPSLPPPAXEEDNLASYXQXKDWFALAKQSQQXVSXFSLPCCVPYNKLKSPAISSVSENFIFDDGVHPRXKKDPSKXNKLISEFEEEEGEEEEVSVSLQDXPSQALLRVYLEKKQDVDESLXMHFSXCEEFLSSYIYFILRGAIQQIVGKPVGEXPDYINFNNIXKVSFDDCFESIHGKNFLSELVQXXKERSEEIEQXSLSSKNESAGPESRADWCISHRXYDIGNRKEFERFKKFIKGXLGERYWWLWMDIERLKVLKDPGRHQRHLEKMKKCYLVSNGDYYLSAEILSKFKLLDGSQWNEEHLRNIQSEVLKPLLLYWAPRFCVXHSASXKYASAELKFWHLRQAKPRKDIDPFPQMAXLLPLRPKSCIPQIPEIQKEEFSLSQPPKSPNKSPEVKXAXQKPWKRELLYPGSSKDDVIEKGSKYMSESSKVIHLXSFXDISECLKPQLDRRYAYXEEPRVKXVSDVGALGGSDMENLLQSLYVENRAGFFFXKFCEHSGNKLWKNSVYFWFDLQAYHQLFYQEXLQPFKVCKQAQYLFAXYVAPSAXLDIGLQQEKKKEIYMKIQPPFEDLFDXAEEYILLLLLEPWXKMVKSDQIAYKKVELVEEXRQLDSXYFRKLQALHKEXFSKKAEDXXCEIGXGILSLSNVSKRXEYWDNVPAEYKHFKFSDLLNNKLEFEHFRQFLEXHSSRWILCAGQXLSSSGEXYRDRNQRKAKSIYIKNKYLNKKYFFGPNSPASLYQQNQVMHLSGGWGKILHEQLDAPVLVEIQKHVQNRLENVWLPLFLASEQFAARQKIKVQMKDIAEELLLQKAEKKIGVWKPVESKWISSSCKIIAFRKALLNPVXSRQFQRFVALKGDLLENGLLFWQEVQKYKDLCHSHCDESVIQKKIXXIINCFINSSIPPALQIDIPVEQAQKIIEHRKELGPYVFREAQMXIFGVLFKFWPQFCEFRKNLXDENIMSVLERRQEYNKQKKKLAVLEDEKSGKDGIKQYANXSVPAIKXALLSDSFLGLQPYGRQPXWCYSKYIEALEQERILLKIQEELEKKLFAGLQPLXNFKASSSXMSLKKNMSAHSSQK

SEQ ID NO: 23448 - protein, 1252 aa, Homo sapiens
  MOD_RES (7)..(7): Selenocysteine
  MOD_RES (12)..(12): Selenocysteine
  MOD_RES (14)..(14): Selenocysteine
  MOD_RES (24)..(24): Selenocysteine
  MOD_RES (40)..(40): Selenocysteine
  MOD_RES (105)..(105): Selenocysteine
  MOD_RES (160)..(160): Selenocysteine
  MOD_RES (181)..(181): Selenocysteine
  MOD_RES (190)..(190): Selenocysteine
  MOD_RES (192)..(192): Selenocysteine
  MOD_RES (205)..(205): Selenocysteine
  MOD_RES (208)..(208): Selenocysteine
  MOD_RES (242)..(242): Selenocysteine
  MOD_RES (249)..(249): Selenocysteine
  MOD_RES (273)..(273): Selenocysteine
  MOD_RES (294)..(294): Selenocysteine
  MOD_RES (299)..(299): Selenocysteine
  MOD_RES (327)..(327): Selenocysteine
  MOD_RES (337)..(337): Selenocysteine
  MOD_RES (360)..(361): Selenocysteine
  MOD_RES (371)..(371): Selenocysteine
  MOD_RES (394)..(394): Selenocysteine
  MOD_RES (413)..(413): Selenocysteine
  MOD_RES (500)..(500): Selenocysteine
  MOD_RES (505)..(505): Selenocysteine
  MOD_RES (534)..(534): Selenocysteine
  MOD_RES (572)..(572): Selenocysteine
  MOD_RES (574)..(574): Selenocysteine
  MOD_RES (610)..(610): Selenocysteine
  MOD_RES (613)..(613): Selenocysteine
  MOD_RES (630)..(630): Selenocysteine
  MOD_RES (637)..(637): Selenocysteine
  MOD_RES (667)..(667): Selenocysteine
  MOD_RES (699)..(699): Selenocysteine
  MOD_RES (715)..(715): Selenocysteine
  MOD_RES (722)..(722): Selenocysteine
  MOD_RES (749)..(749): Selenocysteine
  MOD_RES (763)..(763): Selenocysteine
  MOD_RES (782)..(782): Selenocysteine
  MOD_RES (788)..(788): Selenocysteine
  MOD_RES (800)..(800): Selenocysteine
  MOD_RES (808)..(809): Selenocysteine
  MOD_RES (814)..(814): Selenocysteine
  MOD_RES (826)..(826): Selenocysteine
  MOD_RES (860)..(860): Selenocysteine
  MOD_RES (871)..(871): Selenocysteine
  MOD_RES (880)..(880): Selenocysteine
  MOD_RES (1019)..(1019): Selenocysteine
  MOD_RES (1065)..(1066): Selenocysteine
  MOD_RES (1110)..(1110): Selenocysteine
  MOD_RES (1130)..(1130): Selenocysteine
  MOD_RES (1170)..(1170): Selenocysteine
  MOD_RES (1177)..(1177): Selenocysteine
  MOD_RES (1195)..(1195): Selenocysteine
  MOD_RES (1230)..(1230): Selenocysteine
  MOD_RES (1238)..(1238): Selenocysteine
MPEKRLXAEPPXIXEEEFEDSLAXDDFLVDYFNEFLSLPXFSEAIRFNADYGVFEVANDAPQFLEKQLKKILQNQQPRNPIYDVVRKGKNEVKPVQMNAPDEDEXINVNYNIMCLSREEGIKWIKKERLPAFLESDCYFEYRLAKLVSQVRWSKSGMNFXVGSNFSPWIVKKPPSLPPPAXEEDNLASYXQXKDWFALAKQSQQXVSXFSLPCCVPYNKLKSPAISSVSENFIFDDGVHPRXKKDPSKXNKLISEFEEEEGEEEEVSVSLQDXPSQALLRVYLEKKQDVDESLXMHFSXCEEFLSSYIYFILRGAIQQIVGKPVGEXPDYINFNNIXKVSFDDCFESIHGKNFLSELVQXXKERSEEIEQXSLSSKNESAGPESRADWCISHRXYDIGNRKEFERFKKFIKGXLGERYWWLWMDIERLKVLKDPGRHQRHLEKMKKCYLVSNGDYYLSAEILSKFKLLDGSQWNEEHLRNIQSEVLKPLLLYWAPRFCVXHSASXKYASAELKFWHLRQAKPRKDIDPFPQMAXLLPLRPKSCIPQIPEIQKEEFSLSQPPKSPNKSPEVKXAXQKPWKRELLYPGSSKDDVIEKGSKYMSESSKVIHLXSFXDISECLKPQLDRRYAYXEEPRVKXVSDVGALGGSDMENLLQSLYVENRAGFFFXKFCEHSGNKLWKNSVYFWFDLQAYHQLFYQEXLQPFKVCKQAQYLFAXYVAPSAXLDIGLQQEKKKEIYMKIQPPFEDLFDXAEEYILLLLLEPWXKMVKSDQIAYKKVELVEEXRQLDSXYFRKLQALHKEXFSKKAEDXXCEIGXGILSLSNVSKRXEYWDNVPAEYKHFKFSDLLNNKLEFEHFRQFLEXHSSSMDLMCWXDIEQFRRIXYRDRNQRKAKSIYIKNKYLNKKYFFGPNSPASLYQQNQVMHLSGGWGKILHEQLDAPVLVEIQKHVQNRLENVWLPLFLASEQFAARQKIKVQMKDIAEELLLQKAEKKIGVWKPVESKWISSSCKIIAFRKALLNPVXSRQFQRFVALKGDLLENGLLFWQEVQKYKDLCHSHCDESVIQKKIXXIINCFINSSIPPALQIDIPVEQAQKIIEHRKELGPYVFREAQMXIFGVLFKFWPQFCEFRKNLXDENIMSVLERRQEYNKQKKKLAVLEDEKSGKDGIKQYANXSVPAIKXALLSDSFLGLQPYGRQPXWCYSKYIEALEQERILLKIQEELEKKLFAGLQPLXNFKASSSXMSLKKNMSAHSSQK

SEQ ID NO: 23449 - protein, 504 aa, Homo sapiens
  MOD_RES (7)..(7): Selenocysteine
  MOD_RES (12)..(12): Selenocysteine
  MOD_RES (14)..(14): Selenocysteine
  MOD_RES (24)..(24): Selenocysteine
  MOD_RES (40)..(40): Selenocysteine
  MOD_RES (105)..(105): Selenocysteine
  MOD_RES (160)..(160): Selenocysteine
  MOD_RES (181)..(181): Selenocysteine
  MOD_RES (202)..(202): Selenocysteine
  MOD_RES (204)..(204): Selenocysteine
  MOD_RES (217)..(217): Selenocysteine
  MOD_RES (220)..(220): Selenocysteine
  MOD_RES (254)..(254): Selenocysteine
  MOD_RES (261)..(261): Selenocysteine
  MOD_RES (285)..(285): Selenocysteine
  MOD_RES (306)..(306): Selenocysteine
  MOD_RES (311)..(311): Selenocysteine
  MOD_RES (339)..(339): Selenocysteine
  MOD_RES (349)..(349): Selenocysteine
  MOD_RES (372)..(373): Selenocysteine
  MOD_RES (383)..(383): Selenocysteine
  MOD_RES (406)..(406): Selenocysteine
  MOD_RES (425)..(425): Selenocysteine
MPEKRLXAEPPXIXEEEFEDSLAXDDFLVDYFNEFLSLPXFSEAIRFNADYGVFEVANDAPQFLEKQLKKILQNQQPRNPIYDVVRKGKNEVKPVQMNAPDEDEXINVNYNIMCLSREEGIKWIKKERLPAFLESDCYFEYRLAKLVSQVRWSKSGMNFXVGSNFSPWIVKKPPSLPPPAXEEDNLVIMKKFYVSLGEASYXQXKDWFALAKQSQQXVSXFSLPCCVPYNKLKSPAISSVSENFIFDDGVHPRXKKDPSKXNKLISEFEEEEGEEEEVSVSLQDXPSQALLRVYLEKKQDVDESLXMHFSXCEEFLSSYIYFILRGAIQQIVGKPVGEXPDYINFNNIXKVSFDDCFESIHGKNFLSELVQXXKERSEEIEQXSLSSKNESAGPESRADWCISHRXYDIGNRKEFERFKKFIKGXLGERYWWLWMDIERLKVLKDPGRHQRHLEKMKKCYLVSNGDYYLSAEILSKFKLLDGSQWNEEHLRNIQSEVLKPLLLY

SEQ ID NO: 23450 - protein, 1264 aa, Homo sapiens
  MOD_RES (7)..(7): Selenocysteine
  MOD_RES (12)..(12): Selenocysteine
  MOD_RES (14)..(14): Selenocysteine
  MOD_RES (24)..(24): Selenocysteine
  MOD_RES (40)..(40): Selenocysteine
  MOD_RES (105)..(105): Selenocysteine
  MOD_RES (160)..(160): Selenocysteine
  MOD_RES (181)..(181): Selenocysteine
  MOD_RES (202)..(202): Selenocysteine
  MOD_RES (204)..(204): Selenocysteine
  MOD_RES (217)..(217): Selenocysteine
  MOD_RES (220)..(220): Selenocysteine
  MOD_RES (254)..(254): Selenocysteine
  MOD_RES (261)..(261): Selenocysteine
  MOD_RES (285)..(285): Selenocysteine
  MOD_RES (306)..(306): Selenocysteine
  MOD_RES (311)..(311): Selenocysteine
  MOD_RES (339)..(339): Selenocysteine
  MOD_RES (349)..(349): Selenocysteine
  MOD_RES (372)..(373): Selenocysteine
  MOD_RES (383)..(383): Selenocysteine
  MOD_RES (406)..(406): Selenocysteine
  MOD_RES (425)..(425): Selenocysteine
  MOD_RES (512)..(512): Selenocysteine
  MOD_RES (517)..(517): Selenocysteine
  MOD_RES (546)..(546): Selenocysteine
  MOD_RES (584)..(584): Selenocysteine
  MOD_RES (586)..(586): Selenocysteine
  MOD_RES (622)..(622): Selenocysteine
  MOD_RES (625)..(625): Selenocysteine
  MOD_RES (642)..(642): Selenocysteine
  MOD_RES (649)..(649): Selenocysteine
  MOD_RES (679)..(679): Selenocysteine
  MOD_RES (711)..(711): Selenocysteine
  MOD_RES (727)..(727): Selenocysteine
  MOD_RES (734)..(734): Selenocysteine
  MOD_RES (761)..(761): Selenocysteine
  MOD_RES (775)..(775): Selenocysteine
  MOD_RES (794)..(794): Selenocysteine
  MOD_RES (800)..(800): Selenocysteine
  MOD_RES (812)..(812): Selenocysteine
  MOD_RES (820)..(821): Selenocysteine
  MOD_RES (826)..(826): Selenocysteine
  MOD_RES (838)..(838): Selenocysteine
  MOD_RES (872)..(872): Selenocysteine
  MOD_RES (883)..(883): Selenocysteine
  MOD_RES (892)..(892): Selenocysteine
  MOD_RES (1031)..(1031): Selenocysteine
  MOD_RES (1077)..(1078): Selenocysteine
  MOD_RES (1122)..(1122): Selenocysteine
  MOD_RES (1142)..(1142): Selenocysteine
  MOD_RES (1182)..(1182): Selenocysteine
  MOD_RES (1189)..(1189): Selenocysteine
  MOD_RES (1207)..(1207): Selenocysteine
  MOD_RES (1242)..(1242): Selenocysteine
  MOD_RES (1250)..(1250): Selenocysteine
MPEKRLXAEPPXIXEEEFEDSLAXDDFLVDYFNEFLSLPXFSEAIRFNADYGVFEVANDAPQFLEKQLKKILQNQQPRNPIYDVVRKGKNEVKPVQMNAPDEDEXINVNYNIMCLSREEGIKWIKKERLPAFLESDCYFEYRLAKLVSQVRWSKSGMNFXVGSNFSPWIVKKPPSLPPPAXEEDNLVIMKKFYVSLGEASYXQXKDWFALAKQSQQXVSXFSLPCCVPYNKLKSPAISSVSENFIFDDGVHPRXKKDPSKXNKLISEFEEEEGEEEEVSVSLQDXPSQALLRVYLEKKQDVDESLXMHFSXCEEFLSSYIYFILRGAIQQIVGKPVGEXPDYINFNNIXKVSFDDCFESIHGKNFLSELVQXXKERSEEIEQXSLSSKNESAGPESRADWCISHRXYDIGNRKEFERFKKFIKGXLGERYWWLWMDIERLKVLKDPGRHQRHLEKMKKCYLVSNGDYYLSAEILSKFKLLDGSQWNEEHLRNIQSEVLKPLLLYWAPRFCVXHSASXKYASAELKFWHLRQAKPRKDIDPFPQMAXLLPLRPKSCIPQIPEIQKEEFSLSQPPKSPNKSPEVKXAXQKPWKRELLYPGSSKDDVIEKGSKYMSESSKVIHLXSFXDISECLKPQLDRRYAYXEEPRVKXVSDVGALGGSDMENLLQSLYVENRAGFFFXKFCEHSGNKLWKNSVYFWFDLQAYHQLFYQEXLQPFKVCKQAQYLFAXYVAPSAXLDIGLQQEKKKEIYMKIQPPFEDLFDXAEEYILLLLLEPWXKMVKSDQIAYKKVELVEEXRQLDSXYFRKLQALHKEXFSKKAEDXXCEIGXGILSLSNVSKRXEYWDNVPAEYKHFKFSDLLNNKLEFEHFRQFLEXHSSSMDLMCWXDIEQFRRIXYRDRNQRKAKSIYIKNKYLNKKYFFGPNSPASLYQQNQVMHLSGGWGKILHEQLDAPVLVEIQKHVQNRLENVWLPLFLASEQFAARQKIKVQMKDIAEELLLQKAEKKIGVWKPVESKWISSSCKIIAFRKALLNPVXSRQFQRFVALKGDLLENGLLFWQEVQKYKDLCHSHCDESVIQKKIXXIINCFINSSIPPALQIDIPVEQAQKIIEHRKELGPYVFREAQMXIFGVLFKFWPQFCEFRKNLXDENIMSVLERRQEYNKQKKKLAVLEDEKSGKDGIKQYANXSVPAIKXALLSDSFLGLQPYGRQPXWCYSKYIEALEQERILLKIQEELEKKLFAGLQPLXNFKASSSXMSLKKNMSAHSSQK

SEQ ID NO: 23451 - protein, 602 aa, Homo sapiens
  MOD_RES (24)..(25): Selenocysteine
  MOD_RES (57)..(57): Selenocysteine
  MOD_RES (78)..(78): Selenocysteine
  MOD_RES (80)..(80): Selenocysteine
  MOD_RES (109)..(109): Selenocysteine
  MOD_RES (135)..(135): Selenocysteine
  MOD_RES (154)..(154): Selenocysteine
  MOD_RES (180)..(180): Selenocysteine
  MOD_RES (189)..(189): Selenocysteine
  MOD_RES (200)..(200): Selenocysteine
  MOD_RES (228)..(228): Selenocysteine
  MOD_RES (284)..(284): Selenocysteine
  MOD_RES (299)..(299): Selenocysteine
  MOD_RES (331)..(331): Selenocysteine
  MOD_RES (341)..(341): Selenocysteine
  MOD_RES (349)..(349): Selenocysteine
  MOD_RES (352)..(352): Selenocysteine
  MOD_RES (377)..(377): Selenocysteine
  MOD_RES (392)..(392): Selenocysteine
  MOD_RES (403)..(403): Selenocysteine
  MOD_RES (406)..(406): Selenocysteine
  MOD_RES (424)..(424): Selenocysteine
  MOD_RES (430)..(430): Selenocysteine
  MOD_RES (433)..(433): Selenocysteine
  MOD_RES (456)..(456): Selenocysteine
  MOD_RES (476)..(476): Selenocysteine
  MOD_RES (487)..(487): Selenocysteine
  MOD_RES (533)..(533): Selenocysteine
  MOD_RES (585)..(585): Selenocysteine
  MOD_RES (588)..(588): Selenocysteine
  MOD_RES (594)..(594): Selenocysteine
  MOD_RES (599)..(599): Selenocysteine
MERSLHRVSLGSRRAHPDLSFYLXXFGQLRLSIDAQDRVLLLHIIEGKGLISKQPGXCDPYVKISLIPEDSRLRHQKXQXVPDCRDPAFHEHFFFPVQEEDDQKRLLVXVWNRASQSRQSGLIGCMSFGVKSLLXPDKEISGWYYLLGEHLGRXKHLKVARRRLRPLRDPLLRMPGGGDXENGKKLKIXIPRGKDGFGFXICCDSPVRVQAVDSGGPAERAGLQQLDXVLQLNERPVEHWKCVELAHEIRSCPSEIILLVWRMVPQVKPGPDGGVLRRASCKSXHDLQSPPNKREKNCXHGVQARPEQRHSCHLVCDSSDGLLLGGWERYXEVAKRGGQHXLPALSRAXAPXDPNYIILAPLNPGSQLLRPVYQEDXIPEESGSPSKGKSYXGLGKKSRLMKXVQXMKGHGNYQNCPVVRPHAXHSSYGXYVXLAPKVLVFPVFVQPLDLCNPARXLLLSEELLLYEGRNKAAEVXLFAYSDLLLFXKEDEPGRCDVLRNPLYLQSVKLQEGSSEDLKFCVLYLAEKAECLFXLEAHSQEQKKRVCWCLSENIAKQQQLAASPPDSKKLHPFGSLQQEMGPVNSXNAXQDRSFXSPGQXLIG

SEQ ID NO: 23452 - protein, 74 aa, Homo sapiens
  MOD_RES (4)..(4): Selenocysteine
  MOD_RES (69)..(69): Selenocysteine
MFEXEADEKREMALEEGKGPGAEDSPPSKEPSPGQELPPGQDLPPNKDSPSGQEPAPSQEPLSSKDSAXSEGSP

SEQ ID NO: 23453 - protein, 519 aa, Homo sapiens
  MOD_RES (4)..(4): Selenocysteine
  MOD_RES (69)..(69): Selenocysteine
  MOD_RES (118)..(118): Selenocysteine
  MOD_RES (129)..(129): Selenocysteine
  MOD_RES (151)..(151): Selenocysteine
  MOD_RES (154)..(154): Selenocysteine
  MOD_RES (164)..(164): Selenocysteine
  MOD_RES (185)..(185): Selenocysteine
  MOD_RES (223)..(223): Selenocysteine
  MOD_RES (242)..(242): Selenocysteine
  MOD_RES (262)..(262): Selenocysteine
  MOD_RES (281)..(282): Selenocysteine
  MOD_RES (294)..(294): Selenocysteine
  MOD_RES (302)..(302): Selenocysteine
  MOD_RES (322)..(322): Selenocysteine
  MOD_RES (332)..(332): Selenocysteine
  MOD_RES (384)..(384): Selenocysteine
  MOD_RES (414)..(414): Selenocysteine
  MOD_RES (465)..(465): Selenocysteine
  MOD_RES (469)..(469): Selenocysteine
  MOD_RES (477)..(477): Selenocysteine
MFEXEADEKREMALEEGKGPGAEDSPPSKEPSPGQELPPGQDLPPNKDSPSGQEPAPSQEPLSSKDSAXSEGSPPGPDAPPSKDVPPCQEPPPAQDLSPCQDLPAGQEPLPHQDPLLXKDLPAIQESPXRDLPPCQDLPPSQVSLPAKALXEDXMSSGDLLAAXGDPPAAPRPAFVIPEVRLDSXYSQKAGAEQGCSGDEEDAEEAEEVEEGEEGEEDEDEDXSDDNYGERSEAKRSSMIEXGQGAEGGLSLRVQNSLRRRXHSEGSLLQEPRGPCFASDXXLHCSDGEGAASXWGMPSPSXLKKELGRNGGSMHHLSLFFXGHRKMSGADXVGDDDEASRKRKSKNLAKDMKNKLGIFRRRNESPGAPPAGKADKMMKSFKPXSEEALKWGESLEKLLVHKYGLAVFQAFLRXEFSEENLEFWLACEDFKKVKSQSKMASKAKKIFAEYIAIQACKEVNLDSYXREHXKDNLQSVXRGCFDLAQKRIFGLMEKDSYPRFLRSDLYLDLINQKKMSPPL

SEQ ID NO: 23454 - protein, 247 aa, Homo sapiens
  MOD_RES (4)..(4): Selenocysteine
  MOD_RES (69)..(69): Selenocysteine
  MOD_RES (107)..(107): Selenocysteine
  MOD_RES (126)..(127): Selenocysteine
  MOD_RES (139)..(139): Selenocysteine
  MOD_RES (147)..(147): Selenocysteine
  MOD_RES (167)..(167): Selenocysteine
  MOD_RES (177)..(177): Selenocysteine
  MOD_RES (229)..(229): Selenocysteine
MFEXEADEKREMALEEGKGPGAEDSPPSKEPSPGQELPPGQDLPPNKDSPSGQEPAPSQEPLSSKDSAXSEGSPPGPDAPPSKDVPPCQGAEGGLSLRVQNSLRRRXHSEGSLLQEPRGPCFASDXXLHCSDGEGAASXWGMPSPSXLKKELGRNGGSMHHLSLFFXGHRKMSGADXVGDDDEASRKRKSKNLAKDMKNKLGIFRRRNESPGAPPAGKADKMMKSFKPXSEEALKWGESLEKLLVHK

SEQ ID NO: 23455 - protein, 168 aa, Homo sapiens
  MOD_RES (33)..(33): Selenocysteine
  MOD_RES (63)..(63): Selenocysteine
  MOD_RES (114)..(114): Selenocysteine
  MOD_RES (118)..(118): Selenocysteine
  MOD_RES (126)..(126): Selenocysteine
MKNKLGIFRRRNESPGAPPAGKADKMMKSFKPXSEEALKWGESLEKLLVHKYGLAVFQAFLRXEFSEENLEFWLACEDFKKVKSQSKMASKAKKIFAEYIAIQACKEVNLDSYXREHXKDNLQSVXRGCFDLAQKRIFGLMEKDSYPRFLRSDLYLDLINQKKMSPPL

SEQ ID NO: 23456 - protein, 192 aa, Homo sapiens
  MOD_RES (8)..(8): Selenocysteine
  MOD_RES (18)..(18): Selenocysteine
  MOD_RES (57)..(57): Selenocysteine
  MOD_RES (87)..(87): Selenocysteine
  MOD_RES (138)..(138): Selenocysteine
  MOD_RES (142)..(142): Selenocysteine
  MOD_RES (150)..(150): Selenocysteine
MLRGMYLXRNGNLQRRHXMKEAKDMKNKLGIFRRRNESPGAPPAGKADKMMKSFKPXSEEALKWGESLEKLLVHKYGLAVFQAFLRXEFSEENLEFWLACEDFKKVKSQSKMASKAKKIFAEYIAIQACKEVNLDSYXREHXKDNLQSVXRGCFDLAQKRIFGLMEKDSYPRFLRSDLYLDLINQKKMSPPL

SEQ ID NO: 23457 - protein, 591 aa, Homo sapiens
  MOD_RES (20)..(20): Selenocysteine
  MOD_RES (31)..(31): Selenocysteine
  MOD_RES (59)..(59): Selenocysteine
  MOD_RES (115)..(115): Selenocysteine
  MOD_RES (130)..(130): Selenocysteine
  MOD_RES (162)..(162): Selenocysteine
  MOD_RES (172)..(172): Selenocysteine
  MOD_RES (180)..(180): Selenocysteine
  MOD_RES (183)..(183): Selenocysteine
  MOD_RES (208)..(208): Selenocysteine
  MOD_RES (223)..(223): Selenocysteine
  MOD_RES (234)..(234): Selenocysteine
  MOD_RES (237)..(237): Selenocysteine
  MOD_RES (255)..(255): Selenocysteine
  MOD_RES (261)..(261): Selenocysteine
  MOD_RES (264)..(264): Selenocysteine
  MOD_RES (287)..(287): Selenocysteine
  MOD_RES (307)..(307): Selenocysteine
  MOD_RES (318)..(318): Selenocysteine
  MOD_RES (364)..(364): Selenocysteine
  MOD_RES (404)..(404): Selenocysteine
  MOD_RES (456)..(456): Selenocysteine
  MOD_RES (486)..(486): Selenocysteine
  MOD_RES (537)..(537): Selenocysteine
  MOD_RES (541)..(541): Selenocysteine
  MOD_RES (549)..(549): Selenocysteine
MNRFNGLCKVCSERRYRQIXIPRGKDGFGFXICCDSPVRVQAVDSGGPAERAGLQQLDXVLQLNERPVEHWKCVELAHEIRSCPSEIILLVWRMVPQVKPGPDGGVLRRASCKSXHDLQSPPNKREKNCXHGVQARPEQRHSCHLVCDSSDGLLLGGWERYXEVAKRGGQHXLPALSRAXAPXDPNYIILAPLNPGSQLLRPVYQEDXIPEESGSPSKGKSYXGLGKKSRLMKXVQXMKGHGNYQNCPVVRPHAXHSSYGXYVXLAPKVLVFPVFVQPLDLCNPARXLLLSEELLLYEGRNKAAEVXLFAYSDLLLFXKEDEPGRCDVLRNPLYLQSVKLQEGSSEDLKFCVLYLAEKAECLFXLEAHSQEQKKRVCWCLSENIAKQQQLAASPPDSKMSGADXVGDDDEASRKRKSKNLAKDMKNKLGIFRRRNESPGAPPAGKADKMMKSFKPXSEEALKWGESLEKLLVHKYGLAVFQAFLRXEFSEENLEFWLACEDFKKVKSQSKMASKAKKIFAEYIAIQACKEVNLDSYXREHXKDNLQSVXRGCFDLAQKRIFGLMEKDSYPRFLRSDLYLDLINQKKMSPPL

SEQ ID NO: 23458 - protein, 917 aa, Homo sapiens
  MOD_RES (20)..(20): Selenocysteine
  MOD_RES (31)..(31): Selenocysteine
  MOD_RES (59)..(59): Selenocysteine
  MOD_RES (115)..(115): Selenocysteine
  MOD_RES (130)..(130): Selenocysteine
  MOD_RES (162)..(162): Selenocysteine
  MOD_RES (172)..(172): Selenocysteine
  MOD_RES (180)..(180): Selenocysteine
  MOD_RES (183)..(183): Selenocysteine
  MOD_RES (208)..(208): Selenocysteine
  MOD_RES (223)..(223): Selenocysteine
  MOD_RES (234)..(234): Selenocysteine
  MOD_RES (237)..(237): Selenocysteine
  MOD_RES (255)..(255): Selenocysteine
  MOD_RES (261)..(261): Selenocysteine
  MOD_RES (264)..(264): Selenocysteine
  MOD_RES (287)..(287): Selenocysteine
  MOD_RES (307)..(307): Selenocysteine
  MOD_RES (318)..(318): Selenocysteine
  MOD_RES (364)..(364): Selenocysteine
  MOD_RES (402)..(402): Selenocysteine
  MOD_RES (467)..(467): Selenocysteine
  MOD_RES (516)..(516): Selenocysteine
  MOD_RES (527)..(527): Selenocysteine
  MOD_RES (549)..(549): Selenocysteine
  MOD_RES (552)..(552): Selenocysteine
  MOD_RES (562)..(562): Selenocysteine
  MOD_RES (583)..(583): Selenocysteine
  MOD_RES (621)..(621): Selenocysteine
  MOD_RES (640)..(640): Selenocysteine
  MOD_RES (660)..(660): Selenocysteine
  MOD_RES (679)..(680): Selenocysteine
  MOD_RES (692)..(692): Selenocysteine
  MOD_RES (700)..(700): Selenocysteine
  MOD_RES (720)..(720): Selenocysteine
  MOD_RES (730)..(730): Selenocysteine
  MOD_RES (782)..(782): Selenocysteine
  MOD_RES (812)..(812): Selenocysteine
  MOD_RES (863)..(863): Selenocysteine
  MOD_RES (867)..(867): Selenocysteine
  MOD_RES (875)..(875): Selenocysteine
MNRFNGLCKVCSERRYRQIXIPRGKDGFGFXICCDSPVRVQAVDSGGPAERAGLQQLDXVLQLNERPVEHWKCVELAHEIRSCPSEIILLVWRMVPQVKPGPDGGVLRRASCKSXHDLQSPPNKREKNCXHGVQARPEQRHSCHLVCDSSDGLLLGGWERYXEVAKRGGQHXLPALSRAXAPXDPNYIILAPLNPGSQLLRPVYQEDXIPEESGSPSKGKSYXGLGKKSRLMKXVQXMKGHGNYQNCPVVRPHAXHSSYGXYVXLAPKVLVFPVFVQPLDLCNPARXLLLSEELLLYEGRNKAAEVXLFAYSDLLLFXKEDEPGRCDVLRNPLYLQSVKLQEGSSEDLKFCVLYLAEKAECLFXLEAHSQEQKKRVCWCLSENIAKQQQLAASPPDSKMFEXEADEKREMALEEGKGPGAEDSPPSKEPSPGQELPPGQDLPPNKDSPSGQEPAPSQEPLSSKDSAXSEGSPPGPDAPPSKDVPPCQEPPPAQDLSPCQDLPAGQEPLPHQDPLLXKDLPAIQESPXRDLPPCQDLPPSQVSLPAKALXEDXMSSGDLLAAXGDPPAAPRPAFVIPEVRLDSXYSQKAGAEQGCSGDEEDAEEAEEVEEGEEGEEDEDEDXSDDNYGERSEAKRSSMIEXGQGAEGGLSLRVQNSLRRRXHSEGSLLQEPRGPCFASDXXLHCSDGEGAASXWGMPSPSXLKKELGRNGGSMHHLSLFFXGHRKMSGADXVGDDDEASRKRKSKNLAKDMKNKLGIFRRRNESPGAPPAGKADKMMKSFKPXSEEALKWGESLEKLLVHKYGLAVFQAFLRXEFSEENLEFWLACEDFKKVKSQSKMASKAKKIFAEYIAIQACKEVNLDSYXREHXKDNLQSVXRGCFDLAQKRIFGLMEKDSYPRFLRSDLYLDLINQKKMSPPL

SEQ ID NO: 23459 - protein, 1198 aa, Homo sapiens
  MOD_RES (22)..(22): Selenocysteine
  MOD_RES (33)..(33): Selenocysteine
  MOD_RES (49)..(49): Selenocysteine
  MOD_RES (54)..(54): Selenocysteine
  MOD_RES (90)..(90): Selenocysteine
  MOD_RES (121)..(121): Selenocysteine
  MOD_RES (123)..(123): Selenocysteine
  MOD_RES (131)..(131): Selenocysteine
  MOD_RES (169)..(169): Selenocysteine
  MOD_RES (190)..(190): Selenocysteine
  MOD_RES (192)..(192): Selenocysteine
  MOD_RES (221)..(221): Selenocysteine
  MOD_RES (247)..(247): Selenocysteine
  MOD_RES (266)..(266): Selenocysteine
  MOD_RES (292)..(292): Selenocysteine
  MOD_RES (301)..(301): Selenocysteine
  MOD_RES (312)..(312): Selenocysteine
  MOD_RES (340)..(340): Selenocysteine
  MOD_RES (396)..(396): Selenocysteine
  MOD_RES (411)..(411): Selenocysteine
  MOD_RES (443)..(443): Selenocysteine
  MOD_RES (453)..(453): Selenocysteine
  MOD_RES (461)..(461): Selenocysteine
  MOD_RES (464)..(464): Selenocysteine
  MOD_RES (489)..(489): Selenocysteine
  MOD_RES (504)..(504): Selenocysteine
  MOD_RES (515)..(515): Selenocysteine
  MOD_RES (518)..(518): Selenocysteine
  MOD_RES (536)..(536): Selenocysteine
  MOD_RES (542)..(542): Selenocysteine
  MOD_RES (545)..(545): Selenocysteine
  MOD_RES (568)..(568): Selenocysteine
  MOD_RES (588)..(588): Selenocysteine
  MOD_RES (599)..(599): Selenocysteine
  MOD_RES (645)..(645): Selenocysteine
  MOD_RES (683)..(683): Selenocysteine
  MOD_RES (748)..(748): Selenocysteine
  MOD_RES (797)..(797): Selenocysteine
  MOD_RES (808)..(808): Selenocysteine
  MOD_RES (830)..(830): Selenocysteine
  MOD_RES (833)..(833): Selenocysteine
  MOD_RES (843)..(843): Selenocysteine
  MOD_RES (864)..(864): Selenocysteine
  MOD_RES (902)..(902): Selenocysteine
  MOD_RES (921)..(921): Selenocysteine
  MOD_RES (941)..(941): Selenocysteine
  MOD_RES (960)..(961): Selenocysteine
  MOD_RES (973)..(973): Selenocysteine
  MOD_RES (981)..(981): Selenocysteine
  MOD_RES (1001)..(1001): Selenocysteine
  MOD_RES (1011)..(1011): Selenocysteine
  MOD_RES (1063)..(1063): Selenocysteine
  MOD_RES (1093)..(1093): Selenocysteine
  MOD_RES (1144)..(1144): Selenocysteine
  MOD_RES (1148)..(1148): Selenocysteine
  MOD_RES (1156)..(1156): Selenocysteine
MPVIPALWEVEMGRSQGQEIEXILANRSHSDSXPLPNFLSGSHRPECCXCRLLXASGAQDSLPFGRRLYSGPWRSCEEVCHVSVLSVLSXSCGLSLSLPIFPGWMEWLSPDIALPRRDEWXQXSPARKRIXHAKVQGAGQLRLSIDAQDRVLLLHIIEGKGLISKQPGXCDPYVKISLIPEDSRLRHQKXQXVPDCRDPAFHEHFFFPVQEEDDQKRLLVXVWNRASQSRQSGLIGCMSFGVKSLLXPDKEISGWYYLLGEHLGRXKHLKVARRRLRPLRDPLLRMPGGGDXENGKKLKIXIPRGKDGFGFXICCDSPVRVQAVDSGGPAERAGLQQLDXVLQLNERPVEHWKCVELAHEIRSCPSEIILLVWRMVPQVKPGPDGGVLRRASCKSXHDLQSPPNKREKNCXHGVQARPEQRHSCHLVCDSSDGLLLGGWERYXEVAKRGGQHXLPALSRAXAPXDPNYIILAPLNPGSQLLRPVYQEDXIPEESGSPSKGKSYXGLGKKSRLMKXVQXMKGHGNYQNCPVVRPHAXHSSYGXYVXLAPKVLVFPVFVQPLDLCNPARXLLLSEELLLYEGRNKAAEVXLFAYSDLLLFXKEDEPGRCDVLRNPLYLQSVKLQEGSSEDLKFCVLYLAEKAECLFXLEAHSQEQKKRVCWCLSENIAKQQQLAASPPDSKMFEXEADEKREMALEEGKGPGAEDSPPSKEPSPGQELPPGQDLPPNKDSPSGQEPAPSQEPLSSKDSAXSEGSPPGPDAPPSKDVPPCQEPPPAQDLSPCQDLPAGQEPLPHQDPLLXKDLPAIQESPXRDLPPCQDLPPSQVSLPAKALXEDXMSSGDLLAAXGDPPAAPRPAFVIPEVRLDSXYSQKAGAEQGCSGDEEDAEEAEEVEEGEEGEEDEDEDXSDDNYGERSEAKRSSMIEXGQGAEGGLSLRVQNSLRRRXHSEGSLLQEPRGPCFASDXXLHCSDGEGAASXWGMPSPSXLKKELGRNGGSMHHLSLFFXGHRKMSGADXVGDDDEASRKRKSKNLAKDMKNKLGIFRRRNESPGAPPAGKADKMMKSFKPXSEEALKWGESLEKLLVHKYGLAVFQAFLRXEFSEENLEFWLACEDFKKVKSQSKMASKAKKIFAEYIAIQACKEVNLDSYXREHXKDNLQSVXRGCFDLAQKRIFGLMEKDSYPRFLRSDLYLDLINQKKMSPPL

SEQ ID NO: 23460 - protein, 340 aa, Homo sapiens
  MOD_RES (22)..(22): Selenocysteine
  MOD_RES (37)..(37): Selenocysteine
  MOD_RES (69)..(69): Selenocysteine
  MOD_RES (79)..(79): Selenocysteine
  MOD_RES (87)..(87): Selenocysteine
  MOD_RES (90)..(90): Selenocysteine
  MOD_RES (115)..(115): Selenocysteine
  MOD_RES (130)..(130): Selenocysteine
  MOD_RES (141)..(141): Selenocysteine
  MOD_RES (144)..(144): Selenocysteine
  MOD_RES (162)..(162): Selenocysteine
  MOD_RES (168)..(168): Selenocysteine
  MOD_RES (171)..(171): Selenocysteine
  MOD_RES (194)..(194): Selenocysteine
  MOD_RES (214)..(214): Selenocysteine
  MOD_RES (225)..(225): Selenocysteine
  MOD_RES (271)..(271): Selenocysteine
  MOD_RES (323)..(323): Selenocysteine
  MOD_RES (326)..(326): Selenocysteine
  MOD_RES (332)..(332): Selenocysteine
  MOD_RES (337)..(337): Selenocysteine
MVPQVKPGPDGGVLRRASCKSXHDLQSPPNKREKNCXHGVQARPEQRHSCHLVCDSSDGLLLGGWERYXEVAKRGGQHXLPALSRAXAPXDPNYIILAPLNPGSQLLRPVYQEDXIPEESGSPSKGKSYXGLGKKSRLMKXVQXMKGHGNYQNCPVVRPHAXHSSYGXYVXLAPKVLVFPVFVQPLDLCNPARXLLLSEELLLYEGRNKAAEVXLFAYSDLLLFXKEDEPGRCDVLRNPLYLQSVKLQEGSSEDLKFCVLYLAEKAECLFXLEAHSQEQKKRVCWCLSENIAKQQQLAASPPDSKKLHPFGSLQQEMGPVNSXNAXQDRSFXSPGQXLIG

SEQ ID NO: 23461 - protein, 311 aa, Homo sapiens
  MOD_RES (3)..(3): Selenocysteine
  MOD_RES (8)..(8): Selenocysteine
  MOD_RES (86)..(86): Selenocysteine
  MOD_RES (118)..(118): Selenocysteine
  MOD_RES (127)..(127): Selenocysteine
  MOD_RES (137)..(137): Selenocysteine
  MOD_RES (176)..(176): Selenocysteine
  MOD_RES (206)..(206): Selenocysteine
  MOD_RES (257)..(257): Selenocysteine
  MOD_RES (261)..(261): Selenocysteine
  MOD_RES (269)..(269): Selenocysteine
MVXRRPVXNSWDWLPAGAAPEAVPCRHMPLSRLPLRVGQKEFFFPLPLLVPPISWLLLSESQPRLVPGSPVIRPGFQRACVAAACXVAARCPGRGVGDRSQSGASYRPICGPKVGGPXEMLRGMYLXRNGNLQRRHXMKEAKDMKNKLGIFRRRNESPGAPPAGKADKMMKSFKPXSEEALKWGESLEKLLVHKYGLAVFQAFLRXEFSEENLEFWLACEDFKKVKSQSKMASKAKKIFAEYIAIQACKEVNLDSYXREHXKDNLQSVXRGCFDLAQKRIFGLMEKDSYPRFLRSDLYLDLINQKKMSPPL

SEQ ID NO: 23462 - protein, 214 aa, Homo sapiens
  MOD_RES (1)..(1): Any amino acid
  MOD_RES (13)..(13): Selenocysteine
  MOD_RES (23)..(23): Selenocysteine
  MOD_RES (43)..(43): Selenocysteine
  MOD_RES (54)..(54): Selenocysteine
  MOD_RES (100)..(100): Selenocysteine
  MOD_RES (138)..(138): Selenocysteine
  MOD_RES (203)..(203): Selenocysteine
XWLDFLSMSVALXPLDLCNPARXLLLSEELLLYEGRNKAAEVXLFAYSDLLLFXKEDEPGRCDVLRNPLYLQSVKLQEGSSEDLKFCVLYLAEKAECLFXLEAHSQEQKKRVCWCLSENIAKQQQLAASPPDSKMFEXEADEKREMALEEGKGPGAEDSPPSKEPSPGQELPPGQDLPPNKDSPSGQEPAPSQEPLSSKDSAXSEGSPPGPDAP

SEQ ID NO: 23463 - protein, 93 aa, Homo sapiens
MCKGLAGLPASCLRSAKDMKHRLGFLLQKSDSCEHNSSHNKKDKVVICQRVSQEEVKKWAESLENLISHECEPGFLHQGRDKPEHARAYNNLL

SEQ ID NO: 23464 - protein, 205 aa, Homo sapiens
  MOD_RES (124)..(124): Selenocysteine
  MOD_RES (133)..(133): Selenocysteine
  MOD_RES (137)..(137): Selenocysteine
  MOD_RES (145)..(145): Selenocysteine
  MOD_RES (147)..(147): Selenocysteine
MCKGLAGLPASCLRSAKDMKHRLGFLLQKSDSCEHNSSHNKKDKVVICQRVSQEEVKKWAESLENLISHECGLAAFKAFLKSEYSEENIDFWISCEEYKKIKSPSKLSPKAKKIYNEFISVQAXKEVNLDSCXREEXSRNMLEPXIXCFDEAQKKIFNLMEKDSYRRFLKSRFYLDLVNPSSCGAEKQKGAKSSADCASLVPQCA

SEQ ID NO: 23465 - protein, 113 aa, Homo sapiens
MCKGLAGLPASCLRSAKDMKHRLGFLLQKSDSCEHNSSHNKKDKVVICQRVSQEEVKKWAESLENLISHECGLAAFKAFLKSEYSEENIDFWISCEEYKKIKSPSKLSPKAKY

SEQ ID NO: 23466 - protein, 143 aa, Homo sapiens
  MOD_RES (106)..(106): Selenocysteine
  MOD_RES (115)..(115): Selenocysteine
  MOD_RES (119)..(119): Selenocysteine
  MOD_RES (127)..(127): Selenocysteine
  MOD_RES (129)..(129): Selenocysteine
MKHRLGFLLQKSDSCEHNSSHNKKDKVVICQRVSQEEVKKWAESLENLISHECGLAAFKAFLKSEYSEENIDFWISCEEYKKIKSPSKLSPKAKKIYNEFISVQAXKEVNLDSCXREEXSRNMLEPXIXCFDEAQKKIFNLME

SEQ ID NO: 23467 - protein, 187 aa, Homo sapiens
  MOD_RES (106)..(106): Selenocysteine
  MOD_RES (115)..(115): Selenocysteine
  MOD_RES (119)..(119): Selenocysteine
  MOD_RES (127)..(127): Selenocysteine
  MOD_RES (129)..(129): Selenocysteine
MKHRLGFLLQKSDSCEHNSSHNKKDKVVICQRVSQEEVKKWAESLENLISHECGLAAFKAFLKSEYSEENIDFWISCEEYKKIKSPSKLSPKAKKIYNEFISVQAXKEVNLDSCXREEXSRNMLEPXIXCFDEAQKKIFNLMEKDSYRRFLKSRFYLDLVNPSSCGAEKQKGAKSSADCASLVPQCA

SEQ ID NO: 23468 - protein, 302 aa, Homo sapiens
  MOD_RES (32)..(32): Selenocysteine
  MOD_RES (50)..(50): Selenocysteine
  MOD_RES (52)..(52): Selenocysteine
  MOD_RES (67)..(67): Selenocysteine
  MOD_RES (221)..(221): Selenocysteine
  MOD_RES (230)..(230): Selenocysteine
  MOD_RES (234)..(234): Selenocysteine
  MOD_RES (242)..(242): Selenocysteine
  MOD_RES (244)..(244): Selenocysteine
MYNMMLLIQKRKGIGSQLLRAGEAEGDRGAGXAERSSDWLDGRSWAIKEXPXGLAGRRSEDSDNIFXGEEAKYAQSRSHSSSCRISFLLANSKLLNKMCKGLAGLPASCLRSAKDMKHRLGFLLQKSDSCEHNSSHNKKDKVVICQRVSQEEVKKWAESLENLISHECGLAAFKAFLKSEYSEENIDFWISCEEYKKIKSPSKLSPKAKKIYNEFISVQAXKEVNLDSCXREEXSRNMLEPXIXCFDEAQKKIFNLMEKDSYRRFLKSRFYLDLVNPSSCGAEKQKGAKSSADCASLVPQCA

SEQ ID NO: 23469 - protein, 73 aa, Homo sapiens
  MOD_RES (15)..(15): Selenocysteine
  MOD_RES (27)..(27): Selenocysteine
  MOD_RES (31)..(31): Selenocysteine
MAEKAKQIYEEFIQXEAPKEVNIDHFXKDIXMKNLVEPSLSSFDMAQKRIHALMEKDSLPRFVRSEFYQELIK

SEQ ID NO: 23470 - protein, 201 aa, Homo sapiens
  MOD_RES (70)..(70): Selenocysteine
  MOD_RES (73)..(73): Selenocysteine
  MOD_RES (143)..(143): Selenocysteine
  MOD_RES (155)..(155): Selenocysteine
  MOD_RES (159)..(159): Selenocysteine
MCARNISQDILILQMHSAHWHINGKYEEKSNLMFWAKEIKIKLGILLQKPDSVGDLVIPYNEKPEKPAKXQKXSLDEALQWRDSLDKLLQNNYGLASFKSFLKSEFSEENLEFWIACEDYKKIKSPAKMAEKAKQIYEEFIQXEAPKEVNIDHFXKDIXMKNLVEPSLSSFDMAQKRIHALMEKDSLPRFVRSEFYQELIK

SEQ ID NO: 23471 - protein, 185 aa, Homo sapiens
  MOD_RES (50)..(50): Selenocysteine
  MOD_RES (53)..(53): Selenocysteine
  MOD_RES (123)..(123): Selenocysteine
  MOD_RES (139)..(139): Selenocysteine
  MOD_RES (143)..(143): Selenocysteine
MCKGLAALPHSCLERAKEIKIKLGILLQKPDSVGDLVIPYNEKPEKPAKXQKXSLDEALQWRDSLDKLLQNNYGLASFKSFLKSEFSEENLEFWIACEDYKKIKSPAKMAEKAKQIYEEFIQXEAPKEVGLWVNIDHFXKDIXMKNLVEPSLSSFDMAQKRIHALMEKDSLPRFVRSEFYQELIK

SEQ ID NO: 23472 - protein, 181 aa, Homo sapiens
  MOD_RES (50)..(50): Selenocysteine
  MOD_RES (53)..(53): Selenocysteine
  MOD_RES (123)..(123): Selenocysteine
  MOD_RES (135)..(135): Selenocysteine
  MOD_RES (139)..(139): Selenocysteine
MCKGLAALPHSCLERAKEIKIKLGILLQKPDSVGDLVIPYNEKPEKPAKXQKXSLDEALQWRDSLDKLLQNNYGLASFKSFLKSEFSEENLEFWIACEDYKKIKSPAKMAEKAKQIYEEFIQXEAPKEVNIDHFXKDIXMKNLVEPSLSSFDMAQKRIHALMEKDSLPRFVRSEFYQELIK

SEQ ID NO: 23473 - protein, 71 aa, Homo sapiens
  MOD_RES (16)..(16): Selenocysteine
MCKGLAALPHSCLERXSLDEALQWRDSLDKLLQNNYGLASFKSFLKSEFSEENLEFWIACEDYKKIKSPAK

SEQ ID NO: 23474 - protein, 460 aa, Homo sapiens
  MOD_RES (34)..(34): Selenocysteine
  MOD_RES (41)..(41): Selenocysteine
  MOD_RES (48)..(48): Selenocysteine
  MOD_RES (61)..(61): Selenocysteine
  MOD_RES (63)..(63): Selenocysteine
  MOD_RES (103)..(103): Selenocysteine
  MOD_RES (109)..(109): Selenocysteine
  MOD_RES (129)..(129): Selenocysteine
  MOD_RES (139)..(139): Selenocysteine
  MOD_RES (187)..(187): Selenocysteine
  MOD_RES (212)..(213): Selenocysteine
  MOD_RES (237)..(237): Selenocysteine
  MOD_RES (256)..(257): Selenocysteine
  MOD_RES (266)..(266): Selenocysteine
  MOD_RES (290)..(290): Selenocysteine
  MOD_RES (301)..(301): Selenocysteine
  MOD_RES (410)..(410): Selenocysteine
  MOD_RES (421)..(421): Selenocysteine
MAQGSGDQRAVGVADPEESSPNMIVYCKIEDIIXKMQDDKXGGVPIRXVKSFLSKIPSVVXGXDIVQWLMKNLSIEDPVEAIHLGSLIAAQGYIFPISDHVLXMKDDGXFYRFQAPYFWPSNCWEPENXDYAIYLCKRXMQNKARLELADYEAENLARLQRAFARKWEFIFMQAEAQVKIDRKKDKXERKILDSQERAFWDVHRPVPGCVNXXEMDIRKCRRLKNPQKVKKSVYGVXEESQAQSPVHVLSQPIRKXXKEDIRKQIXFLNAQIDRHCLKMSKVAESLIAYXEQYVEYDPLIXPAEPSNPWISDDVALWDIEMSKEPSQQRVKRWGFSFDEILKDQVGRDQFLRFLESEFSSENLRFWLAVQDLKKQPLQDVAKRVEEIWQEFLAPGAPSAINLDSHSYEIXSQNVKDGGRYXFEDAQEHIYKLMKSDSYARFLRSNAYQDLLLAKKKVWLL

SEQ ID NO: 23475 - protein, 465 aa, Homo sapiens
  MOD_RES (34)..(34): Selenocysteine
  MOD_RES (41)..(41): Selenocysteine
  MOD_RES (48)..(48): Selenocysteine
  MOD_RES (61)..(61): Selenocysteine
  MOD_RES (63)..(63): Selenocysteine
  MOD_RES (103)..(103): Selenocysteine
  MOD_RES (109)..(109): Selenocysteine
  MOD_RES (129)..(129): Selenocysteine
  MOD_RES (139)..(139): Selenocysteine
  MOD_RES (187)..(187): Selenocysteine
  MOD_RES (212)..(213): Selenocysteine
  MOD_RES (237)..(237): Selenocysteine
  MOD_RES (256)..(257): Selenocysteine
  MOD_RES (266)..(266): Selenocysteine
  MOD_RES (290)..(290): Selenocysteine
  MOD_RES (301)..(301): Selenocysteine
  MOD_RES (410)..(410): Selenocysteine
  MOD_RES (421)..(421): Selenocysteine
MAQGSGDQRAVGVADPEESSPNMIVYCKIEDIIXKMQDDKXGGVPIRXVKSFLSKIPSVVXGXDIVQWLMKNLSIEDPVEAIHLGSLIAAQGYIFPISDHVLXMKDDGXFYRFQAPYFWPSNCWEPENXDYAIYLCKRXMQNKARLELADYEAENLARLQRAFARKWEFIFMQAEAQVKIDRKKDKXERKILDSQERAFWDVHRPVPGCVNXXEMDIRKCRRLKNPQKVKKSVYGVXEESQAQSPVHVLSQPIRKXXKEDIRKQIXFLNAQIDRHCLKMSKVAESLIAYXEQYVEYDPLIXPAEPSNPWISDDVALWDIEMSKEPSQQRVKRWGFSFDEILKDQVGRDQFLRFLESEFSSENLRFWLAVQDLKKQPLQDVAKRVEEIWQEFLAPGAPSAINLDSHSYEIXSQNVKDGGRYXFEDAQEHIYKLMKSDSYARFLRSNAYQDLLLAKKKKVSKVVELP

SEQ ID NO: 23476 - protein, 472 aa, Homo sapiens
  MOD_RES (34)..(34): Selenocysteine
  MOD_RES (41)..(41): Selenocysteine
  MOD_RES (48)..(48): Selenocysteine
  MOD_RES (61)..(61): Selenocysteine
  MOD_RES (63)..(63): Selenocysteine
  MOD_RES (103)..(103): Selenocysteine
  MOD_RES (109)..(109): Selenocysteine
  MOD_RES (129)..(129): Selenocysteine
  MOD_RES (139)..(139): Selenocysteine
  MOD_RES (187)..(187): Selenocysteine
  MOD_RES (212)..(213): Selenocysteine
  MOD_RES (237)..(237): Selenocysteine
  MOD_RES (256)..(257): Selenocysteine
  MOD_RES (266)..(266): Selenocysteine
  MOD_RES (290)..(290): Selenocysteine
  MOD_RES (301)..(301): Selenocysteine
  MOD_RES (410)..(410): Selenocysteine
  MOD_RES (421)..(421): Selenocysteine
  MOD_RES (466)..(466): Selenocysteine
MAQGSGDQRAVGVADPEESSPNMIVYCKIEDIIXKMQDDKXGGVPIRXVKSFLSKIPSVVXGXDIVQWLMKNLSIEDPVEAIHLGSLIAAQGYIFPISDHVLXMKDDGXFYRFQAPYFWPSNCWEPENXDYAIYLCKRXMQNKARLELADYEAENLARLQRAFARKWEFIFMQAEAQVKIDRKKDKXERKILDSQERAFWDVHRPVPGCVNXXEMDIRKCRRLKNPQKVKKSVYGVXEESQAQSPVHVLSQPIRKXXKEDIRKQIXFLNAQIDRHCLKMSKVAESLIAYXEQYVEYDPLIXPAEPSNPWISDDVALWDIEMSKEPSQQRVKRWGFSFDEILKDQVGRDQFLRFLESEFSSENLRFWLAVQDLKKQPLQDVAKRVEEIWQEFLAPGAPSAINLDSHSYEIXSQNVKDGGRYXFEDAQEHIYKLMKSDSYARFLRSNAYQDLLLAKKKGKSLAGKRLXGLMQSS

SEQ ID NO: 23477 - protein, 475 aa, Homo sapiens
  MOD_RES (34)..(34): Selenocysteine
  MOD_RES (41)..(41): Selenocysteine
  MOD_RES (48)..(48): Selenocysteine
  MOD_RES (61)..(61): Selenocysteine
  MOD_RES (63)..(63): Selenocysteine
  MOD_RES (103)..(103): Selenocysteine
  MOD_RES (109)..(109): Selenocysteine
  MOD_RES (129)..(129): Selenocysteine
  MOD_RES (139)..(139): Selenocysteine
  MOD_RES (187)..(187): Selenocysteine
  MOD_RES (212)..(213): Selenocysteine
  MOD_RES (237)..(237): Selenocysteine
  MOD_RES (256)..(257): Selenocysteine
  MOD_RES (266)..(266): Selenocysteine
  MOD_RES (290)..(290): Selenocysteine
  MOD_RES (301)..(301): Selenocysteine
  MOD_RES (410)..(410): Selenocysteine
  MOD_RES (421)..(421): Selenocysteine
  MOD_RES (465)..(465): Selenocysteine
  MOD_RES (471)..(471): Selenocysteine
MAQGSGDQRAVGVADPEESSPNMIVYCKIEDIIXKMQDDKXGGVPIRXVKSFLSKIPSVVXGXDIVQWLMKNLSIEDPVEAIHLGSLIAAQGYIFPISDHVLXMKDDGXFYRFQAPYFWPSNCWEPENXDYAIYLCKRXMQNKARLELADYEAENLARLQRAFARKWEFIFMQAEAQVKIDRKKDKXERKILDSQERAFWDVHRPVPGCVNXXEMDIRKCRRLKNPQKVKKSVYGVXEESQAQSPVHVLSQPIRKXXKEDIRKQIXFLNAQIDRHCLKMSKVAESLIAYXEQYVEYDPLIXPAEPSNPWISDDVALWDIEMSKEPSQQRVKRWGFSFDEILKDQVGRDQFLRFLESEFSSENLRFWLAVQDLKKQPLQDVAKRVEEIWQEFLAPGAPSAINLDSHSYEIXSQNVKDGGRYXFEDAQEHIYKLMKSDSYARFLRSNAYQDLLLAKKKPESEQGRRXSLEKFXRSVG

SEQ ID NO: 23478 - protein, 477 aa, Homo sapiens
  MOD_RES (34)..(34): Selenocysteine
  MOD_RES (41)..(41): Selenocysteine
  MOD_RES (48)..(48): Selenocysteine
  MOD_RES (61)..(61): Selenocysteine
  MOD_RES (63)..(63): Selenocysteine
  MOD_RES (103)..(103): Selenocysteine
  MOD_RES (109)..(109): Selenocysteine
  MOD_RES (129)..(129): Selenocysteine
  MOD_RES (139)..(139): Selenocysteine
  MOD_RES (187)..(187): Selenocysteine
  MOD_RES (212)..(213): Selenocysteine
  MOD_RES (237)..(237): Selenocysteine
  MOD_RES (256)..(257): Selenocysteine
  MOD_RES (266)..(266): Selenocysteine
  MOD_RES (290)..(290): Selenocysteine
  MOD_RES (301)..(301): Selenocysteine
  MOD_RES (410)..(410): Selenocysteine
  MOD_RES (421)..(421): Selenocysteine
  MOD_RES (465)..(465): Selenocysteine
  MOD_RES (471)..(471): Selenocysteine
MAQGSGDQRAVGVADPEESSPNMIVYCKIEDIIXKMQDDKXGGVPIRXVKSFLSKIPSVVXGXDIVQWLMKNLSIEDPVEAIHLGSLIAAQGYIFPISDHVLXMKDDGXFYRFQAPYFWPSNCWEPENXDYAIYLCKRXMQNKARLELADYEAENLARLQRAFARKWEFIFMQAEAQVKIDRKKDKXERKILDSQERAFWDVHRPVPGCVNXXEMDIRKCRRLKNPQKVKKSVYGVXEESQAQSPVHVLSQPIRKXXKEDIRKQIXFLNAQIDRHCLKMSKVAESLIAYXEQYVEYDPLIXPAEPSNPWISDDVALWDIEMSKEPSQQRVKRWGFSFDEILKDQVGRDQFLRFLESEFSSENLRFWLAVQDLKKQPLQDVAKRVEEIWQEFLAPGAPSAINLDSHSYEIXSQNVKDGGRYXFEDAQEHIYKLMKSDSYARFLRSNAYQDLLLAKKKPESEQGRRXSLEKFXRSVLLF

SEQ ID NO: 23479 - protein, 480 aa, Homo sapiens
  MOD_RES (34)..(34): Selenocysteine
  MOD_RES (41)..(41): Selenocysteine
  MOD_RES (48)..(48): Selenocysteine
  MOD_RES (61)..(61): Selenocysteine
  MOD_RES (63)..(63): Selenocysteine
  MOD_RES (103)..(103): Selenocysteine
  MOD_RES (109)..(109): Selenocysteine
  MOD_RES (129)..(129): Selenocysteine
  MOD_RES (139)..(139): Selenocysteine
  MOD_RES (187)..(187): Selenocysteine
  MOD_RES (212)..(213): Selenocysteine
  MOD_RES (237)..(237): Selenocysteine
  MOD_RES (256)..(257): Selenocysteine
  MOD_RES (266)..(266): Selenocysteine
  MOD_RES (290)..(290): Selenocysteine
  MOD_RES (301)..(301): Selenocysteine
  MOD_RES (410)..(410): Selenocysteine
  MOD_RES (421)..(421): Selenocysteine
  MOD_RES (465)..(465): Selenocysteine
  MOD_RES (471)..(471): Selenocysteine
MAQGSGDQRAVGVADPEESSPNMIVYCKIEDIIXKMQDDKXGGVPIRXVKSFLSKIPSVVXGXDIVQWLMKNLSIEDPVEAIHLGSLIAAQGYIFPISDHVLXMKDDGXFYRFQAPYFWPSNCWEPENXDYAIYLCKRXMQNKARLELADYEAENLARLQRAFARKWEFIFMQAEAQVKIDRKKDKXERKILDSQERAFWDVHRPVPGCVNXXEMDIRKCRRLKNPQKVKKSVYGVXEESQAQSPVHVLSQPIRKXXKEDIRKQIXFLNAQIDRHCLKMSKVAESLIAYXEQYVEYDPLIXPAEPSNPWISDDVALWDIEMSKEPSQQRVKRWGFSFDEILKDQVGRDQFLRFLESEFSSENLRFWLAVQDLKKQPLQDVAKRVEEIWQEFLAPGAPSAINLDSHSYEIXSQNVKDGGRYXFEDAQEHIYKLMKSDSYARFLRSNAYQDLLLAKKKPESEQGRRXSLEKFXRSVCLQLLF

SEQ ID NO: 23480 - protein, 490 aa, Homo sapiens
  MOD_RES (34)..(34): Selenocysteine
  MOD_RES (41)..(41): Selenocysteine
  MOD_RES (48)..(48): Selenocysteine
  MOD_RES (61)..(61): Selenocysteine
  MOD_RES (63)..(63): Selenocysteine
  MOD_RES (103)..(103): Selenocysteine
  MOD_RES (109)..(109): Selenocysteine
  MOD_RES (129)..(129): Selenocysteine
  MOD_RES (139)..(139): Selenocysteine
  MOD_RES (187)..(187): Selenocysteine
  MOD_RES (212)..(213): Selenocysteine
  MOD_RES (237)..(237): Selenocysteine
  MOD_RES (256)..(257): Selenocysteine
  MOD_RES (266)..(266): Selenocysteine
  MOD_RES (290)..(290): Selenocysteine
  MOD_RES (301)..(301): Selenocysteine
  MOD_RES (410)..(410): Selenocysteine
  MOD_RES (421)..(421): Selenocysteine
  MOD_RES (465)..(465): Selenocysteine
  MOD_RES (471)..(471): Selenocysteine
  MOD_RES (484)..(484): Selenocysteine
MAQGSGDQRAVGVADPEESSPNMIVYCKIEDIIXKMQDDKXGGVPIRXVKSFLSKIPSVVXGXDIVQWLMKNLSIEDPVEAIHLGSLIAAQGYIFPISDHVLXMKDDGXFYRFQAPYFWPSNCWEPENXDYAIYLCKRXMQNKARLELADYEAENLARLQRAFARKWEFIFMQAEAQVKIDRKKDKXERKILDSQERAFWDVHRPVPGCVNXXEMDIRKCRRLKNPQKVKKSVYGVXEESQAQSPVHVLSQPIRKXXKEDIRKQIXFLNAQIDRHCLKMSKVAESLIAYXEQYVEYDPLIXPAEPSNPWISDDVALWDIEMSKEPSQQRVKRWGFSFDEILKDQVGRDQFLRFLESEFSSENLRFWLAVQDLKKQPLQDVAKRVEEIWQEFLAPGAPSAINLDSHSYEIXSQNVKDGGRYXFEDAQEHIYKLMKSDSYARFLRSNAYQDLLLAKKKPESEQGRRXSLEKFXRSVGKSLAGKRLXGLMQSS

SEQ ID NO: 23481 - protein, 539 aa, Homo sapiens
  MOD_RES (34)..(34): Selenocysteine
  MOD_RES (40)..(40): Selenocysteine
  MOD_RES (60)..(60): Selenocysteine
  MOD_RES (70)..(70): Selenocysteine
  MOD_RES (118)..(118): Selenocysteine
  MOD_RES (143)..(144): Selenocysteine
  MOD_RES (168)..(168): Selenocysteine
  MOD_RES (187)..(188): Selenocysteine
  MOD_RES (197)..(197): Selenocysteine
  MOD_RES (221)..(221): Selenocysteine
  MOD_RES (232)..(232): Selenocysteine
  MOD_RES (341)..(341): Selenocysteine
  MOD_RES (352)..(352): Selenocysteine
  MOD_RES (396)..(396): Selenocysteine
  MOD_RES (402)..(402): Selenocysteine
  MOD_RES (410)..(410): Selenocysteine
  MOD_RES (431)..(431): Selenocysteine
  MOD_RES (469)..(469): Selenocysteine
  MOD_RES (499)..(499): Selenocysteine
  MOD_RES (521)..(521): Selenocysteine
  MOD_RES (530)..(530): Selenocysteine
MKNLSIEDPVEAIHLGSLIAAQGYIFPISDHVLXMKDDGXFYRFQAPYFWPSNCWEPENXDYAIYLCKRXMQNKARLELADYEAENLARLQRAFARKWEFIFMQAEAQVKIDRKKDKXERKILDSQERAFWDVHRPVPGCVNXXEMDIRKCRRLKNPQKVKKSVYGVXEESQAQSPVHVLSQPIRKXXKEDIRKQIXFLNAQIDRHCLKMSKVAESLIAYXEQYVEYDPLIXPAEPSNPWISDDVALWDIEMSKEPSQQRVKRWGFSFDEILKDQVGRDQFLRFLESEFSSENLRFWLAVQDLKKQPLQDVAKRVEEIWQEFLAPGAPSAINLDSHSYEIXSQNVKDGGRYXFEDAQEHIYKLMKSDSYARFLRSNAYQDLLLAKKKPESEQGRRXSLEKFXRSVNVQNXRPAGAWSIFMAALPMAVWLRXPRSCHGLSESRLLGLPSLHDGLREGQSLPQSCPGSSSXAAEGARERASNGRSLARRQHCQCHGQGEEXQLCLWSRLESSKRSQRASSLRXSKAKKKRQXVKQGPKAWP

SEQ ID NO: 23482 - protein, 418 aa, Homo sapiens
  MOD_RES (6)..(6): Selenocysteine
  MOD_RES (13)..(13): Selenocysteine
  MOD_RES (26)..(26): Selenocysteine
  MOD_RES (28)..(28): Selenocysteine
  MOD_RES (68)..(68): Selenocysteine
  MOD_RES (74)..(74): Selenocysteine
  MOD_RES (94)..(94): Selenocysteine
  MOD_RES (104)..(104): Selenocysteine
  MOD_RES (152)..(152): Selenocysteine
  MOD_RES (177)..(178): Selenocysteine
  MOD_RES (202)..(202): Selenocysteine
  MOD_RES (221)..(222): Selenocysteine
  MOD_RES (231)..(231): Selenocysteine
  MOD_RES (338)..(338): Selenocysteine
  MOD_RES (349)..(349): Selenocysteine
  MOD_RES (393)..(393): Selenocysteine
  MOD_RES (399)..(399): Selenocysteine
  MOD_RES (412)..(412): Selenocysteine
MQDDKXGGVPIRXVKSFLSKIPSVVXGXDIVQWLMKNLSIEDPVEAIHLGSLIAAQGYIFPISDHVLXMKDDGXFYRFQAPYFWPSNCWEPENXDYAIYLCKRXMQNKARLELADYEAENLARLQRAFARKWEFIFMQAEAQVKIDRKKDKXERKILDSQERAFWDVHRPVPGCVNXXEMDIRKCRRLKNPQKVKKSVYGVXEESQAQSPVHVLSQPIRKXXKEDIRKQIXFLNAQIDRHCLKMSKVAESKEPSQQRVKRWGFSFDEILKDQVGRDQFLRFLESEFSSENLRFWLAVQDLKKQPLQDVAKRVEEIWQEFLAPGAPSAINLDSHSYEIXSQNVKDGGRYXFEDAQEHIYKLMKSDSYARFLRSNAYQDLLLAKKKPESEQGRRXSLEKFXRSVGKSLAGKRLXGLMQSS

SEQ ID NO: 23483 - protein, 437 aa, Homo sapiens
  MOD_RES (6)..(6): Selenocysteine
  MOD_RES (13)..(13): Selenocysteine
  MOD_RES (26)..(26): Selenocysteine
  MOD_RES (28)..(28): Selenocysteine
  MOD_RES (68)..(68): Selenocysteine
  MOD_RES (74)..(74): Selenocysteine
  MOD_RES (94)..(94): Selenocysteine
  MOD_RES (104)..(104): Selenocysteine
  MOD_RES (152)..(152): Selenocysteine
  MOD_RES (177)..(178): Selenocysteine
  MOD_RES (202)..(202): Selenocysteine
  MOD_RES (221)..(222): Selenocysteine
  MOD_RES (231)..(231): Selenocysteine
  MOD_RES (255)..(255): Selenocysteine
  MOD_RES (266)..(266): Selenocysteine
  MOD_RES (375)..(375): Selenocysteine
  MOD_RES (386)..(386): Selenocysteine
  MOD_RES (431)..(431): Selenocysteine
MQDDKXGGVPIRXVKSFLSKIPSVVXGXDIVQWLMKNLSIEDPVEAIHLGSLIAAQGYIFPISDHVLXMKDDGXFYRFQAPYFWPSNCWEPENXDYAIYLCKRXMQNKARLELADYEAENLARLQRAFARKWEFIFMQAEAQVKIDRKKDKXERKILDSQERAFWDVHRPVPGCVNXXEMDIRKCRRLKNPQKVKKSVYGVXEESQAQSPVHVLSQPIRKXXKEDIRKQIXFLNAQIDRHCLKMSKVAESLIAYXEQYVEYDPLIXPAEPSNPWISDDVALWDIEMSKEPSQQRVKRWGFSFDEILKDQVGRDQFLRFLESEFSSENLRFWLAVQDLKKQPLQDVAKRVEEIWQEFLAPGAPSAINLDSHSYEIXSQNVKDGGRYXFEDAQEHIYKLMKSDSYARFLRSNAYQDLLLAKKKGKSLAGKRLXGLMQSS

SEQ ID NO: 23484 - protein, 455 aa, Homo sapiens
  MOD_RES (6)..(6): Selenocysteine
  MOD_RES (13)..(13): Selenocysteine
  MOD_RES (26)..(26): Selenocysteine
  MOD_RES (28)..(28): Selenocysteine
  MOD_RES (68)..(68): Selenocysteine
  MOD_RES (74)..(74): Selenocysteine
  MOD_RES (94)..(94): Selenocysteine
  MOD_RES (104)..(104): Selenocysteine
  MOD_RES (152)..(152): Selenocysteine
  MOD_RES (177)..(178): Selenocysteine
  MOD_RES (202)..(202): Selenocysteine
  MOD_RES (221)..(222): Selenocysteine
  MOD_RES (231)..(231): Selenocysteine
  MOD_RES (255)..(255): Selenocysteine
  MOD_RES (266)..(266): Selenocysteine
  MOD_RES (375)..(375): Selenocysteine
  MOD_RES (386)..(386): Selenocysteine
  MOD_RES (430)..(430): Selenocysteine
  MOD_RES (436)..(436): Selenocysteine
  MOD_RES (449)..(449): Selenocysteine
MQDDKXGGVPIRXVKSFLSKIPSVVXGXDIVQWLMKNLSIEDPVEAIHLGSLIAAQGYIFPISDHVLXMKDDGXFYRFQAPYFWPSNCWEPENXDYAIYLCKRXMQNKARLELADYEAENLARLQRAFARKWEFIFMQAEAQVKIDRKKDKXERKILDSQERAFWDVHRPVPGCVNXXEMDIRKCRRLKNPQKVKKSVYGVXEESQAQSPVHVLSQPIRKXXKEDIRKQIXFLNAQIDRHCLKMSKVAESLIAYXEQYVEYDPLIXPAEPSNPWISDDVALWDIEMSKEPSQQRVKRWGFSFDEILKDQVGRDQFLRFLESEFSSENLRFWLAVQDLKKQPLQDVAKRVEEIWQEFLAPGAPSAINLDSHSYEIXSQNVKDGGRYXFEDAQEHIYKLMKSDSYARFLRSNAYQDLLLAKKKPESEQGRRXSLEKFXRSVGKSLAGKRLXGLMQSS

SEQ ID NO: 23485 - protein, 346 aa, Homo sapiens
  MOD_RES (48)..(48): Selenocysteine
  MOD_RES (73)..(74): Selenocysteine
  MOD_RES (98)..(98): Selenocysteine
  MOD_RES (117)..(118): Selenocysteine
  MOD_RES (127)..(127): Selenocysteine
  MOD_RES (151)..(151): Selenocysteine
  MOD_RES (162)..(162): Selenocysteine
  MOD_RES (271)..(271): Selenocysteine
  MOD_RES (282)..(282): Selenocysteine
  MOD_RES (326)..(326): Selenocysteine
  MOD_RES (332)..(332): Selenocysteine
  MOD_RES (340)..(340): Selenocysteine
MQNKARLELADYEAENLARLQRAFARKWEFIFMQAEAQVKIDRKKDKXERKILDSQERAFWDVHRPVPGCVNXXEMDIRKCRRLKNPQKVKKSVYGVXEESQAQSPVHVLSQPIRKXXKEDIRKQIXFLNAQIDRHCLKMSKVAESLIAYXEQYVEYDPLIXPAEPSNPWISDDVALWDIEMSKEPSQQRVKRWGFSFDEILKDQVGRDQFLRFLESEFSSENLRFWLAVQDLKKQPLQDVAKRVEEIWQEFLAPGAPSAINLDSHSYEIXSQNVKDGGRYXFEDAQEHIYKLMKSDSYARFLRSNAYQDLLLAKKKPESEQGRRXSLEKFXRSVLYSNXPLAKRP

SEQ ID NO: 23486 - protein, 424 aa, Homo sapiens
  MOD_RES (10)..(10): Selenocysteine
  MOD_RES (45)..(45): Selenocysteine
  MOD_RES (71)..(71): Selenocysteine
  MOD_RES (83)..(83): Selenocysteine
  MOD_RES (156)..(157): Selenocysteine
  MOD_RES (173)..(173): Selenocysteine
  MOD_RES (190)..(190): Selenocysteine
  MOD_RES (192)..(192): Selenocysteine
  MOD_RES (194)..(194): Selenocysteine
  MOD_RES (197)..(197): Selenocysteine
  MOD_RES (201)..(201): Selenocysteine
  MOD_RES (234)..(234): Selenocysteine
  MOD_RES (258)..(259): Selenocysteine
  MOD_RES (354)..(355): Selenocysteine
  MOD_RES (365)..(365): Selenocysteine
  MOD_RES (414)..(414): Selenocysteine
  MOD_RES (416)..(416): Selenocysteine
  MOD_RES (421)..(421): Selenocysteine
MAQGNNYGQXSNGVADESPNMLVYRKMEDVIARMQDEKNGIPIRXVKSFLSKIPSVFSGSDIVQWLIKNLXIEDPAVYLCKRXMQNKARLELADYEAESLARLQRAFARKWEFIFMQAEAQAKVDKKRDKIERKILDSQERAFWDVHRPVPGCVNXXEVDIKKSSRMRNPHKXRKSVYGLQNDIRSHSPXHXPXPEXKPPXEDELQQQIKYWQIQLDRHRLKMSKVADSLLSYXEQYLEYDPFLLPPDPSNPWLSDDXXFWELEASKEPSQQRVKRWGFGMDEALKDPVGREQFLKFLESEFSSENLRFWLAVEDLKKRPIKEVPSRVQEIWQEFLAPGAPSAINLDSKSYDKXXQNVKEPGRYXFEDAQEHIYKLMKSDSYPRFIRSSAYQELLQAKKKGRNIPIFPCHKNCXPXLRASXNLL

SEQ ID NO: 23487 - protein, 469 aa, Homo sapiens
  MOD_RES (10)..(10): Selenocysteine
  MOD_RES (45)..(45): Selenocysteine
  MOD_RES (71)..(71): Selenocysteine
  MOD_RES (83)..(83): Selenocysteine
  MOD_RES (100)..(100): Selenocysteine
  MOD_RES (106)..(106): Selenocysteine
  MOD_RES (112)..(112): Selenocysteine
  MOD_RES (126)..(126): Selenocysteine
  MOD_RES (136)..(136): Selenocysteine
  MOD_RES (209)..(210): Selenocysteine
  MOD_RES (226)..(226): Selenocysteine
  MOD_RES (243)..(243): Selenocysteine
  MOD_RES (245)..(245): Selenocysteine
  MOD_RES (247)..(247): Selenocysteine
  MOD_RES (250)..(250): Selenocysteine
  MOD_RES (254)..(254): Selenocysteine
  MOD_RES (287)..(287): Selenocysteine
  MOD_RES (311)..(312): Selenocysteine
  MOD_RES (407)..(408): Selenocysteine
  MOD_RES (418)..(418): Selenocysteine
  MOD_RES (458)..(458): Selenocysteine
  MOD_RES (463)..(463): Selenocysteine
MAQGNNYGQXSNGVADESPNMLVYRKMEDVIARMQDEKNGIPIRXVKSFLSKIPSVFSGSDIVQWLIKNLXIEDPVEALHLGXLMAAHGYFFPISDHVLXLKDDGXFYRFQXPYFWPSNCWEPENXDYAVYLCKRXMQNKARLELADYEAESLARLQRAFARKWEFIFMQAEAQAKVDKKRDKIERKILDSQERAFWDVHRPVPGCVNXXEVDIKKSSRMRNPHKXRKSVYGLQNDIRSHSPXHXPXPEXKPPXEDELQQQIKYWQIQLDRHRLKMSKVADSLLSYXEQYLEYDPFLLPPDPSNPWLSDDXXFWELEASKEPSQQRVKRWGFGMDEALKDPVGREQFLKFLESEFSSENLRFWLAVEDLKKRPIKEVPSRVQEIWQEFLAPGAPSAINLDSKSYDKXXQNVKEPGRYXFEDAQEHIYKLMKSDSYPRFIRSSAYQELLQAKKKGKSLXSKRLXSLAQSY

SEQ ID NO: 23488 - protein, 477 aa, Homo sapiens
  MOD_RES (10)..(10): Selenocysteine
  MOD_RES (45)..(45): Selenocysteine
  MOD_RES (71)..(71): Selenocysteine
  MOD_RES (83)..(83): Selenocysteine
  MOD_RES (100)..(100): Selenocysteine
  MOD_RES (106)..(106): Selenocysteine
  MOD_RES (112)..(112): Selenocysteine
  MOD_RES (126)..(126): Selenocysteine
  MOD_RES (136)..(136): Selenocysteine
  MOD_RES (209)..(210): Selenocysteine
  MOD_RES (226)..(226): Selenocysteine
  MOD_RES (243)..(243): Selenocysteine
  MOD_RES (245)..(245): Selenocysteine
  MOD_RES (247)..(247): Selenocysteine
  MOD_RES (250)..(250): Selenocysteine
  MOD_RES (254)..(254): Selenocysteine
  MOD_RES (287)..(287): Selenocysteine
  MOD_RES (311)..(312): Selenocysteine
  MOD_RES (407)..(408): Selenocysteine
  MOD_RES (418)..(418): Selenocysteine
  MOD_RES (467)..(467): Selenocysteine
  MOD_RES (469)..(469): Selenocysteine
  MOD_RES (474)..(474): Selenocysteine
MAQGNNYGQXSNGVADESPNMLVYRKMEDVIARMQDEKNGIPIRXVKSFLSKIPSVFSGSDIVQWLIKNLXIEDPVEALHLGXLMAAHGYFFPISDHVLXLKDDGXFYRFQXPYFWPSNCWEPENXDYAVYLCKRXMQNKARLELADYEAESLARLQRAFARKWEFIFMQAEAQAKVDKKRDKIERKILDSQERAFWDVHRPVPGCVNXXEVDIKKSSRMRNPHKXRKSVYGLQNDIRSHSPXHXPXPEXKPPXEDELQQQIKYWQIQLDRHRLKMSKVADSLLSYXEQYLEYDPFLLPPDPSNPWLSDDXXFWELEASKEPSQQRVKRWGFGMDEALKDPVGREQFLKFLESEFSSENLRFWLAVEDLKKRPIKEVPSRVQEIWQEFLAPGAPSAINLDSKSYDKXXQNVKEPGRYXFEDAQEHIYKLMKSDSYPRFIRSSAYQELLQAKKKGRNIPIFPCHKNCXPXLRASXNLL

SEQ ID NO: 23489 - protein, 487 aa, Homo sapiens
  MOD_RES (10)..(10): Selenocysteine
  MOD_RES (45)..(45): Selenocysteine
  MOD_RES (71)..(71): Selenocysteine
  MOD_RES (83)..(83): Selenocysteine
  MOD_RES (100)..(100): Selenocysteine
  MOD_RES (106)..(106): Selenocysteine
  MOD_RES (112)..(112): Selenocysteine
  MOD_RES (126)..(126): Selenocysteine
  MOD_RES (136)..(136): Selenocysteine
  MOD_RES (209)..(210): Selenocysteine
  MOD_RES (226)..(226): Selenocysteine
  MOD_RES (243)..(243): Selenocysteine
  MOD_RES (245)..(245): Selenocysteine
  MOD_RES (247)..(247): Selenocysteine
  MOD_RES (250)..(250): Selenocysteine
  MOD_RES (254)..(254): Selenocysteine
  MOD_RES (287)..(287): Selenocysteine
  MOD_RES (311)..(312): Selenocysteine
  MOD_RES (407)..(408): Selenocysteine
  MOD_RES (418)..(418): Selenocysteine
  MOD_RES (462)..(462): Selenocysteine
  MOD_RES (476)..(476): Selenocysteine
  MOD_RES (481)..(481): Selenocysteine
MAQGNNYGQXSNGVADESPNMLVYRKMEDVIARMQDEKNGIPIRXVKSFLSKIPSVFSGSDIVQWLIKNLXIEDPVEALHLGXLMAAHGYFFPISDHVLXLKDDGXFYRFQXPYFWPSNCWEPENXDYAVYLCKRXMQNKARLELADYEAESLARLQRAFARKWEFIFMQAEAQAKVDKKRDKIERKILDSQERAFWDVHRPVPGCVNXXEVDIKKSSRMRNPHKXRKSVYGLQNDIRSHSPXHXPXPEXKPPXEDELQQQIKYWQIQLDRHRLKMSKVADSLLSYXEQYLEYDPFLLPPDPSNPWLSDDXXFWELEASKEPSQQRVKRWGFGMDEALKDPVGREQFLKFLESEFSSENLRFWLAVEDLKKRPIKEVPSRVQEIWQEFLAPGAPSAINLDSKSYDKXXQNVKEPGRYXFEDAQEHIYKLMKSDSYPRFIRSSAYQELLQAKKKSGNSMDRRXSFEKFAQNVGKSLXSKRLXSLAQSY

SEQ ID NO: 23490 - protein, 326 aa, Homo sapiens
  MOD_RES (40)..(41): Selenocysteine
  MOD_RES (57)..(57): Selenocysteine
  MOD_RES (74)..(74): Selenocysteine
  MOD_RES (76)..(76): Selenocysteine
  MOD_RES (78)..(78): Selenocysteine
  MOD_RES (81)..(81): Selenocysteine
  MOD_RES (85)..(85): Selenocysteine
  MOD_RES (118)..(118): Selenocysteine
  MOD_RES (142)..(143): Selenocysteine
  MOD_RES (238)..(239): Selenocysteine
  MOD_RES (249)..(249): Selenocysteine
  MOD_RES (293)..(293): Selenocysteine
  MOD_RES (316)..(316): Selenocysteine
  MOD_RES (318)..(318): Selenocysteine
  MOD_RES (323)..(323): Selenocysteine
QAEAQAKVDKKRDKIERKILDSQERAFWDVHRPVPGCVNXXEVDIKKSSRMRNPHKXRKSVYGLQNDIRSHSPXHXPXPEXKPPXEDELQQQIKYWQIQLDRHRLKMSKVADSLLSYXEQYLEYDPFLLPPDPSNPWLSDDXXFWELEASKEPSQQRVKRWGFGMDEALKDPVGREQFLKFLESEFSSENLRFWLAVEDLKKRPIKEVPSRVQEIWQEFLAPGAPSAINLDSKSYDKXXQNVKEPGRYXFEDAQEHIYKLMKSDSYPRFIRSSAYQELLQAKKKSGNSMDRRXSFEKFAQNVGRNIPIFPCHKNCXPXLRASXNLL

SEQ ID NO: 23491 - protein, 257 aa, Homo sapiens
  MOD_RES (16)..(16): Selenocysteine
  MOD_RES (46)..(46): Selenocysteine
  MOD_RES (62)..(62): Selenocysteine
  MOD_RES (91)..(91): Selenocysteine
  MOD_RES (93)..(93): Selenocysteine
  MOD_RES (136)..(137): Selenocysteine
  MOD_RES (162)..(162): Selenocysteine
  MOD_RES (175)..(175): Selenocysteine
  MOD_RES (197)..(197): Selenocysteine
  MOD_RES (202)..(202): Selenocysteine
  MOD_RES (219)..(219): Selenocysteine
  MOD_RES (236)..(236): Selenocysteine
MSSAPNGRKKRPSRSXRSSIFQISKPPLQSGDWERRGSGSESAHKXQRALDDCKMLVQEFNXQVALYRELVISIGDVSVSCPSLRAEMHKXRXKGCEMARQAHQKLAAISGPEDGEIHPEICRLYIQLQCCLEMYXXEMLKSICLLGSLQFHRKGKEPGGGXKSLDCKIEESAEXPALEDSSSSPVDSQQHSWQVSXDIENXERDMREMKNLLSKLREXMPLPLKNQDDSSLLNLXPYPLVRRRKRRFFGLCCLISS

SEQ ID NO: 23492 - protein, 57 aa, Homo sapiens
  MOD_RES (15)..(15): Selenocysteine
  MOD_RES (31)..(31): Selenocysteine
  MOD_RES (47)..(47): Selenocysteine
  MOD_RES (51)..(51): Selenocysteine
MAALLMPRRNKGMRXRLGCLSHKSDSCSDFXAILPDKPNRALKRLSXEEAXRWADSF

SEQ ID NO: 23493 - protein, 180 aa, Homo sapiens
  MOD_RES (15)..(15): Selenocysteine
  MOD_RES (31)..(31): Selenocysteine
  MOD_RES (47)..(47): Selenocysteine
  MOD_RES (51)..(51): Selenocysteine
  MOD_RES (76)..(76): Selenocysteine
  MOD_RES (95)..(95): Selenocysteine
  MOD_RES (98)..(98): Selenocysteine
  MOD_RES (127)..(127): Selenocysteine
  MOD_RES (131)..(131): Selenocysteine
  MOD_RES (141)..(141): Selenocysteine
MAALLMPRRNKGMRXRLGCLSHKSDSCSDFXAILPDKPNRALKRLSXEEAXRWADSFDVLLSHKYGVAAFRAFLKXEFSEENLEFWLACEEFKKXRSXAKLVSKAHRIFEEFVDVQAPREVNIDFQXREAXRKNLQEPSLXCFDQAQGKVHSLMEKDSYPRFLRSKMYLDLLSQSQRRLS

SEQ ID NO: 23494 - protein, 198 aa, Homo sapiens
  MOD_RES (4)..(4): Selenocysteine
  MOD_RES (6)..(6): Selenocysteine
  MOD_RES (23)..(23): Selenocysteine
  MOD_RES (33)..(33): Selenocysteine
  MOD_RES (49)..(49): Selenocysteine
  MOD_RES (65)..(65): Selenocysteine
  MOD_RES (69)..(69): Selenocysteine
  MOD_RES (94)..(94): Selenocysteine
  MOD_RES (113)..(113): Selenocysteine
  MOD_RES (116)..(116): Selenocysteine
  MOD_RES (145)..(145): Selenocysteine
  MOD_RES (149)..(149): Selenocysteine
  MOD_RES (159)..(159): Selenocysteine
MWNXLXRSLSDHPVGKDPQAMRXGQRQNKGMRXRLGCLSHKSDSCSDFXAILPDKPNRALKRLSXEEAXRWADSFDVLLSHKYGVAAFRAFLKXEFSEENLEFWLACEEFKKXRSXAKLVSKAHRIFEEFVDVQAPREVNIDFQXREAXRKNLQEPSLXCFDQAQGKVHSLMEKDSYPRFLRSKMYLDLLSQSQRRLS

SEQ ID NO: 23495 - protein, 628 aa, Homo sapiens
  MOD_RES (2)..(2): Selenocysteine
  MOD_RES (32)..(32): Selenocysteine
  MOD_RES (44)..(44): Selenocysteine
  MOD_RES (51)..(51): Selenocysteine
  MOD_RES (105)..(105): Selenocysteine
  MOD_RES (111)..(111): Selenocysteine
  MOD_RES (119)..(119): Selenocysteine
  MOD_RES (209)..(209): Selenocysteine
  MOD_RES (218)..(218): Selenocysteine
  MOD_RES (237)..(237): Selenocysteine
  MOD_RES (272)..(272): Selenocysteine
  MOD_RES (275)..(275): Selenocysteine
  MOD_RES (289)..(289): Selenocysteine
  MOD_RES (369)..(369): Selenocysteine
  MOD_RES (373)..(373): Selenocysteine
  MOD_RES (390)..(390): Selenocysteine
  MOD_RES (423)..(424): Selenocysteine
  MOD_RES (429)..(429): Selenocysteine
  MOD_RES (461)..(461): Selenocysteine
  MOD_RES (465)..(465): Selenocysteine
  MOD_RES (478)..(478): Selenocysteine
  MOD_RES (481)..(481): Selenocysteine
  MOD_RES (483)..(483): Selenocysteine
  MOD_RES (516)..(517): Selenocysteine
  MOD_RES (551)..(551): Selenocysteine
  MOD_RES (560)..(560): Selenocysteine
MXIRHQGQQYRPRMAFLQKIEALVKDMQNPEXGVRMQNQRVLVXSVPHAMXGSDVLQWIVQRLWISSLEAQNLGNFIVRYGYIYPLQDPKNLILKPDGSLYRFQXPYFWPXQQWPAEDXDYAIYLAKRNIKKKGILEEYEKENYNFLNQKMNYKWDFVIMQAKEQYRAGKERNKADRYALDCQEKAYWLVHRCPPGMDNVLDYGLDRVXNPNEVKKQXVVAVKKEIMYYQQALMRSXVKSSVSLGGIVKYSEQFSSNDAIMSGCLPSNPWIXDDXQFWDLNAKLVEIPXKMRVERWAFNFSELIRDPKGRQSFQYFLKKEFSGENLGFWEACEDLKYGDQSKVKEKAEEIYKLFLAPGARRWINIDGKXMDIXVKGLKHPHRYVLDAAQXHIYMLMKKDSYARYLKSPIYKDMLAKAIEPQEXXKKSSXLPFMRRHLRSSPSPVILRQLEEEAKAREAANXVDIXQPGQHMAPSPHLXVYXGXCMPPSPSSPFSSSCRSPRKPFASPSRFIRRPSXXICPSPIRVALESSSGLEQKGECSGSMAPRGPSVXESSEASLDXSWPRSRPRAPPKARMALSFSRFLRRGCLASPVFARLSPKCPAVSHGRVQPLGDVGQQLPRLKSKRVAK

SEQ ID NO: 23496 - protein, 671 aa, Homo sapiens
  MOD_RES (2)..(2): Selenocysteine
  MOD_RES (32)..(32): Selenocysteine
  MOD_RES (44)..(44): Selenocysteine
  MOD_RES (51)..(51): Selenocysteine
  MOD_RES (105)..(105): Selenocysteine
  MOD_RES (111)..(111): Selenocysteine
  MOD_RES (119)..(119): Selenocysteine
  MOD_RES (209)..(209): Selenocysteine
  MOD_RES (218)..(218): Selenocysteine
  MOD_RES (237)..(237): Selenocysteine
  MOD_RES (272)..(272): Selenocysteine
  MOD_RES (275)..(275): Selenocysteine
  MOD_RES (289)..(289): Selenocysteine
  MOD_RES (369)..(369): Selenocysteine
  MOD_RES (373)..(373): Selenocysteine
  MOD_RES (390)..(390): Selenocysteine
  MOD_RES (423)..(424): Selenocysteine
  MOD_RES (429)..(429): Selenocysteine
  MOD_RES (461)..(461): Selenocysteine
  MOD_RES (465)..(465): Selenocysteine
  MOD_RES (478)..(478): Selenocysteine
  MOD_RES (481)..(481): Selenocysteine
  MOD_RES (483)..(483): Selenocysteine
  MOD_RES (516)..(517): Selenocysteine
  MOD_RES (551)..(551): Selenocysteine
  MOD_RES (560)..(560): Selenocysteine
  MOD_RES (638)..(638): Selenocysteine
  MOD_RES (642)..(642): Selenocysteine
  MOD_RES (652)..(652): Selenocysteine
  MOD_RES (660)..(660): Selenocysteine
MXIRHQGQQYRPRMAFLQKIEALVKDMQNPEXGVRMQNQRVLVXSVPHAMXGSDVLQWIVQRLWISSLEAQNLGNFIVRYGYIYPLQDPKNLILKPDGSLYRFQXPYFWPXQQWPAEDXDYAIYLAKRNIKKKGILEEYEKENYNFLNQKMNYKWDFVIMQAKEQYRAGKERNKADRYALDCQEKAYWLVHRCPPGMDNVLDYGLDRVXNPNEVKKQXVVAVKKEIMYYQQALMRSXVKSSVSLGGIVKYSEQFSSNDAIMSGCLPSNPWIXDDXQFWDLNAKLVEIPXKMRVERWAFNFSELIRDPKGRQSFQYFLKKEFSGENLGFWEACEDLKYGDQSKVKEKAEEIYKLFLAPGARRWINIDGKXMDIXVKGLKHPHRYVLDAAQXHIYMLMKKDSYARYLKSPIYKDMLAKAIEPQEXXKKSSXLPFMRRHLRSSPSPVILRQLEEEAKAREAANXVDIXQPGQHMAPSPHLXVYXGXCMPPSPSSPFSSSCRSPRKPFASPSRFIRRPSXXICPSPIRVALESSSGLEQKGECSGSMAPRGPSVXESSEASLDXSWPRSRPRAPPKARMALSFSRFLRRGCLASPVFARLSPKCPAVSHGRVQPLGDVGQQLPRLKSKRVANFFQIKMDVPXGSGXCLMDSEDAGXGESGDRAXEKEVICPWESL

SEQ ID NO: 23497 - protein, 494 aa, Homo sapiens
  MOD_RES (2)..(2): Selenocysteine
  MOD_RES (32)..(32): Selenocysteine
  MOD_RES (44)..(44): Selenocysteine
  MOD_RES (51)..(51): Selenocysteine
  MOD_RES (105)..(105): Selenocysteine
  MOD_RES (111)..(111): Selenocysteine
  MOD_RES (119)..(119): Selenocysteine
  MOD_RES (209)..(209): Selenocysteine
  MOD_RES (221)..(221): Selenocysteine
  MOD_RES (240)..(240): Selenocysteine
  MOD_RES (275)..(275): Selenocysteine
  MOD_RES (278)..(278): Selenocysteine
  MOD_RES (292)..(292): Selenocysteine
  MOD_RES (372)..(372): Selenocysteine
  MOD_RES (376)..(376): Selenocysteine
  MOD_RES (393)..(393): Selenocysteine
  MOD_RES (426)..(427): Selenocysteine
  MOD_RES (452)..(452): Selenocysteine
MXIRHQGQQYRPRMAFLQKIEALVKDMQNPEXGVRMQNQRVLVXSVPHAMXGSDVLQWIVQRLWISSLEAQNLGNFIVRYGYIYPLQDPKNLILKPDGSLYRFQXPYFWPXQQWPAEDXDYAIYLAKRNIKKKGILEEYEKENYNFLNQKMNYKWDFVIMQAKEQYRAGKERNKADRYALDCQEKAYWLVHRCPPGMDNVLDYGLDRVXNPNEVKVNQKQXVVAVKKEIMYYQQALMRSXVKSSVSLGGIVKYSEQFSSNDAIMSGCLPSNPWIXDDXQFWDLNAKLVEIPXKMRVERWAFNFSELIRDPKGRQSFQYFLKKEFSGENLGFWEACEDLKYGDQSKVKEKAEEIYKLFLAPGARRWINIDGKXMDIXVKGLKHPHRYVLDAAQXHIYMLMKKDSYARYLKSPIYKDMLAKAIEPQEXXKKRQLHPPFYAASPALQPKPCHPEXAGRGSQGPRSSQHCGHHPAGPAHGSQPPSDRVHRDLHAPVSF

SEQ ID NO: 23498 - protein, 674 aa, Homo sapiens
  MOD_RES (2)..(2): Selenocysteine
  MOD_RES (32)..(32): Selenocysteine
  MOD_RES (44)..(44): Selenocysteine
  MOD_RES (51)..(51): Selenocysteine
  MOD_RES (105)..(105): Selenocysteine
  MOD_RES (111)..(111): Selenocysteine
  MOD_RES (119)..(119): Selenocysteine
  MOD_RES (209)..(209): Selenocysteine
  MOD_RES (221)..(221): Selenocysteine
  MOD_RES (240)..(240): Selenocysteine
  MOD_RES (275)..(275): Selenocysteine
  MOD_RES (278)..(278): Selenocysteine
  MOD_RES (292)..(292): Selenocysteine
  MOD_RES (372)..(372): Selenocysteine
  MOD_RES (376)..(376): Selenocysteine
  MOD_RES (393)..(393): Selenocysteine
  MOD_RES (426)..(427): Selenocysteine
  MOD_RES (432)..(432): Selenocysteine
  MOD_RES (464)..(464): Selenocysteine
  MOD_RES (468)..(468): Selenocysteine
  MOD_RES (481)..(481): Selenocysteine
  MOD_RES (484)..(484): Selenocysteine
  MOD_RES (486)..(486): Selenocysteine
  MOD_RES (519)..(520): Selenocysteine
  MOD_RES (554)..(554): Selenocysteine
  MOD_RES (563)..(563): Selenocysteine
  MOD_RES (641)..(641): Selenocysteine
  MOD_RES (645)..(645): Selenocysteine
  MOD_RES (655)..(655): Selenocysteine
  MOD_RES (663)..(663): Selenocysteine
MXIRHQGQQYRPRMAFLQKIEALVKDMQNPEXGVRMQNQRVLVXSVPHAMXGSDVLQWIVQRLWISSLEAQNLGNFIVRYGYIYPLQDPKNLILKPDGSLYRFQXPYFWPXQQWPAEDXDYAIYLAKRNIKKKGILEEYEKENYNFLNQKMNYKWDFVIMQAKEQYRAGKERNKADRYALDCQEKAYWLVHRCPPGMDNVLDYGLDRVXNPNEVKVNQKQXVVAVKKEIMYYQQALMRSXVKSSVSLGGIVKYSEQFSSNDAIMSGCLPSNPWIXDDXQFWDLNAKLVEIPXKMRVERWAFNFSELIRDPKGRQSFQYFLKKEFSGENLGFWEACEDLKYGDQSKVKEKAEEIYKLFLAPGARRWINIDGKXMDIXVKGLKHPHRYVLDAAQXHIYMLMKKDSYARYLKSPIYKDMLAKAIEPQEXXKKSSXLPFMRRHLRSSPSPVILRQLEEEAKAREAANXVDIXQPGQHMAPSPHLXVYXGXCMPPSPSSPFSSSCRSPRKPFASPSRFIRRPSXXICPSPIRVALESSSGLEQKGECSGSMAPRGPSVXESSEASLDXSWPRSRPRAPPKARMALSFSRFLRRGCLASPVFARLSPKCPAVSHGRVQPLGDVGQQLPRLKSKRVANFFQIKMDVPXGSGXCLMDSEDAGXGESGDRAXEKEVICPWESL

SEQ ID NO: 23499 - protein, 674 aa, Homo sapiens
  MOD_RES (2)..(2): Selenocysteine
  MOD_RES (32)..(32): Selenocysteine
  MOD_RES (44)..(44): Selenocysteine
  MOD_RES (51)..(51): Selenocysteine
  MOD_RES (105)..(105): Selenocysteine
  MOD_RES (111)..(111): Selenocysteine
  MOD_RES (119)..(119): Selenocysteine
  MOD_RES (209)..(209): Selenocysteine
  MOD_RES (221)..(221): Selenocysteine
  MOD_RES (240)..(240): Selenocysteine
  MOD_RES (275)..(275): Selenocysteine
  MOD_RES (278)..(278): Selenocysteine
  MOD_RES (292)..(292): Selenocysteine
  MOD_RES (372)..(372): Selenocysteine
  MOD_RES (376)..(376): Selenocysteine
  MOD_RES (393)..(393): Selenocysteine
  MOD_RES (426)..(427): Selenocysteine
  MOD_RES (432)..(432): Selenocysteine
  MOD_RES (464)..(464): Selenocysteine
  MOD_RES (468)..(468): Selenocysteine
  MOD_RES (481)..(481): Selenocysteine
  MOD_RES (484)..(484): Selenocysteine
  MOD_RES (486)..(486): Selenocysteine
  MOD_RES (519)..(520): Selenocysteine
  MOD_RES (554)..(554): Selenocysteine
  MOD_RES (563)..(563): Selenocysteine
  MOD_RES (641)..(641): Selenocysteine
  MOD_RES (645)..(645): Selenocysteine
  MOD_RES (655)..(655): Selenocysteine
  MOD_RES (663)..(663): Selenocysteine
MXIRYQGRQYRLRMAFLQKIEALVKDMQNPEXGVRMQNQRVLVXSVPHAMXGSDVLQWIVQRLWISSLEAQNLGNFIVRYGYIYPLQDPKNLILKPDGSLYRFQXPYFWPXQQWPAEDXDYAIYLAKRNIKKKGILEEYEKENYNFLNQKMNYKWDFVIMQAKEQYRAGKERNKADRYALDCQEKAYWLVHRCPPGMDNVLDYGLDRVXNPNEVKVNQKQXVVAVKKEIMYYQQALMRSXVKSSVSLGGIVKYSEQFSSNDAIMSGCLPSNPWIXDDXQFWDLNAKLVEIPXKMRVERWAFNFSELIRDPKGRQSFQYFLKKEFSGENLGFWEACEDLKYGDQSKVKEKAEEIYKLFLAPGARRWINIDGKXMDIXVKGLKHPHRYVLDAAQXHIYMLMKKDSYARYLKSPIYKDMLAKAIEPQEXXKKSSXLPFMRRHLRSSPSPVILRQLEEEAKAREAANXVDIXQPGQHMAPSPHLXVYXGXCMPPSPSSPFSSSCRSPRKPFASPSRFIRRPSXXICPSPIRVALESSSGLEQKGECSGSMAPRGPSVXESSEASLDXSWPRSRPRAPPKARMALSFSRFLRRGCLASPVFARLSPKCPAVSHGRVQPLGDVGQQLPRLKSKRVANFFQIKMDVPXGSGXCLMDSEDAGXGESGDRAXEKEVICPWESL

SEQ ID NO: 23500 - protein, 235 aa, Homo sapiens
  MOD_RES (16)..(17): Selenocysteine
  MOD_RES (26)..(26): Selenocysteine
  MOD_RES (43)..(43): Selenocysteine
  MOD_RES (54)..(54): Selenocysteine
  MOD_RES (59)..(59): Selenocysteine
  MOD_RES (115)..(115): Selenocysteine
  MOD_RES (131)..(131): Selenocysteine
  MOD_RES (174)..(174): Selenocysteine
  MOD_RES (188)..(188): Selenocysteine
MAREECKALLDGLNKXXACYHHLVLXVGGSADSQNLRQELQKXRQKAQELAVSXCARLXAVLRDRGLAADERAEFERLWVAFSGCLDLLEADMRRALELGAAFPLHAPRRPLVRXGVAGASSGVAARALSXRSLRLEAEGDFDVADLRELEREVLQVGEMIDNMEMKVNVPRWXVQARQAAGAELLSXVSAGPSSVVSLQERGGGCDPRKALAAILFGAVLLAAVALAVCVAKLS

SEQ ID NO: 23501 - protein, 163 aa, Homo sapiens
  MOD_RES (9)..(9): Selenocysteine
  MOD_RES (31)..(31): Selenocysteine
  MOD_RES (56)..(56): Selenocysteine
  MOD_RES (75)..(75): Selenocysteine
  MOD_RES (78)..(78): Selenocysteine
  MOD_RES (80)..(80): Selenocysteine
  MOD_RES (85)..(85): Selenocysteine
  MOD_RES (98)..(98): Selenocysteine
  MOD_RES (135)..(135): Selenocysteine
  MOD_RES (137)..(137): Selenocysteine
  MOD_RES (139)..(139): Selenocysteine
MSEARRDSXSSLQRKKPPWLKLDIPSAVPLXAEEPSFLQPLRRQAFLRSVSMPAEXAHISSPHHELRRPVLQRQXSIXQXIRRGXADWFGVSKDSDSXQKWQRKSIRHCSQRYGKLKPQVLRELDLPSQDNVSLXSXEXPPPLYVGPCQLGMQKIIDPLARGR

SEQ ID NO: 23502 - protein, 855 aa, Homo sapiens
  MOD_RES (9)..(9): Selenocysteine
  MOD_RES (31)..(31): Selenocysteine
  MOD_RES (56)..(56): Selenocysteine
  MOD_RES (75)..(75): Selenocysteine
  MOD_RES (78)..(78): Selenocysteine
  MOD_RES (80)..(80): Selenocysteine
  MOD_RES (85)..(85): Selenocysteine
  MOD_RES (98)..(98): Selenocysteine
  MOD_RES (135)..(135): Selenocysteine
  MOD_RES (137)..(137): Selenocysteine
  MOD_RES (139)..(139): Selenocysteine
  MOD_RES (171)..(171): Selenocysteine
  MOD_RES (180)..(180): Selenocysteine
  MOD_RES (183)..(183): Selenocysteine
  MOD_RES (232)..(232): Selenocysteine
  MOD_RES (242)..(242): Selenocysteine
  MOD_RES (251)..(252): Selenocysteine
  MOD_RES (260)..(260): Selenocysteine
  MOD_RES (275)..(275): Selenocysteine
  MOD_RES (302)..(302): Selenocysteine
  MOD_RES (347)..(347): Selenocysteine
  MOD_RES (380)..(380): Selenocysteine
  MOD_RES (383)..(383): Selenocysteine
  MOD_RES (407)..(407): Selenocysteine
  MOD_RES (411)..(411): Selenocysteine
  MOD_RES (418)..(418): Selenocysteine
  MOD_RES (437)..(437): Selenocysteine
  MOD_RES (513)..(513): Selenocysteine
  MOD_RES (521)..(521): Selenocysteine
  MOD_RES (571)..(571): Selenocysteine
  MOD_RES (577)..(577): Selenocysteine
  MOD_RES (585)..(585): Selenocysteine
  MOD_RES (595)..(595): Selenocysteine
  MOD_RES (603)..(603): Selenocysteine
  MOD_RES (610)..(610): Selenocysteine
  MOD_RES (627)..(627): Selenocysteine
  MOD_RES (678)..(678): Selenocysteine
  MOD_RES (702)..(702): Selenocysteine
  MOD_RES (760)..(760): Selenocysteine
  MOD_RES (836)..(836): Selenocysteine
  MOD_RES (841)..(841): Selenocysteine
MSEARRDSXSSLQRKKPPWLKLDIPSAVPLXAEEPSFLQPLRRQAFLRSVSMPAEXAHISSPHHELRRPVLQRQXSIXQXIRRGXADWFGVSKDSDSXQKWQRKSIRHCSQRYGKLKPQVLRELDLPSQDNVSLXSXEXPPPLYVGPCQLGMQKIIDPLARGRAFRVADDXAEGLSAPHXPVXPGAASLCSFSSSRSGFHRLPRRRKRESVAKMSFRAAAALMKGRSVRDGXFRRAQRRSFXPASFLEEDXXDFPDELDXSFFAREGILHEELSXYPDEVFESPSEAALKDWEKAPEQADLXGGALDRSELERSHLMLPLERGWRKQKEGAAAPQPKVRLRQEVVSXAGPRRGQRIAVPVRKLFAREKRPYGLGMVGRLXNRXYRKRIDSFVKRQIEDMDDHRPFFXYWLXFVHSLVXILAVCIYGIAPVGFSQHEXVDSVLRNRGVYENVKYVQQENFWIGPSSEALIHLGAKFSPCMRQDPQVHSFIRSAREREKHSACCVRNDRSGCVQXSEEECSSXLAVWVKWPIHPSAPELAGHKRQFGSVCHQDPRVCDEPSSEDPHEWPEDIXKWPICXKNSAGNHXNHPHMDCVIXGRPCCIGXKGRCEIXSREYCDFMRGYFHEEAXLCSQVHCMDDVCGLLPFLNPEVPDQFYRLWLSLFLHAGILHCLVSICFQMXVLRDLEKLAGWHRIAIIYLLSGVXGNLASAIFLPYRAEVGPAGSQFGILACLFVELFQSWQILARPWRAFFKLLAVVLFLFXFGLLPWIDNFAHISGFISGLFLSFAFLPYISFGKFDLYRKRCQIIIFQVVFLGLLAGLVVLFYVYPVRCEWCEFLXCIPFXDKFCEKYELDAQLH

SEQ ID NO: 23503 - protein, 188 aa, Homo sapiens
  MOD_RES (9)..(9): Selenocysteine
  MOD_RES (31)..(31): Selenocysteine
  MOD_RES (56)..(56): Selenocysteine
  MOD_RES (75)..(75): Selenocysteine
  MOD_RES (78)..(78): Selenocysteine
  MOD_RES (80)..(80): Selenocysteine
  MOD_RES (85)..(85): Selenocysteine
  MOD_RES (98)..(98): Selenocysteine
  MOD_RES (135)..(135): Selenocysteine
  MOD_RES (137)..(137): Selenocysteine
  MOD_RES (139)..(139): Selenocysteine
MSEARRDSXSSLQRKKPPWLKLDIPSAVPLXAEEPSFLQPLRRQAFLRSVSMPAEXAHISSPHHELRRPVLQRQXSIXQXIRRGXADWFGVSKDSDSXQKWQRKSIRHCSQRYGKLKPQVLRELDLPSQDNVSLXSXEXPPPLYVGPCQLGMQKLPLRFPPAPAAAQARVGGQDELPGGRSADERPLR

SEQ ID NO: 23504 - protein, 88 aa, Homo sapiens
  MOD_RES (9)..(9): Selenocysteine
  MOD_RES (31)..(31): Selenocysteine
  MOD_RES (56)..(56): Selenocysteine
  MOD_RES (75)..(75): Selenocysteine
  MOD_RES (78)..(78): Selenocysteine
  MOD_RES (80)..(80): Selenocysteine
MSEARRDSXSSLQRKKPPWLKLDIPSAVPLXAEEPSFLQPLRRQAFLRSVSMPAEXAHISSPHHELRRPVLQRQXSIXQXIRRPWSLE

SEQ ID NO: 23505 - protein, 137 aa, Homo sapiens
  MOD_RES (9)..(9): Selenocysteine
  MOD_RES (31)..(31): Selenocysteine
  MOD_RES (56)..(56): Selenocysteine
  MOD_RES (75)..(75): Selenocysteine
  MOD_RES (78)..(78): Selenocysteine
  MOD_RES (80)..(80): Selenocysteine
  MOD_RES (93)..(93): Selenocysteine
  MOD_RES (120)..(120): Selenocysteine
  MOD_RES (133)..(133): Selenocysteine
MSEARRDSXSSLQRKKPPWLKLDIPSAVPLXAEEPSFLQPLRRQAFLRSVSMPAEXAHISSPHHELRRPVLQRQXSIXQXIRSRQVRFGRVHXLPLLGPRAARRAFPQRQSLSWSLLRGXADWFGVSKDSDSXQKWQ

SEQ ID NO: 23506 - protein, 232 aa, Homo sapiens
  MOD_RES (1)..(1): Any amino acid
  MOD_RES (8)..(8): Selenocysteine
  MOD_RES (15)..(15): Selenocysteine
  MOD_RES (32)..(32): Selenocysteine
  MOD_RES (55)..(55): Selenocysteine
  MOD_RES (79)..(79): Selenocysteine
  MOD_RES (137)..(137): Selenocysteine
  MOD_RES (213)..(213): Selenocysteine
  MOD_RES (218)..(218): Selenocysteine
XRPCCIGXKGRCEIXSREYCDFMRGYFHEEAXLCSQVHCMDDVCGLLPFLNPEMXVLRDLEKLAGWHRIAIIYLLSGVXGNLASAIFLPYRAEVGPAGSQFGILACLFVELFQSWQILARPWRAFFKLLAVVLFLFXFGLLPWIDNFAHISGFISGLFLSFAFLPYISFGKFDLYRKRCQIIIFQVVFLGLLAGLVVLFYVYPVRCEWCEFLXCIPFXDKFCEKYELDAQLH

SEQ ID NO: 23507 - protein, 86 aa, Homo sapiens
  MOD_RES (37)..(37): Selenocysteine
  MOD_RES (61)..(61): Selenocysteine
LPFLNPEVPDQFYRLWLSLFLHAGVVHCLVSVVFQMXILRDLEKLAGWHRIAIIFILSGIXGNLASAIFLPYRAEPQGSPCLPGRS

SEQ ID NO: 23508 - protein, 13 aa, Homo sapiens
MASADKNGGSVSS

SEQ ID NO: 23509 - protein, 26 aa, Homo sapiens
MASADKNGGSVSSVSSSRLQSRKPPN

SEQ ID NO: 23510 - protein, 28 aa, Homo sapiens
MASADKNGGSVSSVSSSRLQSRKPPNLS

SEQ ID NO: 23511 - protein, 47 aa, Homo sapiens
  MOD_RES (30)..(30): Selenocysteine
  MOD_RES (38)..(38): Selenocysteine
MASADKNGGSVSSVSSSRLQSRKPPNLSIXIPPPEKEXQAPGEQDSM

SEQ ID NO: 23512 - protein, 185 aa, Homo sapiens
  MOD_RES (30)..(30): Selenocysteine
  MOD_RES (38)..(38): Selenocysteine
  MOD_RES (64)..(64): Selenocysteine
  MOD_RES (69)..(70): Selenocysteine
  MOD_RES (175)..(175): Selenocysteine
MASADKNGGSVSSVSSSRLQSRKPPNLSIXIPPPEKEXQAPGEQDSMLPEGFQNRRLKKSQPRXWAAHXXACPPSFLPKRKNPAYLKSVSLQEPRSRWQESSEKRPGFRRQASLSQSIRKGAAQWFGVSGDWEGQRQQWQRRSLHHCSMRYGRLKASCQRDLELPSQEAPSFQGXESPKPCKMPK

SEQ ID NO: 23513 - protein, 856 aa, Homo sapiens
  MOD_RES (30)..(30): Selenocysteine
  MOD_RES (38)..(38): Selenocysteine
  MOD_RES (64)..(64): Selenocysteine
  MOD_RES (69)..(70): Selenocysteine
  MOD_RES (175)..(175): Selenocysteine
  MOD_RES (213)..(213): Selenocysteine
  MOD_RES (220)..(220): Selenocysteine
  MOD_RES (223)..(223): Selenocysteine
  MOD_RES (261)..(261): Selenocysteine
  MOD_RES (288)..(288): Selenocysteine
  MOD_RES (389)..(389): Selenocysteine
  MOD_RES (405)..(405): Selenocysteine
  MOD_RES (409)..(409): Selenocysteine
  MOD_RES (416)..(416): Selenocysteine
  MOD_RES (422)..(422): Selenocysteine
  MOD_RES (435)..(436): Selenocysteine
  MOD_RES (511)..(511): Selenocysteine
  MOD_RES (519)..(519): Selenocysteine
  MOD_RES (522)..(522): Selenocysteine
  MOD_RES (530)..(530): Selenocysteine
  MOD_RES (544)..(544): Selenocysteine
  MOD_RES (555)..(555): Selenocysteine
  MOD_RES (572)..(572): Selenocysteine
  MOD_RES (578)..(578): Selenocysteine
  MOD_RES (586)..(586): Selenocysteine
  MOD_RES (604)..(604): Selenocysteine
  MOD_RES (611)..(612): Selenocysteine
  MOD_RES (628)..(628): Selenocysteine
  MOD_RES (679)..(679): Selenocysteine
  MOD_RES (703)..(703): Selenocysteine
  MOD_RES (792)..(792): Selenocysteine
  MOD_RES (795)..(795): Selenocysteine
  MOD_RES (837)..(837): Selenocysteine
  MOD_RES (842)..(842): Selenocysteine
MASADKNGGSVSSVSSSRLQSRKPPNLSIXIPPPEKEXQAPGEQDSMLPEGFQNRRLKKSQPRXWAAHXXACPPSFLPKRKNPAYLKSVSLQEPRSRWQESSEKRPGFRRQASLSQSIRKGAAQWFGVSGDWEGQRQQWQRRSLHHCSMRYGRLKASCQRDLELPSQEAPSFQGXESPKPCKMPKIVDPLARGRAFRHPEEMDRPHAPHPPLXPGVLSLXSFXSVRSGYSHLPRRKRMSVAHMSLQAAAALLKGRSVLDAXGQRCRVVKRSFAFPSFLEEDVVDGADXFDSSFFSKEEMSSMPDDVFESPPLSASYFRGIPHSASPVSPDGVQIPLKEYGRAPVPGPRRGKRIASKVKHFAFDRKKRHYGLGVVGNWLNRSYRRSISSXVQRQLESFDSHRPYFXYWLXFVHVIIXLLVICXYGIAPVGFAQHVXXQLVLRNKGVYESVKYIQQENFWVGPSSIDLIHLGAKFSPCIRKDGQIEQLVLRERDLERDSGCCVQNDHSGCIQXQRKDCSEXLAXFVKWQDDXGPPMDKSDLGQKRXSGAVCHQDPRXCEEPASSGAHIWPDDIXKWPICXEQARSNHXGFLHMDCEIKGRPCCIGXKGSCEIXXREYCEFMHGYFHEEAXLCSQVHCLDKVCGLLPFLNPEVPDQFYRLWLSLFLHAGVVHCLVSVVFQMXILRDLEKLAGWHRIAIIFILSGIXGNLASAIFLPYRAEVGPAGSQFGLLACLFVELFQSWPLLERPWKAFLNLSAIVLFLFICGLLPWIDNIAHIFGFLSGLLLAFAFLPYIXFGXSDKYRKRALILVSLLAFAGLFAALVLWLYIYPINWPWIEHLXCFPFXSRFCEKYELDQVLH

SEQ ID NO: 23514 - protein, 73 aa, Homo sapiens
  MOD_RES (30)..(30): Selenocysteine
  MOD_RES (38)..(38): Selenocysteine
MASADKNGGSVSSVSSSRLQSRKPPNLSIXIPPPEKEXQAPGEQDSMLPERKNPAYLKSVSLQEPRSRWQESS

SEQ ID NO: 23515 - protein, 74 aa, Homo sapiens
  MOD_RES (30)..(30): Selenocysteine
  MOD_RES (38)..(38): Selenocysteine
MASADKNGGSVSSVSSSRLQSRKPPNLSIXIPPPEKEXQAPGEQDSMLPERKNPAYLKSVSLQEPRSRWQESSE

SEQ ID NO: 23516 - protein, 90 aa, Homo sapiens
  MOD_RES (30)..(30): Selenocysteine
  MOD_RES (38)..(38): Selenocysteine
MASADKNGGSVSSVSSSRLQSRKPPNLSIXIPPPEKEXQAPGEQDSMLPERKNPAYLKSVSLQEPRSRWQESSEKRPGFRRQASLSQSIR

SEQ ID NO: 23517 - protein, 113 aa, Homo sapiens
  MOD_RES (30)..(30): Selenocysteine
  MOD_RES (38)..(38): Selenocysteine
MASADKNGGSVSSVSSSRLQSRKPPNLSIXIPPPEKEXQAPGEQDSMLPERKNPAYLKSVSLQEPRSRWQESSEKRPGFRRQASLSQSIRKGAAQWFGVSGDWEGQRQQWQRR

SEQ ID NO: 23518 - protein, 827 aa, Homo sapiens
  MOD_RES (30)..(30): Selenocysteine
  MOD_RES (38)..(38): Selenocysteine
  MOD_RES (146)..(146): Selenocysteine
  MOD_RES (184)..(184): Selenocysteine
  MOD_RES (191)..(191): Selenocysteine
  MOD_RES (194)..(194): Selenocysteine
  MOD_RES (232)..(232): Selenocysteine
  MOD_RES (259)..(259): Selenocysteine
  MOD_RES (360)..(360): Selenocysteine
  MOD_RES (376)..(376): Selenocysteine
  MOD_RES (380)..(380): Selenocysteine
  MOD_RES (387)..(387): Selenocysteine
  MOD_RES (393)..(393): Selenocysteine
  MOD_RES (406)..(407): Selenocysteine
  MOD_RES (482)..(482): Selenocysteine
  MOD_RES (490)..(490): Selenocysteine
  MOD_RES (493)..(493): Selenocysteine
  MOD_RES (501)..(501): Selenocysteine
  MOD_RES (515)..(515): Selenocysteine
  MOD_RES (526)..(526): Selenocysteine
  MOD_RES (543)..(543): Selenocysteine
  MOD_RES (549)..(549): Selenocysteine
  MOD_RES (557)..(557): Selenocysteine
  MOD_RES (575)..(575): Selenocysteine
  MOD_RES (582)..(583): Selenocysteine
  MOD_RES (599)..(599): Selenocysteine
  MOD_RES (650)..(650): Selenocysteine
  MOD_RES (674)..(674): Selenocysteine
  MOD_RES (763)..(763): Selenocysteine
  MOD_RES (766)..(766): Selenocysteine
  MOD_RES (808)..(808): Selenocysteine
  MOD_RES (813)..(813): Selenocysteine
MASADKNGGSVSSVSSSRLQSRKPPNLSIXIPPPEKEXQAPGEQDSMLPERKNPAYLKSVSLQEPRSRWQESSEKRPGFRRQASLSQSIRKGAAQWFGVSGDWEGQRQQWQRRSLHHCSMRYGRLKASCQRDLELPSQEAPSFQGXESPKPCKMPKIVDPLARGRAFRHPEEMDRPHAPHPPLXPGVLSLXSFXSVRSGYSHLPRRKRMSVAHMSLQAAAALLKGRSVLDAXGQRCRVVKRSFAFPSFLEEDVVDGADXFDSSFFSKEEMSSMPDDVFESPPLSASYFRGIPHSASPVSPDGVQIPLKEYGRAPVPGPRRGKRIASKVKHFAFDRKKRHYGLGVVGNWLNRSYRRSISSXVQRQLESFDSHRPYFXYWLXFVHVIIXLLVICXYGIAPVGFAQHVXXQLVLRNKGVYESVKYIQQENFWVGPSSIDLIHLGAKFSPCIRKDGQIEQLVLRERDLERDSGCCVQNDHSGCIQXQRKDCSEXLAXFVKWQDDXGPPMDKSDLGQKRXSGAVCHQDPRXCEEPASSGAHIWPDDIXKWPICXEQARSNHXGFLHMDCEIKGRPCCIGXKGSCEIXXREYCEFMHGYFHEEAXLCSQVHCLDKVCGLLPFLNPEVPDQFYRLWLSLFLHAGVVHCLVSVVFQMXILRDLEKLAGWHRIAIIFILSGIXGNLASAIFLPYRAEVGPAGSQFGLLACLFVELFQSWPLLERPWKAFLNLSAIVLFLFICGLLPWIDNIAHIFGFLSGLLLAFAFLPYIXFGXSDKYRKRALILVSLLAFAGLFAALVLWLYIYPINWPWIEHLXCFPFXSRFCEKYELDQVLH

SEQ ID NO: 23519 - protein, 229 aa, Homo sapiens
  MOD_RES (20)..(20): Selenocysteine
  MOD_RES (27)..(27): Selenocysteine
  MOD_RES (29)..(29): Selenocysteine
  MOD_RES (85)..(85): Selenocysteine
  MOD_RES (110)..(110): Selenocysteine
  MOD_RES (158)..(158): Selenocysteine
  MOD_RES (162)..(162): Selenocysteine
MDRSSLLQLIQEQQLDPENXGFIGADXFXGLVHSHELPLDPAKLDMLVALAQSNEQGQVCYQELVDLIIVFLCYGARLNKWVLQXYHPEYMKSPLVYHPGHRARAWRFLXYMFMHVGLEQLGFNALLQLMIGVPLEMVHGLLRISLLYLAGVLAGSLXVSIXDMRAPVVGGSGGVYALCSAHLANVVMNWAGMRCPYKLLRMVLALVCMSSEVGRAVWLRFSPPLPASG

SEQ ID NO: 23520 - protein, 373 aa, Homo sapiens
  MOD_RES (20)..(20): Selenocysteine
  MOD_RES (27)..(27): Selenocysteine
  MOD_RES (29)..(29): Selenocysteine
  MOD_RES (139)..(139): Selenocysteine
  MOD_RES (160)..(160): Selenocysteine
  MOD_RES (185)..(185): Selenocysteine
  MOD_RES (233)..(233): Selenocysteine
  MOD_RES (237)..(237): Selenocysteine
  MOD_RES (325)..(325): Selenocysteine
  MOD_RES (349)..(349): Selenocysteine
MDRSSLLQLIQEQQLDPENXGFIGADXFXGLVHSHELPLDPAKLDMLVALAQSNEQGQVCYQELVDLISSKRSSSFKRAIANGQRALPRDGPLDEPGLGVYKRFVRYVAYEILPCEVDRRWYFYRHRSCPPPVFMASVXLAQIIVFLCYGARLNKWVLQXYHPEYMKSPLVYHPGHRARAWRFLXYMFMHVGLEQLGFNALLQLMIGVPLEMVHGLLRISLLYLAGVLAGSLXVSIXDMRAPVVGGSGGVYALCSAHLANVVMNWAGMRCPYKLLRMVLALVCMSSEVGRAVWLRFSPPLPASGPQPSFMAHLAGAVVGVSMGLXILRSYEERLRDQCGWWVVLLAYGXFLLFAVFWNVFAYDLLGAHIPPPP

SEQ ID NO: 23521 - protein, 438 aa, Homo sapiens
  MOD_RES (9)..(10): Selenocysteine
  MOD_RES (20)..(20): Selenocysteine
  MOD_RES (36)..(36): Selenocysteine
  MOD_RES (38)..(38): Selenocysteine
  MOD_RES (68)..(68): Selenocysteine
  MOD_RES (85)..(85): Selenocysteine
  MOD_RES (92)..(92): Selenocysteine
  MOD_RES (94)..(94): Selenocysteine
  MOD_RES (204)..(204): Selenocysteine
  MOD_RES (225)..(225): Selenocysteine
  MOD_RES (250)..(250): Selenocysteine
  MOD_RES (298)..(298): Selenocysteine
  MOD_RES (302)..(302): Selenocysteine
  MOD_RES (390)..(390): Selenocysteine
  MOD_RES (414)..(414): Selenocysteine
MGRVEDGGXXEELEDWDPGXSALPAPGIKQGPREQXGXGPLSQKCWEPEPDAPSQPGPALWSRGRARXQALAGGSSLQQLDPENXGFIGADXFXGLVHSHELPLDPAKLDMLVALAQSNEQGQVCYQELVDLISSKRSSSFKRAIANGQRALPRDGPLDEPGLGVYKRFVRYVAYEILPCEVDRRWYFYRHRSCPPPVFMASVXLAQIIVFLCYGARLNKWVLQXYHPEYMKSPLVYHPGHRARAWRFLXYMFMHVGLEQLGFNALLQLMIGVPLEMVHGLLRISLLYLAGVLAGSLXVSIXDMRAPVVGGSGGVYALCSAHLANVVMNWAGMRCPYKLLRMVLALVCMSSEVGRAVWLRFSPPLPASGPQPSFMAHLAGAVVGVSMGLXILRSYEERLRDQCGWWVVLLAYGXFLLFAVFWNVFAYDLLGAHIPPPP

SEQ ID NO: 23522 - protein, 184 aa, Homo sapiens
  MOD_RES (23)..(23): Selenocysteine
  MOD_RES (38)..(38): Selenocysteine
  MOD_RES (42)..(42): Selenocysteine
  MOD_RES (44)..(44): Selenocysteine
  MOD_RES (48)..(48): Selenocysteine
  MOD_RES (61)..(61): Selenocysteine
  MOD_RES (73)..(73): Selenocysteine
  MOD_RES (88)..(88): Selenocysteine
  MOD_RES (155)..(155): Selenocysteine
MPQSKSRKIAILGYRSVGKSSLXIQFVEGQFVDSYDPXIENXFXKLIXVNGQEYHLQLVDXAGQDEYSIFPQXYSIDINGYILVYSVXSIKSFEVIKVIHGKLLDMVGKVQIPIMLVGNKKDLHMERVISYEEGKALAESWNAAFLESSAKENQXAVDVFRRIILEAEKMDGAASQGKSSCSVM

SEQ ID NO: 23523 - protein, 47 aa, Homo sapiens
  MOD_RES (26)..(26): Selenocysteine
  MOD_RES (38)..(38): Selenocysteine
MPQSKSRKIAILGYRSVGSSSQDLRXCCEWCYSSAGRXGASPWAHLI

SEQ ID NO: 23524 - protein, 19 aa, Homo sapiens
MVGKVQIPIMLVGNKKDLH

SEQ ID NO: 23525 - protein, 79 aa, Homo sapiens
  MOD_RES (50)..(50): Selenocysteine
MVGKVQIPIMLVGNKKDLHMERVISYEEGKALAESWNAAFLESSAKENQXAVDVFRRIILEAEKMDGAASQGKSSCSVM

SEQ ID NO: 23526 - protein, 42 aa, Homo sapiens
  MOD_RES (20)..(20): Selenocysteine
  MOD_RES (38)..(38): Selenocysteine
MPLVRYRKVVILGYRCVGKXSLAHQFVEGEFSEGYDPXVENR

SEQ ID NO: 23527 - protein, 183 aa, Homo sapiens
  MOD_RES (20)..(20): Selenocysteine
  MOD_RES (38)..(38): Selenocysteine
  MOD_RES (42)..(42): Selenocysteine
  MOD_RES (48)..(48): Selenocysteine
  MOD_RES (61)..(61): Selenocysteine
  MOD_RES (88)..(88): Selenocysteine
  MOD_RES (110)..(110): Selenocysteine
  MOD_RES (144)..(144): Selenocysteine
  MOD_RES (156)..(156): Selenocysteine
  MOD_RES (161)..(161): Selenocysteine
MPLVRYRKVVILGYRCVGKXSLAHQFVEGEFSEGYDPXVENXYSKIVXLGKDEFHLHLVDXAGQDEYSILPYSFIIGVHGYVLVYSVXSLHSFQVIESLYQKLHEGHGKXRVPVVLVGNKADLSPEREVQAVEGKKLAESWGAXFMESSARENQLXQGIFXKVIQEIARVENSYGQERRCHLM

SEQ ID NO: 23528 - protein, 109 aa, Homo sapiens
  MOD_RES (20)..(20): Selenocysteine
  MOD_RES (38)..(38): Selenocysteine
  MOD_RES (42)..(42): Selenocysteine
  MOD_RES (48)..(48): Selenocysteine
  MOD_RES (61)..(61): Selenocysteine
  MOD_RES (92)..(92): Selenocysteine
MPLVRYRKVVILGYRCVGKXSLAHQFVEGEFSEGYDPXVENXYSKIVXLGKDEFHLHLVDXAGQVPVGDEYSILPYSFIIGVHGYVLVYSVXSLHSFQVIESLYQKLHE

SEQ ID NO: 23529 - protein, 68 aa, Homo sapiens
  MOD_RES (58)..(58): Selenocysteine
  MOD_RES (66)..(66): Selenocysteine
MPLVRYRKVVILGYRCVVRKDRGCECGWMIWIQLSHCSPQGRHLWHINLWKASSRKAXILQWRILXAR

SEQ ID NO: 23530 - protein, 59 aa, Homo sapiens
  MOD_RES (33)..(33): Selenocysteine
  MOD_RES (38)..(38): Selenocysteine
  MOD_RES (40)..(40): Selenocysteine
  MOD_RES (52)..(52): Selenocysteine
  MOD_RES (54)..(54): Selenocysteine
MPPRKKRRQPSQKAPLLFHQQPLEGPKHSCASXQLPIXHXRQVPSKPIDHSXIXSWAFC

SEQ ID NO: 23531 - protein, 64 aa, Homo sapiens
  MOD_RES (33)..(33): Selenocysteine
  MOD_RES (38)..(38): Selenocysteine
  MOD_RES (40)..(40): Selenocysteine
  MOD_RES (52)..(52): Selenocysteine
  MOD_RES (54)..(54): Selenocysteine
  MOD_RES (63)..(63): Selenocysteine
MPPRKKRRQPSQKAPLLFHQQPLEGPKHSCASXQLPIXHXRQVPSKPIDHSXIXSWVSPDFDXA

SEQ ID NO: 23532 - protein, 105 aa, Homo sapiens
  MOD_RES (33)..(33): Selenocysteine
  MOD_RES (38)..(38): Selenocysteine
  MOD_RES (40)..(40): Selenocysteine
  MOD_RES (52)..(52): Selenocysteine
  MOD_RES (54)..(54): Selenocysteine
  MOD_RES (63)..(63): Selenocysteine
  MOD_RES (87)..(88): Selenocysteine
  MOD_RES (95)..(95): Selenocysteine
MPPRKKRRQPSQKAPLLFHQQPLEGPKHSCASXQLPIXHXRQVPSKPIDHSXIXSWVSPDFDXAAGSLFPAYQKHQNRARHSSRKPXXSKFPHLXFESPQSSSSE

SEQ ID NO: 23533 - protein, 132 aa, Homo sapiens
  MOD_RES (33)..(33): Selenocysteine
  MOD_RES (38)..(38): Selenocysteine
  MOD_RES (40)..(40): Selenocysteine
  MOD_RES (52)..(52): Selenocysteine
  MOD_RES (54)..(54): Selenocysteine
  MOD_RES (63)..(63): Selenocysteine
  MOD_RES (87)..(88): Selenocysteine
  MOD_RES (95)..(95): Selenocysteine
  MOD_RES (106)..(106): Selenocysteine
MPPRKKRRQPSQKAPLLFHQQPLEGPKHSCASXQLPIXHXRQVPSKPIDHSXIXSWVSPDFDXAAGSLFPAYQKHQNRARHSSRKPXXSKFPHLXFESPQSSSSEXLGIPLIRECPSESEKDVSRRPLVPVL

SEQ ID NO: 23534 - protein, 238 aa, Homo sapiens
  MOD_RES (33)..(33): Selenocysteine
  MOD_RES (38)..(38): Selenocysteine
  MOD_RES (40)..(40): Selenocysteine
  MOD_RES (52)..(52): Selenocysteine
  MOD_RES (54)..(54): Selenocysteine
  MOD_RES (63)..(63): Selenocysteine
  MOD_RES (87)..(88): Selenocysteine
  MOD_RES (95)..(95): Selenocysteine
  MOD_RES (106)..(106): Selenocysteine
  MOD_RES (159)..(159): Selenocysteine
  MOD_RES (183)..(183): Selenocysteine
  MOD_RES (186)..(186): Selenocysteine
  MOD_RES (188)..(188): Selenocysteine
  MOD_RES (202)..(202): Selenocysteine
  MOD_RES (212)..(212): Selenocysteine
MPPRKKRRQPSQKAPLLFHQQPLEGPKHSCASXQLPIXHXRQVPSKPIDHSXIXSWVSPDFDXAAGSLFPAYQKHQNRARHSSRKPXXSKFPHLXFESPQSSSSEXLGIPLIRECPSESEKDVSRRPLVPVLSPQSCGNMSVQALQSLPYVFIPPDIQXPESSSVKEELIPQDQKENSLLSCXLHXGXPNSPEPGPVLVKDXPEDKYGIKVXWRRRQHLLAYLRERGKLSRSQFLVKS

SEQ ID NO: 23535 - protein, 224 aa, Homo sapiens
  MOD_RES (33)..(33): Selenocysteine
  MOD_RES (38)..(38): Selenocysteine
  MOD_RES (40)..(40): Selenocysteine
  MOD_RES (49)..(49): Selenocysteine
  MOD_RES (73)..(74): Selenocysteine
  MOD_RES (81)..(81): Selenocysteine
  MOD_RES (92)..(92): Selenocysteine
  MOD_RES (145)..(145): Selenocysteine
  MOD_RES (169)..(169): Selenocysteine
  MOD_RES (172)..(172): Selenocysteine
  MOD_RES (174)..(174): Selenocysteine
  MOD_RES (188)..(188): Selenocysteine
  MOD_RES (198)..(198): Selenocysteine
MPPRKKRRQPSQKAPLLFHQQPLEGPKHSCASXQLPIXHXRQVSPDFDXAAGSLFPAYQKHQNRARHSSRKPXXSKFPHLXFESPQSSSSEXLGIPLIRECPSESEKDVSRRPLVPVLSPQSCGNMSVQALQSLPYVFIPPDIQXPESSSVKEELIPQDQKENSLLSCXLHXGXPNSPEPGPVLVKDXPEDKYGIKVXWRRRQHLLAYLRERGKLSRSQFLVKS

SEQ ID NO: 23536 - protein, 348 aa, Homo sapiens
  MOD_RES (4)..(4): Selenocysteine
  MOD_RES (17)..(17): Selenocysteine
  MOD_RES (58)..(58): Selenocysteine
  MOD_RES (62)..(62): Selenocysteine
  MOD_RES (70)..(70): Selenocysteine
  MOD_RES (92)..(92): Selenocysteine
  MOD_RES (94)..(94): Selenocysteine
  MOD_RES (97)..(97): Selenocysteine
  MOD_RES (108)..(108): Selenocysteine
  MOD_RES (118)..(118): Selenocysteine
  MOD_RES (160)..(160): Selenocysteine
  MOD_RES (193)..(193): Selenocysteine
  MOD_RES (213)..(213): Selenocysteine
  MOD_RES (229)..(229): Selenocysteine
  MOD_RES (242)..(243): Selenocysteine
  MOD_RES (251)..(251): Selenocysteine
  MOD_RES (277)..(277): Selenocysteine
  MOD_RES (289)..(289): Selenocysteine
  MOD_RES (319)..(320): Selenocysteine
  MOD_RES (336)..(336): Selenocysteine
  MOD_RES (340)..(340): Selenocysteine
  MOD_RES (342)..(342): Selenocysteine
MNGXEGPNFYVPFSNAXGVVRSPFEYPQYYLAEPWQFSMLAAYMFLLIVLGFPINFLXLYVXVQHKKLRXPLNYILLNLAVADLFMVLGGFXSXLYXSLHGYFVFGPXGCNLEGFFAXLGGEIALWSLVVLAIERYVVVCKPMSNFRFGENHAIMGVAFXWVMALACAAPPLAGWSRYIPEGLQCSCGIDYYXLKPEVNNESFVIYMFVVHFXIPMIIIFFCYGQLVFXVKEAAAQQQESAXXQKAEKEVXRMVIIMVIAFLICWVPYASVAFYIFXHQGSNFGPIFMXIPAFFAKSAAIYNPVIYIMMNKQFRNCMLXXICCGKNPLGDDEASAXVSKXEXSQVAPA

SEQ ID NO: 23537 - protein, 90 aa, Homo sapiens
  MOD_RES (19)..(19): Selenocysteine
  MOD_RES (37)..(37): Selenocysteine
  MOD_RES (54)..(54): Selenocysteine
  MOD_RES (69)..(69): Selenocysteine
  MOD_RES (86)..(86): Selenocysteine
MAAIRKKLVIVGDGACGKXCLLIVFSKDQFPEVYVPXVFENYVADIEVDGKQKXSQKSGPQKSSISVPXCPSSWLGIRRIFGMMSXQGGS

SEQ ID NO: 23538 - protein, 129 aa, Homo sapiens
  MOD_RES (19)..(19): Selenocysteine
  MOD_RES (37)..(37): Selenocysteine
  MOD_RES (60)..(60): Selenocysteine
  MOD_RES (77)..(77): Selenocysteine
  MOD_RES (100)..(100): Selenocysteine
  MOD_RES (127)..(127): Selenocysteine
MAAIRKKLVIVGDGACGKXCLLIVFSKDQFPEVYVPXVFENYVADIEVDGKQVELALWDXAGQEDYDRLRPLSYPDXDVILMCFSIDSPDSLENIPEKWXPEVKHFCPNVPIILVGNKKDLRNDEHXRR

SEQ ID NO: 23539 - protein, 187 aa, Homo sapiens
  MOD_RES (19)..(19): Selenocysteine
  MOD_RES (37)..(37): Selenocysteine
  MOD_RES (60)..(60): Selenocysteine
  MOD_RES (77)..(77): Selenocysteine
  MOD_RES (100)..(100): Selenocysteine
  MOD_RES (127)..(127): Selenocysteine
  MOD_RES (149)..(149): Selenocysteine
  MOD_RES (187)..(187): Selenocysteine
MAAIRKKLVIVGDGACGKXCLLIVFSKDQFPEVYVPXVFENYVADIEVDGKQVELALWDXAGQEDYDRLRPLSYPDXDVILMCFSIDSPDSLENIPEKWXPEVKHFCPNVPIILVGNKKDLRNDEHXRRELAKMKQEPHCVARLECCGXILAQLQPPPPRFKRFPCLSLLSSWGYRRPLPHPGAGEX

SEQ ID NO: 23540 - protein, 193 aa, Homo sapiens
  MOD_RES (19)..(19): Selenocysteine
  MOD_RES (37)..(37): Selenocysteine
  MOD_RES (60)..(60): Selenocysteine
  MOD_RES (77)..(77): Selenocysteine
  MOD_RES (100)..(100): Selenocysteine
  MOD_RES (127)..(127): Selenocysteine
  MOD_RES (163)..(163): Selenocysteine
  MOD_RES (175)..(175): Selenocysteine
MAAIRKKLVIVGDGACGKXCLLIVFSKDQFPEVYVPXVFENYVADIEVDGKQVELALWDXAGQEDYDRLRPLSYPDXDVILMCFSIDSPDSLENIPEKWXPEVKHFCPNVPIILVGNKKDLRNDEHXRRELAKMKQEPVKPEEGRDMANRIGAFGYMECSAKXKDGVREVFEMAXRAALQARRGKKKSGCLVL

SEQ ID NO: 23541 - protein, 196 aa, Homo sapiens
  MOD_RES (19)..(19): Selenocysteine
  MOD_RES (37)..(37): Selenocysteine
  MOD_RES (60)..(60): Selenocysteine
  MOD_RES (77)..(77): Selenocysteine
  MOD_RES (129)..(129): Selenocysteine
  MOD_RES (141)..(141): Selenocysteine
  MOD_RES (163)..(163): Selenocysteine
  MOD_RES (173)..(173): Selenocysteine
  MOD_RES (175)..(175): Selenocysteine
MAAIRKKLVVVGDGACGKXCLLIVFSKDEFPEVYVPXVFENYVADIEVDGKQVELALWDXAGQEDYDRLRPLSYPDXDVILMCFSVDSPDSLENIPEKWVPEVKHFCPNVPIILVANKKDLRSDEHVRXELARMKQEPVRXDDGRAMAVRIQAYDYLECSAKXKEGVREVFEXAXRAALQKRYGSQNGCINCCKVL

SEQ ID NO: 23542 - protein, 696 aa, Homo sapiens
  MOD_RES (14)..(14): Selenocysteine
  MOD_RES (28)..(28): Selenocysteine
  MOD_RES (38)..(39): Selenocysteine
  MOD_RES (41)..(41): Selenocysteine
  MOD_RES (48)..(48): Selenocysteine
  MOD_RES (52)..(52): Selenocysteine
  MOD_RES (85)..(85): Selenocysteine
  MOD_RES (133)..(133): Selenocysteine
  MOD_RES (188)..(188): Selenocysteine
  MOD_RES (253)..(253): Selenocysteine
  MOD_RES (287)..(287): Selenocysteine
  MOD_RES (368)..(368): Selenocysteine
  MOD_RES (370)..(370): Selenocysteine
  MOD_RES (372)..(372): Selenocysteine
  MOD_RES (398)..(398): Selenocysteine
  MOD_RES (413)..(413): Selenocysteine
  MOD_RES (420)..(420): Selenocysteine
  MOD_RES (464)..(464): Selenocysteine
  MOD_RES (483)..(483): Selenocysteine
  MOD_RES (488)..(488): Selenocysteine
  MOD_RES (545)..(545): Selenocysteine
  MOD_RES (584)..(584): Selenocysteine
  MOD_RES (588)..(588): Selenocysteine
  MOD_RES (622)..(622): Selenocysteine
MDADMDYERPNVEXIKCVVVGDNAVGKXRLICARACNXXLXQYQLLAXHVPXVWAIDQYRVCQEVLERSRDVVDEVSVSLRLWDXFGDHHKDRRFAYGRSDVVVLCFSIANPNSLNHVKSMWYPEIKHFCPRXPVILVGCQLDLRYADLEAVNRARRPLARPIKRGDILPPEKGREVAKELGLPYYEXSVFDQFGIKDVFDNAIRAALISRRHLQFWKSHLKKVQKPLLQAPFLPPKAPPPVIKIPECPSMGXNEAACLLDNPLCADVLFILQDQEHIFAHRIYLAXSSSKFYDLFLMECEESPNGSEGACEKEKQSRDFQGRILSVDPEEEREEGPPRIPQADQWKSSNKSLVEALGLEAEGAVPEXQXLXGWSKGFIGMHREMQVNPISKRMGPMXVVRMDASVQPGPFRXLLQFLYXGQLDEKEKDLVGLAQIAEVLEMFDLRMMVENIMNKEAFMNQEIXKAFHVRKANRIKECLSKGXFSDVXFKLDDGAISAHKPLLICSCEWMAAMFGGSFVESANSEVYLPNINKISMQAVLDYLYXKQLSPNLDLDPLELIALANRFCLPHLVALAEQHAVQELXKAAXSGVGIDGEVLSYLELAQFHNAHQLAAWCLHHICXNYNSVCSKFRKEIKSKSADNQEYFERHRWPPVWYLKEEDHYQRVKREREKEDIALNKHRSRRKWCFWNSSPAVA

SEQ ID NO: 23543 - protein, 727 aa, Homo sapiens
  MOD_RES (14)..(14): Selenocysteine
  MOD_RES (28)..(28): Selenocysteine
  MOD_RES (39)..(39): Selenocysteine
  MOD_RES (41)..(41): Selenocysteine
  MOD_RES (48)..(48): Selenocysteine
  MOD_RES (52)..(52): Selenocysteine
  MOD_RES (85)..(85): Selenocysteine
  MOD_RES (120)..(120): Selenocysteine
  MOD_RES (188)..(188): Selenocysteine
  MOD_RES (287)..(287): Selenocysteine
  MOD_RES (314)..(314): Selenocysteine
  MOD_RES (366)..(366): Selenocysteine
  MOD_RES (376)..(376): Selenocysteine
  MOD_RES (406)..(406): Selenocysteine
  MOD_RES (435)..(435): Selenocysteine
  MOD_RES (479)..(479): Selenocysteine
  MOD_RES (487)..(487): Selenocysteine
  MOD_RES (498)..(498): Selenocysteine
  MOD_RES (503)..(503): Selenocysteine
  MOD_RES (510)..(510): Selenocysteine
  MOD_RES (538)..(538): Selenocysteine
  MOD_RES (546)..(546): Selenocysteine
  MOD_RES (560)..(560): Selenocysteine
  MOD_RES (564)..(564): Selenocysteine
  MOD_RES (590)..(590): Selenocysteine
  MOD_RES (594)..(594): Selenocysteine
  MOD_RES (596)..(596): Selenocysteine
  MOD_RES (602)..(602): Selenocysteine
  MOD_RES (637)..(637): Selenocysteine
MDSDMDYERPNVEXIKCVVVGDNAVGKXRLICARACNAXLXQYQLLAXHVPXVWAIDQYRVCQEVLERSRDVVDDVSVSLRLWDXFGDHHKDRRFAYGRSDVVVLCFSIANPNSLHHVKXMWYPEIKHFCPRAPVILVGCQLDLRYADLEAVNRARRPLARPIKPNEILPPEKGREVAKELGIPYYEXSVVAQFGIKDVFDNAIRAALISRRHLQFWKSHLRNVQRPLLQAPFLPPKPPPPIIVVPDPPSSSEECPAHLLEDPLCADVILVLQERVRIFAHKIYLSXSSSKFYDLFLMDLSEGELGGPSEPGGXHPEDHQGHSDQHHHHHHHHHGRDFLLRAASFDVCESVDEAGGSGPAGLRASXSDGILRGNGXGYLPGRGRVLSSWSRAFVSIQEEMAEDPLXYKSRLMVVVKMDSSIQPGPFRAVLKYLYXGELDENERDLMHIAHIAELLEVFDLRMMVANILNNEAFMNQEIXKAFHVRRXNRVKECLAKGXFSDVXFILDDGXISAHKPLLISSCDWMAAMFGGPFVESSXREVVFPYXSKSCMRAVLEYLYXGMFXSSPDLDDMKLIILANRLCLPHLVALXEQYXVXGLMEAXQMMVDIDGDVLVFLELAQFHCAYQLADWCLHHICXNYNNVCRKFPRDMKAMSPENQEYFEKHRWPPVWYLKEEDHYQRARKEREKEDYLHLKRQPKRRWLFWNSPSSPSSSAASSSSPSSSSAVV

SEQ ID NO: 23544 - protein, 734 aa, Homo sapiens
  MOD_RES (21)..(21): Selenocysteine
  MOD_RES (35)..(35): Selenocysteine
  MOD_RES (46)..(46): Selenocysteine
  MOD_RES (48)..(48): Selenocysteine
  MOD_RES (55)..(55): Selenocysteine
  MOD_RES (59)..(59): Selenocysteine
  MOD_RES (92)..(92): Selenocysteine
  MOD_RES (127)..(127): Selenocysteine
  MOD_RES (195)..(195): Selenocysteine
  MOD_RES (294)..(294): Selenocysteine
  MOD_RES (321)..(321): Selenocysteine
  MOD_RES (373)..(373): Selenocysteine
  MOD_RES (383)..(383): Selenocysteine
  MOD_RES (413)..(413): Selenocysteine
  MOD_RES (442)..(442): Selenocysteine
  MOD_RES (486)..(486): Selenocysteine
  MOD_RES (494)..(494): Selenocysteine
  MOD_RES (505)..(505): Selenocysteine
  MOD_RES (510)..(510): Selenocysteine
  MOD_RES (517)..(517): Selenocysteine
  MOD_RES (545)..(545): Selenocysteine
  MOD_RES (553)..(553): Selenocysteine
  MOD_RES (567)..(567): Selenocysteine
  MOD_RES (571)..(571): Selenocysteine
  MOD_RES (597)..(597): Selenocysteine
  MOD_RES (601)..(601): Selenocysteine
  MOD_RES (603)..(603): Selenocysteine
  MOD_RES (609)..(609): Selenocysteine
  MOD_RES (644)..(644): Selenocysteine
MKARSRLMDSDMDYERPNVEXIKCVVVGDNAVGKXRLICARACNAXLXQYQLLAXHVPXVWAIDQYRVCQEVLERSRDVVDDVSVSLRLWDXFGDHHKDRRFAYGRSDVVVLCFSIANPNSLHHVKXMWYPEIKHFCPRAPVILVGCQLDLRYADLEAVNRARRPLARPIKPNEILPPEKGREVAKELGIPYYEXSVVAQFGIKDVFDNAIRAALISRRHLQFWKSHLRNVQRPLLQAPFLPPKPPPPIIVVPDPPSSSEECPAHLLEDPLCADVILVLQERVRIFAHKIYLSXSSSKFYDLFLMDLSEGELGGPSEPGGXHPEDHQGHSDQHHHHHHHHHGRDFLLRAASFDVCESVDEAGGSGPAGLRASXSDGILRGNGXGYLPGRGRVLSSWSRAFVSIQEEMAEDPLXYKSRLMVVVKMDSSIQPGPFRAVLKYLYXGELDENERDLMHIAHIAELLEVFDLRMMVANILNNEAFMNQEIXKAFHVRRXNRVKECLAKGXFSDVXFILDDGXISAHKPLLISSCDWMAAMFGGPFVESSXREVVFPYXSKSCMRAVLEYLYXGMFXSSPDLDDMKLIILANRLCLPHLVALXEQYXVXGLMEAXQMMVDIDGDVLVFLELAQFHCAYQLADWCLHHICXNYNNVCRKFPRDMKAMSPENQEYFEKHRWPPVWYLKEEDHYQRARKEREKEDYLHLKRQPKRRWLFWNSPSSPSSSAASSSSPSSSSAVV

SEQ ID NO: 23545 - protein, 182 aa, Homo sapiens
  MOD_RES (14)..(14): Selenocysteine
  MOD_RES (36)..(36): Selenocysteine
  MOD_RES (50)..(50): Selenocysteine
  MOD_RES (61)..(61): Selenocysteine
  MOD_RES (63)..(63): Selenocysteine
  MOD_RES (70)..(70): Selenocysteine
  MOD_RES (74)..(74): Selenocysteine
  MOD_RES (107)..(107): Selenocysteine
  MOD_RES (142)..(142): Selenocysteine
MQAWRKGPDGPQKXSSDSMSRLMDSDMDYERPNVEXIKCVVVGDNAVGKXRLICARACNAXLXQYQLLAXHVPXVWAIDQYRVCQEVLERSRDVVDDVSVSLRLWDXFGDHHKDRRFAYGRSDVVVLCFSIANPNSLHHVKXMWYPEIKHFCPRAPVILVGCQLDLRYADLEAVNRARRPLA

SEQ ID NO: 23546 - protein, 749 aa, Homo sapiens
  MOD_RES (14)..(14): Selenocysteine
  MOD_RES (36)..(36): Selenocysteine
  MOD_RES (50)..(50): Selenocysteine
  MOD_RES (61)..(61): Selenocysteine
  MOD_RES (63)..(63): Selenocysteine
  MOD_RES (70)..(70): Selenocysteine
  MOD_RES (74)..(74): Selenocysteine
  MOD_RES (107)..(107): Selenocysteine
  MOD_RES (142)..(142): Selenocysteine
  MOD_RES (210)..(210): Selenocysteine
  MOD_RES (309)..(309): Selenocysteine
  MOD_RES (336)..(336): Selenocysteine
  MOD_RES (388)..(388): Selenocysteine
  MOD_RES (398)..(398): Selenocysteine
  MOD_RES (428)..(428): Selenocysteine
  MOD_RES (457)..(457): Selenocysteine
  MOD_RES (501)..(501): Selenocysteine
  MOD_RES (509)..(509): Selenocysteine
  MOD_RES (520)..(520): Selenocysteine
  MOD_RES (525)..(525): Selenocysteine
  MOD_RES (532)..(532): Selenocysteine
  MOD_RES (560)..(560): Selenocysteine
  MOD_RES (568)..(568): Selenocysteine
  MOD_RES (582)..(582): Selenocysteine
  MOD_RES (586)..(586): Selenocysteine
  MOD_RES (612)..(612): Selenocysteine
  MOD_RES (616)..(616): Selenocysteine
  MOD_RES (618)..(618): Selenocysteine
  MOD_RES (624)..(624): Selenocysteine
  MOD_RES (659)..(659): Selenocysteine
MQAWRKGPDGPQKXSSDSMSRLMDSDMDYERPNVEXIKCVVVGDNAVGKXRLICARACNAXLXQYQLLAXHVPXVWAIDQYRVCQEVLERSRDVVDDVSVSLRLWDXFGDHHKDRRFAYGRSDVVVLCFSIANPNSLHHVKXMWYPEIKHFCPRAPVILVGCQLDLRYADLEAVNRARRPLARPIKPNEILPPEKGREVAKELGIPYYEXSVVAQFGIKDVFDNAIRAALISRRHLQFWKSHLRNVQRPLLQAPFLPPKPPPPIIVVPDPPSSSEECPAHLLEDPLCADVILVLQERVRIFAHKIYLSXSSSKFYDLFLMDLSEGELGGPSEPGGXHPEDHQGHSDQHHHHHHHHHGRDFLLRAASFDVCESVDEAGGSGPAGLRASXSDGILRGNGXGYLPGRGRVLSSWSRAFVSIQEEMAEDPLXYKSRLMVVVKMDSSIQPGPFRAVLKYLYXGELDENERDLMHIAHIAELLEVFDLRMMVANILNNEAFMNQEIXKAFHVRRXNRVKECLAKGXFSDVXFILDDGXISAHKPLLISSCDWMAAMFGGPFVESSXREVVFPYXSKSCMRAVLEYLYXGMFXSSPDLDDMKLIILANRLCLPHLVALXEQYXVXGLMEAXQMMVDIDGDVLVFLELAQFHCAYQLADWCLHHICXNYNNVCRKFPRDMKAMSPENQEYFEKHRWPPVWYLKEEDHYQRARKEREKEDYLHLKRQPKRRWLFWNSPSSPSSSAASSSSPSSSSAVV

SEQ ID NO: 23547 - protein, 72 aa, Homo sapiens
  MOD_RES (16)..(16): Selenocysteine
  MOD_RES (23)..(23): Selenocysteine
  MOD_RES (56)..(56): Selenocysteine
LVSGDESSLLLNAASXVARPVFXEYQASAFGNVKLVVHDCPVWKSYLVHAHYVPQXEGAVLVQLKGSNLQKN

SEQ ID NO: 23548 - protein, 242 aa, Homo sapiens
  MOD_RES (9)..(9): Selenocysteine
  MOD_RES (27)..(27): Selenocysteine
  MOD_RES (39)..(39): Selenocysteine
  MOD_RES (60)..(61): Selenocysteine
  MOD_RES (101)..(101): Selenocysteine
  MOD_RES (111)..(111): Selenocysteine
  MOD_RES (147)..(147): Selenocysteine
  MOD_RES (181)..(181): Selenocysteine
  MOD_RES (189)..(189): Selenocysteine
MPKRAVLFXDRQPIQFLKINCLRNCKXYQARKPLWFYNXSLKFFLNKPMLADVVFEIQGXXVPAHRAILVARCEVMAAMFNGNYMEAKSVLIPVYGVSKEXFLSFLEYLYXDSCCPAGIFQAMCLLICAEMYQVSRLQHICELFIIXQLQSMPSRELASMNLDIVDLLKKAKFHHSDCLSXWLLHFIAXNYLIFSQKPEFQDLSVEERSFVEKHRWPSNMYLKQLAEYRKYIHSRKCRCLVM

SEQ ID NO: 23549 - protein, 181 aa, Homo sapiens
  MOD_RES (6)..(6): Selenocysteine
  MOD_RES (20)..(20): Selenocysteine
  MOD_RES (33)..(33): Selenocysteine
  MOD_RES (55)..(55): Selenocysteine
  MOD_RES (62)..(62): Selenocysteine
  MOD_RES (91)..(91): Selenocysteine
  MOD_RES (141)..(141): Selenocysteine
  MOD_RES (150)..(150): Selenocysteine
  MOD_RES (155)..(155): Selenocysteine
  MOD_RES (164)..(165): Selenocysteine
  MOD_RES (177)..(177): Selenocysteine
MRKRQXWSIHIVALGNEGDXFHQDNRPSGLIRXYLGRSPLVSGDESSLLLNAASXVARPVFXEYQASAFGNVKLVVHDCPVWDIFDSDWYXSRNLIGGADIIVIKYNVNDKFSFHEVKDNYIPVIKRALNSVPVIIAAVGXRQNEELPCXCPLCXSDRGSCVSXXEGIQLAKELGAXYLEL

SEQ ID NO: 23550 - protein, 611 aa, Homo sapiens
  MOD_RES (14)..(14): Selenocysteine
  MOD_RES (27)..(27): Selenocysteine
  MOD_RES (49)..(49): Selenocysteine
  MOD_RES (56)..(56): Selenocysteine
  MOD_RES (85)..(85): Selenocysteine
  MOD_RES (135)..(135): Selenocysteine
  MOD_RES (144)..(144): Selenocysteine
  MOD_RES (149)..(149): Selenocysteine
  MOD_RES (158)..(159): Selenocysteine
  MOD_RES (171)..(171): Selenocysteine
  MOD_RES (203)..(203): Selenocysteine
  MOD_RES (291)..(291): Selenocysteine
  MOD_RES (301)..(302): Selenocysteine
  MOD_RES (312)..(312): Selenocysteine
  MOD_RES (384)..(384): Selenocysteine
  MOD_RES (396)..(396): Selenocysteine
  MOD_RES (408)..(408): Selenocysteine
  MOD_RES (429)..(430): Selenocysteine
  MOD_RES (470)..(470): Selenocysteine
  MOD_RES (480)..(480): Selenocysteine
  MOD_RES (516)..(516): Selenocysteine
  MOD_RES (550)..(550): Selenocysteine
  MOD_RES (558)..(558): Selenocysteine
MSIHIVALGNEGDXFHQDNRPSGLIRXYLGRSPLVSGDESSLLLNAASXVARPVFXEYQASAFGNVKLVVHDCPVWDIFDSDWYXSRNLIGGADIIVIKYNVNDKFSFHEVKDNYIPVIKRALNSVPVIIAAVGXRQNEELPCXCPLCXSDRGSCVSXXEGIQLAKELGAXYLELHSLDDFYIGKYFGGVLEYFMIQALNQKXSEKMKKRKMSNSFHGIRPPQLEQPEKMPVLKAEASHYNSDLNNLLFCCQCVDVVFYNPNLKKVVEAHKIVLCAVSHVFMLLFNVKSPXDIQDSSIIRXXQDLFAINRDXAFPGASHESSGNPPLRVIVKDALFCSCLSDILRFIYSGAFQWEELEEDIRKKLKDSGDVSNVIEKVKCILKXPGKINCLRNCKXYQARKPLWFYNXSLKFFLNKPMLADVVFEIQGXXVPAHRAILVARCEVMAAMFNGNYMEAKSVLIPVYGVSKEXFLSFLEYLYXDSCCPAGIFQAMCLLICAEMYQVSRLQHICELFIIXQLQSMPSRELASMNLDIVDLLKKAKFHHSDCLSXWLLHFIAXNYLIFSQKPEFQDLSVEERSFVEKHRWPSNMYLKQLAEYRKYIHSRKCRCLVM

SEQ ID NO: 23551 - protein, 104 aa, Homo sapiens
  MOD_RES (14)..(14): Selenocysteine
  MOD_RES (27)..(27): Selenocysteine
  MOD_RES (49)..(49): Selenocysteine
  MOD_RES (56)..(56): Selenocysteine
MSIHIVALGNEGDXFHQDNRPSGLIRXYLGRSPLVSGDESSLLLNAASXVARPVFXEYQASAFGNVKLVVHDCPVWVRKSSCSALRLKKLFFPFFSPSPFCPLP

SEQ ID NO: 23552 - protein, 172 aa, Homo sapiens
  MOD_RES (1)..(1): Any amino acid
  MOD_RES (11)..(12): Selenocysteine
  MOD_RES (52)..(52): Selenocysteine
  MOD_RES (62)..(62): Selenocysteine
  MOD_RES (98)..(98): Selenocysteine
  MOD_RES (132)..(132): Selenocysteine
  MOD_RES (140)..(140): Selenocysteine
XADVVFEIQGXXVPAHRAILVARCEVMAAMFNGNYMEAKSVLIPVYGVSKEXFLSFLEYLYXDSCCPAGIFQAMCLLICAEMYQVSRLQHICELFIIXQLQSMPSRELASMNLDIVDLLKKAKFHHSDCLSXWLLHFIAXNYLIFSQKPEFQDLSGRLLISVLKRKLYVLCS

SEQ ID NO: 23553 - protein, 103 aa, Homo sapiens
  MOD_RES (1)..(1): Any amino acid
  MOD_RES (43)..(43): Selenocysteine
  MOD_RES (52)..(52): Selenocysteine
  MOD_RES (57)..(57): Selenocysteine
  MOD_RES (66)..(67): Selenocysteine
  MOD_RES (79)..(79): Selenocysteine
XDIIVIKYNVNDKFSFHEVKDNYIPVIKRALNSVPVIIAAVGXRQNEELPCXCPLCXSDRGSCVSXXEGIQLAKELGAXYLELHSLDDFYIGKYFGGVKKCLS

SEQ ID NO: 23554 - protein, 117 aa, Homo sapiens
  MOD_RES (1)..(1): Any amino acid
  MOD_RES (19)..(19): Selenocysteine
  MOD_RES (53)..(53): Selenocysteine
  MOD_RES (61)..(61): Selenocysteine
XEMYQVSRLQHICELFIIXQLQSMPSRELASMNLDIVDLLKKAKFHHSDCLSXWLLHFIAXNYLIFSQKPEFQDLSVEERSFVEKHRWPSNMYLKQLAEYRKYIHSRKCRCLVIKRH

SEQ ID NO: 23555 - protein, 37 aa, Homo sapiens
  MOD_RES (1)..(1): Any amino acid
  MOD_RES (30)..(30): Selenocysteine
  MOD_RES (37)..(37): Selenocysteine
XIFSQKPEFQDLSVFFLKLQWKNAVLLKSXDGRRICX

SEQ ID NO: 23556 - protein, 76 aa, Homo sapiens
  MOD_RES (1)..(1): Any amino acid
  MOD_RES (64)..(64): Selenocysteine
  MOD_RES (66)..(66): Selenocysteine
  MOD_RES (70)..(70): Selenocysteine
XYLIFSQKPEFQDLSGSFMVKPEYLQRGGAKARAGHHDCHVRGIPSILRSREGKKIHSQKQLFXVXLIVXRIKMAK

SEQ ID NO: 23557 - protein, 66 aa, Homo sapiens
  MOD_RES (19)..(19): Selenocysteine
  MOD_RES (37)..(37): Selenocysteine
  MOD_RES (53)..(53): Selenocysteine
  MOD_RES (57)..(57): Selenocysteine
MAAIRKKLVIVGDGACGKXCLLIVFSKDQFPEVYVPXVFENYIADIEVDGKQXGSVXWAESLCLWV

SEQ ID NO: 23558 - protein, 92 aa, Homo sapiens
  MOD_RES (19)..(19): Selenocysteine
  MOD_RES (37)..(37): Selenocysteine
  MOD_RES (60)..(60): Selenocysteine
  MOD_RES (77)..(77): Selenocysteine
MAAIRKKLVIVGDGACGKXCLLIVFSKDQFPEVYVPXVFENYIADIEVDGKQVELALWDXAGQEDYDRLRPLSYPDXDVILMCFSIDSPDSL

SEQ ID NO: 23559 - protein, 199 aa, Homo sapiens
  MOD_RES (19)..(19): Selenocysteine
  MOD_RES (37)..(37): Selenocysteine
  MOD_RES (60)..(60): Selenocysteine
  MOD_RES (77)..(77): Selenocysteine
  MOD_RES (100)..(100): Selenocysteine
  MOD_RES (126)..(126): Selenocysteine
  MOD_RES (129)..(129): Selenocysteine
  MOD_RES (136)..(136): Selenocysteine
  MOD_RES (164)..(164): Selenocysteine
  MOD_RES (181)..(181): Selenocysteine
  MOD_RES (195)..(196): Selenocysteine
MAAIRKKLVIVGDGACGKXCLLIVFSKDQFPEVYVPXVFENYIADIEVDGKQVELALWDXAGQEDYDRLRPLSYPDXDVILMCFSIDSPDSLENIPEKWXPEVKHFCPNVPIILVGNKKDLRKAGXWRXGSVPLAXLSAQPRPRRECGRCLRWPLGLASRSARXSVGGAVPFSEIPKAFPXCPLPSQGYRNYPPXXPAS

SEQ ID NO: 23560 - protein, 127 aa, Homo sapiens
  MOD_RES (19)..(19): Selenocysteine
  MOD_RES (37)..(37): Selenocysteine
  MOD_RES (60)..(60): Selenocysteine
  MOD_RES (77)..(77): Selenocysteine
  MOD_RES (100)..(100): Selenocysteine
  MOD_RES (127)..(127): Selenocysteine
MAAIRKKLVIVGDGACGKXCLLIVFSKDQFPEVYVPXVFENYIADIEVDGKQVELALWDXAGQEDYDRLRPLSYPDXDVILMCFSIDSPDSLENIPEKWXPEVKHFCPNVPIILVGNKKDLRQDEHX

SEQ ID NO: 23561 - protein, 169 aa, Homo sapiens
  MOD_RES (19)..(19): Selenocysteine
  MOD_RES (37)..(37): Selenocysteine
  MOD_RES (60)..(60): Selenocysteine
  MOD_RES (77)..(77): Selenocysteine
  MOD_RES (100)..(100): Selenocysteine
  MOD_RES (127)..(127): Selenocysteine
  MOD_RES (163)..(163): Selenocysteine
MAAIRKKLVIVGDGACGKXCLLIVFSKDQFPEVYVPXVFENYIADIEVDGKQVELALWDXAGQEDYDRLRPLSYPDXDVILMCFSIDSPDSLENIPEKWXPEVKHFCPNVPIILVGNKKDLRQDEHXRRELAKMKQEPVRSEEGRDMANRISAFGYLECSAKXKEGVRE

SEQ ID NO: 23562 - protein, 189 aa, Homo sapiens
  MOD_RES (19)..(19): Selenocysteine
  MOD_RES (37)..(37): Selenocysteine
  MOD_RES (60)..(60): Selenocysteine
  MOD_RES (77)..(77): Selenocysteine
  MOD_RES (100)..(100): Selenocysteine
  MOD_RES (127)..(127): Selenocysteine
  MOD_RES (163)..(163): Selenocysteine
  MOD_RES (175)..(175): Selenocysteine
MAAIRKKLVIVGDGACGKXCLLIVFSKDQFPEVYVPXVFENYIADIEVDGKQVELALWDXAGQEDYDRLRPLSYPDXDVILMCFSIDSPDSLENIPEKWXPEVKHFCPNVPIILVGNKKDLRQDEHXRRELAKMKQEPVRSEEGRDMANRISAFGYLECSAKXKEGVREVFEMAXRAGLQVRKNKRRRG

SEQ ID NO: 23563 - protein, 193 aa, Homo sapiens
  MOD_RES (19)..(19): Selenocysteine
  MOD_RES (37)..(37): Selenocysteine
  MOD_RES (60)..(60): Selenocysteine
  MOD_RES (77)..(77): Selenocysteine
  MOD_RES (100)..(100): Selenocysteine
  MOD_RES (127)..(127): Selenocysteine
  MOD_RES (163)..(163): Selenocysteine
  MOD_RES (175)..(175): Selenocysteine
MAAIRKKLVIVGDGACGKXCLLIVFSKDQFPEVYVPXVFENYIADIEVDGKQVELALWDXAGQEDYDRLRPLSYPDXDVILMCFSIDSPDSLENIPEKWXPEVKHFCPNVPIILVGNKKDLRQDEHXRRELAKMKQEPVRSEEGRDMANRISAFGYLECSAKXKEGVREVFEMAXRAGLQVRKNKRRRGCPIL

SEQ ID NO: 23564 - protein, 129 aa, Homo sapiens
  MOD_RES (11)..(11): Selenocysteine
  MOD_RES (30)..(30): Selenocysteine
  MOD_RES (37)..(37): Selenocysteine
  MOD_RES (56)..(56): Selenocysteine
  MOD_RES (74)..(74): Selenocysteine
  MOD_RES (97)..(97): Selenocysteine
  MOD_RES (114)..(114): Selenocysteine
MVSISGGDLPXGLDFISAPEPALSSCSLGXSAGWSPXMAAIRKKLVIVGDGACGKXCLLIVFSKDQFPEVYVPXVFENYIADIEVDGKQVELALWDXAGQEDYDRLRPLSYPDXDVILMCFSIDSPDSL

SEQ ID NO: 23565 - protein, 210 aa, Homo sapiens
  MOD_RES (2)..(2): Selenocysteine
  MOD_RES (31)..(31): Selenocysteine
  MOD_RES (47)..(47): Selenocysteine
  MOD_RES (49)..(49): Selenocysteine
  MOD_RES (72)..(72): Selenocysteine
  MOD_RES (99)..(99): Selenocysteine
  MOD_RES (131)..(131): Selenocysteine
  MOD_RES (152)..(152): Selenocysteine
  MOD_RES (203)..(203): Selenocysteine
  MOD_RES (210)..(210): Selenocysteine
MXAAQAAGEEAPPGVRSVKVVLVGDGGCGKXSLLMVFADGAFPESYXPXVFERYMVNLQVKGKPVHLHIWDXAGQDDYDRLRPLFYPDASVLLLCFDVXSPNSFDNIFNRWYPEVNHFCKKVPIIVVGCKXDLRKDKSLVNKLRRNGLEPVXYHRGQEMARSVGAVAYLECSARLHDNVHAVFQEAAEVALSSRGRNFWRRIXQGFCVVX

SEQ ID NO: 23566 - protein, 144 aa, Homo sapiens
  MOD_RES (2)..(2): Selenocysteine
  MOD_RES (31)..(31): Selenocysteine
  MOD_RES (65)..(65): Selenocysteine
  MOD_RES (86)..(86): Selenocysteine
  MOD_RES (137)..(137): Selenocysteine
  MOD_RES (144)..(144): Selenocysteine
MXAAQAAGEEAPPGVRSVKVVLVGDGGCGKXSLLMVFADGAFPEWYPEVNHFCKKVPIIVVGCKXDLRKDKSLVNKLRRNGLEPVXYHRGQEMARSVGAVAYLECSARLHDNVHAVFQEAAEVALSSRGRNFWRRIXQGFCVVX

SEQ ID NO: 23567 - protein, 113 aa, Homo sapiens
  MOD_RES (10)..(10): Selenocysteine
  MOD_RES (33)..(33): Selenocysteine
  MOD_RES (57)..(57): Selenocysteine
  MOD_RES (61)..(61): Selenocysteine
  MOD_RES (68)..(68): Selenocysteine
  MOD_RES (74)..(74): Selenocysteine
  MOD_RES (91)..(91): Selenocysteine
  MOD_RES (104)..(104): Selenocysteine
MDAPGALAQXAAPGPGRKELKIVIVGDGGCGKXSLLMVYSQGSFPEHYAPSVFEKYXASVXVGSKEVXLNLYDXAGQEDYDRLRPLSYQNXHLVLICYDVMNPXSYDNVLIKV

SEQ ID NO: 23568 - protein, 211 aa, Homo sapiens
  MOD_RES (10)..(10): Selenocysteine
  MOD_RES (33)..(33): Selenocysteine
  MOD_RES (57)..(57): Selenocysteine
  MOD_RES (61)..(61): Selenocysteine
  MOD_RES (68)..(68): Selenocysteine
  MOD_RES (74)..(74): Selenocysteine
  MOD_RES (91)..(91): Selenocysteine
  MOD_RES (104)..(104): Selenocysteine
  MOD_RES (118)..(118): Selenocysteine
  MOD_RES (133)..(133): Selenocysteine
  MOD_RES (154)..(154): Selenocysteine
MDAPGALAQXAAPGPGRKELKIVIVGDGGCGKXSLLMVYSQGSFPEHYAPSVFEKYXASVXVGSKEVXLNLYDXAGQEDYDRLRPLSYQNXHLVLICYDVMNPXSYDNVLIKWFPEVXHFCRGIPMVLIGCKXDLRKDKEQLRKLRAAQLEPIXYMQGLSACEQIRAALYLECSAKFRENVEDVFREAAKVALSALKKAQRQKKRRLCLLL

SEQ ID NO: 23569 - protein, 170 aa, Homo sapiens
  MOD_RES (10)..(10): Selenocysteine
  MOD_RES (33)..(33): Selenocysteine
  MOD_RES (57)..(57): Selenocysteine
  MOD_RES (61)..(61): Selenocysteine
  MOD_RES (68)..(68): Selenocysteine
  MOD_RES (74)..(74): Selenocysteine
  MOD_RES (91)..(91): Selenocysteine
  MOD_RES (104)..(104): Selenocysteine
  MOD_RES (118)..(118): Selenocysteine
  MOD_RES (133)..(133): Selenocysteine
  MOD_RES (154)..(154): Selenocysteine
MDAPGALAQXAAPGPGRKELKIVIVGDGGCGKXSLLMVYSQGSFPEHYAPSVFEKYXASVXVGSKEVXLNLYDXAGQEDYDRLRPLSYQNXHLVLICYDVMNPXSYDNVLIKWFPEVXHFCRGIPMVLIGCKXDLRKDKEQLRKLRAAQLEPIXYMQVGRGQDPGAQPWL

SEQ ID NO: 23570 - protein, 30 aa, Homo sapiens
  MOD_RES (4)..(4): Selenocysteine
  MOD_RES (18)..(18): Selenocysteine
MNPXSYDNVLIKWFPEVXHFCRGIPMVLIG

SEQ ID NO: 23571 - protein, 75 aa, Homo sapiens
  MOD_RES (4)..(4): Selenocysteine
  MOD_RES (18)..(18): Selenocysteine
  MOD_RES (33)..(33): Selenocysteine
  MOD_RES (54)..(54): Selenocysteine
MNPXSYDNVLIKWFPEVXHFCRGIPMVLIGCKXDLRKDKEQLRKLRAAQLEPIXYMQGLSACEQIRAALYLECSA

SEQ ID NO: 23572 - protein, 111 aa, Homo sapiens
  MOD_RES (4)..(4): Selenocysteine
  MOD_RES (18)..(18): Selenocysteine
  MOD_RES (33)..(33): Selenocysteine
  MOD_RES (54)..(54): Selenocysteine
MNPXSYDNVLIKWFPEVXHFCRGIPMVLIGCKXDLRKDKEQLRKLRAAQLEPIXYMQGLSACEQIRAALYLECSAKFRENVEDVFREAAKVALSALKKAQRQKKRRLCLLL

SEQ ID NO: 23573 - protein, 191 aa, Homo sapiens
  MOD_RES (17)..(17): Selenocysteine
  MOD_RES (24)..(25): Selenocysteine
  MOD_RES (35)..(35): Selenocysteine
  MOD_RES (50)..(50): Selenocysteine
  MOD_RES (58)..(58): Selenocysteine
  MOD_RES (69)..(69): Selenocysteine
  MOD_RES (75)..(75): Selenocysteine
  MOD_RES (115)..(115): Selenocysteine
  MOD_RES (125)..(125): Selenocysteine
  MOD_RES (138)..(138): Selenocysteine
  MOD_RES (180)..(180): Selenocysteine
MQSIKCVVVGDGAVGKXCLLICYXXNAFPKEYIPXVFDNYSAQSAVDGRXVNLNLWDXAGQEEYDRLRXLSYPQXNVFVICFSIASPPSYENVRHKWHPEVCHHCPDVPILLVGXKKDLRAQPDXLRRLKEQGQAPIXPQQGQALAKQIHAVRYLECSALQQDGVKEVFAEAVRAVLNPXPIKRGRSCILL

SEQ ID NO: 23574 - protein, 6 aa, Homo sapiens
MLSSIK

SEQ ID NO: 23575 - protein, 16 aa, Homo sapiens
MLSSIKCVLVGDSAVG

SEQ ID NO: 23576 - protein, 103 aa, Homo sapiens
  MOD_RES (18)..(18): Selenocysteine
  MOD_RES (25)..(25): Selenocysteine
  MOD_RES (28)..(28): Selenocysteine
  MOD_RES (36)..(36): Selenocysteine
  MOD_RES (41)..(41): Selenocysteine
  MOD_RES (59)..(59): Selenocysteine
MLSSIKCVLVGDSAVGKXSLLVRFXSEXFPEAYKPXVYENXGVDVFMDGIQISLGLWDXAGNDAFRSIRPLSYQQADVVLMCYSVANHNSFLNLKNKWIGEIR

SEQ ID NO: 23577 - protein, 109 aa, Homo sapiens
  MOD_RES (18)..(18): Selenocysteine
  MOD_RES (25)..(25): Selenocysteine
  MOD_RES (28)..(28): Selenocysteine
  MOD_RES (36)..(36): Selenocysteine
  MOD_RES (41)..(41): Selenocysteine
  MOD_RES (59)..(59): Selenocysteine
  MOD_RES (109)..(109): Selenocysteine
MLSSIKCVLVGDSAVGKXSLLVRFXSEXFPEAYKPXVYENXGVDVFMDGIQISLGLWDXAGNDAFRSIRPLSYQQADVVLMCYSVANHNSFLNLKNKWIGEIRSNLPCX

SEQ ID NO: 23578 - protein, 191 aa, Homo sapiens
  MOD_RES (18)..(18): Selenocysteine
  MOD_RES (25)..(25): Selenocysteine
  MOD_RES (28)..(28): Selenocysteine
  MOD_RES (36)..(36): Selenocysteine
  MOD_RES (41)..(41): Selenocysteine
  MOD_RES (59)..(59): Selenocysteine
  MOD_RES (109)..(109): Selenocysteine
  MOD_RES (116)..(116): Selenocysteine
  MOD_RES (118)..(118): Selenocysteine
  MOD_RES (169)..(169): Selenocysteine
MLSSIKCVLVGDSAVGKXSLLVRFXSEXFPEAYKPXVYENXGVDVFMDGIQISLGLWDXAGNDAFRSIRPLSYQQADVVLMCYSVANHNSFLNLKNKWIGEIRSNLPCXPVLVVAXQXDQREMGPHRASCVNAMEGKKLAQDVRAKGYLECSALSNRGVQQVFECAVRXAVNQARRRNRRRLFSINECKIF

SEQ ID NO: 23579 - protein, 214 aa, Homo sapiens
  MOD_RES (7)..(7): Selenocysteine
  MOD_RES (35)..(35): Selenocysteine
  MOD_RES (53)..(53): Selenocysteine
  MOD_RES (61)..(61): Selenocysteine
  MOD_RES (63)..(63): Selenocysteine
  MOD_RES (76)..(76): Selenocysteine
  MOD_RES (93)..(93): Selenocysteine
  MOD_RES (133)..(133): Selenocysteine
  MOD_RES (143)..(143): Selenocysteine
  MOD_RES (156)..(156): Selenocysteine
  MOD_RES (179)..(179): Selenocysteine
  MOD_RES (193)..(193): Selenocysteine
MNCKEGXDSSCGCRGNDEKKMLKCVVVGDGAVGKXCLLMSYANDAFPEEYVPXVFDHYAVXVXVGGKQHLLGLYDXAGQEDYNQLRPLSYPNXDVFLICFSVVNPASYHNVQEEWVPELKDCMPHVPYVLIGXQIDLRDDPKXLARLLYMKEKPLXYEHGVKLAKAIGAQCYLECSALXQKGLKAVFDEAILXIFHPKKKKKRCSEGHSCCSII

SEQ ID NO: 23580 - protein, 178 aa, Homo sapiens
  MOD_RES (7)..(7): Selenocysteine
  MOD_RES (35)..(35): Selenocysteine
  MOD_RES (53)..(53): Selenocysteine
  MOD_RES (61)..(61): Selenocysteine
  MOD_RES (63)..(63): Selenocysteine
  MOD_RES (76)..(76): Selenocysteine
  MOD_RES (93)..(93): Selenocysteine
  MOD_RES (133)..(133): Selenocysteine
  MOD_RES (143)..(143): Selenocysteine
  MOD_RES (156)..(156): Selenocysteine
MNCKEGXDSSCGCRGNDEKKMLKCVVVGDGAVGKXCLLMSYANDAFPEEYVPXVFDHYAVXVXVGGKQHLLGLYDXAGQEDYNQLRPLSYPNXDVFLICFSVVNPASYHNVQEEWVPELKDCMPHVPYVLIGXQIDLRDDPKXLARLLYMKEKPLXYEHGVKLAKAVQSDLNFILNVC

SEQ ID NO: 23581 - protein, 153 aa, Homo sapiens
  MOD_RES (7)..(7): Selenocysteine
  MOD_RES (35)..(35): Selenocysteine
  MOD_RES (53)..(53): Selenocysteine
  MOD_RES (61)..(61): Selenocysteine
  MOD_RES (63)..(63): Selenocysteine
  MOD_RES (76)..(76): Selenocysteine
  MOD_RES (93)..(93): Selenocysteine
  MOD_RES (130)..(131): Selenocysteine
  MOD_RES (151)..(151): Selenocysteine
MNCKEGXDSSCGCRGNDEKKMLKCVVVGDGAVGKXCLLMSYANDAFPEEYVPXVFDHYAVXVXVGGKQHLLGLYDXAGQEDYNQLRPLSYPNXDVFLICFSVVWDLPPPHPGMRMAANLCGQAPAKKEGXXRKELPLHGGLPHHPLSPPNXAH

SEQ ID NO: 23582 - protein, 50 aa, Homo sapiens
  MOD_RES (23)..(23): Selenocysteine
  MOD_RES (41)..(41): Selenocysteine
MAHGPGALMLKCVVVGDGAVGKXCLLMSYANDAFPEEYVPXVFDHYAGRL

SEQ ID NO: 23583 - protein, 205 aa, Homo sapiens
  MOD_RES (23)..(23): Selenocysteine
  MOD_RES (41)..(41): Selenocysteine
  MOD_RES (51)..(51): Selenocysteine
  MOD_RES (64)..(64): Selenocysteine
  MOD_RES (81)..(81): Selenocysteine
  MOD_RES (121)..(121): Selenocysteine
  MOD_RES (131)..(131): Selenocysteine
  MOD_RES (167)..(167): Selenocysteine
  MOD_RES (173)..(173): Selenocysteine
  MOD_RES (184)..(184): Selenocysteine
  MOD_RES (189)..(189): Selenocysteine
  MOD_RES (205)..(205): Selenocysteine
MAHGPGALMLKCVVVGDGAVGKXCLLMSYANDAFPEEYVPXVFDHYAVSVXVGGKQYLLGLYDXAGQEDYDRLRPLSYPMXDVFLICFSVVNPASFQNVKEEWVPELKEYAPNVPFLLIGXQIDLRDDPKXLARLNDMKEKPICVEQGQKLAKEIGACCYVECSALXQKGLKXVFDEAIIAILXPKKHXVKKRIGSRCINCCLIX

SEQ ID NO: 23584 - protein, 75 aa, Homo sapiens
  MOD_RES (2)..(2): Selenocysteine
  MOD_RES (42)..(42): Selenocysteine
  MOD_RES (52)..(52): Selenocysteine
MXDVFLICFSVVNPASFQNVKEEWVPELKEYAPNVPFLLIGXQIDLRDDPKXLARLNDMKEKPICVEQGQKLAKE

SEQ ID NO: 23585 - protein, 91 aa, Homo sapiens
  MOD_RES (7)..(7): Selenocysteine
  MOD_RES (17)..(17): Selenocysteine
  MOD_RES (30)..(30): Selenocysteine
  MOD_RES (58)..(58): Selenocysteine
  MOD_RES (63)..(63): Selenocysteine
PEEYVPXVFDHYAVSVXVGGKQYLLGLYDXAGQALQQSELDFWEEISVSSGSWGHVIXFSFHXRAWVSSGQDLLCPLAPASAVLLLDRGRL

SEQ ID NO: 23586 - protein, 34 aa, Homo sapiens
  MOD_RES (1)..(1): Any amino acid
  MOD_RES (13)..(13): Selenocysteine
  MOD_RES (19)..(19): Selenocysteine
XGGKQYLLGLYDXAGQEDXGELAVRSCDFDKSIF

SEQ ID NO: 23587 - protein, 156 aa, Homo sapiens
  MOD_RES (6)..(6): Selenocysteine
  MOD_RES (66)..(66): Selenocysteine
  MOD_RES (81)..(81): Selenocysteine
  MOD_RES (84)..(84): Selenocysteine
  MOD_RES (97)..(98): Selenocysteine
  MOD_RES (112)..(112): Selenocysteine
  MOD_RES (117)..(117): Selenocysteine
  MOD_RES (139)..(139): Selenocysteine
  MOD_RES (147)..(147): Selenocysteine
  MOD_RES (150)..(150): Selenocysteine
ESEFLXEAEIICDVVCLVYDVSNPKSFEYCARIFKQHFMDSRIPCLIVAAKSDLHEVKQEYSISPXDFCRKHKMPPPQAFXCNXADAPSKDIFVKLXXMAMYPHARLRCMCXCNRCXFCICQNFLNSDLLQSVKNKIFXAVLNRFLXLFXGYQAFC

SEQ ID NO: 23588 - protein, 40 aa, Homo sapiens
  MOD_RES (21)..(21): Selenocysteine
KSFVMLYAWYMMSAIPNPLNXVPGFLRKKLEIIKMANNGR

SEQ ID NO: 23589 - protein, 51 aa, Homo sapiens
  MOD_RES (18)..(18): Selenocysteine
  MOD_RES (39)..(39): Selenocysteine
  MOD_RES (50)..(50): Selenocysteine
MKKDVRILLVGEPRVGKXSLIMSLVSEEFPEEIVVDLNXSSFAEYLQPSXK

SEQ ID NO: 23590 - protein, 580 aa, Homo sapiens
  MOD_RES (18)..(18): Selenocysteine
  MOD_RES (41)..(41): Selenocysteine
  MOD_RES (47)..(47): Selenocysteine
  MOD_RES (53)..(53): Selenocysteine
  MOD_RES (94)..(94): Selenocysteine
  MOD_RES (105)..(105): Selenocysteine
  MOD_RES (130)..(130): Selenocysteine
  MOD_RES (139)..(139): Selenocysteine
  MOD_RES (143)..(143): Selenocysteine
  MOD_RES (170)..(170): Selenocysteine
  MOD_RES (190)..(190): Selenocysteine
  MOD_RES (203)..(203): Selenocysteine
  MOD_RES (219)..(219): Selenocysteine
  MOD_RES (247)..(247): Selenocysteine
  MOD_RES (256)..(256): Selenocysteine
  MOD_RES (266)..(267): Selenocysteine
  MOD_RES (269)..(269): Selenocysteine
  MOD_RES (283)..(283): Selenocysteine
  MOD_RES (298)..(299): Selenocysteine
  MOD_RES (312)..(312): Selenocysteine
  MOD_RES (348)..(348): Selenocysteine
  MOD_RES (351)..(351): Selenocysteine
  MOD_RES (358)..(358): Selenocysteine
  MOD_RES (367)..(367): Selenocysteine
  MOD_RES (369)..(370): Selenocysteine
  MOD_RES (390)..(390): Selenocysteine
  MOD_RES (400)..(400): Selenocysteine
  MOD_RES (402)..(402): Selenocysteine
  MOD_RES (414)..(414): Selenocysteine
  MOD_RES (461)..(461): Selenocysteine
  MOD_RES (483)..(483): Selenocysteine
  MOD_RES (543)..(543): Selenocysteine
  MOD_RES (558)..(558): Selenocysteine
  MOD_RES (561)..(561): Selenocysteine
  MOD_RES (574)..(575): Selenocysteine
MKKDVRILLVGEPRVGKXSLIMSLVSEEFPEEVPPRAEEIXIPADVXPERVPXHIVDYSEAEQSDEQLHQEISQANVICIVYAVNNKHSIDKVXSRWIPLINERXDKDSRLPLILVGNKSDLVEYSSMEXILPIMNQYXEIEXCVECSAKNLKNISELFYYAQKAVLHPXGPLYCPEEKEMKPACIKALXRIFKISDQDNDGXLNDAELNFFQRICFNXPLAPQALEDVKNVVRKHISDGVADSGLXLKGFLFLHXLFIQRGRHEXXWXVLRRFGYDDDLDLXPEYLFPLLKIPPDCXXELNHHAYLFLQSXFDKHDLDRDCALSPDELKDLFKVFPYIPWGPDVNNXVCXNERGWIXYQGFLSQWXLXXYLDVQRCLEYLGYLGYSILXEQESQASAVXVXRDKKIDLQKKQXQRNVFRCNVIGVKNCGKSGVLQALLGRNLMRQKKIREDHKSYYAINXVYVYGQEKYLLLHDISESEFLXEAEIICDVVCLVYDVSNPKSFEYCARIFKQHFMDSRIPCLIVAAKSDLHEVKQEYSISPXDFCRKHKMPPPQAFXCNXADAPSKDIFVKLXXMAMYP

SEQ ID NO: 23591 - protein, 618 aa, Homo sapiens
  MOD_RES (18)..(18): Selenocysteine
  MOD_RES (41)..(41): Selenocysteine
  MOD_RES (47)..(47): Selenocysteine
  MOD_RES (53)..(53): Selenocysteine
  MOD_RES (94)..(94): Selenocysteine
  MOD_RES (105)..(105): Selenocysteine
  MOD_RES (130)..(130): Selenocysteine
  MOD_RES (139)..(139): Selenocysteine
  MOD_RES (143)..(143): Selenocysteine
  MOD_RES (170)..(170): Selenocysteine
  MOD_RES (190)..(190): Selenocysteine
  MOD_RES (203)..(203): Selenocysteine
  MOD_RES (219)..(219): Selenocysteine
  MOD_RES (247)..(247): Selenocysteine
  MOD_RES (256)..(256): Selenocysteine
  MOD_RES (266)..(267): Selenocysteine
  MOD_RES (269)..(269): Selenocysteine
  MOD_RES (283)..(283): Selenocysteine
  MOD_RES (298)..(299): Selenocysteine
  MOD_RES (312)..(312): Selenocysteine
  MOD_RES (348)..(348): Selenocysteine
  MOD_RES (351)..(351): Selenocysteine
  MOD_RES (358)..(358): Selenocysteine
  MOD_RES (367)..(367): Selenocysteine
  MOD_RES (369)..(370): Selenocysteine
  MOD_RES (390)..(390): Selenocysteine
  MOD_RES (400)..(400): Selenocysteine
  MOD_RES (402)..(402): Selenocysteine
  MOD_RES (414)..(414): Selenocysteine
  MOD_RES (461)..(461): Selenocysteine
  MOD_RES (483)..(483): Selenocysteine
  MOD_RES (543)..(543): Selenocysteine
  MOD_RES (558)..(558): Selenocysteine
  MOD_RES (561)..(561): Selenocysteine
  MOD_RES (574)..(575): Selenocysteine
  MOD_RES (583)..(583): Selenocysteine
  MOD_RES (591)..(591): Selenocysteine
  MOD_RES (601)..(601): Selenocysteine
MKKDVRILLVGEPRVGKXSLIMSLVSEEFPEEVPPRAEEIXIPADVXPERVPXHIVDYSEAEQSDEQLHQEISQANVICIVYAVNNKHSIDKVXSRWIPLINERXDKDSRLPLILVGNKSDLVEYSSMEXILPIMNQYXEIEXCVECSAKNLKNISELFYYAQKAVLHPXGPLYCPEEKEMKPACIKALXRIFKISDQDNDGXLNDAELNFFQRICFNXPLAPQALEDVKNVVRKHISDGVADSGLXLKGFLFLHXLFIQRGRHEXXWXVLRRFGYDDDLDLXPEYLFPLLKIPPDCXXELNHHAYLFLQSXFDKHDLDRDCALSPDELKDLFKVFPYIPWGPDVNNXVCXNERGWIXYQGFLSQWXLXXYLDVQRCLEYLGYLGYSILXEQESQASAVXVXRDKKIDLQKKQXQRNVFRCNVIGVKNCGKSGVLQALLGRNLMRQKKIREDHKSYYAINXVYVYGQEKYLLLHDISESEFLXEAEIICDVVCLVYDVSNPKSFEYCARIFKQHFMDSRIPCLIVAAKSDLHEVKQEYSISPXDFCRKHKMPPPQAFXCNXADAPSKDIFVKLXXMAMYPHVXQADLKSSXFWLRASFGAXVFAVLGFAMYKALLKQR

SEQ ID NO: 23592 - protein, 625 aa, Homo sapiens
  MOD_RES (18)..(18): Selenocysteine
  MOD_RES (41)..(41): Selenocysteine
  MOD_RES (47)..(47): Selenocysteine
  MOD_RES (53)..(53): Selenocysteine
  MOD_RES (94)..(94): Selenocysteine
  MOD_RES (105)..(105): Selenocysteine
  MOD_RES (130)..(130): Selenocysteine
  MOD_RES (139)..(139): Selenocysteine
  MOD_RES (143)..(143): Selenocysteine
  MOD_RES (170)..(170): Selenocysteine
  MOD_RES (190)..(190): Selenocysteine
  MOD_RES (203)..(203): Selenocysteine
  MOD_RES (219)..(219): Selenocysteine
  MOD_RES (247)..(247): Selenocysteine
  MOD_RES (256)..(256): Selenocysteine
  MOD_RES (266)..(267): Selenocysteine
  MOD_RES (269)..(269): Selenocysteine
  MOD_RES (283)..(283): Selenocysteine
  MOD_RES (298)..(299): Selenocysteine
  MOD_RES (312)..(312): Selenocysteine
  MOD_RES (348)..(348): Selenocysteine
  MOD_RES (351)..(351): Selenocysteine
  MOD_RES (358)..(358): Selenocysteine
  MOD_RES (367)..(367): Selenocysteine
  MOD_RES (369)..(370): Selenocysteine
  MOD_RES (390)..(390): Selenocysteine
  MOD_RES (400)..(400): Selenocysteine
  MOD_RES (402)..(402): Selenocysteine
  MOD_RES (414)..(414): Selenocysteine
  MOD_RES (461)..(461): Selenocysteine
  MOD_RES (483)..(483): Selenocysteine
  MOD_RES (543)..(543): Selenocysteine
  MOD_RES (558)..(558): Selenocysteine
  MOD_RES (561)..(561): Selenocysteine
  MOD_RES (574)..(575): Selenocysteine
  MOD_RES (589)..(589): Selenocysteine
  MOD_RES (594)..(594): Selenocysteine
  MOD_RES (616)..(616): Selenocysteine
MKKDVRILLVGEPRVGKXSLIMSLVSEEFPEEVPPRAEEIXIPADVXPERVPXHIVDYSEAEQSDEQLHQEISQANVICIVYAVNNKHSIDKVXSRWIPLINERXDKDSRLPLILVGNKSDLVEYSSMEXILPIMNQYXEIEXCVECSAKNLKNISELFYYAQKAVLHPXGPLYCPEEKEMKPACIKALXRIFKISDQDNDGXLNDAELNFFQRICFNXPLAPQALEDVKNVVRKHISDGVADSGLXLKGFLFLHXLFIQRGRHEXXWXVLRRFGYDDDLDLXPEYLFPLLKIPPDCXXELNHHAYLFLQSXFDKHDLDRDCALSPDELKDLFKVFPYIPWGPDVNNXVCXNERGWIXYQGFLSQWXLXXYLDVQRCLEYLGYLGYSILXEQESQASAVXVXRDKKIDLQKKQXQRNVFRCNVIGVKNCGKSGVLQALLGRNLMRQKKIREDHKSYYAINXVYVYGQEKYLLLHDISESEFLXEAEIICDVVCLVYDVSNPKSFEYCARIFKQHFMDSRIPCLIVAAKSDLHEVKQEYSISPXDFCRKHKMPPPQAFXCNXADAPSKDIFVKLXXMAMYPHARLRCMCXCNRCXFCICQNFLNSDLLQSVKNKIFXAVLNRIISA

SEQ ID NO: 23593 - protein, 650 aa, Homo sapiens
  MOD_RES (18)..(18): Selenocysteine
  MOD_RES (41)..(41): Selenocysteine
  MOD_RES (47)..(47): Selenocysteine
  MOD_RES (53)..(53): Selenocysteine
  MOD_RES (94)..(94): Selenocysteine
  MOD_RES (105)..(105): Selenocysteine
  MOD_RES (130)..(130): Selenocysteine
  MOD_RES (139)..(139): Selenocysteine
  MOD_RES (143)..(143): Selenocysteine
  MOD_RES (170)..(170): Selenocysteine
  MOD_RES (190)..(190): Selenocysteine
  MOD_RES (203)..(203): Selenocysteine
  MOD_RES (219)..(219): Selenocysteine
  MOD_RES (247)..(247): Selenocysteine
  MOD_RES (256)..(256): Selenocysteine
  MOD_RES (266)..(267): Selenocysteine
  MOD_RES (269)..(269): Selenocysteine
  MOD_RES (283)..(283): Selenocysteine
  MOD_RES (298)..(299): Selenocysteine
  MOD_RES (312)..(312): Selenocysteine
  MOD_RES (348)..(348): Selenocysteine
  MOD_RES (351)..(351): Selenocysteine
  MOD_RES (358)..(358): Selenocysteine
  MOD_RES (367)..(367): Selenocysteine
  MOD_RES (369)..(370): Selenocysteine
  MOD_RES (390)..(390): Selenocysteine
  MOD_RES (400)..(400): Selenocysteine
  MOD_RES (402)..(402): Selenocysteine
  MOD_RES (414)..(414): Selenocysteine
  MOD_RES (461)..(461): Selenocysteine
  MOD_RES (483)..(483): Selenocysteine
  MOD_RES (543)..(543): Selenocysteine
  MOD_RES (558)..(558): Selenocysteine
  MOD_RES (561)..(561): Selenocysteine
  MOD_RES (574)..(575): Selenocysteine
  MOD_RES (595)..(595): Selenocysteine
  MOD_RES (610)..(610): Selenocysteine
  MOD_RES (615)..(615): Selenocysteine
  MOD_RES (623)..(623): Selenocysteine
  MOD_RES (633)..(633): Selenocysteine
MKKDVRILLVGEPRVGKXSLIMSLVSEEFPEEVPPRAEEIXIPADVXPERVPXHIVDYSEAEQSDEQLHQEISQANVICIVYAVNNKHSIDKVXSRWIPLINERXDKDSRLPLILVGNKSDLVEYSSMEXILPIMNQYXEIEXCVECSAKNLKNISELFYYAQKAVLHPXGPLYCPEEKEMKPACIKALXRIFKISDQDNDGXLNDAELNFFQRICFNXPLAPQALEDVKNVVRKHISDGVADSGLXLKGFLFLHXLFIQRGRHEXXWXVLRRFGYDDDLDLXPEYLFPLLKIPPDCXXELNHHAYLFLQSXFDKHDLDRDCALSPDELKDLFKVFPYIPWGPDVNNXVCXNERGWIXYQGFLSQWXLXXYLDVQRCLEYLGYLGYSILXEQESQASAVXVXRDKKIDLQKKQXQRNVFRCNVIGVKNCGKSGVLQALLGRNLMRQKKIREDHKSYYAINXVYVYGQEKYLLLHDISESEFLXEAEIICDVVCLVYDVSNPKSFEYCARIFKQHFMDSRIPCLIVAAKSDLHEVKQEYSISPXDFCRKHKMPPPQAFXCNXADAPSKDIFVKLXXMAMYPEDHYRDRLSRDMGHXDRIENLRKIWVFLKXALHVXQADLKSSXFWLRASFGAXVFAVLGFAMYKALLKQR

SEQ ID NO: 23594 - protein, 659 aa, Homo sapiens
  MOD_RES (18)..(18): Selenocysteine
  MOD_RES (41)..(41): Selenocysteine
  MOD_RES (47)..(47): Selenocysteine
  MOD_RES (53)..(53): Selenocysteine
  MOD_RES (94)..(94): Selenocysteine
  MOD_RES (105)..(105): Selenocysteine
  MOD_RES (130)..(130): Selenocysteine
  MOD_RES (139)..(139): Selenocysteine
  MOD_RES (143)..(143): Selenocysteine
  MOD_RES (170)..(170): Selenocysteine
  MOD_RES (190)..(190): Selenocysteine
  MOD_RES (203)..(203): Selenocysteine
  MOD_RES (219)..(219): Selenocysteine
  MOD_RES (247)..(247): Selenocysteine
  MOD_RES (256)..(256): Selenocysteine
  MOD_RES (266)..(267): Selenocysteine
  MOD_RES (269)..(269): Selenocysteine
  MOD_RES (283)..(283): Selenocysteine
  MOD_RES (298)..(299): Selenocysteine
  MOD_RES (312)..(312): Selenocysteine
  MOD_RES (348)..(348): Selenocysteine
  MOD_RES (351)..(351): Selenocysteine
  MOD_RES (358)..(358): Selenocysteine
  MOD_RES (367)..(367): Selenocysteine
  MOD_RES (369)..(370): Selenocysteine
  MOD_RES (390)..(390): Selenocysteine
  MOD_RES (400)..(400): Selenocysteine
  MOD_RES (402)..(402): Selenocysteine
  MOD_RES (414)..(414): Selenocysteine
  MOD_RES (461)..(461): Selenocysteine
  MOD_RES (483)..(483): Selenocysteine
  MOD_RES (543)..(543): Selenocysteine
  MOD_RES (558)..(558): Selenocysteine
  MOD_RES (561)..(561): Selenocysteine
  MOD_RES (574)..(575): Selenocysteine
  MOD_RES (589)..(589): Selenocysteine
  MOD_RES (594)..(594): Selenocysteine
  MOD_RES (616)..(616): Selenocysteine
  MOD_RES (624)..(624): Selenocysteine
  MOD_RES (632)..(632): Selenocysteine
  MOD_RES (642)..(642): Selenocysteine
MKKDVRILLVGEPRVGKXSLIMSLVSEEFPEEVPPRAEEIXIPADVXPERVPXHIVDYSEAEQSDEQLHQEISQANVICIVYAVNNKHSIDKVXSRWIPLINERXDKDSRLPLILVGNKSDLVEYSSMEXILPIMNQYXEIEXCVECSAKNLKNISELFYYAQKAVLHPXGPLYCPEEKEMKPACIKALXRIFKISDQDNDGXLNDAELNFFQRICFNXPLAPQALEDVKNVVRKHISDGVADSGLXLKGFLFLHXLFIQRGRHEXXWXVLRRFGYDDDLDLXPEYLFPLLKIPPDCXXELNHHAYLFLQSXFDKHDLDRDCALSPDELKDLFKVFPYIPWGPDVNNXVCXNERGWIXYQGFLSQWXLXXYLDVQRCLEYLGYLGYSILXEQESQASAVXVXRDKKIDLQKKQXQRNVFRCNVIGVKNCGKSGVLQALLGRNLMRQKKIREDHKSYYAINXVYVYGQEKYLLLHDISESEFLXEAEIICDVVCLVYDVSNPKSFEYCARIFKQHFMDSRIPCLIVAAKSDLHEVKQEYSISPXDFCRKHKMPPPQAFXCNXADAPSKDIFVKLXXMAMYPHARLRCMCXCNRCXFCICQNFLNSDLLQSVKNKIFXAVLNRHVXQADLKSSXFWLRASFGAXVFAVLGFAMYKALLKQR

SEQ ID NO: 23595 - protein, 691 aa, Homo sapiens
  MOD_RES (18)..(18): Selenocysteine
  MOD_RES (41)..(41): Selenocysteine
  MOD_RES (47)..(47): Selenocysteine
  MOD_RES (53)..(53): Selenocysteine
  MOD_RES (94)..(94): Selenocysteine
  MOD_RES (105)..(105): Selenocysteine
  MOD_RES (130)..(130): Selenocysteine
  MOD_RES (139)..(139): Selenocysteine
  MOD_RES (143)..(143): Selenocysteine
  MOD_RES (170)..(170): Selenocysteine
  MOD_RES (190)..(190): Selenocysteine
  MOD_RES (203)..(203): Selenocysteine
  MOD_RES (219)..(219): Selenocysteine
  MOD_RES (247)..(247): Selenocysteine
  MOD_RES (256)..(256): Selenocysteine
  MOD_RES (266)..(267): Selenocysteine
  MOD_RES (269)..(269): Selenocysteine
  MOD_RES (283)..(283): Selenocysteine
  MOD_RES (298)..(299): Selenocysteine
  MOD_RES (312)..(312): Selenocysteine
  MOD_RES (348)..(348): Selenocysteine
  MOD_RES (351)..(351): Selenocysteine
  MOD_RES (358)..(358): Selenocysteine
  MOD_RES (367)..(367): Selenocysteine
  MOD_RES (369)..(370): Selenocysteine
  MOD_RES (390)..(390): Selenocysteine
  MOD_RES (400)..(400): Selenocysteine
  MOD_RES (402)..(402): Selenocysteine
  MOD_RES (414)..(414): Selenocysteine
  MOD_RES (461)..(461): Selenocysteine
  MOD_RES (483)..(483): Selenocysteine
  MOD_RES (543)..(543): Selenocysteine
  MOD_RES (558)..(558): Selenocysteine
  MOD_RES (561)..(561): Selenocysteine
  MOD_RES (574)..(575): Selenocysteine
  MOD_RES (595)..(595): Selenocysteine
  MOD_RES (610)..(610): Selenocysteine
  MOD_RES (621)..(621): Selenocysteine
  MOD_RES (626)..(626): Selenocysteine
  MOD_RES (648)..(648): Selenocysteine
  MOD_RES (656)..(656): Selenocysteine
  MOD_RES (664)..(664): Selenocysteine
  MOD_RES (674)..(674): Selenocysteine
MKKDVRILLVGEPRVGKXSLIMSLVSEEFPEEVPPRAEEIXIPADVXPERVPXHIVDYSEAEQSDEQLHQEISQANVICIVYAVNNKHSIDKVXSRWIPLINERXDKDSRLPLILVGNKSDLVEYSSMEXILPIMNQYXEIEXCVECSAKNLKNISELFYYAQKAVLHPXGPLYCPEEKEMKPACIKALXRIFKISDQDNDGXLNDAELNFFQRICFNXPLAPQALEDVKNVVRKHISDGVADSGLXLKGFLFLHXLFIQRGRHEXXWXVLRRFGYDDDLDLXPEYLFPLLKIPPDCXXELNHHAYLFLQSXFDKHDLDRDCALSPDELKDLFKVFPYIPWGPDVNNXVCXNERGWIXYQGFLSQWXLXXYLDVQRCLEYLGYLGYSILXEQESQASAVXVXRDKKIDLQKKQXQRNVFRCNVIGVKNCGKSGVLQALLGRNLMRQKKIREDHKSYYAINXVYVYGQEKYLLLHDISESEFLXEAEIICDVVCLVYDVSNPKSFEYCARIFKQHFMDSRIPCLIVAAKSDLHEVKQEYSISPXDFCRKHKMPPPQAFXCNXADAPSKDIFVKLXXMAMYPEDHYRDRLSRDMGHXDRIENLRKIWVFLKXAFHARLRCMCXCNRCXFCICQNFLNSDLLQSVKNKIFXAVLNRHVXQADLKSSXFWLRASFGAXVFAVLGFAMYKALLKQR

SEQ ID NO: 23596 - protein, 597 aa, Homo sapiens
  MOD_RES (20)..(20): Selenocysteine
  MOD_RES (26)..(26): Selenocysteine
  MOD_RES (32)..(32): Selenocysteine
  MOD_RES (73)..(73): Selenocysteine
  MOD_RES (84)..(84): Selenocysteine
  MOD_RES (109)..(109): Selenocysteine
  MOD_RES (118)..(118): Selenocysteine
  MOD_RES (122)..(122): Selenocysteine
  MOD_RES (149)..(149): Selenocysteine
  MOD_RES (169)..(169): Selenocysteine
  MOD_RES (182)..(182): Selenocysteine
  MOD_RES (198)..(198): Selenocysteine
  MOD_RES (226)..(226): Selenocysteine
  MOD_RES (235)..(235): Selenocysteine
  MOD_RES (245)..(246): Selenocysteine
  MOD_RES (248)..(248): Selenocysteine
  MOD_RES (262)..(262): Selenocysteine
  MOD_RES (277)..(278): Selenocysteine
  MOD_RES (291)..(291): Selenocysteine
  MOD_RES (327)..(327): Selenocysteine
  MOD_RES (330)..(330): Selenocysteine
  MOD_RES (337)..(337): Selenocysteine
  MOD_RES (346)..(346): Selenocysteine
  MOD_RES (348)..(349): Selenocysteine
  MOD_RES (369)..(369): Selenocysteine
  MOD_RES (379)..(379): Selenocysteine
  MOD_RES (381)..(381): Selenocysteine
  MOD_RES (393)..(393): Selenocysteine
  MOD_RES (440)..(440): Selenocysteine
  MOD_RES (462)..(462): Selenocysteine
  MOD_RES (522)..(522): Selenocysteine
  MOD_RES (537)..(537): Selenocysteine
  MOD_RES (540)..(540): Selenocysteine
  MOD_RES (553)..(554): Selenocysteine
  MOD_RES (562)..(562): Selenocysteine
  MOD_RES (570)..(570): Selenocysteine
  MOD_RES (580)..(580): Selenocysteine
MSLVSEEFPEEVPPRAEEIXIPADVXPERVPXHIVDYSEAEQSDEQLHQEISQANVICIVYAVNNKHSIDKVXSRWIPLINERXDKDSRLPLILVGNKSDLVEYSSMEXILPIMNQYXEIEXCVECSAKNLKNISELFYYAQKAVLHPXGPLYCPEEKEMKPACIKALXRIFKISDQDNDGXLNDAELNFFQRICFNXPLAPQALEDVKNVVRKHISDGVADSGLXLKGFLFLHXLFIQRGRHEXXWXVLRRFGYDDDLDLXPEYLFPLLKIPPDCXXELNHHAYLFLQSXFDKHDLDRDCALSPDELKDLFKVFPYIPWGPDVNNXVCXNERGWIXYQGFLSQWXLXXYLDVQRCLEYLGYLGYSILXEQESQASAVXVXRDKKIDLQKKQXQRNVFRCNVIGVKNCGKSGVLQALLGRNLMRQKKIREDHKSYYAINXVYVYGQEKYLLLHDISESEFLXEAEIICDVVCLVYDVSNPKSFEYCARIFKQHFMDSRIPCLIVAAKSDLHEVKQEYSISPXDFCRKHKMPPPQAFXCNXADAPSKDIFVKLXXMAMYPHVXQADLKSSXFWLRASFGAXVFAVLGFAMYKALLKQR

SEQ ID NO: 23597 - protein, 57 aa, Homo sapiens
  MOD_RES (12)..(12): Selenocysteine
  MOD_RES (17)..(17): Selenocysteine
  MOD_RES (39)..(39): Selenocysteine
MYPHARLRCMCXCNRCXFCICQNFLNSDLLQSVKNKIFXAVLNRHENSPGSLPWRLH

SEQ ID NO: 23598 - protein, 190 aa, Homo sapiens
  MOD_RES (1)..(1): Any amino acid
  MOD_RES (45)..(45): Selenocysteine
  MOD_RES (67)..(67): Selenocysteine
  MOD_RES (127)..(127): Selenocysteine
  MOD_RES (142)..(142): Selenocysteine
  MOD_RES (145)..(145): Selenocysteine
  MOD_RES (158)..(159): Selenocysteine
  MOD_RES (173)..(173): Selenocysteine
  MOD_RES (178)..(178): Selenocysteine
XRCNVIGVKNCGKSGVLQALLGRNLMVRRQKKIREDHKSYYAINXVYVYGQEKYLLLHDISESEFLXEAEIICDVVCLVYDVSNPKSFEYCARIFKQHFMDSRIPCLIVAAKSDLHEVKQEYSISPXDFCRKHKMPPPQAFXCNXADAPSKDIFVKLXXMAMYPHARLRCMCXCNRCXFCICQNFLNSDL

SEQ ID NO: 23599 - protein, 134 aa, Homo sapiens
  MOD_RES (1)..(1): Any amino acid
  MOD_RES (2)..(2): Selenocysteine
  MOD_RES (24)..(24): Selenocysteine
  MOD_RES (84)..(84): Selenocysteine
  MOD_RES (99)..(99): Selenocysteine
  MOD_RES (102)..(102): Selenocysteine
  MOD_RES (115)..(116): Selenocysteine
XXVYVYGQEKYLLLHDISESEFLXEAEIICDVVCLVYDVSNPKSFEYCARIFKQHFMDSRIPCLIVAAKSDLHEVKQEYSISPXDFCRKHKMPPPQAFXCNXADAPSKDIFVKLXXMAMYPHENSPGSLPWRLH

SEQ ID NO: 23600 - protein, 208 aa, Homo sapiens
  MOD_RES (15)..(15): Selenocysteine
  MOD_RES (38)..(38): Selenocysteine
  MOD_RES (44)..(44): Selenocysteine
  MOD_RES (50)..(50): Selenocysteine
  MOD_RES (61)..(61): Selenocysteine
  MOD_RES (74)..(74): Selenocysteine
  MOD_RES (84)..(85): Selenocysteine
  MOD_RES (122)..(122): Selenocysteine
  MOD_RES (149)..(149): Selenocysteine
  MOD_RES (169)..(169): Selenocysteine
DVRILLLGEAQVGKXSLILSLVGEEFPEEVPPRAEEIXIPADVXPEKVPXHIVDYSEAEQXDEELREEIHKIRXKWIPLVNGGXXQGPRVPIILVGNKSDLRSGSSMEAVLPIMSQFPEIEXCVECSAKNLRNISELFYYAQKAVLHPXAPLYDPEAKQLRPACAQALXRIFRLSDQDLDQALSDEELNAFQKSCFGHPLAPQALEDV

SEQ ID NO: 23601 - protein, 55 aa, Homo sapiens
  MOD_RES (18)..(18): Selenocysteine
  MOD_RES (38)..(38): Selenocysteine
  MOD_RES (46)..(46): Selenocysteine
MRRDVRILLLGEAQVGKXSLILSLVGEEFPEEKPSRRXRSCGRRSXRFELSGSHW

SEQ ID NO: 23602 - protein, 72 aa, Homo sapiens
  MOD_RES (18)..(18): Selenocysteine
  MOD_RES (37)..(37): Selenocysteine
  MOD_RES (45)..(45): Selenocysteine
  MOD_RES (48)..(48): Selenocysteine
  MOD_RES (55)..(55): Selenocysteine
MRRDVRILLLGEAQVGKXSLILSLVGEEFPEEPSRRXRSCGRRSXRQXWCVWCMXSLRRPPLRRFELSGSHW

SEQ ID NO: 23603 - protein, 214 aa, Homo sapiens
  MOD_RES (18)..(18): Selenocysteine
  MOD_RES (41)..(41): Selenocysteine
  MOD_RES (47)..(47): Selenocysteine
  MOD_RES (53)..(53): Selenocysteine
  MOD_RES (64)..(64): Selenocysteine
  MOD_RES (89)..(89): Selenocysteine
  MOD_RES (95)..(95): Selenocysteine
  MOD_RES (105)..(106): Selenocysteine
  MOD_RES (143)..(143): Selenocysteine
  MOD_RES (170)..(170): Selenocysteine
  MOD_RES (198)..(198): Selenocysteine
  MOD_RES (214)..(214): Selenocysteine
MRRDVRILLLGEAQVGKXSLILSLVGEEFPEEVPPRAEEIXIPADVXPEKVPXHIVDYSEAEQXDEELREEIHKANVVCVVYDVSEEAXIEKIRXKWIPLVNGGXXQGPRVPIILVGNKSDLRSGSSMEAVLPIMSQFPEIEXCVECSAKNLRNISELFYYAQKAVLHPXAPLYDPEAKQKSCFGHPLAPQALEDVKXVVCRNVAGGVREDRLX

SEQ ID NO: 23604 - protein, 618 aa, Homo sapiens
  MOD_RES (18)..(18): Selenocysteine
  MOD_RES (41)..(41): Selenocysteine
  MOD_RES (47)..(47): Selenocysteine
  MOD_RES (53)..(53): Selenocysteine
  MOD_RES (64)..(64): Selenocysteine
  MOD_RES (89)..(89): Selenocysteine
  MOD_RES (95)..(95): Selenocysteine
  MOD_RES (105)..(106): Selenocysteine
  MOD_RES (143)..(143): Selenocysteine
  MOD_RES (170)..(170): Selenocysteine
  MOD_RES (190)..(190): Selenocysteine
  MOD_RES (231)..(231): Selenocysteine
  MOD_RES (247)..(247): Selenocysteine
  MOD_RES (256)..(256): Selenocysteine
  MOD_RES (266)..(267): Selenocysteine
  MOD_RES (269)..(269): Selenocysteine
  MOD_RES (283)..(283): Selenocysteine
  MOD_RES (299)..(299): Selenocysteine
  MOD_RES (348)..(348): Selenocysteine
  MOD_RES (351)..(351): Selenocysteine
  MOD_RES (366)..(366): Selenocysteine
  MOD_RES (369)..(369): Selenocysteine
  MOD_RES (387)..(387): Selenocysteine
  MOD_RES (398)..(398): Selenocysteine
  MOD_RES (400)..(400): Selenocysteine
  MOD_RES (412)..(412): Selenocysteine
  MOD_RES (446)..(446): Selenocysteine
  MOD_RES (457)..(457): Selenocysteine
  MOD_RES (474)..(474): Selenocysteine
  MOD_RES (480)..(480): Selenocysteine
  MOD_RES (485)..(485): Selenocysteine
  MOD_RES (517)..(517): Selenocysteine
  MOD_RES (564)..(565): Selenocysteine
  MOD_RES (568)..(568): Selenocysteine
  MOD_RES (572)..(572): Selenocysteine
MRRDVRILLLGEAQVGKXSLILSLVGEEFPEEVPPRAEEIXIPADVXPEKVPXHIVDYSEAEQXDEELREEIHKANVVCVVYDVSEEAXIEKIRXKWIPLVNGGXXQGPRVPIILVGNKSDLRSGSSMEAVLPIMSQFPEIEXCVECSAKNLRNISELFYYAQKAVLHPXAPLYDPEAKQLRPACAQALXRIFRLSDQDLDQALSDEELNAFQKSCFGHPLAPQALEDVKXVVCRNVAGGVREDRLXLDGFLFLNXLFIQRGRHEXXWXILRRFGYSDALELXADYLSPLIHVPPGCSXELNHLGYQFVQRVFEKHDQDRDGALSPVELQSLFSVFPAAPWGPELPRXVRXEAGRLPLHGYLCQWXLVXYLDVRSCLGHLGYLGYPXLCEQDQAHAIXVXREKRLDQEKGQXQRSVLLCKVVGARGVGKSAFLQAFLGRGLGHQDXREQPPGYAIDXVQVNGQEKYLILCEVGXDGLLAXSLDAXCDVACLMFDGSDPKSFAHCASVYKHHYMDGQXPCLFVSSKADLPEGVAVSGPSPAEFCRKHRLPAPVPFSCAGPAEPSXXIFXQLAXMAAFPHLVHAELHPSSFWLRGLLGVVGAAVAAVLSFSLYRVLVKSQ

SEQ ID NO: 23605 - protein, 135 aa, Homo sapiens
  MOD_RES (18)..(18): Selenocysteine
  MOD_RES (41)..(41): Selenocysteine
  MOD_RES (47)..(47): Selenocysteine
  MOD_RES (53)..(53): Selenocysteine
  MOD_RES (64)..(64): Selenocysteine
  MOD_RES (89)..(89): Selenocysteine
  MOD_RES (95)..(95): Selenocysteine
  MOD_RES (105)..(106): Selenocysteine
MRRDVRILLLGEAQVGKXSLILSLVGEEFPEEVPPRAEEIXIPADVXPEKVPXHIVDYSEAEQXDEELREEIHKANVVCVVYDVSEEAXIEKIRXKWIPLVNGGXXQGPSGQQVRPAVGELHGGRAPHHEPVSRD

SEQ ID NO: 23606 - protein, 80 aa, Homo sapiens
MRRDVRILLLGEGGEDVADPVPGGRGVPRGGPSPRGGDHHPRGRHPGEGAHPHRGLLRSRADGRGAAGGDPQGKRGVCGV

SEQ ID NO: 23607 - protein, 155 aa, Homo sapiens
  MOD_RES (1)..(1): Any amino acid
  MOD_RES (2)..(2): Selenocysteine
  MOD_RES (34)..(34): Selenocysteine
  MOD_RES (81)..(82): Selenocysteine
  MOD_RES (85)..(85): Selenocysteine
  MOD_RES (89)..(89): Selenocysteine
XXCDVACLMFDGSDPKSFAHCASVYKHHYMDGQXPCLFVSSKADLPEGVAVSGPSPAEFCRKHRLPAPVPFSCAGPAEPSXXIFXQLAXMAAFPHLVHAEPRILRALPPFPGPRWPVGMRRAGRQSFGPKAGVGGSPLKFGAVSVVVAEDRRLGS

SEQ ID NO: 23608 - protein, 258 aa, Homo sapiens
  MOD_RES (63)..(63): Selenocysteine
  MOD_RES (70)..(71): Selenocysteine
  MOD_RES (76)..(76): Selenocysteine
  MOD_RES (81)..(81): Selenocysteine
  MOD_RES (104)..(104): Selenocysteine
  MOD_RES (119)..(119): Selenocysteine
  MOD_RES (121)..(121): Selenocysteine
  MOD_RES (161)..(161): Selenocysteine
  MOD_RES (207)..(207): Selenocysteine
  MOD_RES (228)..(228): Selenocysteine
  MOD_RES (239)..(239): Selenocysteine
MPPQQGDPAFPDRCEAPPVPPRRERGGRGGRGPGEPGGRGRAGGAEGRGVKCVLVGDGAVGKXSLVVSYXXNGYPXEYIPXAFDNFSAVVSVDGRPVRLQLCDXAGQDEFDKLRPLCYXNXDIFLLCFSVVSPSSFQNVSEKWVPEIRCHCPKAPIILVGXQSDLREDVKVLIELDKCKEKPVPEEAAKLCAEEIKAASYIECSALXQKNLKEVFDAAIVAGIQYSDXQQQPKKSKSRXPDKMKNLSKSWWKKYCCFV

SEQ ID NO: 23609 - protein, 236 aa, Homo sapiens
  MOD_RES (18)..(18): Selenocysteine
  MOD_RES (52)..(52): Selenocysteine
  MOD_RES (63)..(63): Selenocysteine
  MOD_RES (67)..(67): Selenocysteine
  MOD_RES (86)..(86): Selenocysteine
  MOD_RES (103)..(103): Selenocysteine
  MOD_RES (122)..(122): Selenocysteine
  MOD_RES (131)..(131): Selenocysteine
  MOD_RES (143)..(143): Selenocysteine
  MOD_RES (190)..(190): Selenocysteine
  MOD_RES (223)..(223): Selenocysteine
MPPRELSEAEPPPLRAPXPPPRRRSAPPELGIKCVLVGDGAVGKSSLIVSYXCNGYPARYRPXALDXFSVQVLVDGAPVRIELWDXAGQEDFDRLRSLCYPDXDVFLACFSVVQPSSFQNIXEKWLPEIRXHNPQAPVLLVGXQADLRDDVNVLIQLDQGGREGPVPQPQAQGLAEKIRACCYLECSALXQKNLKEVFDSAILSAIEHKARLEKKLNAKGVRXLSRCRWKKFFCFV

SEQ ID NO: 23610 - protein, 184 aa, Homo sapiens
  MOD_RES (9)..(9): Selenocysteine
  MOD_RES (24)..(24): Selenocysteine
  MOD_RES (105)..(105): Selenocysteine
  MOD_RES (108)..(108): Selenocysteine
  MOD_RES (111)..(111): Selenocysteine
  MOD_RES (125)..(125): Selenocysteine
  MOD_RES (132)..(132): Selenocysteine
  MOD_RES (143)..(143): Selenocysteine
MARSLVHDXVFYCLSVYQVKISPXPQLGAASSAEGHVGQGAPGLMGNMNPEGGVNHENGMNRDGGMIPEGGGGNQEPRQQPQPPPEEPAQAAMEGPQPENMQPRXRRXKFXLLQVEELESVFRHXQYPDVPXRRELAENLGVXEDKVRVWFKNKRARCRRHQRELMLANELRADPDDCVYIVVD

SEQ ID NO: 23611 - protein, 288 aa, Homo sapiens
  MOD_RES (12)..(12): Selenocysteine
  MOD_RES (36)..(36): Selenocysteine
  MOD_RES (54)..(54): Selenocysteine
  MOD_RES (97)..(97): Selenocysteine
  MOD_RES (142)..(142): Selenocysteine
  MOD_RES (174)..(174): Selenocysteine
  MOD_RES (214)..(214): Selenocysteine
  MOD_RES (220)..(220): Selenocysteine
  MOD_RES (284)..(284): Selenocysteine
MEPPDQCSQYMXSLLSPAVDDEKELQDMNAMVLSLXEEVKEEEEDAQPEPEQGXAAGEKLKSAGAQGGEEKDGGGEEKDGGGAGVPGHLWEGDLEGXSGSDGNVEDSDQSEKEPGQQYSRPQGAVGGLEPGNAQQPNVHAFXPLQLQELERIFQREQFPSEFLRRRLARSMNVXELAVQIWFENRRAKWRRHQRALMARNMLPFMAVGQPVMVXAAEAIXAPLFISGMRDDYFWDHSHSSSLCFPMPPFPPPSLPLPLMLLPPMPPAGQAEFGPFPFVIVPSFXFPNV

SEQ ID NO: 23612 - protein, 288 aa, Homo sapiens
  MOD_RES (12)..(12): Selenocysteine
  MOD_RES (36)..(36): Selenocysteine
  MOD_RES (54)..(54): Selenocysteine
  MOD_RES (97)..(97): Selenocysteine
  MOD_RES (142)..(142): Selenocysteine
  MOD_RES (174)..(174): Selenocysteine
  MOD_RES (214)..(214): Selenocysteine
  MOD_RES (220)..(220): Selenocysteine
  MOD_RES (284)..(284): Selenocysteine
MEPPDQCSQYMXSLLSPAVDDEKELQDMNAMVLSLXEEVKEEEEDAQPEPEQGXAAGEKLKSAGAQGGEEKDGGGEEKDGGGAGVPGHLWEGNLEGXSGSDGNVEDSDQSEKEPGQQYSRPQGAVGGLEPGNAQQPNVHAFXPLQLQELECIFQREQFPSEFLRRRLARSMNVXELAVQIWFENRRAKWRRHQRALMARNMLPFMAVGQPVMVXAAEAIXAPLFISGMRDDYFWDHSHSSSLCFPMPPFPPPSLPLPLMLLPPMPPAGQAEFGPFPFVIVPSFXFPNV

SEQ ID NO: 23613 - protein, 670 aa, Homo sapiens
  MOD_RES (26)..(26): Selenocysteine
  MOD_RES (52)..(52): Selenocysteine
  MOD_RES (61)..(61): Selenocysteine
  MOD_RES (69)..(69): Selenocysteine
  MOD_RES (106)..(106): Selenocysteine
  MOD_RES (117)..(117): Selenocysteine
  MOD_RES (124)..(124): Selenocysteine
  MOD_RES (157)..(157): Selenocysteine
  MOD_RES (169)..(169): Selenocysteine
  MOD_RES (184)..(184): Selenocysteine
  MOD_RES (200)..(200): Selenocysteine
  MOD_RES (225)..(225): Selenocysteine
  MOD_RES (236)..(236): Selenocysteine
  MOD_RES (326)..(326): Selenocysteine
  MOD_RES (341)..(341): Selenocysteine
  MOD_RES (370)..(370): Selenocysteine
  MOD_RES (376)..(376): Selenocysteine
  MOD_RES (386)..(386): Selenocysteine
  MOD_RES (443)..(443): Selenocysteine
  MOD_RES (473)..(473): Selenocysteine
  MOD_RES (517)..(517): Selenocysteine
  MOD_RES (526)..(526): Selenocysteine
  MOD_RES (573)..(573): Selenocysteine
  MOD_RES (623)..(623): Selenocysteine
  MOD_RES (627)..(627): Selenocysteine
  MOD_RES (646)..(646): Selenocysteine
MILEERPDGAGAGEESPRLQGCDSLXQIQCGQLQSRRAQIHQQIDKELQMRXGAENLYRAXSNNRVREXVALELSYVNSNLQLLKEELEELSGGVDPGRHGSEAVXVPMIPLGLKEXKELDWSXPLKELISVHFGEDGASYEAEIRELEALRQAMRXPSRNESGLELLXAYYNQLCFLDARFLXPARSLGLFFHWYDSLXGVPAQQRALAFEKGSVLFNIGALHXQIGARQDRSCXEGARRAMEAFQRAAGAFSLLRENFSHAPSPDMSAASLCALEQLMMAQAQECVFEGLSPPASMAPQDCLAQLRLAQEAAQVAAEYRLVHRXMAQPPVHDYVPVSWXALVHVKAEYFRSLAHYHVAMALCDGSPAXEGELPXHEQVFLQPPXSSKPRGPVLPQELEERRQLGKAHLKRAILGQEEALRLHALCRVLREVDLLRAVISQXLQRSLAKYAELDREDDFCEAAEAPDIQPKXHQKPEARMPRLSQGKGPDIFHRLGPLSVFSAKNRWRLVGPVHLXRGEGGFGLXLRGDSPVLIAAVIPGSQAAAAGLKEGDYIVSVNGQPCRWWRHAEVVXELKAAGEAGASLQVVSLLPSSRLPSLGDRRPVLLGPRGLLRSQREHGCKXPASXWASPRPLLNWSRKAQQGKXGGCPQPCAPVKPAPPSSLKHPGWP

SEQ ID NO: 23614 - protein, 686 aa, Homo sapiens
  MOD_RES (2)..(2): Selenocysteine
  MOD_RES (31)..(31): Selenocysteine
  MOD_RES (55)..(55): Selenocysteine
  MOD_RES (65)..(65): Selenocysteine
  MOD_RES (104)..(104): Selenocysteine
  MOD_RES (109)..(109): Selenocysteine
  MOD_RES (120)..(120): Selenocysteine
  MOD_RES (160)..(160): Selenocysteine
  MOD_RES (173)..(173): Selenocysteine
  MOD_RES (189)..(189): Selenocysteine
  MOD_RES (197)..(197): Selenocysteine
  MOD_RES (203)..(203): Selenocysteine
  MOD_RES (223)..(223): Selenocysteine
  MOD_RES (228)..(228): Selenocysteine
  MOD_RES (232)..(232): Selenocysteine
  MOD_RES (238)..(238): Selenocysteine
  MOD_RES (262)..(262): Selenocysteine
  MOD_RES (264)..(264): Selenocysteine
  MOD_RES (266)..(266): Selenocysteine
  MOD_RES (360)..(360): Selenocysteine
  MOD_RES (373)..(373): Selenocysteine
  MOD_RES (394)..(394): Selenocysteine
  MOD_RES (398)..(398): Selenocysteine
  MOD_RES (453)..(453): Selenocysteine
  MOD_RES (476)..(476): Selenocysteine
  MOD_RES (491)..(491): Selenocysteine
  MOD_RES (493)..(493): Selenocysteine
  MOD_RES (512)..(512): Selenocysteine
  MOD_RES (520)..(520): Selenocysteine
  MOD_RES (529)..(529): Selenocysteine
  MOD_RES (570)..(570): Selenocysteine
  MOD_RES (597)..(597): Selenocysteine
  MOD_RES (606)..(606): Selenocysteine
  MOD_RES (614)..(614): Selenocysteine
  MOD_RES (628)..(628): Selenocysteine
  MOD_RES (631)..(631): Selenocysteine
  MOD_RES (645)..(645): Selenocysteine
  MOD_RES (655)..(655): Selenocysteine
MXDALLPAAPQPLEKENDGYFRKGCNPLAQXGRSKLQNQRAALNQQILKAVRMRXGAENLLKVAXNSKVREQVRLELSFVNSDLQMLKEELEGLNISVGVYQNXEEAFXIPLIPLGLKEXKDVDFAVVLKDFILEHYSEDGYLYEDEIADLMDLRQACRXPSRDEAGVELLMXYFIQLGFVESRFFPPXRQMGLLFXWYDSLXGVPVSQQNLLLEKASVLFNXGALYXQIGXRCDRQXQAGLESAIDAFQRAAGVLNYLKDXFXHXPSYDMSPAMLSVLVKMMLAQAQESVFEKISLPGIRNEFFMLVKVAQEAAKVGEVYQQLHAAMSQAPVKENIPYSWASLACVKAHHYAALAHYFXAILLIDHQVKPGXDLDHQEKCLSQLYDHMPEGLXPLAXLKNDQQRRQLGKSHLRRAMAHHEESVREASLCKKLRSIEVLQKVLCAAQERSRLXYAQHQEEDDLLNLIDAPSVVAKXEQEVDIILPQFSKLXVXDFFQKLGPLSVFSANKRWXPPRSIRFXAEEGDLGFXLRGNAPVQVHFLDPYCSASVAGAREGDYIVSIQLVDCKWLXLSEVMKLLKSFGEDEIEMKVVSLLDSXSSMHNKSAXYSVGMQKXYSMICLAIDDDDKXDKXKKISKKLSFLSWGXNKNRQKSASXLCLPSVGAARPQVKKKLPSPFSLLNSDSSWY

SEQ ID NO: 23615 - protein, 128 aa, Homo sapiens
  MOD_RES (2)..(2): Selenocysteine
  MOD_RES (31)..(31): Selenocysteine
  MOD_RES (55)..(55): Selenocysteine
  MOD_RES (65)..(65): Selenocysteine
  MOD_RES (104)..(104): Selenocysteine
  MOD_RES (112)..(112): Selenocysteine
MXDALLPAAPQPLEKENDGYFRKGCNPLAQXGRSKLQNQRAALNQQILKAVRMRXGAENLLKVAXNSKVREQVRLELSFVNSDLQMLKEELEGLNISVGVYQNXEILSWNIXVKMAIYMKMKLQILWI

SEQ ID NO: 23616 - protein, 44 aa, Homo sapiens
  MOD_RES (35)..(35): Selenocysteine
MDVVLESLKCLCNLVLSSPVAQMLAAEARLVVKLXERVGLYRER

SEQ ID NO: 23617 - protein, 183 aa, Homo sapiens
  MOD_RES (12)..(12): Selenocysteine
  MOD_RES (38)..(38): Selenocysteine
  MOD_RES (88)..(88): Selenocysteine
  MOD_RES (149)..(149): Selenocysteine
  MOD_RES (176)..(176): Selenocysteine
  MOD_RES (180)..(180): Selenocysteine
MEPRAVAEAVEXGEEDVIMEALRSYNQEFSLQHSQSFXFDDAQQEDRKRLAELLVSVLEQGLPPSHRVIWLQSVRILSRDRNCLDPFXSRQSLQALACYADISVSEGSVPESADMDVVLESLKCLCNLVLSSPVAQMLAAEARLVVKLXERVGLYRERSFPHDVQFFDLRLLFLLXALRXDVR

SEQ ID NO: 23618 - protein, 531 aa, Homo sapiens
  MOD_RES (12)..(12): Selenocysteine
  MOD_RES (34)..(34): Selenocysteine
  MOD_RES (84)..(84): Selenocysteine
  MOD_RES (145)..(145): Selenocysteine
  MOD_RES (172)..(172): Selenocysteine
  MOD_RES (176)..(176): Selenocysteine
  MOD_RES (193)..(193): Selenocysteine
  MOD_RES (195)..(195): Selenocysteine
  MOD_RES (199)..(199): Selenocysteine
  MOD_RES (203)..(203): Selenocysteine
  MOD_RES (211)..(211): Selenocysteine
  MOD_RES (218)..(218): Selenocysteine
  MOD_RES (232)..(232): Selenocysteine
  MOD_RES (253)..(253): Selenocysteine
  MOD_RES (263)..(263): Selenocysteine
  MOD_RES (268)..(268): Selenocysteine
  MOD_RES (292)..(292): Selenocysteine
  MOD_RES (300)..(300): Selenocysteine
  MOD_RES (324)..(324): Selenocysteine
  MOD_RES (339)..(339): Selenocysteine
  MOD_RES (365)..(365): Selenocysteine
  MOD_RES (382)..(382): Selenocysteine
  MOD_RES (386)..(386): Selenocysteine
  MOD_RES (411)..(411): Selenocysteine
  MOD_RES (441)..(441): Selenocysteine
  MOD_RES (443)..(443): Selenocysteine
  MOD_RES (457)..(457): Selenocysteine
  MOD_RES (472)..(472): Selenocysteine
  MOD_RES (485)..(485): Selenocysteine
  MOD_RES (508)..(508): Selenocysteine
  MOD_RES (517)..(517): Selenocysteine
MEPRAVAEAVEXGEEDVIMEALRSYNQEHSQSFXFDDAQQEDRKRLAELLVSVLEQGLPPSHRVIWLQSVRILSRDRNCLDPFXSRQSLQALACYADISVSEGSVPESADMDVVLESLKCLCNLVLSSPVAQMLAAEARLVVKLXERVGLYRERSFPHDVQFFDLRLLFLLXALRXDVRQQLFQELKGVRLLXDXLELXLGVXPEGNPPPXLLPSQEXERAMEILKVLFNIXLDSIKGEVDEEDAALYRHLGXLLRHCVMIAXAGDRXEEFHGHAVNLLGNLPLKCLDVLLXLEPHGDSXEFMGVNMDVIRALLIFLEKRLHKXHRLKESVAPVLSVLXECARMHRPARKFLKAQVLPPLRDVRXRPEVGEMLRNKLVRLMXHLDXDVKRVAAEFLFVLCSESVPRFIKYXGYGNAAGLLAARGLMAGGRPEGQYSEDEDXDXDEYKEAKASINPVXGRVEEKPPNPMEGMXEEQKEHEAMKLVXMFDKLSRNRVIQPMGMSPRGHLXSLQDAMCEXMEQQLSSDPDSDPD

SEQ ID NO: 23619 - protein, 537 aa, Homo sapiens
  MOD_RES (12)..(12): Selenocysteine
  MOD_RES (34)..(34): Selenocysteine
  MOD_RES (84)..(84): Selenocysteine
  MOD_RES (145)..(145): Selenocysteine
  MOD_RES (172)..(172): Selenocysteine
  MOD_RES (176)..(176): Selenocysteine
  MOD_RES (193)..(193): Selenocysteine
  MOD_RES (195)..(195): Selenocysteine
  MOD_RES (199)..(199): Selenocysteine
  MOD_RES (203)..(203): Selenocysteine
  MOD_RES (211)..(211): Selenocysteine
  MOD_RES (218)..(218): Selenocysteine
  MOD_RES (232)..(232): Selenocysteine
  MOD_RES (253)..(253): Selenocysteine
  MOD_RES (263)..(263): Selenocysteine
  MOD_RES (268)..(268): Selenocysteine
  MOD_RES (292)..(292): Selenocysteine
  MOD_RES (300)..(300): Selenocysteine
  MOD_RES (324)..(324): Selenocysteine
  MOD_RES (339)..(339): Selenocysteine
  MOD_RES (371)..(371): Selenocysteine
  MOD_RES (388)..(388): Selenocysteine
  MOD_RES (392)..(392): Selenocysteine
  MOD_RES (417)..(417): Selenocysteine
  MOD_RES (447)..(447): Selenocysteine
  MOD_RES (449)..(449): Selenocysteine
  MOD_RES (463)..(463): Selenocysteine
  MOD_RES (478)..(478): Selenocysteine
  MOD_RES (491)..(491): Selenocysteine
  MOD_RES (514)..(514): Selenocysteine
  MOD_RES (523)..(523): Selenocysteine
MEPRAVAEAVEXGEEDVIMEALRSYNQEHSQSFXFDDAQQEDRKRLAELLVSVLEQGLPPSHRVIWLQSVRILSRDRNCLDPFXSRQSLQALACYADISVSEGSVPESADMDVVLESLKCLCNLVLSSPVAQMLAAEARLVVKLXERVGLYRERSFPHDVQFFDLRLLFLLXALRXDVRQQLFQELKGVRLLXDXLELXLGVXPEGNPPPXLLPSQEXERAMEILKVLFNIXLDSIKGEVDEEDAALYRHLGXLLRHCVMIAXAGDRXEEFHGHAVNLLGNLPLKCLDVLLXLEPHGDSXEFMGVNMDVIRALLIFLEKRLHKXHRLKESVAPVLSVLXECARMHRPARKFLKAQGWPPPQVLPPLRDVRXRPEVGEMLRNKLVRLMXHLDXDVKRVAAEFLFVLCSESVPRFIKYXGYGNAAGLLAARGLMAGGRPEGQYSEDEDXDXDEYKEAKASINPVXGRVEEKPPNPMEGMXEEQKEHEAMKLVXMFDKLSRNRVIQPMGMSPRGHLXSLQDAMCEXMEQQLSSDPDSDPD

SEQ ID NO: 23620 - protein, 148 aa, Homo sapiens
  MOD_RES (12)..(12): Selenocysteine
  MOD_RES (34)..(34): Selenocysteine
  MOD_RES (60)..(60): Selenocysteine
  MOD_RES (121)..(121): Selenocysteine
  MOD_RES (148)..(148): Selenocysteine
MEPRAVAEAVEXGEEDVIMEALRSYNQEHSQSFXFDDAQQEDRKSVRILSRDRNCLDPFXSRQSLQALACYADISVSEGSVPESADMDVVLESLKCLCNLVLSSPVAQMLAAEARLVVKLXERVGLYRERSFPHDVQFFDLRLLFLLX

SEQ ID NO: 23621 - protein, 52 aa, Homo sapiens
  MOD_RES (12)..(12): Selenocysteine
  MOD_RES (48)..(48): Selenocysteine
MEPRAVAEAVEXGEEDVIMEALRSYNQEWLLPELEANRPPASADADPXPLWI

SEQ ID NO: 23622 - protein, 525 aa, Homo sapiens
  MOD_RES (7)..(7): Selenocysteine
  MOD_RES (78)..(78): Selenocysteine
  MOD_RES (139)..(139): Selenocysteine
  MOD_RES (166)..(166): Selenocysteine
  MOD_RES (170)..(170): Selenocysteine
  MOD_RES (187)..(187): Selenocysteine
  MOD_RES (189)..(189): Selenocysteine
  MOD_RES (193)..(193): Selenocysteine
  MOD_RES (197)..(197): Selenocysteine
  MOD_RES (205)..(205): Selenocysteine
  MOD_RES (212)..(212): Selenocysteine
  MOD_RES (226)..(226): Selenocysteine
  MOD_RES (247)..(247): Selenocysteine
  MOD_RES (257)..(257): Selenocysteine
  MOD_RES (262)..(262): Selenocysteine
  MOD_RES (286)..(286): Selenocysteine
  MOD_RES (294)..(294): Selenocysteine
  MOD_RES (318)..(318): Selenocysteine
  MOD_RES (333)..(333): Selenocysteine
  MOD_RES (359)..(359): Selenocysteine
  MOD_RES (376)..(376): Selenocysteine
  MOD_RES (380)..(380): Selenocysteine
  MOD_RES (405)..(405): Selenocysteine
  MOD_RES (435)..(435): Selenocysteine
  MOD_RES (437)..(437): Selenocysteine
  MOD_RES (451)..(451): Selenocysteine
  MOD_RES (466)..(466): Selenocysteine
  MOD_RES (479)..(479): Selenocysteine
  MOD_RES (502)..(502): Selenocysteine
  MOD_RES (511)..(511): Selenocysteine
MMPNRRXGRWVLAQGVKGQGRVAPGRRAWWSRSSPCPQRLAELLVSVLEQGLPPSHRVIWLQSVRILSRDRNCLDPFXSRQSLQALACYADISVSEGSVPESADMDVVLESLKCLCNLVLSSPVAQMLAAEARLVVKLXERVGLYRERSFPHDVQFFDLRLLFLLXALRXDVRQQLFQELKGVRLLXDXLELXLGVXPEGNPPPXLLPSQEXERAMEILKVLFNIXLDSIKGEVDEEDAALYRHLGXLLRHCVMIAXAGDRXEEFHGHAVNLLGNLPLKCLDVLLXLEPHGDSXEFMGVNMDVIRALLIFLEKRLHKXHRLKESVAPVLSVLXECARMHRPARKFLKAQVLPPLRDVRXRPEVGEMLRNKLVRLMXHLDXDVKRVAAEFLFVLCSESVPRFIKYXGYGNAAGLLAARGLMAGGRPEGQYSEDEDXDXDEYKEAKASINPVXGRVEEKPPNPMEGMXEEQKEHEAMKLVXMFDKLSRNRVIQPMGMSPRGHLXSLQDAMCEXMEQQLSSDPDSDPD

SEQ ID NO: 23623 - protein, 147 aa, Homo sapiens
  MOD_RES (1)..(1): Any amino acid
  MOD_RES (27)..(27): Selenocysteine
  MOD_RES (29)..(29): Selenocysteine
  MOD_RES (43)..(43): Selenocysteine
  MOD_RES (58)..(58): Selenocysteine
  MOD_RES (71)..(71): Selenocysteine
  MOD_RES (92)..(92): Selenocysteine
  MOD_RES (94)..(94): Selenocysteine
  MOD_RES (96)..(96): Selenocysteine
  MOD_RES (98)..(98): Selenocysteine
  MOD_RES (116)..(116): Selenocysteine
  MOD_RES (126)..(126): Selenocysteine
  MOD_RES (132)..(132): Selenocysteine
  MOD_RES (141)..(141): Selenocysteine
XAAGLLAARGLMAGGRPEGQYSEDEDXDXDEYKEAKASINPVXGRVEEKPPNPMEGMXEEQKEHEAMKLVXMFDKLSRMPCARLWSSSSPRXLXRXLXEDGSSSAPPSGLVLLPEXSLGLQPGEAXSHWIHXRPHFSILEXPSLDSR

SEQ ID NO: 23624 - protein, 287 aa, Homo sapiens
  MOD_RES (1)..(1): Any amino acid
  MOD_RES (27)..(27): Selenocysteine
  MOD_RES (54)..(54): Selenocysteine
  MOD_RES (58)..(58): Selenocysteine
  MOD_RES (75)..(75): Selenocysteine
  MOD_RES (77)..(77): Selenocysteine
  MOD_RES (81)..(81): Selenocysteine
  MOD_RES (85)..(85): Selenocysteine
  MOD_RES (93)..(93): Selenocysteine
  MOD_RES (100)..(100): Selenocysteine
  MOD_RES (114)..(114): Selenocysteine
  MOD_RES (133)..(133): Selenocysteine
  MOD_RES (148)..(148): Selenocysteine
  MOD_RES (158)..(158): Selenocysteine
  MOD_RES (163)..(163): Selenocysteine
  MOD_RES (187)..(187): Selenocysteine
  MOD_RES (195)..(195): Selenocysteine
  MOD_RES (219)..(219): Selenocysteine
  MOD_RES (234)..(234): Selenocysteine
  MOD_RES (260)..(260): Selenocysteine
  MOD_RES (277)..(277): Selenocysteine
  MOD_RES (281)..(281): Selenocysteine
XCLCNLVLSSPVAQMLAAEARLVVKLXERVGLYRERSFPHDVQFFDLRLLFLLXALRXDVRQQLFQELKGVRLLXDXLELXLGVXPEGNPPPXLLPSQEXERAMEILKVLFNIXLDSIKGEVDEHYPESPRKXPGDQEDAALYRHLGXLLRHCVMIAXAGDRXEEFHGHAVNLLGNLPLKCLDVLLXLEPHGDSXEFMGVNMDVIRALLIFLEKRLHKXHRLKESVAPVLSVLXECARMHRPARKFLKAQVLPPLRDVRXRPEVGEMLRNKLVRLMXHLDXDVKRVA

SEQ ID NO: 23625 - protein, 147 aa, Homo sapiens
  MOD_RES (1)..(1): Any amino acid
  MOD_RES (19)..(19): Selenocysteine
  MOD_RES (49)..(49): Selenocysteine
  MOD_RES (51)..(51): Selenocysteine
  MOD_RES (65)..(65): Selenocysteine
  MOD_RES (80)..(80): Selenocysteine
  MOD_RES (93)..(93): Selenocysteine
  MOD_RES (102)..(102): Selenocysteine
  MOD_RES (124)..(124): Selenocysteine
  MOD_RES (133)..(133): Selenocysteine
XEFLFVLCSESVPRFIKYXGYGNAAGLLAARGLMAGGRPEGQYSEDEDXDXDEYKEAKASINPVXGRVEEKPPNPMEGMXEEQKEHEAMKLVXMFDKLSSPXAPFPNRNRVIQPMGMSPRGHLXSLQDAMCEXMEQQLSSDPDSDPD

SEQ ID NO: 23626 - protein, 520 aa, Homo sapiens
  MOD_RES (32)..(32): Selenocysteine
  MOD_RES (38)..(38): Selenocysteine
  MOD_RES (60)..(61): Selenocysteine
  MOD_RES (84)..(85): Selenocysteine
  MOD_RES (176)..(176): Selenocysteine
  MOD_RES (193)..(193): Selenocysteine
  MOD_RES (205)..(205): Selenocysteine
  MOD_RES (224)..(224): Selenocysteine
  MOD_RES (238)..(238): Selenocysteine
  MOD_RES (270)..(270): Selenocysteine
  MOD_RES (274)..(274): Selenocysteine
  MOD_RES (301)..(301): Selenocysteine
  MOD_RES (305)..(305): Selenocysteine
  MOD_RES (310)..(311): Selenocysteine
  MOD_RES (320)..(320): Selenocysteine
  MOD_RES (325)..(325): Selenocysteine
  MOD_RES (331)..(331): Selenocysteine
  MOD_RES (364)..(364): Selenocysteine
  MOD_RES (371)..(371): Selenocysteine
  MOD_RES (396)..(396): Selenocysteine
  MOD_RES (404)..(404): Selenocysteine
  MOD_RES (414)..(414): Selenocysteine
  MOD_RES (443)..(443): Selenocysteine
  MOD_RES (473)..(473): Selenocysteine
  MOD_RES (475)..(475): Selenocysteine
  MOD_RES (498)..(498): Selenocysteine
  MOD_RES (500)..(500): Selenocysteine
  MOD_RES (515)..(515): Selenocysteine
  MOD_RES (519)..(519): Selenocysteine
MDEERALYIVRAGEAGAIERVLRDYSDKHRAXFKFESXDEDKRKKLCEGIFKVLIKDIPXXCQVSCLEVLRILSRDKKVLVPVXXKENMQILLRLAKLNELDDSLEKVSEFPVIVESLKCLCNIVFNSQMAQQLSLELNLAAKLCNLLRKCKDRKFINDIKCFDLRLLFLLSLLHXDIRSQLRYELQGLPLLXQILESAFSIKWXDEYESAIDHNGPPLSPQEXDCAIEALKALFNVXVDSWKVHKESDSHQFRVMAAVLRHCLLIVGPXEDKXEELHSNAVNLLSNVPVSCLDVLICPLXHEEXAQEAXXLDELPSNKXAEKEXVLKNNXMVYNGMNMEAIHVLLNFMEKRIDKGSSYREGLXPVLSLLXECSRAHRNIRKFLKDQVLPPLRDVXNRPEVGSXVRNKLVRLMXHVDLGVKQIAAEFLFVLCKERVDSLLKYXGYGNAAGLLAARGLLAGGRGDNWYSEDEDXDXEEYKNAKPKEELLKPMGLKPDGXIXPLEEALNQYSVIEEXSSDXD

SEQ ID NO: 23627 - protein, 536 aa, Homo sapiens
  MOD_RES (32)..(32): Selenocysteine
  MOD_RES (38)..(38): Selenocysteine
  MOD_RES (60)..(61): Selenocysteine
  MOD_RES (84)..(85): Selenocysteine
  MOD_RES (176)..(176): Selenocysteine
  MOD_RES (193)..(193): Selenocysteine
  MOD_RES (205)..(205): Selenocysteine
  MOD_RES (224)..(224): Selenocysteine
  MOD_RES (238)..(238): Selenocysteine
  MOD_RES (270)..(270): Selenocysteine
  MOD_RES (274)..(274): Selenocysteine
  MOD_RES (301)..(301): Selenocysteine
  MOD_RES (305)..(305): Selenocysteine
  MOD_RES (310)..(311): Selenocysteine
  MOD_RES (320)..(320): Selenocysteine
  MOD_RES (325)..(325): Selenocysteine
  MOD_RES (331)..(331): Selenocysteine
  MOD_RES (364)..(364): Selenocysteine
  MOD_RES (371)..(371): Selenocysteine
  MOD_RES (396)..(396): Selenocysteine
  MOD_RES (404)..(404): Selenocysteine
  MOD_RES (414)..(414): Selenocysteine
  MOD_RES (443)..(443): Selenocysteine
  MOD_RES (473)..(473): Selenocysteine
  MOD_RES (475)..(475): Selenocysteine
  MOD_RES (489)..(489): Selenocysteine
  MOD_RES (504)..(504): Selenocysteine
MDEERALYIVRAGEAGAIERVLRDYSDKHRAXFKFESXDEDKRKKLCEGIFKVLIKDIPXXCQVSCLEVLRILSRDKKVLVPVXXKENMQILLRLAKLNELDDSLEKVSEFPVIVESLKCLCNIVFNSQMAQQLSLELNLAAKLCNLLRKCKDRKFINDIKCFDLRLLFLLSLLHXDIRSQLRYELQGLPLLXQILESAFSIKWXDEYESAIDHNGPPLSPQEXDCAIEALKALFNVXVDSWKVHKESDSHQFRVMAAVLRHCLLIVGPXEDKXEELHSNAVNLLSNVPVSCLDVLICPLXHEEXAQEAXXLDELPSNKXAEKEXVLKNNXMVYNGMNMEAIHVLLNFMEKRIDKGSSYREGLXPVLSLLXECSRAHRNIRKFLKDQVLPPLRDVXNRPEVGSXVRNKLVRLMXHVDLGVKQIAAEFLFVLCKERVDSLLKYXGYGNAAGLLAARGLLAGGRGDNWYSEDEDXDXEEYKNAKPNINLIXGHLEEPMPNPIDEMXEEQKEYEAMKLVNMLDKLSRRADVKDLHQDGG

SEQ ID NO: 23628 - protein, 560 aa, Homo sapiens
  MOD_RES (32)..(32): Selenocysteine
  MOD_RES (38)..(38): Selenocysteine
  MOD_RES (60)..(61): Selenocysteine
  MOD_RES (84)..(85): Selenocysteine
  MOD_RES (176)..(176): Selenocysteine
  MOD_RES (193)..(193): Selenocysteine
  MOD_RES (205)..(205): Selenocysteine
  MOD_RES (224)..(224): Selenocysteine
  MOD_RES (238)..(238): Selenocysteine
  MOD_RES (270)..(270): Selenocysteine
  MOD_RES (274)..(274): Selenocysteine
  MOD_RES (301)..(301): Selenocysteine
  MOD_RES (305)..(305): Selenocysteine
  MOD_RES (310)..(311): Selenocysteine
  MOD_RES (320)..(320): Selenocysteine
  MOD_RES (325)..(325): Selenocysteine
  MOD_RES (331)..(331): Selenocysteine
  MOD_RES (364)..(364): Selenocysteine
  MOD_RES (371)..(371): Selenocysteine
  MOD_RES (396)..(396): Selenocysteine
  MOD_RES (404)..(404): Selenocysteine
  MOD_RES (414)..(414): Selenocysteine
  MOD_RES (443)..(443): Selenocysteine
  MOD_RES (473)..(473): Selenocysteine
  MOD_RES (475)..(475): Selenocysteine
  MOD_RES (489)..(489): Selenocysteine
  MOD_RES (504)..(504): Selenocysteine
  MOD_RES (538)..(538): Selenocysteine
  MOD_RES (540)..(540): Selenocysteine
  MOD_RES (555)..(555): Selenocysteine
  MOD_RES (559)..(559): Selenocysteine
MDEERALYIVRAGEAGAIERVLRDYSDKHRAXFKFESXDEDKRKKLCEGIFKVLIKDIPXXCQVSCLEVLRILSRDKKVLVPVXXKENMQILLRLAKLNELDDSLEKVSEFPVIVESLKCLCNIVFNSQMAQQLSLELNLAAKLCNLLRKCKDRKFINDIKCFDLRLLFLLSLLHXDIRSQLRYELQGLPLLXQILESAFSIKWXDEYESAIDHNGPPLSPQEXDCAIEALKALFNVXVDSWKVHKESDSHQFRVMAAVLRHCLLIVGPXEDKXEELHSNAVNLLSNVPVSCLDVLICPLXHEEXAQEAXXLDELPSNKXAEKEXVLKNNXMVYNGMNMEAIHVLLNFMEKRIDKGSSYREGLXPVLSLLXECSRAHRNIRKFLKDQVLPPLRDVXNRPEVGSXVRNKLVRLMXHVDLGVKQIAAEFLFVLCKERVDSLLKYXGYGNAAGLLAARGLLAGGRGDNWYSEDEDXDXEEYKNAKPNINLIXGHLEEPMPNPIDEMXEEQKEYEAMKLVNMLDKLSREELLKPMGLKPDGXIXPLEEALNQYSVIEEXSSDXD

SEQ ID NO: 23629 - protein, 118 aa, Homo sapiens
  MOD_RES (44)..(45): Selenocysteine
  MOD_RES (68)..(69): Selenocysteine
MDEERALYIVRAGEAGAIERVLRDYSDKKLCEGIFKVLIKDIPXXCQVSCLEVLRILSRDKKVLVPVXXKENMQILLRLAKLNELDDSLEKVSEFPVIVESLKCLCNIVFNSQMAQQL

SEQ ID NO: 23630 - protein, 41 aa, Homo sapiens
MDEERALYIVRAGEAGAIERVLRDYSDKSVYRVDGIILPIL

SEQ ID NO: 23631 - protein, 30 aa, Homo sapiens
  MOD_RES (8)..(8): Selenocysteine
  MOD_RES (10)..(10): Selenocysteine
  MOD_RES (25)..(25): Selenocysteine
  MOD_RES (29)..(29): Selenocysteine
MGLKPDGXIXPLEEALNQYSVIEEXSSDXD

SEQ ID NO: 23632 - protein, 496 aa, Homo sapiens
  MOD_RES (20)..(21): Selenocysteine
  MOD_RES (44)..(45): Selenocysteine
  MOD_RES (136)..(136): Selenocysteine
  MOD_RES (153)..(153): Selenocysteine
  MOD_RES (165)..(165): Selenocysteine
  MOD_RES (184)..(184): Selenocysteine
  MOD_RES (198)..(198): Selenocysteine
  MOD_RES (230)..(230): Selenocysteine
  MOD_RES (234)..(234): Selenocysteine
  MOD_RES (261)..(261): Selenocysteine
  MOD_RES (265)..(265): Selenocysteine
  MOD_RES (270)..(271): Selenocysteine
  MOD_RES (280)..(280): Selenocysteine
  MOD_RES (285)..(285): Selenocysteine
  MOD_RES (291)..(291): Selenocysteine
  MOD_RES (324)..(324): Selenocysteine
  MOD_RES (331)..(331): Selenocysteine
  MOD_RES (356)..(356): Selenocysteine
  MOD_RES (364)..(364): Selenocysteine
  MOD_RES (374)..(374): Selenocysteine
  MOD_RES (403)..(403): Selenocysteine
  MOD_RES (433)..(433): Selenocysteine
  MOD_RES (435)..(435): Selenocysteine
  MOD_RES (449)..(449): Selenocysteine
  MOD_RES (464)..(464): Selenocysteine
MLASKLCEGIFKVLIKDIPXXCQVSCLEVLRILSRDKKVLVPVXXKENMQILLRLAKLNELDDSLEKVSEFPVIVESLKCLCNIVFNSQMAQQLSLELNLAAKLCNLLRKCKDRKFINDIKCFDLRLLFLLSLLHXDIRSQLRYELQGLPLLXQILESAFSIKWXDEYESAIDHNGPPLSPQEXDCAIEALKALFNVXVDSWKVHKESDSHQFRVMAAVLRHCLLIVGPXEDKXEELHSNAVNLLSNVPVSCLDVLICPLXHEEXAQEAXXLDELPSNKXAEKEXVLKNNXMVYNGMNMEAIHVLLNFMEKRIDKGSSYREGLXPVLSLLXECSRAHRNIRKFLKDQVLPPLRDVXNRPEVGSXVRNKLVRLMXHVDLGVKQIAAEFLFVLCKERVDSLLKYXGYGNAAGLLAARGLLAGGRGDNWYSEDEDXDXEEYKNAKPNINLIXGHLEEPMPNPIDEMXEEQKEYEAMKLVNMLDKLSRRADVKDLHQDGG

SEQ ID NO: 23633 - protein, 258 aa, Homo sapiens
  MOD_RES (30)..(30): Selenocysteine
  MOD_RES (34)..(34): Selenocysteine
  MOD_RES (61)..(61): Selenocysteine
  MOD_RES (65)..(65): Selenocysteine
  MOD_RES (70)..(71): Selenocysteine
  MOD_RES (80)..(80): Selenocysteine
  MOD_RES (85)..(85): Selenocysteine
  MOD_RES (91)..(91): Selenocysteine
  MOD_RES (124)..(124): Selenocysteine
  MOD_RES (131)..(131): Selenocysteine
  MOD_RES (156)..(156): Selenocysteine
  MOD_RES (164)..(164): Selenocysteine
  MOD_RES (174)..(174): Selenocysteine
  MOD_RES (203)..(203): Selenocysteine
  MOD_RES (233)..(233): Selenocysteine
  MOD_RES (235)..(235): Selenocysteine
MLSKLEKSDSHQFRVMAAVLRHCLLIVGPXEDKXEELHSNAVNLLSNVPVSCLDVLICPLXHEEXAQEAXXLDELPSNKXAEKEXVLKNNXMVYNGMNMEAIHVLLNFMEKRIDKGSSYREGLXPVLSLLXECSRAHRNIRKFLKDQVLPPLRDVXNRPEVGSXVRNKLVRLMXHVDLGVKQIAAEFLFVLCKERVDSLLKYXGYGNAAGLLAARGLLAGGRGDNWYSEDEDXDXEEYKNAKPNSIEFEERSHLSRGK

SEQ ID NO: 23634 - protein, 276 aa, Homo sapiens
  MOD_RES (1)..(1): Any amino acid
  MOD_RES (60)..(60): Selenocysteine
  MOD_RES (66)..(66): Selenocysteine
  MOD_RES (95)..(95): Selenocysteine
  MOD_RES (99)..(99): Selenocysteine
  MOD_RES (126)..(126): Selenocysteine
  MOD_RES (130)..(130): Selenocysteine
  MOD_RES (135)..(136): Selenocysteine
  MOD_RES (145)..(145): Selenocysteine
  MOD_RES (150)..(150): Selenocysteine
  MOD_RES (156)..(156): Selenocysteine
  MOD_RES (189)..(189): Selenocysteine
  MOD_RES (196)..(196): Selenocysteine
  MOD_RES (221)..(221): Selenocysteine
  MOD_RES (229)..(229): Selenocysteine
  MOD_RES (239)..(239): Selenocysteine
  MOD_RES (268)..(268): Selenocysteine
XASGGARRLPGGSGLGAQSGRGSPAPAAMDEERALYIVRAGEAGAIERVLRDYSDKHRAXFKFESXDEDKRKSDSHQFRVMAAVLRHCLLIVGPXEDKXEELHSNAVNLLSNVPVSCLDVLICPLXHEEXAQEAXXLDELPSNKXAEKEXVLKNNXMVYNGMNMEAIHVLLNFMEKRIDKGSSYREGLXPVLSLLXECSRAHRNIRKFLKDQVLPPLRDVXNRPEVGSXVRNKLVRLMXHVDLGVKQIAAEFLFVLCKERVDSLLKYXGYGNAAGL

SEQ ID NO: 23635 - protein, 46 aa, Homo sapiens
  MOD_RES (1)..(1): Any amino acid
  MOD_RES (6)..(6): Selenocysteine
  MOD_RES (21)..(21): Selenocysteine
XINLIXGHLEEPMPNPIDEMXEEQKEYEAMKLVNMLDKLSRGIHIF

SEQ ID NO: 23636 - protein, 225 aa, Homo sapiens
  MOD_RES (48)..(48): Selenocysteine
  MOD_RES (128)..(128): Selenocysteine
  MOD_RES (139)..(139): Selenocysteine
  MOD_RES (150)..(150): Selenocysteine
  MOD_RES (194)..(194): Selenocysteine
  MOD_RES (213)..(214): Selenocysteine
  MOD_RES (224)..(224): Selenocysteine
MAAIGRGRSLKNLRVREPSDNLREILQNVARLQGVSNMRKLGHLNNFXKLLCDIGHSEEKLGFHYEDIIICLRLALLNEAKEVRAAGLRALRYLIQDSSILQKVLKLKVDYLIARCIDIQQSNEVERXQALRLVRKMIXVNASLFPSSVXNSLIAVGNDGLQERDRMVRACIAIICELALQNPEVVALRGGLNXILKNVIDCQLSRINEALIXXILHLLNHPKXR

SEQ ID NO: 23637 - protein, 257 aa, Homo sapiens
  MOD_RES (31)..(31): Selenocysteine
  MOD_RES (64)..(64): Selenocysteine
  MOD_RES (144)..(144): Selenocysteine
  MOD_RES (155)..(155): Selenocysteine
  MOD_RES (166)..(166): Selenocysteine
  MOD_RES (210)..(210): Selenocysteine
  MOD_RES (229)..(230): Selenocysteine
  MOD_RES (240)..(240): Selenocysteine
  MOD_RES (255)..(255): Selenocysteine
MAAIGRGRSLKNLRVRGRNDSGEENVPLDLXREPSDNLREILQNVARLQGVSNMRKLGHLNNFXKLLCDIGHSEEKLGFHYEDIIICLRLALLNEAKEVRAAGLRALRYLIQDSSILQKVLKLKVDYLIARCIDIQQSNEVERXQALRLVRKMIXVNASLFPSSVXNSLIAVGNDGLQERDRMVRACIAIICELALQNPEVVALRGGLNXILKNVIDCQLSRINEALIXXILHLLNHPKXRQYVRADVELENFSXLY

SEQ ID NO: 23638 - protein, 1708 aa, Homo sapiens
  MOD_RES (31)..(31): Selenocysteine
  MOD_RES (64)..(64): Selenocysteine
  MOD_RES (144)..(144): Selenocysteine
  MOD_RES (155)..(155): Selenocysteine
  MOD_RES (166)..(166): Selenocysteine
  MOD_RES (210)..(210): Selenocysteine
  MOD_RES (229)..(230): Selenocysteine
  MOD_RES (240)..(240): Selenocysteine
  MOD_RES (258)..(258): Selenocysteine
  MOD_RES (268)..(268): Selenocysteine
  MOD_RES (291)..(291): Selenocysteine
  MOD_RES (343)..(343): Selenocysteine
  MOD_RES (375)..(375): Selenocysteine
  MOD_RES (413)..(413): Selenocysteine
  MOD_RES (424)..(424): Selenocysteine
  MOD_RES (436)..(436): Selenocysteine
  MOD_RES (451)..(451): Selenocysteine
  MOD_RES (504)..(504): Selenocysteine
  MOD_RES (524)..(524): Selenocysteine
  MOD_RES (553)..(553): Selenocysteine
  MOD_RES (602)..(602): Selenocysteine
  MOD_RES (609)..(609): Selenocysteine
  MOD_RES (653)..(654): Selenocysteine
  MOD_RES (665)..(665): Selenocysteine
  MOD_RES (701)..(701): Selenocysteine
  MOD_RES (722)..(722): Selenocysteine
  MOD_RES (725)..(725): Selenocysteine
  MOD_RES (733)..(733): Selenocysteine
  MOD_RES (757)..(757): Selenocysteine
  MOD_RES (765)..(765): Selenocysteine
  MOD_RES (852)..(853): Selenocysteine
  MOD_RES (891)..(891): Selenocysteine
  MOD_RES (903)..(903): Selenocysteine
  MOD_RES (911)..(911): Selenocysteine
  MOD_RES (967)..(967): Selenocysteine
  MOD_RES (978)..(978): Selenocysteine
  MOD_RES (1021)..(1021): Selenocysteine
  MOD_RES (1029)..(1029): Selenocysteine
  MOD_RES (1057)..(1057): Selenocysteine
  MOD_RES (1059)..(1059): Selenocysteine
  MOD_RES (1068)..(1068): Selenocysteine
  MOD_RES (1071)..(1071): Selenocysteine
  MOD_RES (1103)..(1103): Selenocysteine
  MOD_RES (1126)..(1126): Selenocysteine
  MOD_RES (1133)..(1133): Selenocysteine
  MOD_RES (1135)..(1135): Selenocysteine
  MOD_RES (1148)..(1148): Selenocysteine
  MOD_RES (1152)..(1152): Selenocysteine
  MOD_RES (1156)..(1156): Selenocysteine
  MOD_RES (1161)..(1161): Selenocysteine
  MOD_RES (1172)..(1172): Selenocysteine
  MOD_RES (1175)..(1175): Selenocysteine
  MOD_RES (1186)..(1186): Selenocysteine
  MOD_RES (1191)..(1191): Selenocysteine
  MOD_RES (1198)..(1198): Selenocysteine
  MOD_RES (1209)..(1209): Selenocysteine
  MOD_RES (1222)..(1222): Selenocysteine
  MOD_RES (1224)..(1226): Selenocysteine
  MOD_RES (1240)..(1240): Selenocysteine
  MOD_RES (1246)..(1247): Selenocysteine
  MOD_RES (1250)..(1250): Selenocysteine
  MOD_RES (1257)..(1257): Selenocysteine
  MOD_RES (1261)..(1261): Selenocysteine
  MOD_RES (1263)..(1263): Selenocysteine
  MOD_RES (1266)..(1266): Selenocysteine
  MOD_RES (1271)..(1271): Selenocysteine
  MOD_RES (1295)..(1295): Selenocysteine
  MOD_RES (1310)..(1310): Selenocysteine
  MOD_RES (1322)..(1322): Selenocysteine
  MOD_RES (1332)..(1332): Selenocysteine
  MOD_RES (1361)..(1361): Selenocysteine
  MOD_RES (1363)..(1363): Selenocysteine
  MOD_RES (1365)..(1365): Selenocysteine
  MOD_RES (1376)..(1376): Selenocysteine
  MOD_RES (1402)..(1402): Selenocysteine
  MOD_RES (1417)..(1417): Selenocysteine
  MOD_RES (1447)..(1447): Selenocysteine
  MOD_RES (1472)..(1472): Selenocysteine
  MOD_RES (1490)..(1490): Selenocysteine
  MOD_RES (1507)..(1507): Selenocysteine
  MOD_RES (1510)..(1510): Selenocysteine
  MOD_RES (1516)..(1516): Selenocysteine
  MOD_RES (1558)..(1558): Selenocysteine
  MOD_RES (1589)..(1589): Selenocysteine
  MOD_RES (1592)..(1592): Selenocysteine
  MOD_RES (1600)..(1600): Selenocysteine
  MOD_RES (1605)..(1605): Selenocysteine
  MOD_RES (1629)..(1629): Selenocysteine
  MOD_RES (1634)..(1634): Selenocysteine
  MOD_RES (1638)..(1638): Selenocysteine
  MOD_RES (1646)..(1646): Selenocysteine
  MOD_RES (1664)..(1664): Selenocysteine
  MOD_RES (1695)..(1695): Selenocysteine
  MOD_RES (1704)..(1704): Selenocysteine
MAAIGRGRSLKNLRVRGRNDSGEENVPLDLXREPSDNLREILQNVARLQGVSNMRKLGHLNNFXKLLCDIGHSEEKLGFHYEDIIICLRLALLNEAKEVRAAGLRALRYLIQDSSILQKVLKLKVDYLIARCIDIQQSNEVERXQALRLVRKMIXVNASLFPSSVXNSLIAVGNDGLQERDRMVRACIAIICELALQNPEVVALRGGLNXILKNVIDCQLSRINEALIXXILHLLNHPKXRQYVRADVELERILAPYXDFHYRHSPDXAEGQLKEDREARFLASKMGIIAXFRSWAGIINLCKPGNSGIQSLIGVLCIPNMEIRRGLLEVLYDIFRLPLPVVXEEFIEALLSVDPGRFQDSWRLSDGFVAAEAKXILPHRARSRPDLMDNYLALILSAFIRNGLLEGLVEVIXNSDDHISVRAXILLGELLHMANXILPHSHSHHLHCLPXLMNMAASFDIPKEKRLRASAALNCLKRFHEMKKRGPKPYSLHLDHIIQKAIAXHQKRDQYLRVQKDIFILKDXEEALLINLRDSQVLQHKENLEWNWNLIGXILKWPNVNLRNYKDEQLHRFVRRLLYFYKPSSKLYANLDLDFAKAKQLXVVGCQFXEFLLESEEDGQGYLEDLVKDIVQWLNASSGMKPERSLQNNGLLXXLSQHYFLFIGXLSCHPHGVKMLEKCSVFQCLLNLCSLKNQDHLLKLXVSSLDYSRDGLARVILSKILXAAXDACRLYAXKHLRVLLRANVEFFNNWGIELLVXQLHDKNKXISSEALDILDEACEDKANLHALIQMKPALSHLGDKGLLLLLRFLSIPKGFSYLNERGYVAKQLEKWHREYNSKYVDLIEEQLNEALXXYRKPVDGDNYVRRSNQRLQRPHVYLPIHLYGQLVHHKXGCHLLEVQNIIXELCRNVRXPDLDKWEEIKKLKASLWALGNIGSSNWGLNLLQEENVIPDILKLAKQCEVLSIRGXCVYVLGLIAKXKQGCDILKCHNWDAVRHSRKHLWPVVPDDVEQLCNELSSIPSXLSLNSESXSSRHNSESESVPSSMFILEDDRFGSSSXSXFFLDINEDXEPXFYDRSGPIKDKNSFPFFASSKLVKNRILNSLXLPNKKHRSSSDPKGGKLSSESKXSNRRIRXLXEPSVDFNHSDDFXPISXVQKXLQLEXSFMGNKHIEDXGSXPSIGENDLKFXKNFGXENHRENXSRERLVVESSXSSHMKIRSQSFNXDXXXSGISSMSSSPSREXVGVDAXXMDXDCGSMSXVVSXKXIKXSHYLXPQSNHLSLSKSNSVSLVPPGSSHXLPRRAQSLKAPSIAXIKSLADCNFSYXSSRDAFGYAXLKRLQQQRMHPSLSHSEALASPAKDVLFXDXIXMKANSFESRLXPSRFMKALSYASLDKEDLLSPINQNXLQRSSSVRSMVSSAXYGGSDDYIGLALPVDINDIFQVKDIPYFQXKNIPPHDDRGARAFAHDAGGLPSGXGGLVKNSFHLLRQQMSLXEIMNSIHSDASLFLESXEDXGLQEHXDDNCLYCVCIEILGFQPSNQLSAICSHSDFQDIPYSDWCEQXIHNPLEVVPSKFSGISGCSDGVSQEGSASSXKSXELLLGVKXIPDDXPMCRILLRKEVLRLVINLSSSVSXKCHEXGLLXIKEKYPQXFDDICLYSEVSHLLSHCXFRLPCRRFIQELFQDVQFLQMHEEAEAVLAXPPKQPIVDXSAES

SEQ ID NO: 23639 - protein, 1732 aa, Homo sapiens
  MOD_RES (31)..(31): Selenocysteine
  MOD_RES (64)..(64): Selenocysteine
  MOD_RES (144)..(144): Selenocysteine
  MOD_RES (155)..(155): Selenocysteine
  MOD_RES (166)..(166): Selenocysteine
  MOD_RES (210)..(210): Selenocysteine
  MOD_RES (229)..(230): Selenocysteine
  MOD_RES (240)..(240): Selenocysteine
  MOD_RES (258)..(258): Selenocysteine
  MOD_RES (268)..(268): Selenocysteine
  MOD_RES (291)..(291): Selenocysteine
  MOD_RES (343)..(343): Selenocysteine
  MOD_RES (375)..(375): Selenocysteine
  MOD_RES (413)..(413): Selenocysteine
  MOD_RES (424)..(424): Selenocysteine
  MOD_RES (436)..(436): Selenocysteine
  MOD_RES (451)..(451): Selenocysteine
  MOD_RES (504)..(504): Selenocysteine
  MOD_RES (524)..(524): Selenocysteine
  MOD_RES (553)..(553): Selenocysteine
  MOD_RES (602)..(602): Selenocysteine
  MOD_RES (609)..(609): Selenocysteine
  MOD_RES (653)..(654): Selenocysteine
  MOD_RES (665)..(665): Selenocysteine
  MOD_RES (701)..(701): Selenocysteine
  MOD_RES (722)..(722): Selenocysteine
  MOD_RES (725)..(725): Selenocysteine
  MOD_RES (733)..(733): Selenocysteine
  MOD_RES (757)..(757): Selenocysteine
  MOD_RES (765)..(765): Selenocysteine
  MOD_RES (852)..(853): Selenocysteine
  MOD_RES (891)..(891): Selenocysteine
  MOD_RES (903)..(903): Selenocysteine
  MOD_RES (911)..(911): Selenocysteine
  MOD_RES (967)..(967): Selenocysteine
  MOD_RES (978)..(978): Selenocysteine
  MOD_RES (1021)..(1021): Selenocysteine
  MOD_RES (1029)..(1029): Selenocysteine
  MOD_RES (1057)..(1057): Selenocysteine
  MOD_RES (1059)..(1059): Selenocysteine
  MOD_RES (1068)..(1068): Selenocysteine
  MOD_RES (1071)..(1071): Selenocysteine
  MOD_RES (1103)..(1103): Selenocysteine
  MOD_RES (1126)..(1126): Selenocysteine
  MOD_RES (1133)..(1133): Selenocysteine
  MOD_RES (1135)..(1135): Selenocysteine
  MOD_RES (1148)..(1148): Selenocysteine
  MOD_RES (1152)..(1152): Selenocysteine
  MOD_RES (1156)..(1156): Selenocysteine
  MOD_RES (1161)..(1161): Selenocysteine
  MOD_RES (1172)..(1172): Selenocysteine
  MOD_RES (1175)..(1175): Selenocysteine
  MOD_RES (1186)..(1186): Selenocysteine
  MOD_RES (1191)..(1191): Selenocysteine
  MOD_RES (1198)..(1198): Selenocysteine
  MOD_RES (1209)..(1209): Selenocysteine
  MOD_RES (1222)..(1222): Selenocysteine
  MOD_RES (1224)..(1226): Selenocysteine
  MOD_RES (1240)..(1240): Selenocysteine
  MOD_RES (1246)..(1247): Selenocysteine
  MOD_RES (1250)..(1250): Selenocysteine
  MOD_RES (1257)..(1257): Selenocysteine
  MOD_RES (1261)..(1261): Selenocysteine
  MOD_RES (1263)..(1263): Selenocysteine
  MOD_RES (1266)..(1266): Selenocysteine
  MOD_RES (1271)..(1271): Selenocysteine
  MOD_RES (1295)..(1295): Selenocysteine
  MOD_RES (1310)..(1310): Selenocysteine
  MOD_RES (1322)..(1322): Selenocysteine
  MOD_RES (1332)..(1332): Selenocysteine
  MOD_RES (1361)..(1361): Selenocysteine
  MOD_RES (1363)..(1363): Selenocysteine
  MOD_RES (1365)..(1365): Selenocysteine
  MOD_RES (1376)..(1376): Selenocysteine
  MOD_RES (1396)..(1396): Selenocysteine
  MOD_RES (1398)..(1398): Selenocysteine
  MOD_RES (1426)..(1426): Selenocysteine
  MOD_RES (1441)..(1441): Selenocysteine
  MOD_RES (1471)..(1471): Selenocysteine
  MOD_RES (1496)..(1496): Selenocysteine
  MOD_RES (1514)..(1514): Selenocysteine
  MOD_RES (1531)..(1531): Selenocysteine
  MOD_RES (1534)..(1534): Selenocysteine
  MOD_RES (1540)..(1540): Selenocysteine
  MOD_RES (1582)..(1582): Selenocysteine
  MOD_RES (1613)..(1613): Selenocysteine
  MOD_RES (1616)..(1616): Selenocysteine
  MOD_RES (1624)..(1624): Selenocysteine
  MOD_RES (1629)..(1629): Selenocysteine
  MOD_RES (1653)..(1653): Selenocysteine
  MOD_RES (1658)..(1658): Selenocysteine
  MOD_RES (1662)..(1662): Selenocysteine
  MOD_RES (1670)..(1670): Selenocysteine
  MOD_RES (1688)..(1688): Selenocysteine
  MOD_RES (1719)..(1719): Selenocysteine
  MOD_RES (1728)..(1728): Selenocysteine
MAAIGRGRSLKNLRVRGRNDSGEENVPLDLXREPSDNLREILQNVARLQGVSNMRKLGHLNNFXKLLCDIGHSEEKLGFHYEDIIICLRLALLNEAKEVRAAGLRALRYLIQDSSILQKVLKLKVDYLIARCIDIQQSNEVERXQALRLVRKMIXVNASLFPSSVXNSLIAVGNDGLQERDRMVRACIAIICELALQNPEVVALRGGLNXILKNVIDCQLSRINEALIXXILHLLNHPKXRQYVRADVELERILAPYXDFHYRHSPDXAEGQLKEDREARFLASKMGIIAXFRSWAGIINLCKPGNSGIQSLIGVLCIPNMEIRRGLLEVLYDIFRLPLPVVXEEFIEALLSVDPGRFQDSWRLSDGFVAAEAKXILPHRARSRPDLMDNYLALILSAFIRNGLLEGLVEVIXNSDDHISVRAXILLGELLHMANXILPHSHSHHLHCLPXLMNMAASFDIPKEKRLRASAALNCLKRFHEMKKRGPKPYSLHLDHIIQKAIAXHQKRDQYLRVQKDIFILKDXEEALLINLRDSQVLQHKENLEWNWNLIGXILKWPNVNLRNYKDEQLHRFVRRLLYFYKPSSKLYANLDLDFAKAKQLXVVGCQFXEFLLESEEDGQGYLEDLVKDIVQWLNASSGMKPERSLQNNGLLXXLSQHYFLFIGXLSCHPHGVKMLEKCSVFQCLLNLCSLKNQDHLLKLXVSSLDYSRDGLARVILSKILXAAXDACRLYAXKHLRVLLRANVEFFNNWGIELLVXQLHDKNKXISSEALDILDEACEDKANLHALIQMKPALSHLGDKGLLLLLRFLSIPKGFSYLNERGYVAKQLEKWHREYNSKYVDLIEEQLNEALXXYRKPVDGDNYVRRSNQRLQRPHVYLPIHLYGQLVHHKXGCHLLEVQNIIXELCRNVRXPDLDKWEEIKKLKASLWALGNIGSSNWGLNLLQEENVIPDILKLAKQCEVLSIRGXCVYVLGLIAKXKQGCDILKCHNWDAVRHSRKHLWPVVPDDVEQLCNELSSIPSXLSLNSESXSSRHNSESESVPSSMFILEDDRFGSSSXSXFFLDINEDXEPXFYDRSGPIKDKNSFPFFASSKLVKNRILNSLXLPNKKHRSSSDPKGGKLSSESKXSNRRIRXLXEPSVDFNHSDDFXPISXVQKXLQLEXSFMGNKHIEDXGSXPSIGENDLKFXKNFGXENHRENXSRERLVVESSXSSHMKIRSQSFNXDXXXSGISSMSSSPSREXVGVDAXXMDXDCGSMSXVVSXKXIKXSHYLXPQSNHLSLSKSNSVSLVPPGSSHXLPRRAQSLKAPSIAXIKSLADCNFSYXSSRDAFGYAXLKRLQQQRMHPSLSHSEALASPAKDVLFXDXIXMKANSFESRLXPSRIDFKKKHVGGIRSLRPXIXNNLFRFMKALSYASLDKEDLLSPINQNXLQRSSSVRSMVSSAXYGGSDDYIGLALPVDINDIFQVKDIPYFQXKNIPPHDDRGARAFAHDAGGLPSGXGGLVKNSFHLLRQQMSLXEIMNSIHSDASLFLESXEDXGLQEHXDDNCLYCVCIEILGFQPSNQLSAICSHSDFQDIPYSDWCEQXIHNPLEVVPSKFSGISGCSDGVSQEGSASSXKSXELLLGVKXIPDDXPMCRILLRKEVLRLVINLSSSVSXKCHEXGLLXIKEKYPQXFDDICLYSEVSHLLSHCXFRLPCRRFIQELFQDVQFLQMHEEAEAVLAXPPKQPIVDXSAES

SEQ ID NO: 23640 - protein, 258 aa, Homo sapiens
  MOD_RES (57)..(57): Selenocysteine
  MOD_RES (62)..(62): Selenocysteine
  MOD_RES (64)..(64): Selenocysteine
  MOD_RES (75)..(75): Selenocysteine
  MOD_RES (83)..(83): Selenocysteine
  MOD_RES (126)..(126): Selenocysteine
  MOD_RES (129)..(129): Selenocysteine
  MOD_RES (164)..(164): Selenocysteine
  MOD_RES (186)..(186): Selenocysteine
  MOD_RES (192)..(192): Selenocysteine
MGRQGLGGASAAGRSMQRSQSRSSLSASFEALAGYFPCMNSLEEEEGEAGGKKLRSXVQRSXEXGLAVEMRNWMXRQASRESXDGSMNSYSSEGNLIFPGVRLASDSQFSDFLDGLGPAQLVGRQXLAXPAMGDIQVGMMDKKGQLEVEIIRARGLVVKPGSKXLPAPYVKVYLLDNGVCIAKKKXKVARKXLEPLYQQLLSFEESPQGKVLQIIVWGDYGRMDHKSFMGVAQILLDELELSNMVIGWFKLFPPSSLV

SEQ ID NO: 23641 - protein, 285 aa, Homo sapiens
  MOD_RES (57)..(57): Selenocysteine
  MOD_RES (62)..(62): Selenocysteine
  MOD_RES (64)..(64): Selenocysteine
  MOD_RES (75)..(75): Selenocysteine
  MOD_RES (83)..(83): Selenocysteine
  MOD_RES (126)..(126): Selenocysteine
  MOD_RES (129)..(129): Selenocysteine
  MOD_RES (164)..(164): Selenocysteine
  MOD_RES (186)..(186): Selenocysteine
  MOD_RES (192)..(192): Selenocysteine
  MOD_RES (261)..(261): Selenocysteine
  MOD_RES (266)..(266): Selenocysteine
  MOD_RES (278)..(278): Selenocysteine
MGRQGLGGASAAGRSMQRSQSRSSLSASFEALAGYFPCMNSLEEEEGEAGGKKLRSXVQRSXEXGLAVEMRNWMXRQASRESXDGSMNSYSSEGNLIFPGVRLASDSQFSDFLDGLGPAQLVGRQXLAXPAMGDIQVGMMDKKGQLEVEIIRARGLVVKPGSKXLPAPYVKVYLLDNGVCIAKKKXKVARKXLEPLYQQLLSFEESPQGKVLQIIVWGDYGRMDHKSFMGVAQILLDELELSNMVIGWFKLFPPSSLVDPXLAPLXRRASQSSLESSXGPSYSRS

SEQ ID NO: 23642 - protein, 1367 aa, Homo sapiens
  MOD_RES (39)..(39): Selenocysteine
  MOD_RES (42)..(42): Selenocysteine
  MOD_RES (193)..(193): Selenocysteine
  MOD_RES (206)..(207): Selenocysteine
  MOD_RES (213)..(213): Selenocysteine
  MOD_RES (229)..(229): Selenocysteine
  MOD_RES (247)..(247): Selenocysteine
  MOD_RES (254)..(254): Selenocysteine
  MOD_RES (300)..(300): Selenocysteine
  MOD_RES (304)..(304): Selenocysteine
  MOD_RES (330)..(330): Selenocysteine
  MOD_RES (346)..(346): Selenocysteine
  MOD_RES (389)..(389): Selenocysteine
  MOD_RES (399)..(399): Selenocysteine
  MOD_RES (409)..(409): Selenocysteine
  MOD_RES (431)..(431): Selenocysteine
  MOD_RES (466)..(466): Selenocysteine
  MOD_RES (490)..(490): Selenocysteine
  MOD_RES (518)..(519): Selenocysteine
  MOD_RES (541)..(541): Selenocysteine
  MOD_RES (577)..(577): Selenocysteine
  MOD_RES (579)..(579): Selenocysteine
  MOD_RES (583)..(583): Selenocysteine
  MOD_RES (591)..(591): Selenocysteine
  MOD_RES (610)..(610): Selenocysteine
  MOD_RES (634)..(634): Selenocysteine
  MOD_RES (648)..(648): Selenocysteine
  MOD_RES (674)..(674): Selenocysteine
  MOD_RES (714)..(714): Selenocysteine
  MOD_RES (742)..(742): Selenocysteine
  MOD_RES (764)..(764): Selenocysteine
  MOD_RES (766)..(766): Selenocysteine
  MOD_RES (768)..(768): Selenocysteine
  MOD_RES (773)..(773): Selenocysteine
  MOD_RES (797)..(797): Selenocysteine
  MOD_RES (806)..(806): Selenocysteine
  MOD_RES (820)..(820): Selenocysteine
  MOD_RES (825)..(825): Selenocysteine
  MOD_RES (830)..(830): Selenocysteine
  MOD_RES (848)..(848): Selenocysteine
  MOD_RES (868)..(868): Selenocysteine
  MOD_RES (875)..(875): Selenocysteine
  MOD_RES (923)..(923): Selenocysteine
  MOD_RES (939)..(939): Selenocysteine
  MOD_RES (948)..(948): Selenocysteine
  MOD_RES (1006)..(1006): Selenocysteine
  MOD_RES (1021)..(1021): Selenocysteine
  MOD_RES (1048)..(1048): Selenocysteine
  MOD_RES (1052)..(1052): Selenocysteine
  MOD_RES (1068)..(1068): Selenocysteine
  MOD_RES (1071)..(1071): Selenocysteine
  MOD_RES (1090)..(1090): Selenocysteine
  MOD_RES (1094)..(1094): Selenocysteine
  MOD_RES (1097)..(1097): Selenocysteine
  MOD_RES (1129)..(1129): Selenocysteine
  MOD_RES (1139)..(1139): Selenocysteine
  MOD_RES (1144)..(1144): Selenocysteine
  MOD_RES (1146)..(1146): Selenocysteine
  MOD_RES (1157)..(1157): Selenocysteine
  MOD_RES (1165)..(1165): Selenocysteine
  MOD_RES (1208)..(1208): Selenocysteine
  MOD_RES (1211)..(1211): Selenocysteine
  MOD_RES (1246)..(1246): Selenocysteine
  MOD_RES (1268)..(1268): Selenocysteine
  MOD_RES (1274)..(1274): Selenocysteine
  MOD_RES (1343)..(1343): Selenocysteine
  MOD_RES (1348)..(1348): Selenocysteine
  MOD_RES (1360)..(1360): Selenocysteine
MLDRCALVEQRKRSPSVSRDQNRRYDQREEREEYSQYAXSDXAMPRSPSDYADRRSQHEPQFYEDSDHLSYRDSNRRSHRHSKEYIVDDEDVESRDEYERQRREEEYQSRYRSDPNLARYPVKPQPYEEQMRIHAEVSRARHERRHSDVSLANADLEDSRISMLRMDRPSRQRSISERRAAMENQRSYSMERXREAQGPSSYAQRXXNHSPPXPRRSPLPIDRPDLRRXDSLRKQHHLDPSSAVRKXKREKMEXMLRNDSLSSDQSESVRPPPPKPHKSKKGGKMRQISLSSSEEELASXPEYXSCDDVEIESESVSEKGDMDYNWLDHXSWHSSEASPMSLHPVXWQPSKDGDRLIGRILLNKRLKDGSVPRDSGAMLGLKVVGGKMXESGRLCAFIXKVKKGSLADXVGHLRPGDEVLEWNGRLLQGAXFEEVYNIILESKPEPQVELVVSRPIGDIPRIPDSXHAQLESSSSSFESQKMDRPSISVXSPMSPGMLRDVPQFLSGQLSSQSLSRRXXPFVPRVQIKLWFDKVGHQLIVXILGAKDLPSREDGRPRNPYVKIYFLPDRSDKNKRRXKXVKKXLEPKWNQXFIYSPVHRREFRERMLEIXLWDQARVREEESEFLGEILIELEXALLDDEPHWYKLQXHDVSSLPLPHPSPYMPRRQLHGESPXRRLQRSKRISDSEVSDYDCDDGIGVVSDYRHDGRDLQSSXLSVPEQVMSSNHCSPSGSPHRVDVIGRXRSWSPSVPPPQSRNVEQGLRGXRXMXGHYNXISRMDRHRVMDDHYSPDRDSHFLXLPRSRYSQXIDHHHRDGRSHPRXGSVQXSPSSXPVAGRRGRQLPQLPPKGXLDRNNGVKEIEPYEEELDSXRRRYAGXMDIEERNRQMKINKYKQVAGSDPRLEQDYHSKYRSGWDPHRGADNVSXKSSDSDVSDISAVSRXSSASRFSSXSYMSVQSERPGGNKKIRPKGIEEGGKEGDKHEEIVHEKEEVKEERINENEKGKEIAKXCNKEKNRESGDEEKXQDIHEQGKEKEQWNKEDLQRRFSQDDXSVFXSKMQSRQMGISGKNMXKSXSISGDMCSLEKNDGSQSDXAVGXLGXSGKKRRSSLGAKMVAIVGLSRKSRSASQLSQXEAGGKKLRSXVQRSXEXGLAVEMRNWMXRQASRESXDGSMNSYSSEGNLIFPGVRLASDSQFSDFLDGLGPAQLVGRQXLAXPAMGDIQVGMMDKKGQLEVEIIRARGLVVKPGSKXLPAPYVKVYLLDNGVCIAKKKXKVARKXLEPLYQQLLSFEESPQGKVLQIIVWGDYGRMDHKSFMGVAQILLDELELSNMVIGWFKLFPPSSLVDPXLAPLXRRASQSSLESSXGPSYSRS

SEQ ID NO: 23643 - protein, 666 aa, Homo sapiens
  MOD_RES (5)..(5): Selenocysteine
  MOD_RES (36)..(36): Selenocysteine
  MOD_RES (69)..(69): Selenocysteine
  MOD_RES (72)..(72): Selenocysteine
  MOD_RES (223)..(223): Selenocysteine
  MOD_RES (236)..(237): Selenocysteine
  MOD_RES (243)..(243): Selenocysteine
  MOD_RES (259)..(259): Selenocysteine
  MOD_RES (277)..(277): Selenocysteine
  MOD_RES (284)..(284): Selenocysteine
  MOD_RES (330)..(330): Selenocysteine
  MOD_RES (334)..(334): Selenocysteine
  MOD_RES (360)..(360): Selenocysteine
  MOD_RES (376)..(376): Selenocysteine
  MOD_RES (419)..(419): Selenocysteine
  MOD_RES (429)..(429): Selenocysteine
  MOD_RES (439)..(439): Selenocysteine
  MOD_RES (461)..(461): Selenocysteine
  MOD_RES (496)..(496): Selenocysteine
  MOD_RES (520)..(520): Selenocysteine
  MOD_RES (555)..(555): Selenocysteine
  MOD_RES (591)..(591): Selenocysteine
  MOD_RES (593)..(593): Selenocysteine
  MOD_RES (597)..(597): Selenocysteine
  MOD_RES (605)..(605): Selenocysteine
  MOD_RES (624)..(624): Selenocysteine
  MOD_RES (648)..(648): Selenocysteine
  MOD_RES (662)..(662): Selenocysteine
MQFEXLRQVCNSVLSHFHGVFSSPPNILQNELFGQXLNNARKRSPSVSRDQNRRYDQREEREEYSQYAXSDXAMPRSPSDYADRRSQHEPQFYEDSDHLSYRDSNRRSHRHSKEYIVDDEDVESRDEYERQRREEEYQSRYRSDPNLARYPVKPQPYEEQMRIHAEVSRARHERRHSDVSLANADLEDSRISMLRMDRPSRQRSISERRAAMENQRSYSMERXREAQGPSSYAQRXXNHSPPXPRRSPLPIDRPDLRRXDSLRKQHHLDPSSAVRKXKREKMEXMLRNDSLSSDQSESVRPPPPKPHKSKKGGKMRQISLSSSEEELASXPEYXSCDDVEIESESVSEKGDMDYNWLDHXSWHSSEASPMSLHPVXWQPSKDGDRLIGRILLNKRLKDGSVPRDSGAMLGLKVVGGKMXESGRLCAFIXKVKKGSLADXVGHLRPGDEVLEWNGRLLQGAXFEEVYNIILESKPEPQVELVVSRPIGDIPRIPDSXHAQLESSSSSFESQKMDRPSISVXSPMSPGMLRDVPQFLSGQLSIKLWFDKVGHQLIVXILGAKDLPSREDGRPRNPYVKIYFLPDRSDKNKRRXKXVKKXLEPKWNQXFIYSPVHRREFRERMLEIXLWDQARVREEESEFLGEILIELEXALLDDEPHWYKLQXHDVS

SEQ ID NO: 23644 - protein, 1163 aa, Homo sapiens
  MOD_RES (5)..(5): Selenocysteine
  MOD_RES (36)..(36): Selenocysteine
  MOD_RES (69)..(69): Selenocysteine
  MOD_RES (72)..(72): Selenocysteine
  MOD_RES (223)..(223): Selenocysteine
  MOD_RES (236)..(237): Selenocysteine
  MOD_RES (243)..(243): Selenocysteine
  MOD_RES (259)..(259): Selenocysteine
  MOD_RES (277)..(277): Selenocysteine
  MOD_RES (284)..(284): Selenocysteine
  MOD_RES (330)..(330): Selenocysteine
  MOD_RES (334)..(334): Selenocysteine
  MOD_RES (360)..(360): Selenocysteine
  MOD_RES (376)..(376): Selenocysteine
  MOD_RES (419)..(419): Selenocysteine
  MOD_RES (429)..(429): Selenocysteine
  MOD_RES (439)..(439): Selenocysteine
  MOD_RES (461)..(461): Selenocysteine
  MOD_RES (496)..(496): Selenocysteine
  MOD_RES (520)..(520): Selenocysteine
  MOD_RES (555)..(555): Selenocysteine
  MOD_RES (591)..(591): Selenocysteine
  MOD_RES (593)..(593): Selenocysteine
  MOD_RES (597)..(597): Selenocysteine
  MOD_RES (605)..(605): Selenocysteine
  MOD_RES (624)..(624): Selenocysteine
  MOD_RES (648)..(648): Selenocysteine
  MOD_RES (662)..(662): Selenocysteine
  MOD_RES (688)..(688): Selenocysteine
  MOD_RES (728)..(728): Selenocysteine
  MOD_RES (756)..(756): Selenocysteine
  MOD_RES (778)..(778): Selenocysteine
  MOD_RES (780)..(780): Selenocysteine
  MOD_RES (782)..(782): Selenocysteine
  MOD_RES (787)..(787): Selenocysteine
  MOD_RES (811)..(811): Selenocysteine
  MOD_RES (820)..(820): Selenocysteine
  MOD_RES (845)..(845): Selenocysteine
  MOD_RES (854)..(856): Selenocysteine
  MOD_RES (861)..(861): Selenocysteine
  MOD_RES (866)..(866): Selenocysteine
  MOD_RES (877)..(877): Selenocysteine
  MOD_RES (894)..(894): Selenocysteine
  MOD_RES (899)..(899): Selenocysteine
  MOD_RES (904)..(904): Selenocysteine
  MOD_RES (922)..(922): Selenocysteine
  MOD_RES (935)..(935): Selenocysteine
  MOD_RES (940)..(940): Selenocysteine
  MOD_RES (942)..(942): Selenocysteine
  MOD_RES (953)..(953): Selenocysteine
  MOD_RES (961)..(961): Selenocysteine
  MOD_RES (1004)..(1004): Selenocysteine
  MOD_RES (1007)..(1007): Selenocysteine
  MOD_RES (1042)..(1042): Selenocysteine
  MOD_RES (1064)..(1064): Selenocysteine
  MOD_RES (1070)..(1070): Selenocysteine
  MOD_RES (1139)..(1139): Selenocysteine
  MOD_RES (1144)..(1144): Selenocysteine
  MOD_RES (1156)..(1156): Selenocysteine
MQFEXLRQVCNSVLSHFHGVFSSPPNILQNELFGQXLNNARKRSPSVSRDQNRRYDQREEREEYSQYAXSDXAMPRSPSDYADRRSQHEPQFYEDSDHLSYRDSNRRSHRHSKEYIVDDEDVESRDEYERQRREEEYQSRYRSDPNLARYPVKPQPYEEQMRIHAEVSRARHERRHSDVSLANADLEDSRISMLRMDRPSRQRSISERRAAMENQRSYSMERXREAQGPSSYAQRXXNHSPPXPRRSPLPIDRPDLRRXDSLRKQHHLDPSSAVRKXKREKMEXMLRNDSLSSDQSESVRPPPPKPHKSKKGGKMRQISLSSSEEELASXPEYXSCDDVEIESESVSEKGDMDYNWLDHXSWHSSEASPMSLHPVXWQPSKDGDRLIGRILLNKRLKDGSVPRDSGAMLGLKVVGGKMXESGRLCAFIXKVKKGSLADXVGHLRPGDEVLEWNGRLLQGAXFEEVYNIILESKPEPQVELVVSRPIGDIPRIPDSXHAQLESSSSSFESQKMDRPSISVXSPMSPGMLRDVPQFLSGQLSIKLWFDKVGHQLIVXILGAKDLPSREDGRPRNPYVKIYFLPDRSDKNKRRXKXVKKXLEPKWNQXFIYSPVHRREFRERMLEIXLWDQARVREEESEFLGEILIELEXALLDDEPHWYKLQXHDVSSLPLPHPSPYMPRRQLHGESPXRRLQRSKRISDSEVSDYDCDDGIGVVSDYRHDGRDLQSSXLSVPEQVMSSNHCSPSGSPHRVDVIGRXRSWSPSVPPPQSRNVEQGLRGXRXMXGHYNXISRMDRHRVMDDHYSPDRDSHFLXLPRSRYSQXIDHHHRDGRDCEAADRQPYHRSRSXEQRPLLERXXXRSRSXERPDXNLMRSMPSLMXGRSAPPSPALSRSHPRXGSVQXSPSSXPVAGRRGRQLPQLPPKGXLDRKAGGKKLRSXVQRSXEXGLAVEMRNWMXRQASRESXDGSMNSYSSEGNLIFPGVRLASDSQFSDFLDGLGPAQLVGRQXLAXPAMGDIQVGMMDKKGQLEVEIIRARGLVVKPGSKXLPAPYVKVYLLDNGVCIAKKKXKVARKXLEPLYQQLLSFEESPQGKVLQIIVWGDYGRMDHKSFMGVAQILLDELELSNMVIGWFKLFPPSSLVDPXLAPLXRRASQSSLESSXGPSYSRS

SEQ ID NO: 23645 - protein, 1188 aa, Homo sapiens
  MOD_RES (5)..(5): Selenocysteine
  MOD_RES (36)..(36): Selenocysteine
  MOD_RES (69)..(69): Selenocysteine
  MOD_RES (72)..(72): Selenocysteine
  MOD_RES (223)..(223): Selenocysteine
  MOD_RES (236)..(237): Selenocysteine
  MOD_RES (243)..(243): Selenocysteine
  MOD_RES (259)..(259): Selenocysteine
  MOD_RES (277)..(277): Selenocysteine
  MOD_RES (284)..(284): Selenocysteine
  MOD_RES (330)..(330): Selenocysteine
  MOD_RES (334)..(334): Selenocysteine
  MOD_RES (359)..(359): Selenocysteine
  MOD_RES (370)..(370): Selenocysteine
  MOD_RES (404)..(404): Selenocysteine
  MOD_RES (408)..(409): Selenocysteine
  MOD_RES (423)..(423): Selenocysteine
  MOD_RES (466)..(466): Selenocysteine
  MOD_RES (476)..(476): Selenocysteine
  MOD_RES (486)..(486): Selenocysteine
  MOD_RES (508)..(508): Selenocysteine
  MOD_RES (543)..(543): Selenocysteine
  MOD_RES (567)..(567): Selenocysteine
  MOD_RES (602)..(602): Selenocysteine
  MOD_RES (638)..(638): Selenocysteine
  MOD_RES (640)..(640): Selenocysteine
  MOD_RES (644)..(644): Selenocysteine
  MOD_RES (652)..(652): Selenocysteine
  MOD_RES (671)..(671): Selenocysteine
  MOD_RES (695)..(695): Selenocysteine
  MOD_RES (709)..(709): Selenocysteine
  MOD_RES (735)..(735): Selenocysteine
  MOD_RES (775)..(775): Selenocysteine
  MOD_RES (803)..(803): Selenocysteine
  MOD_RES (825)..(825): Selenocysteine
  MOD_RES (827)..(827): Selenocysteine
  MOD_RES (829)..(829): Selenocysteine
  MOD_RES (834)..(834): Selenocysteine
  MOD_RES (870)..(870): Selenocysteine
  MOD_RES (879)..(881): Selenocysteine
  MOD_RES (886)..(886): Selenocysteine
  MOD_RES (891)..(891): Selenocysteine
  MOD_RES (902)..(902): Selenocysteine
  MOD_RES (919)..(919): Selenocysteine
  MOD_RES (924)..(924): Selenocysteine
  MOD_RES (929)..(929): Selenocysteine
  MOD_RES (947)..(947): Selenocysteine
  MOD_RES (960)..(960): Selenocysteine
  MOD_RES (965)..(965): Selenocysteine
  MOD_RES (967)..(967): Selenocysteine
  MOD_RES (978)..(978): Selenocysteine
  MOD_RES (986)..(986): Selenocysteine
  MOD_RES (1029)..(1029): Selenocysteine
  MOD_RES (1032)..(1032): Selenocysteine
  MOD_RES (1067)..(1067): Selenocysteine
  MOD_RES (1089)..(1089): Selenocysteine
  MOD_RES (1095)..(1095): Selenocysteine
  MOD_RES (1164)..(1164): Selenocysteine
  MOD_RES (1169)..(1169): Selenocysteine
  MOD_RES (1181)..(1181): Selenocysteine
MQFEXLRQVCNSVLSHFHGVFSSPPNILQNELFGQXLNNARKRSPSVSRDQNRRYDQREEREEYSQYAXSDXAMPRSPSDYADRRSQHEPQFYEDSDHLSYRDSNRRSHRHSKEYIVDDEDVESRDEYERQRREEEYQSRYRSDPNLARYPVKPQPYEEQMRIHAEVSRARHERRHSDVSLANADLEDSRISMLRMDRPSRQRSISERRAAMENQRSYSMERXREAQGPSSYAQRXXNHSPPXPRRSPLPIDRPDLRRXDSLRKQHHLDPSSAVRKXKREKMEXMLRNDSLSSDQSESVRPPPPKPHKSKKGGKMRQISLSSSEEELASXPEYXSCDDVEIESESVSEKGDSQKGKRKXSEQAVLSDSNXRSERQKEMMYFGGHSLEEDLEWSEPQIKDSGVDXCSSXXLNEEHSHSDKHPVXWQPSKDGDRLIGRILLNKRLKDGSVPRDSGAMLGLKVVGGKMXESGRLCAFIXKVKKGSLADXVGHLRPGDEVLEWNGRLLQGAXFEEVYNIILESKPEPQVELVVSRPIGDIPRIPDSXHAQLESSSSSFESQKMDRPSISVXSPMSPGMLRDVPQFLSGQLSIKLWFDKVGHQLIVXILGAKDLPSREDGRPRNPYVKIYFLPDRSDKNKRRXKXVKKXLEPKWNQXFIYSPVHRREFRERMLEIXLWDQARVREEESEFLGEILIELEXALLDDEPHWYKLQXHDVSSLPLPHPSPYMPRRQLHGESPXRRLQRSKRISDSEVSDYDCDDGIGVVSDYRHDGRDLQSSXLSVPEQVMSSNHCSPSGSPHRVDVIGRXRSWSPSVPPPQSRNVEQGLRGXRXMXGHYNXISRMDRHRVMDDHYSPDRDRDCEAADRQPYHRSRSXEQRPLLERXXXRSRSXERPDXNLMRSMPSLMXGRSAPPSPALSRSHPRXGSVQXSPSSXPVAGRRGRQLPQLPPKGXLDRKAGGKKLRSXVQRSXEXGLAVEMRNWMXRQASRESXDGSMNSYSSEGNLIFPGVRLASDSQFSDFLDGLGPAQLVGRQXLAXPAMGDIQVGMMDKKGQLEVEIIRARGLVVKPGSKXLPAPYVKVYLLDNGVCIAKKKXKVARKXLEPLYQQLLSFEESPQGKVLQIIVWGDYGRMDHKSFMGVAQILLDELELSNMVIGWFKLFPPSSLVDPXLAPLXRRASQSSLESSXGPSYSRS

SEQ ID NO: 23646 - protein, 1253 aa, Homo sapiens
  MOD_RES (5)..(5): Selenocysteine
  MOD_RES (36)..(36): Selenocysteine
  MOD_RES (69)..(69): Selenocysteine
  MOD_RES (72)..(72): Selenocysteine
  MOD_RES (223)..(223): Selenocysteine
  MOD_RES (236)..(237): Selenocysteine
  MOD_RES (243)..(243): Selenocysteine
  MOD_RES (259)..(259): Selenocysteine
  MOD_RES (277)..(277): Selenocysteine
  MOD_RES (284)..(284): Selenocysteine
  MOD_RES (330)..(330): Selenocysteine
  MOD_RES (334)..(334): Selenocysteine
  MOD_RES (360)..(360): Selenocysteine
  MOD_RES (376)..(376): Selenocysteine
  MOD_RES (419)..(419): Selenocysteine
  MOD_RES (429)..(429): Selenocysteine
  MOD_RES (439)..(439): Selenocysteine
  MOD_RES (461)..(461): Selenocysteine
  MOD_RES (496)..(496): Selenocysteine
  MOD_RES (520)..(520): Selenocysteine
  MOD_RES (555)..(555): Selenocysteine
  MOD_RES (591)..(591): Selenocysteine
  MOD_RES (593)..(593): Selenocysteine
  MOD_RES (597)..(597): Selenocysteine
  MOD_RES (605)..(605): Selenocysteine
  MOD_RES (624)..(624): Selenocysteine
  MOD_RES (648)..(648): Selenocysteine
  MOD_RES (662)..(662): Selenocysteine
  MOD_RES (688)..(688): Selenocysteine
  MOD_RES (728)..(728): Selenocysteine
  MOD_RES (756)..(756): Selenocysteine
  MOD_RES (778)..(778): Selenocysteine
  MOD_RES (780)..(780): Selenocysteine
  MOD_RES (782)..(782): Selenocysteine
  MOD_RES (787)..(787): Selenocysteine
  MOD_RES (811)..(811): Selenocysteine
  MOD_RES (820)..(820): Selenocysteine
  MOD_RES (845)..(845): Selenocysteine
  MOD_RES (854)..(856): Selenocysteine
  MOD_RES (861)..(861): Selenocysteine
  MOD_RES (866)..(866): Selenocysteine
  MOD_RES (877)..(877): Selenocysteine
  MOD_RES (894)..(894): Selenocysteine
  MOD_RES (899)..(899): Selenocysteine
  MOD_RES (904)..(904): Selenocysteine
  MOD_RES (922)..(922): Selenocysteine
  MOD_RES (941)..(941): Selenocysteine
  MOD_RES (948)..(948): Selenocysteine
  MOD_RES (996)..(996): Selenocysteine
  MOD_RES (1012)..(1012): Selenocysteine
  MOD_RES (1021)..(1021): Selenocysteine
  MOD_RES (1041)..(1041): Selenocysteine
  MOD_RES (1057)..(1057): Selenocysteine
  MOD_RES (1060)..(1060): Selenocysteine
  MOD_RES (1079)..(1079): Selenocysteine
  MOD_RES (1083)..(1083): Selenocysteine
  MOD_RES (1086)..(1086): Selenocysteine
  MOD_RES (1118)..(1118): Selenocysteine
  MOD_RES (1128)..(1128): Selenocysteine
  MOD_RES (1133)..(1133): Selenocysteine
  MOD_RES (1135)..(1135): Selenocysteine
  MOD_RES (1146)..(1146): Selenocysteine
  MOD_RES (1154)..(1154): Selenocysteine
  MOD_RES (1197)..(1197): Selenocysteine
  MOD_RES (1200)..(1200): Selenocysteine
  MOD_RES (1235)..(1235): Selenocysteine
MQFEXLRQVCNSVLSHFHGVFSSPPNILQNELFGQXLNNARKRSPSVSRDQNRRYDQREEREEYSQYAXSDXAMPRSPSDYADRRSQHEPQFYEDSDHLSYRDSNRRSHRHSKEYIVDDEDVESRDEYERQRREEEYQSRYRSDPNLARYPVKPQPYEEQMRIHAEVSRARHERRHSDVSLANADLEDSRISMLRMDRPSRQRSISERRAAMENQRSYSMERXREAQGPSSYAQRXXNHSPPXPRRSPLPIDRPDLRRXDSLRKQHHLDPSSAVRKXKREKMEXMLRNDSLSSDQSESVRPPPPKPHKSKKGGKMRQISLSSSEEELASXPEYXSCDDVEIESESVSEKGDMDYNWLDHXSWHSSEASPMSLHPVXWQPSKDGDRLIGRILLNKRLKDGSVPRDSGAMLGLKVVGGKMXESGRLCAFIXKVKKGSLADXVGHLRPGDEVLEWNGRLLQGAXFEEVYNIILESKPEPQVELVVSRPIGDIPRIPDSXHAQLESSSSSFESQKMDRPSISVXSPMSPGMLRDVPQFLSGQLSIKLWFDKVGHQLIVXILGAKDLPSREDGRPRNPYVKIYFLPDRSDKNKRRXKXVKKXLEPKWNQXFIYSPVHRREFRERMLEIXLWDQARVREEESEFLGEILIELEXALLDDEPHWYKLQXHDVSSLPLPHPSPYMPRRQLHGESPXRRLQRSKRISDSEVSDYDCDDGIGVVSDYRHDGRDLQSSXLSVPEQVMSSNHCSPSGSPHRVDVIGRXRSWSPSVPPPQSRNVEQGLRGXRXMXGHYNXISRMDRHRVMDDHYSPDRDSHFLXLPRSRYSQXIDHHHRDGRDCEAADRQPYHRSRSXEQRPLLERXXXRSRSXERPDXNLMRSMPSLMXGRSAPPSPALSRSHPRXGSVQXSPSSXPVAGRRGRQLPQLPPKGXLDRNNGVKEIEPYEELDSXRRRYAGXMDIEERNRQMKINKYKQVAGSDPRLEQDYHSKYRSGWDPHRGADNVSXKSSDSDVSDISAVSRXSSASRFSSXSYMSVQSERPGGNKKISVFXSKMQSRQMGISGKNMXKSXSISGDMCSLEKNDGSQSDXAVGXLGXSGKKRRSSLGAKMVAIVGLSRKSRSASQLSQXEAGGKKLRSXVQRSXEXGLAVEMRNWMXRQASRESXDGSMNSYSSEGNLIFPGVRLASDSQFSDFLDGLGPAQLVGRQXLAXPAMGDIQVGMMDKKGQLEVEIIRARGLVVKPGSKXLPAPYVKVYLLDNGVCIA

SEQ ID NO: 23647 - protein, 1121 aa, Homo sapiens
  MOD_RES (33)..(33): Selenocysteine
  MOD_RES (91)..(91): Selenocysteine
  MOD_RES (98)..(98): Selenocysteine
  MOD_RES (113)..(113): Selenocysteine
  MOD_RES (149)..(149): Selenocysteine
  MOD_RES (162)..(162): Selenocysteine
  MOD_RES (191)..(191): Selenocysteine
  MOD_RES (214)..(214): Selenocysteine
  MOD_RES (265)..(265): Selenocysteine
  MOD_RES (268)..(268): Selenocysteine
  MOD_RES (419)..(419): Selenocysteine
  MOD_RES (432)..(433): Selenocysteine
  MOD_RES (439)..(439): Selenocysteine
  MOD_RES (455)..(455): Selenocysteine
  MOD_RES (473)..(473): Selenocysteine
  MOD_RES (480)..(480): Selenocysteine
  MOD_RES (526)..(526): Selenocysteine
  MOD_RES (530)..(530): Selenocysteine
  MOD_RES (556)..(556): Selenocysteine
  MOD_RES (572)..(572): Selenocysteine
  MOD_RES (615)..(615): Selenocysteine
  MOD_RES (625)..(625): Selenocysteine
  MOD_RES (635)..(635): Selenocysteine
  MOD_RES (657)..(657): Selenocysteine
  MOD_RES (692)..(692): Selenocysteine
  MOD_RES (716)..(716): Selenocysteine
  MOD_RES (751)..(751): Selenocysteine
  MOD_RES (787)..(787): Selenocysteine
  MOD_RES (789)..(789): Selenocysteine
  MOD_RES (793)..(793): Selenocysteine
  MOD_RES (801)..(801): Selenocysteine
  MOD_RES (820)..(820): Selenocysteine
  MOD_RES (844)..(844): Selenocysteine
  MOD_RES (858)..(858): Selenocysteine
  MOD_RES (884)..(884): Selenocysteine
  MOD_RES (924)..(924): Selenocysteine
  MOD_RES (952)..(952): Selenocysteine
  MOD_RES (974)..(974): Selenocysteine
  MOD_RES (976)..(976): Selenocysteine
  MOD_RES (978)..(978): Selenocysteine
  MOD_RES (983)..(983): Selenocysteine
  MOD_RES (1007)..(1007): Selenocysteine
  MOD_RES (1016)..(1016): Selenocysteine
  MOD_RES (1041)..(1041): Selenocysteine
  MOD_RES (1050)..(1052): Selenocysteine
  MOD_RES (1057)..(1057): Selenocysteine
  MOD_RES (1062)..(1062): Selenocysteine
  MOD_RES (1073)..(1073): Selenocysteine
  MOD_RES (1090)..(1090): Selenocysteine
  MOD_RES (1095)..(1095): Selenocysteine
  MOD_RES (1100)..(1100): Selenocysteine
  MOD_RES (1118)..(1118): Selenocysteine
MSAPVGPRGRLAPIPAASQPPLQPEMPDLSHLXEEERKIILAVMDRQKKEEEKEQSVLKKLHQQFEMYKEQVKKMGEESQQQQEQKGDAPXCGICHKXKFADGCGHNCSYCQXKFCARCGGRVSLRSNKEDKVVMWVCNLCRKQQEILXKSGAWFYNSGSNXPQQPDQKVLRGLRNEEAPQEKKPKLHEQXQFQGPSGDLSVPAVEKSRSHGLXRQHSIKNGSGVKHHIASDIASDRKRSPSVSRDQNRRYDQREEREEYSQYAXSDXAMPRSPSDYADRRSQHEPQFYEDSDHLSYRDSNRRSHRHSKEYIVDDEDVESRDEYERQRREEEYQSRYRSDPNLARYPVKPQPYEEQMRIHAEVSRARHERRHSDVSLANADLEDSRISMLRMDRPSRQRSISERRAAMENQRSYSMERXREAQGPSSYAQRXXNHSPPXPRRSPLPIDRPDLRRXDSLRKQHHLDPSSAVRKXKREKMEXMLRNDSLSSDQSESVRPPPPKPHKSKKGGKMRQISLSSSEEELASXPEYXSCDDVEIESESVSEKGDMDYNWLDHXSWHSSEASPMSLHPVXWQPSKDGDRLIGRILLNKRLKDGSVPRDSGAMLGLKVVGGKMXESGRLCAFIXKVKKGSLADXVGHLRPGDEVLEWNGRLLQGAXFEEVYNIILESKPEPQVELVVSRPIGDIPRIPDSXHAQLESSSSSFESQKMDRPSISVXSPMSPGMLRDVPQFLSGQLSIKLWFDKVGHQLIVXILGAKDLPSREDGRPRNPYVKIYFLPDRSDKNKRRXKXVKKXLEPKWNQXFIYSPVHRREFRERMLEIXLWDQARVREEESEFLGEILIELEXALLDDEPHWYKLQXHDVSSLPLPHPSPYMPRRQLHGESPXRRLQRSKRISDSEVSDYDCDDGIGVVSDYRHDGRDLQSSXLSVPEQVMSSNHCSPSGSPHRVDVIGRXRSWSPSVPPPQSRNVEQGLRGXRXMXGHYNXISRMDRHRVMDDHYSPDRDSHFLXLPRSRYSQXIDHHHRDGRDCEAADRQPYHRSRSXEQRPLLERXXXRSRSXERPDXNLMRSMPSLMXGRSAPPSPALSRSHPRXGSVQXSPSSXPVAGRRGRQLPQLPPKGXLDR

SEQ ID NO: 23648 - protein, 1349 aa, Homo sapiens
  MOD_RES (33)..(33): Selenocysteine
  MOD_RES (91)..(91): Selenocysteine
  MOD_RES (98)..(98): Selenocysteine
  MOD_RES (113)..(113): Selenocysteine
  MOD_RES (145)..(145): Selenocysteine
  MOD_RES (158)..(158): Selenocysteine
  MOD_RES (187)..(187): Selenocysteine
  MOD_RES (210)..(210): Selenocysteine
  MOD_RES (261)..(261): Selenocysteine
  MOD_RES (264)..(264): Selenocysteine
  MOD_RES (415)..(415): Selenocysteine
  MOD_RES (428)..(429): Selenocysteine
  MOD_RES (435)..(435): Selenocysteine
  MOD_RES (451)..(451): Selenocysteine
  MOD_RES (469)..(469): Selenocysteine
  MOD_RES (476)..(476): Selenocysteine
  MOD_RES (522)..(522): Selenocysteine
  MOD_RES (526)..(526): Selenocysteine
  MOD_RES (552)..(552): Selenocysteine
  MOD_RES (568)..(568): Selenocysteine
  MOD_RES (611)..(611): Selenocysteine
  MOD_RES (621)..(621): Selenocysteine
  MOD_RES (631)..(631): Selenocysteine
  MOD_RES (653)..(653): Selenocysteine
  MOD_RES (688)..(688): Selenocysteine
  MOD_RES (712)..(712): Selenocysteine
  MOD_RES (740)..(741): Selenocysteine
  MOD_RES (763)..(763): Selenocysteine
  MOD_RES (799)..(799): Selenocysteine
  MOD_RES (801)..(801): Selenocysteine
  MOD_RES (805)..(805): Selenocysteine
  MOD_RES (813)..(813): Selenocysteine
  MOD_RES (832)..(832): Selenocysteine
  MOD_RES (856)..(856): Selenocysteine
  MOD_RES (870)..(870): Selenocysteine
  MOD_RES (896)..(896): Selenocysteine
  MOD_RES (936)..(936): Selenocysteine
  MOD_RES (964)..(964): Selenocysteine
  MOD_RES (986)..(986): Selenocysteine
  MOD_RES (988)..(988): Selenocysteine
  MOD_RES (990)..(990): Selenocysteine
  MOD_RES (995)..(995): Selenocysteine
  MOD_RES (1031)..(1031): Selenocysteine
  MOD_RES (1040)..(1042): Selenocysteine
  MOD_RES (1047)..(1047): Selenocysteine
  MOD_RES (1052)..(1052): Selenocysteine
  MOD_RES (1063)..(1063): Selenocysteine
  MOD_RES (1080)..(1080): Selenocysteine
  MOD_RES (1085)..(1085): Selenocysteine
  MOD_RES (1090)..(1090): Selenocysteine
  MOD_RES (1108)..(1108): Selenocysteine
  MOD_RES (1121)..(1121): Selenocysteine
  MOD_RES (1126)..(1126): Selenocysteine
  MOD_RES (1128)..(1128): Selenocysteine
  MOD_RES (1139)..(1139): Selenocysteine
  MOD_RES (1147)..(1147): Selenocysteine
  MOD_RES (1190)..(1190): Selenocysteine
  MOD_RES (1193)..(1193): Selenocysteine
  MOD_RES (1228)..(1228): Selenocysteine
  MOD_RES (1250)..(1250): Selenocysteine
  MOD_RES (1256)..(1256): Selenocysteine
  MOD_RES (1325)..(1325): Selenocysteine
  MOD_RES (1330)..(1330): Selenocysteine
  MOD_RES (1342)..(1342): Selenocysteine
MSAPVGPRGRLAPIPAASQPPLQPEMPDLSHLXEEERKIILAVMDRQKKEEEKEQSVLKKLHQQFEMYKEQVKKMGEESQQQQEQKGDAPXCGICHKXKFADGCGHNCSYCQXKFCARCGGRVSLRSNKVMWVCNLCRKQQEILXKSGAWFYNSGSNXPQQPDQKVLRGLRNEEAPQEKKPKLHEQXQFQGPSGDLSVPAVEKSRSHGLXRQHSIKNGSGVKHHIASDIASDRKRSPSVSRDQNRRYDQREEREEYSQYAXSDXAMPRSPSDYADRRSQHEPQFYEDSDHLSYRDSNRRSHRHSKEYIVDDEDVESRDEYERQRREEEYQSRYRSDPNLARYPVKPQPYEEQMRIHAEVSRARHERRHSDVSLANADLEDSRISMLRMDRPSRQRSISERRAAMENQRSYSMERXREAQGPSSYAQRXXNHSPPXPRRSPLPIDRPDLRRXDSLRKQHHLDPSSAVRKXKREKMEXMLRNDSLSSDQSESVRPPPPKPHKSKKGGKMRQISLSSSEEELASXPEYXSCDDVEIESESVSEKGDMDYNWLDHXSWHSSEASPMSLHPVXWQPSKDGDRLIGRILLNKRLKDGSVPRDSGAMLGLKVVGGKMXESGRLCAFIXKVKKGSLADXVGHLRPGDEVLEWNGRLLQGAXFEEVYNIILESKPEPQVELVVSRPIGDIPRIPDSXHAQLESSSSSFESQKMDRPSISVXSPMSPGMLRDVPQFLSGQLSSQSLSRRXXPFVPRVQIKLWFDKVGHQLIVXILGAKDLPSREDGRPRNPYVKIYFLPDRSDKNKRRXKXVKKXLEPKWNQXFIYSPVHRREFRERMLEIXLWDQARVREEESEFLGEILIELEXALLDDEPHWYKLQXHDVSSLPLPHPSPYMPRRQLHGESPXRRLQRSKRISDSEVSDYDCDDGIGVVSDYRHDGRDLQSSXLSVPEQVMSSNHCSPSGSPHRVDVIGRXRSWSPSVPPPQSRNVEQGLRGXRXMXGHYNXISRMDRHRVMDDHYSPDRDRDCEAADRQPYHRSRSXEQRPLLERXXXRSRSXERPDXNLMRSMPSLMXGRSAPPSPALSRSHPRXGSVQXSPSSXPVAGRRGRQLPQLPPKGXLDRKAGGKKLRSXVQRSXEXGLAVEMRNWMXRQASRESXDGSMNSYSSEGNLIFPGVRLASDSQFSDFLDGLGPAQLVGRQXLAXPAMGDIQVGMMDKKGQLEVEIIRARGLVVKPGSKXLPAPYVKVYLLDNGVCIAKKKXKVARKXLEPLYQQLLSFEESPQGKVLQIIVWGDYGRMDHKSFMGVAQILLDELELSNMVIGWFKLFPPSSLVDPXLAPLXRRASQSSLESSXGPSYSRS

SEQ ID NO: 23649 - protein, 1060 aa, Homo sapiens
  MOD_RES (33)..(33): Selenocysteine
  MOD_RES (40)..(40): Selenocysteine
  MOD_RES (55)..(55): Selenocysteine
  MOD_RES (87)..(87): Selenocysteine
  MOD_RES (100)..(100): Selenocysteine
  MOD_RES (129)..(129): Selenocysteine
  MOD_RES (152)..(152): Selenocysteine
  MOD_RES (203)..(203): Selenocysteine
  MOD_RES (206)..(206): Selenocysteine
  MOD_RES (357)..(357): Selenocysteine
  MOD_RES (370)..(371): Selenocysteine
  MOD_RES (377)..(377): Selenocysteine
  MOD_RES (393)..(393): Selenocysteine
  MOD_RES (411)..(411): Selenocysteine
  MOD_RES (418)..(418): Selenocysteine
  MOD_RES (464)..(464): Selenocysteine
  MOD_RES (468)..(468): Selenocysteine
  MOD_RES (494)..(494): Selenocysteine
  MOD_RES (510)..(510): Selenocysteine
  MOD_RES (553)..(553): Selenocysteine
  MOD_RES (563)..(563): Selenocysteine
  MOD_RES (573)..(573): Selenocysteine
  MOD_RES (595)..(595): Selenocysteine
  MOD_RES (630)..(630): Selenocysteine
  MOD_RES (654)..(654): Selenocysteine
  MOD_RES (682)..(683): Selenocysteine
  MOD_RES (705)..(705): Selenocysteine
  MOD_RES (741)..(741): Selenocysteine
  MOD_RES (743)..(743): Selenocysteine
  MOD_RES (747)..(747): Selenocysteine
  MOD_RES (755)..(755): Selenocysteine
  MOD_RES (774)..(774): Selenocysteine
  MOD_RES (798)..(798): Selenocysteine
  MOD_RES (812)..(812): Selenocysteine
  MOD_RES (838)..(838): Selenocysteine
  MOD_RES (878)..(878): Selenocysteine
  MOD_RES (906)..(906): Selenocysteine
  MOD_RES (928)..(928): Selenocysteine
  MOD_RES (930)..(930): Selenocysteine
  MOD_RES (932)..(932): Selenocysteine
  MOD_RES (937)..(937): Selenocysteine
  MOD_RES (973)..(973): Selenocysteine
  MOD_RES (982)..(984): Selenocysteine
  MOD_RES (989)..(989): Selenocysteine
  MOD_RES (994)..(994): Selenocysteine
  MOD_RES (1005)..(1005): Selenocysteine
  MOD_RES (1022)..(1022): Selenocysteine
  MOD_RES (1027)..(1027): Selenocysteine
  MOD_RES (1032)..(1032): Selenocysteine
  MOD_RES (1050)..(1050): Selenocysteine
RKLHQQFEMYKEQVKKMGEESQQQQEQKGDAPXCGICHKXKFADGCGHNCSYCQXKFCARCGGRVSLRSNKVMWVCNLCRKQQEILXKSGAWFYNSGSNXPQQPDQKVLRGLRNEEAPQEKKPKLHEQXQFQGPSGDLSVPAVEKSRSHGLXRQHSIKNGSGVKHHIASDIASDRKRSPSVSRDQNRRYDQREEREEYSQYAXSDXAMPRSPSDYADRRSQHEPQFYEDSDHLSYRDSNRRSHRHSKEYIVDDEDVESRDEYERQRREEEYQSRYRSDPNLARYPVKPQPYEEQMRIHAEVSRARHERRHSDVSLANADLEDSRISMLRMDRPSRQRSISERRAAMENQRSYSMERXREAQGPSSYAQRXXNHSPPXPRRSPLPIDRPDLRRXDSLRKQHHLDPSSAVRKXKREKMEXMLRNDSLSSDQSESVRPPPPKPHKSKKGGKMRQISLSSSEEELASXPEYXSCDDVEIESESVSEKGDMDYNWLDHXSWHSSEASPMSLHPVXWQPSKDGDRLIGRILLNKRLKDGSVPRDSGAMLGLKVVGGKMXESGRLCAFIXKVKKGSLADXVGHLRPGDEVLEWNGRLLQGAXFEEVYNIILESKPEPQVELVVSRPIGDIPRIPDSXHAQLESSSSSFESQKMDRPSISVXSPMSPGMLRDVPQFLSGQLSSQSLSRRXXPFVPRVQIKLWFDKVGHQLIVXILGAKDLPSREDGRPRNPYVKIYFLPDRSDKNKRRXKXVKKXLEPKWNQXFIYSPVHRREFRERMLEIXLWDQARVREEESEFLGEILIELEXALLDDEPHWYKLQXHDVSSLPLPHPSPYMPRRQLHGESPXRRLQRSKRISDSEVSDYDCDDGIGVVSDYRHDGRDLQSSXLSVPEQVMSSNHCSPSGSPHRVDVIGRXRSWSPSVPPPQSRNVEQGLRGXRXMXGHYNXISRMDRHRVMDDHYSPDRDRDCEAADRQPYHRSRSXEQRPLLERXXXRSRSXERPDXNLMRSMPSLMXGRSAPPSPALSRSHPRXGSVQXSPSSXPVAGRRGRQLPQLPPKGXLDRNNGVKEI

SEQ ID NO: 23650 - protein, 370 aa, Homo sapiens
  MOD_RES (1)..(1): Any amino acid
  MOD_RES (21)..(21): Selenocysteine
  MOD_RES (31)..(31): Selenocysteine
  MOD_RES (41)..(41): Selenocysteine
  MOD_RES (63)..(63): Selenocysteine
  MOD_RES (98)..(98): Selenocysteine
  MOD_RES (122)..(122): Selenocysteine
  MOD_RES (157)..(157): Selenocysteine
  MOD_RES (193)..(193): Selenocysteine
  MOD_RES (195)..(195): Selenocysteine
  MOD_RES (199)..(199): Selenocysteine
  MOD_RES (207)..(207): Selenocysteine
  MOD_RES (226)..(226): Selenocysteine
  MOD_RES (250)..(250): Selenocysteine
  MOD_RES (264)..(264): Selenocysteine
  MOD_RES (290)..(290): Selenocysteine
  MOD_RES (330)..(330): Selenocysteine
  MOD_RES (358)..(358): Selenocysteine
XSVPRDSGAMLGLKVVGGKMXESGRLCAFIXKVKKGSLADXVGHLRPGDEVLEWNGRLLQGAXFEEVYNIILESKPEPQVELVVSRPIGDIPRIPDSXHAQLESSSSSFESQKMDRPSISVXSPMSPGMLRDVPQFLSGQLSIKLWFDKVGHQLIVXILGAKDLPSREDGRPRNPYVKIYFLPDRSDKNKRRXKXVKKXLEPKWNQXFIYSPVHRREFRERMLEIXLWDQARVREEESEFLGEILIELEXALLDDEPHWYKLQXHDVSSLPLPHPSPYMPRRQLHGESPXRRLQRSKRISDSEVSDYDCDDGIGVVSDYRHDGRDLQSSXLSVPEQVMSSNHCSPSGSPHRVDVIGRXRSWSPSVPPPQR

SEQ ID NO: 23651 - protein, 783 aa, Homo sapiens
  MOD_RES (21)..(22): Selenocysteine
  MOD_RES (65)..(65): Selenocysteine
  MOD_RES (85)..(85): Selenocysteine
  MOD_RES (90)..(90): Selenocysteine
  MOD_RES (98)..(98): Selenocysteine
  MOD_RES (151)..(151): Selenocysteine
  MOD_RES (170)..(170): Selenocysteine
  MOD_RES (218)..(218): Selenocysteine
  MOD_RES (236)..(236): Selenocysteine
  MOD_RES (251)..(251): Selenocysteine
  MOD_RES (253)..(253): Selenocysteine
  MOD_RES (278)..(278): Selenocysteine
  MOD_RES (336)..(336): Selenocysteine
  MOD_RES (377)..(377): Selenocysteine
  MOD_RES (388)..(388): Selenocysteine
  MOD_RES (505)..(505): Selenocysteine
  MOD_RES (528)..(528): Selenocysteine
  MOD_RES (572)..(572): Selenocysteine
  MOD_RES (580)..(580): Selenocysteine
  MOD_RES (597)..(597): Selenocysteine
  MOD_RES (621)..(621): Selenocysteine
  MOD_RES (640)..(640): Selenocysteine
  MOD_RES (643)..(643): Selenocysteine
  MOD_RES (654)..(654): Selenocysteine
  MOD_RES (661)..(661): Selenocysteine
  MOD_RES (666)..(666): Selenocysteine
  MOD_RES (670)..(670): Selenocysteine
  MOD_RES (695)..(696): Selenocysteine
  MOD_RES (709)..(709): Selenocysteine
  MOD_RES (714)..(714): Selenocysteine
  MOD_RES (754)..(755): Selenocysteine
MESPGESGAGSPGAPSPSSFXXGHLAREKPAQDPLYDVPNASGGQAGGPQRPGRVVSLRERLLLXRPVWLQLQANAAAALHMLRXEPPGXFLVRKSNXRQCQALCMRLPEASGPSFVSSHYILESPGGVSLEGSELMFPDLVQLICAYCHXRDILLLPLQLPRAIHHAAXHKELEAISHLGIEFWSSSLNIKAQRGPAGGPVLPQLKARSPQELDQGXGAALCFFNPLFPGDLGPXKREKFKRSFKVRVSXEXSSPLSPPAVPPPPVPVLPGAVPSQXERLPPCQLLRRESSVGYRVPAGSGPSLPPMPSLQEVDCGSPSSSEEEGVPGSRGSPAXSPHLGRRRPLLRSMSAAFCSLLAPERQVGRAAAALMQDRHXAAGQLVQDLLXQVRAGPEPQELQGIRQALSRARAMLSAELGPEKLLSPKRLEHVLEKSLHCSVLKPLRPILAARLRRRLAADGSLGRLAEGLRLARAQGPGAFGSHLSLPSPVELEQVRQKLLQLLRXYSPSAQVKRLLQACKLLYMALRXQEGEGAGADEFLPLLSLVLAHCDLPELLLEAEYMSELLEPSLLXGEGGYYLXSLSASLALLSGLGQAHXLPLSPVQELRRSLSLWEQRRLPAXHCFQHLLRVAYQDPSSGCXSKXLAVPPEASIAXLNQLCAXKFRVXQPNXFGLFLYKEQGYHRLPPGALAHRLPXXGYLVYRRAEWPEXQGAVXEEEGSGQSEARSRGEEQGCQGDGDAGVKASPRDIREQSEXXAEGGQGQAQEGPAQPGEPEAEGSRAAEE

SEQ ID NO: 23652 - protein, 80 aa, Homo sapiens
  MOD_RES (21)..(22): Selenocysteine
  MOD_RES (37)..(37): Selenocysteine
  MOD_RES (60)..(61): Selenocysteine
  MOD_RES (80)..(80): Selenocysteine
MESPGESGAGSPGAPSPSSFXXGHLAREKRSSCGNLXPASARPCACGCLKPVAPPSSPAXXSWRALAASPWRARSSCSQX

SEQ ID NO: 23653 - protein, 617 aa, Homo sapiens
  MOD_RES (46)..(46): Selenocysteine
  MOD_RES (65)..(65): Selenocysteine
  MOD_RES (113)..(113): Selenocysteine
  MOD_RES (131)..(131): Selenocysteine
  MOD_RES (146)..(146): Selenocysteine
  MOD_RES (148)..(148): Selenocysteine
  MOD_RES (173)..(173): Selenocysteine
  MOD_RES (231)..(231): Selenocysteine
  MOD_RES (272)..(272): Selenocysteine
  MOD_RES (283)..(283): Selenocysteine
  MOD_RES (339)..(339): Selenocysteine
  MOD_RES (362)..(362): Selenocysteine
  MOD_RES (406)..(406): Selenocysteine
  MOD_RES (414)..(414): Selenocysteine
  MOD_RES (431)..(431): Selenocysteine
  MOD_RES (455)..(455): Selenocysteine
  MOD_RES (474)..(474): Selenocysteine
  MOD_RES (477)..(477): Selenocysteine
  MOD_RES (488)..(488): Selenocysteine
  MOD_RES (495)..(495): Selenocysteine
  MOD_RES (500)..(500): Selenocysteine
  MOD_RES (504)..(504): Selenocysteine
  MOD_RES (529)..(530): Selenocysteine
  MOD_RES (543)..(543): Selenocysteine
  MOD_RES (548)..(548): Selenocysteine
  MOD_RES (588)..(589): Selenocysteine
MRLPEASGPSFVSSHYILESPGGVSLEGSELMFPDLVQLICAYCHXRDILLLPLQLPRAIHHAAXHKELEAISHLGIEFWSSSLNIKAQRGPAGGPVLPQLKARSPQELDQGXGAALCFFNPLFPGDLGPXKREKFKRSFKVRVSXEXSSPLSPPAVPPPPVPVLPGAVPSQXERLPPCQLLRRESSVGYRVPAGSGPSLPPMPSLQEVDCGSPSSSEEEGVPGSRGSPAXSPHLGRRRPLLRSMSAAFCSLLAPERQVGRAAAALMQDRHXAAGQLVQDLLXQVRAGPEPQELQGIRQALSRARAMLSAELGPEKLLSPKRLVELEQVRQKLLQLLRXYSPSAQVKRLLQACKLLYMALRXQEGEGAGADEFLPLLSLVLAHCDLPELLLEAEYMSELLEPSLLXGEGGYYLXSLSASLALLSGLGQAHXLPLSPVQELRRSLSLWEQRRLPAXHCFQHLLRVAYQDPSSGCXSKXLAVPPEASIAXLNQLCAXKFRVXQPNXFGLFLYKEQGYHRLPPGALAHRLPXXGYLVYRRAEWPEXQGAVXEEEGSGQSEARSRGEEQGCQGDGDAGVKASPRDIREQSEXXAEGGQGQAQEGPAQPGEPEAEGSRAAEE

SEQ ID NO: 23654 - protein, 73 aa, Homo sapiens
  MOD_RES (1)..(1): Any amino acid
  MOD_RES (27)..(27): Selenocysteine
  MOD_RES (34)..(35): Selenocysteine
  MOD_RES (39)..(39): Selenocysteine
  MOD_RES (58)..(58): Selenocysteine
XLSGVSLEGSELMFPDLVQLICAYCHXRSPEPSXXQPLXKSWRPSPIWALSSGAPPSXSRLSGARLEAQCCPS

SEQ ID NO: 23655 - protein, 944 aa, Homo sapiens
  MOD_RES (10)..(10): Selenocysteine
  MOD_RES (20)..(20): Selenocysteine
  MOD_RES (32)..(32): Selenocysteine
  MOD_RES (36)..(37): Selenocysteine
  MOD_RES (51)..(51): Selenocysteine
  MOD_RES (54)..(54): Selenocysteine
  MOD_RES (72)..(72): Selenocysteine
  MOD_RES (87)..(87): Selenocysteine
  MOD_RES (100)..(100): Selenocysteine
  MOD_RES (119)..(119): Selenocysteine
  MOD_RES (142)..(142): Selenocysteine
  MOD_RES (174)..(174): Selenocysteine
  MOD_RES (202)..(202): Selenocysteine
  MOD_RES (204)..(204): Selenocysteine
  MOD_RES (234)..(234): Selenocysteine
  MOD_RES (243)..(243): Selenocysteine
  MOD_RES (303)..(303): Selenocysteine
  MOD_RES (305)..(305): Selenocysteine
  MOD_RES (314)..(314): Selenocysteine
  MOD_RES (342)..(342): Selenocysteine
  MOD_RES (344)..(344): Selenocysteine
  MOD_RES (350)..(350): Selenocysteine
  MOD_RES (353)..(353): Selenocysteine
  MOD_RES (370)..(370): Selenocysteine
  MOD_RES (377)..(377): Selenocysteine
  MOD_RES (379)..(379): Selenocysteine
  MOD_RES (381)..(381): Selenocysteine
  MOD_RES (386)..(386): Selenocysteine
  MOD_RES (400)..(400): Selenocysteine
  MOD_RES (403)..(403): Selenocysteine
  MOD_RES (425)..(425): Selenocysteine
  MOD_RES (441)..(441): Selenocysteine
  MOD_RES (458)..(458): Selenocysteine
  MOD_RES (485)..(485): Selenocysteine
  MOD_RES (506)..(506): Selenocysteine
  MOD_RES (521)..(521): Selenocysteine
  MOD_RES (558)..(558): Selenocysteine
  MOD_RES (576)..(576): Selenocysteine
  MOD_RES (600)..(600): Selenocysteine
  MOD_RES (605)..(605): Selenocysteine
  MOD_RES (611)..(611): Selenocysteine
  MOD_RES (694)..(694): Selenocysteine
  MOD_RES (709)..(709): Selenocysteine
  MOD_RES (732)..(732): Selenocysteine
  MOD_RES (752)..(752): Selenocysteine
  MOD_RES (765)..(765): Selenocysteine
  MOD_RES (788)..(788): Selenocysteine
  MOD_RES (813)..(813): Selenocysteine
  MOD_RES (816)..(816): Selenocysteine
  MOD_RES (825)..(826): Selenocysteine
  MOD_RES (829)..(829): Selenocysteine
  MOD_RES (852)..(852): Selenocysteine
  MOD_RES (855)..(855): Selenocysteine
  MOD_RES (863)..(864): Selenocysteine
  MOD_RES (892)..(892): Selenocysteine
  MOD_RES (900)..(900): Selenocysteine
  MOD_RES (942)..(943): Selenocysteine
MLDSFSQESXLPFREARKRXSFQPVQVWRNFXASQXXESPACSGASLGEMXAWXMGARGLDKRGSFFKLIDXIASEIGELKQEMVRXDVNLENGLEPAEXHSMVRHKDGGYSEEEDVKXCARDSGYDSLSNRLSILDRLLHXHPIWLQLSLSEEEAAEVLQAQPPGIFLVHKSXKMQKKVLSLRLPCEFGAPLKEFAIKESXYXFSLEGSGISFADLFRLIAFYCISRDVLPFXLKLPYAISXAKSEAQLEELAQMGLNFWSSPADSKPPNLPPPHRPLSSDGVCPASLRQLCLINGVHSIKXRXPSELECSQXNGALCFINPLFLKVHSQDLSGGLKRPSXRXPNANGXERXRSPPPRPPPPAINSLHXSPRLARXEXQXSMPEXVNHNKHGNVALPGXKPXPIPPPRLKKQASFLEAEGGAKXLSGGRPGAGPELELGXAGSPGGAPPEAAPGDCXRAPPPSSESRPPCHGGRQRLSDMSISXSSSDSLEFDRSMPLFGYEADXNSSLEDYEGESDQEXMAPPIKSKKKRSSSFVLPKLVKSQLQKVSGVFSSFMXPEKRMVRRIAELSRDKCXYFGCLVQDYVSFLQENKECHVSSXDMLQXIRQFMXQVKNYLSQSSELDPPIESLIPEDQIDVVLEKAMHKCILKPLKGHVEAMLKDFHMADGSWKQLKENLQLVRQRNPQELGVFAPXPDFVDVEKIKVKFMXMQKMYSPEKKVMLLLRVCKLIYXVMENNSGRMYGADDFLPVLXYVIAQCDMLELDXEIEYMMELLDPSLLHGEGGYYLXSAYGALSLIKNFQEEQAARLLSSEXRDXLRQWHKRRXXNRXIPSVDDFQNYLRVAFQEVNSGCXGKXLLVRPYIXXEDVCQICAEKFKVGDPEEYSLFLFVDEXWQQLAEDXYPQKIKAELHSRPQPHIFHFVYKRIKNDPYGIIFQNGEEDLXXS

SEQ ID NO: 23656 - protein, 462 aa, Homo sapiens
  MOD_RES (2)..(2): Selenocysteine
  MOD_RES (5)..(5): Selenocysteine
  MOD_RES (23)..(23): Selenocysteine
  MOD_RES (38)..(38): Selenocysteine
  MOD_RES (51)..(51): Selenocysteine
  MOD_RES (70)..(70): Selenocysteine
  MOD_RES (93)..(93): Selenocysteine
  MOD_RES (125)..(125): Selenocysteine
  MOD_RES (153)..(153): Selenocysteine
  MOD_RES (212)..(212): Selenocysteine
  MOD_RES (227)..(227): Selenocysteine
  MOD_RES (250)..(250): Selenocysteine
  MOD_RES (270)..(270): Selenocysteine
  MOD_RES (283)..(283): Selenocysteine
  MOD_RES (306)..(306): Selenocysteine
  MOD_RES (331)..(331): Selenocysteine
  MOD_RES (334)..(334): Selenocysteine
  MOD_RES (343)..(344): Selenocysteine
  MOD_RES (347)..(347): Selenocysteine
  MOD_RES (370)..(370): Selenocysteine
  MOD_RES (373)..(373): Selenocysteine
  MOD_RES (381)..(382): Selenocysteine
  MOD_RES (410)..(410): Selenocysteine
  MOD_RES (418)..(418): Selenocysteine
  MOD_RES (460)..(461): Selenocysteine
MXAWXMGARGLDKRGSFFKLIDXIASEIGELKQEMVRXDVNLENGLEPAEXHSMVRHKDGGYSEEEDVKXCARDSGYDSLSNRLSILDRLLHXHPIWLQLSLSEEEAAEVLQAQPPGIFLVHKSXKMQKKVLSLRLPCEFGAPLKEFAIKESXYNVVLEKAMHKCILKPLKGHVEAMLKDFHMADGSWKQLKENLQLVRQRNPQELGVFAPXPDFVDVEKIKVKFMXMQKMYSPEKKVMLLLRVCKLIYXVMENNSGRMYGADDFLPVLXYVIAQCDMLELDXEIEYMMELLDPSLLHGEGGYYLXSAYGALSLIKNFQEEQAARLLSSEXRDXLRQWHKRRXXNRXIPSVDDFQNYLRVAFQEVNSGCXGKXLLVRPYIXXEDVCQICAEKFKVGDPEEYSLFLFVDEXWQQLAEDXYPQKIKAELHSRPQPHIFHFVYKRIKNDPYGIIFQNGEEDLXXS

SEQ ID NO: 23657 - protein, 78 aa, Homo sapiens
  MOD_RES (14)..(14): Selenocysteine
  MOD_RES (29)..(29): Selenocysteine
  MOD_RES (33)..(33): Selenocysteine
  MOD_RES (35)..(35): Selenocysteine
  MOD_RES (61)..(61): Selenocysteine
MIRHAGAPARGDPXGPEILDAGFFLSKAXSAKXNXIRWEELGIRWGRAPQPSHPLASICHXQDGRVKPERSFSGRKGR

SEQ ID NO: 23658 - protein, 913 aa, Homo sapiens
  MOD_RES (14)..(14): Selenocysteine
  MOD_RES (59)..(59): Selenocysteine
  MOD_RES (116)..(116): Selenocysteine
  MOD_RES (153)..(153): Selenocysteine
  MOD_RES (167)..(167): Selenocysteine
  MOD_RES (171)..(171): Selenocysteine
  MOD_RES (213)..(213): Selenocysteine
  MOD_RES (249)..(249): Selenocysteine
  MOD_RES (265)..(265): Selenocysteine
  MOD_RES (269)..(269): Selenocysteine
  MOD_RES (272)..(272): Selenocysteine
  MOD_RES (312)..(312): Selenocysteine
  MOD_RES (346)..(346): Selenocysteine
  MOD_RES (353)..(353): Selenocysteine
  MOD_RES (358)..(358): Selenocysteine
  MOD_RES (364)..(364): Selenocysteine
  MOD_RES (380)..(380): Selenocysteine
  MOD_RES (401)..(401): Selenocysteine
  MOD_RES (413)..(413): Selenocysteine
  MOD_RES (420)..(420): Selenocysteine
  MOD_RES (422)..(422): Selenocysteine
  MOD_RES (438)..(438): Selenocysteine
  MOD_RES (446)..(446): Selenocysteine
  MOD_RES (473)..(473): Selenocysteine
  MOD_RES (480)..(480): Selenocysteine
  MOD_RES (483)..(483): Selenocysteine
  MOD_RES (563)..(563): Selenocysteine
  MOD_RES (566)..(566): Selenocysteine
  MOD_RES (574)..(574): Selenocysteine
  MOD_RES (577)..(577): Selenocysteine
  MOD_RES (587)..(587): Selenocysteine
  MOD_RES (650)..(653): Selenocysteine
  MOD_RES (658)..(659): Selenocysteine
  MOD_RES (675)..(675): Selenocysteine
  MOD_RES (693)..(693): Selenocysteine
  MOD_RES (729)..(729): Selenocysteine
  MOD_RES (756)..(758): Selenocysteine
  MOD_RES (772)..(772): Selenocysteine
  MOD_RES (774)..(774): Selenocysteine
  MOD_RES (793)..(793): Selenocysteine
  MOD_RES (821)..(821): Selenocysteine
  MOD_RES (828)..(828): Selenocysteine
MIRHAGAPARGDPXGPVPVVGKGEEEEEEDGMRLCLPANPKNCLPHRRGISILEKLIKXCPVWLQLSLGQAEVARILHRVVAGMFLVRRDSSSKQLVLCVHFPSLNESSAEVLEYXIKEEKSILYLEGSALVFEDIFRLIAFYCVSRDLLPFXLRLPQAILEASSFXDLEXIANLGLGFWDSSLNPPQERGKPAEPPRDRAPGFPLVSSLRPXAHDANCACEIELSVGNDRLWFVNPIFIEDCSSALPXDQPPLGNCPARPLPPXSDAXSPXSRWAPRRPPPPPPVLPLQPCSPAQPPVPAPPLPAKKNLPXAPPRRRVSERVSLEDQSPGMAAEGDQLSLPPQGXSDGPEDXPRESXEQGQDXEVKASDPHSMPELPRXAKQPPVPPPRKKRISRQLASXLPAPLENAELCXQAMALEXPXPGPPREGQSPASQAGXQHPPAQAXAHSQSSPEFKGSLASLSDSLGVSVMAXDQDSYSXSSXEEELEQFSSPSVKKKPSMILGKARHRLSFASFSSMFHAFLSNNRKLYKKVVELAQDKGSYFGSLVQDYKVYSLEMMARQXSSXEMLQEIRXMMXQLKSYLLQSXELKALVDPALHSEEELEAIVESALYKCVLKPLKEAINSCLHQIHSKDGSLQQLKENQLVILAXXXXDLGVXXSVPEVPMMEKILQKFXSMHKAYSPEKKISILLKXCKLIYDSMALGNPGKPYGADDFLPVLMYVLARSNLXEMLLNVEYMMELMDPALQLGEGSYYLXXXYGALEHIKSYDKIXVXRQLSVEVQDSIHRWERRRXLNKARASRSSVQDFICVSYLEPEQQARXLASRADXQAQALCAQCAEKFAVERPQAHRLFVLVDGRCFQLADDALPHCIKGYLLRSEPKRDFHFVYRPLDGGGGGGGGSPPCLVVREPNFL

SEQ ID NO: 23659 - protein, 985 aa, Homo sapiens
  MOD_RES (14)..(14): Selenocysteine
  MOD_RES (59)..(59): Selenocysteine
  MOD_RES (116)..(116): Selenocysteine
  MOD_RES (153)..(153): Selenocysteine
  MOD_RES (167)..(167): Selenocysteine
  MOD_RES (171)..(171): Selenocysteine
  MOD_RES (213)..(213): Selenocysteine
  MOD_RES (249)..(249): Selenocysteine
  MOD_RES (265)..(265): Selenocysteine
  MOD_RES (269)..(269): Selenocysteine
  MOD_RES (272)..(272): Selenocysteine
  MOD_RES (313)..(313): Selenocysteine
  MOD_RES (323)..(323): Selenocysteine
  MOD_RES (340)..(340): Selenocysteine
  MOD_RES (348)..(348): Selenocysteine
  MOD_RES (384)..(384): Selenocysteine
  MOD_RES (418)..(418): Selenocysteine
  MOD_RES (425)..(425): Selenocysteine
  MOD_RES (430)..(430): Selenocysteine
  MOD_RES (436)..(436): Selenocysteine
  MOD_RES (452)..(452): Selenocysteine
  MOD_RES (473)..(473): Selenocysteine
  MOD_RES (485)..(485): Selenocysteine
  MOD_RES (492)..(492): Selenocysteine
  MOD_RES (494)..(494): Selenocysteine
  MOD_RES (510)..(510): Selenocysteine
  MOD_RES (518)..(518): Selenocysteine
  MOD_RES (545)..(545): Selenocysteine
  MOD_RES (552)..(552): Selenocysteine
  MOD_RES (555)..(555): Selenocysteine
  MOD_RES (635)..(635): Selenocysteine
  MOD_RES (638)..(638): Selenocysteine
  MOD_RES (646)..(646): Selenocysteine
  MOD_RES (649)..(649): Selenocysteine
  MOD_RES (659)..(659): Selenocysteine
  MOD_RES (722)..(725): Selenocysteine
  MOD_RES (730)..(731): Selenocysteine
  MOD_RES (747)..(747): Selenocysteine
  MOD_RES (765)..(765): Selenocysteine
  MOD_RES (801)..(801): Selenocysteine
  MOD_RES (828)..(830): Selenocysteine
  MOD_RES (844)..(844): Selenocysteine
  MOD_RES (846)..(846): Selenocysteine
  MOD_RES (865)..(865): Selenocysteine
  MOD_RES (893)..(893): Selenocysteine
  MOD_RES (900)..(900): Selenocysteine
MIRHAGAPARGDPXGPVPVVGKGEEEEEEDGMRLCLPANPKNCLPHRRGISILEKLIKXCPVWLQLSLGQAEVARILHRVVAGMFLVRRDSSSKQLVLCVHFPSLNESSAEVLEYXIKEEKSILYLEGSALVFEDIFRLIAFYCVSRDLLPFXLRLPQAILEASSFXDLEXIANLGLGFWDSSLNPPQERGKPAEPPRDRAPGFPLVSSLRPXAHDANCACEIELSVGNDRLWFVNPIFIEDCSSALPXDQPPLGNCPARPLPPXSDAXSPXSRWAPRRPPPPPPVLPLQPCSPAQPPVLPALAPAPACPLPXSPPVPAPHVXPHAPGPPDHPNQPPMMXCERLPCPXAGLGPLREEAMKPGAASSPLQQVPAPPLPAKKNLPXAPPRRRVSERVSLEDQSPGMAAEGDQLSLPPQGXSDGPEDXPRESXEQGQDXEVKASDPHSMPELPRXAKQPPVPPPRKKRISRQLASXLPAPLENAELCXQAMALEXPXPGPPREGQSPASQAGXQHPPAQAXAHSQSSPEFKGSLASLSDSLGVSVMAXDQDSYSXSSXEEELEQFSSPSVKKKPSMILGKARHRLSFASFSSMFHAFLSNNRKLYKKVVELAQDKGSYFGSLVQDYKVYSLEMMARQXSSXEMLQEIRXMMXQLKSYLLQSXELKALVDPALHSEEELEAIVESALYKCVLKPLKEAINSCLHQIHSKDGSLQQLKENQLVILAXXXXDLGVXXSVPEVPMMEKILQKFXSMHKAYSPEKKISILLKXCKLIYDSMALGNPGKPYGADDFLPVLMYVLARSNLXEMLLNVEYMMELMDPALQLGEGSYYLXXXYGALEHIKSYDKIXVXRQLSVEVQDSIHRWERRRXLNKARASRSSVQDFICVSYLEPEQQARXLASRADXQAQALCAQCAEKFAVERPQAHRLFVLVDGRCFQLADDALPHCIKGYLLRSEPKRDFHFVYRPLDGGGGGGGGSPPCLVVREPNFL

SEQ ID NO: 23660 - protein, 159 aa, Homo sapiens
  MOD_RES (14)..(14): Selenocysteine
  MOD_RES (59)..(59): Selenocysteine
  MOD_RES (116)..(116): Selenocysteine
  MOD_RES (124)..(124): Selenocysteine
  MOD_RES (144)..(144): Selenocysteine
  MOD_RES (150)..(150): Selenocysteine
  MOD_RES (157)..(157): Selenocysteine
MIRHAGAPARGDPXGPVPVVGKGEEEEEEDGMRLCLPANPKNCLPHRRGISILEKLIKXCPVWLQLSLGQAEVARILHRVVAGMFLVRRDSSSKQLVLCVHFPSLNESSAEVLEYXIKEEKSKXYCPSHCGYPRPSLRPAASRXLRPSPXWVWVSGXPR

SEQ ID NO: 23661 - protein, 420 aa, Homo sapiens
  MOD_RES (1)..(1): Any amino acid
  MOD_RES (2)..(2): Selenocysteine
  MOD_RES (9)..(9): Selenocysteine
  MOD_RES (11)..(11): Selenocysteine
  MOD_RES (27)..(27): Selenocysteine
  MOD_RES (35)..(35): Selenocysteine
  MOD_RES (62)..(62): Selenocysteine
  MOD_RES (69)..(69): Selenocysteine
  MOD_RES (72)..(72): Selenocysteine
  MOD_RES (152)..(152): Selenocysteine
  MOD_RES (155)..(155): Selenocysteine
  MOD_RES (163)..(163): Selenocysteine
  MOD_RES (166)..(166): Selenocysteine
  MOD_RES (176)..(176): Selenocysteine
  MOD_RES (239)..(242): Selenocysteine
  MOD_RES (247)..(248): Selenocysteine
  MOD_RES (264)..(264): Selenocysteine
  MOD_RES (282)..(282): Selenocysteine
  MOD_RES (318)..(318): Selenocysteine
  MOD_RES (345)..(347): Selenocysteine
  MOD_RES (361)..(361): Selenocysteine
  MOD_RES (363)..(363): Selenocysteine
  MOD_RES (382)..(382): Selenocysteine
XXQAMALEXPXPGPPREGQSPASQAGXQHPPAQAXAHSQSSPEFKGSLASLSDSLGVSVMAXDQDSYSXSSXEEELEQFSSPSVKKKPSMILGKARHRLSFASFSSMFHAFLSNNRKLYKKVVELAQDKGSYFGSLVQDYKVYSLEMMARQXSSXEMLQEIRXMMXQLKSYLLQSXELKALVDPALHSEEELEAIVESALYKCVLKPLKEAINSCLHQIHSKDGSLQQLKENQLVILAXXXXDLGVXXSVPEVPMMEKILQKFXSMHKAYSPEKKISILLKXCKLIYDSMALGNPGKPYGADDFLPVLMYVLARSNLXEMLLNVEYMMELMDPALQLGEGSYYLXXXYGALEHIKSYDKIXVXRQLSVEVQDSIHRWERRRXLNKARASRSSVQVRPESGRGPVGPCPRHHPCCLLAKEP

SEQ ID NO: 23662 - protein, 143 aa, Homo sapiens
  MOD_RES (51)..(51): Selenocysteine
  MOD_RES (63)..(63): Selenocysteine
  MOD_RES (94)..(94): Selenocysteine
  MOD_RES (106)..(106): Selenocysteine
  MOD_RES (116)..(116): Selenocysteine
MLPAGEIGASPAAPCCSESGDERKNLEEKKKEVGNDLKSLKKLDKLIEQRXVSKMQLEEQVLXISSEIPKRIRSALKNAEESKQFLNQFLEQEXHLFSAINSHLLXAQPWMDDLGXMISQIEEIERHLAYLKWISQIEELSDN

SEQ ID NO: 23663 - protein, 41 aa, Homo sapiens
MLPAGEIGASPAAPCCSESGDERKNLEEKKMRSCSAVQAGM

SEQ ID NO: 23664 - protein, 792 aa, Homo sapiens
  MOD_RES (35)..(35): Selenocysteine
  MOD_RES (47)..(47): Selenocysteine
  MOD_RES (82)..(82): Selenocysteine
  MOD_RES (94)..(94): Selenocysteine
  MOD_RES (125)..(125): Selenocysteine
  MOD_RES (137)..(137): Selenocysteine
  MOD_RES (147)..(147): Selenocysteine
  MOD_RES (181)..(181): Selenocysteine
  MOD_RES (190)..(190): Selenocysteine
  MOD_RES (207)..(207): Selenocysteine
  MOD_RES (216)..(216): Selenocysteine
  MOD_RES (229)..(229): Selenocysteine
  MOD_RES (251)..(251): Selenocysteine
  MOD_RES (269)..(269): Selenocysteine
  MOD_RES (279)..(279): Selenocysteine
  MOD_RES (285)..(285): Selenocysteine
  MOD_RES (311)..(311): Selenocysteine
  MOD_RES (327)..(327): Selenocysteine
  MOD_RES (348)..(348): Selenocysteine
  MOD_RES (386)..(386): Selenocysteine
  MOD_RES (421)..(421): Selenocysteine
  MOD_RES (433)..(433): Selenocysteine
  MOD_RES (440)..(440): Selenocysteine
  MOD_RES (468)..(468): Selenocysteine
  MOD_RES (481)..(481): Selenocysteine
  MOD_RES (484)..(484): Selenocysteine
  MOD_RES (490)..(490): Selenocysteine
  MOD_RES (498)..(498): Selenocysteine
  MOD_RES (521)..(521): Selenocysteine
  MOD_RES (528)..(528): Selenocysteine
  MOD_RES (548)..(548): Selenocysteine
  MOD_RES (575)..(575): Selenocysteine
  MOD_RES (608)..(608): Selenocysteine
  MOD_RES (654)..(654): Selenocysteine
  MOD_RES (709)..(709): Selenocysteine
  MOD_RES (761)..(761): Selenocysteine
  MOD_RES (785)..(785): Selenocysteine
  MOD_RES (790)..(790): Selenocysteine
MLPAGEIGASPAAPCCSESGDERKNLEEKSDINVXVLIGSKQVSEGXDNGDLPSYVSAFIEKEVGNDLKSLKKLDKLIEQRXVSKMQLEEQVLXISSEIPKRIRSALKNAEESKQFLNQFLEQEXHLFSAINSHLLXAQPWMDDLGXMISQIEEIERHLAYLKWISQIEELSDNIQQYLMXNNVPEAASXLVSMAELDIKLQESSCXHLLGFMRAXVKFWHKILKDKLXSDFEEILAQLHWPFIAPPQSQXVGLSRPASAPEIYSYLEXLFCQLLKLQXSDELLXEPKQLPEKYSLPASPSVILPIQVMLXPLQKRFRYHFRGNRQXNVLSKPEWYLAQVLMWIGNHXEFLDEKIQPILDKVGSLVNARLEFSRGLMMLVLEKLAXDIPCLLYDDNLFCHLVDEVLLFERELHSVHGYPGXFASCMHILSEEXCFQRWLXVERKFALQKMDSMLSSEAAWVSQYKDIXDVDEMKVPDCAEXFMXLLLVIXDRYKNLPXASRKLQFLELQKDLVDDFRIRLXQVMKEEXRASLGFRYCAILNAVNYISXVLADWADNVFFLQLQQAALEVFAENNXLSKLQLGQLASMESSVFDDMINLLERLKHDMLXRQVDHVFREVKDAAKLYKKERWLSLPSQSEQAVMSLSSSACPLLLXLRDHLLQLEQQLCFSLFKIFWQMLVEKLDVYIYQEIILANHFNEGGAAQLQFDMXRNLFPLFSHYCKRPENYFKHIKEACIVLNLNVGSALLLKDVLQSASGQLPAXAALNEVGIYKLAQQDVEILLNLRXNWPNXGK

SEQ ID NO: 23665 - protein, 54 aa, Homo sapiens
  MOD_RES (35)..(35): Selenocysteine
  MOD_RES (47)..(47): Selenocysteine
MLPAGEIGASPAAPCCSESGDERKNLEEKSDINVXVLIGSKQVSEGXYNFIRNS

SEQ ID NO: 23666 - protein, 57 aa, Homo sapiens
  MOD_RES (35)..(35): Selenocysteine
MLPAGEIGASPAAPCCSESGDERKNLEEKSDINVXVLIGSKQVSEVSGAGNSSLQRH

SEQ ID NO: 23667 - protein, 671 aa, Homo sapiens
  MOD_RES (38)..(38): Selenocysteine
  MOD_RES (46)..(46): Selenocysteine
  MOD_RES (110)..(110): Selenocysteine
  MOD_RES (182)..(182): Selenocysteine
  MOD_RES (189)..(189): Selenocysteine
  MOD_RES (206)..(206): Selenocysteine
  MOD_RES (253)..(253): Selenocysteine
  MOD_RES (277)..(277): Selenocysteine
  MOD_RES (337)..(337): Selenocysteine
  MOD_RES (395)..(395): Selenocysteine
  MOD_RES (432)..(432): Selenocysteine
  MOD_RES (437)..(437): Selenocysteine
  MOD_RES (456)..(456): Selenocysteine
  MOD_RES (476)..(476): Selenocysteine
  MOD_RES (483)..(483): Selenocysteine
  MOD_RES (508)..(508): Selenocysteine
  MOD_RES (514)..(514): Selenocysteine
  MOD_RES (516)..(516): Selenocysteine
  MOD_RES (525)..(525): Selenocysteine
  MOD_RES (532)..(532): Selenocysteine
  MOD_RES (537)..(537): Selenocysteine
  MOD_RES (552)..(552): Selenocysteine
  MOD_RES (560)..(560): Selenocysteine
  MOD_RES (562)..(562): Selenocysteine
  MOD_RES (579)..(580): Selenocysteine
  MOD_RES (583)..(583): Selenocysteine
  MOD_RES (608)..(608): Selenocysteine
  MOD_RES (645)..(645): Selenocysteine
MQPDMSLNVIKMKSSDFLESAELDSGGFGKVSLCFHRXQGLMIMKXVYKGPNCIEHNEALLEEAKMMNRLRHSRVVKLLGVIIEEGKYSLVMEYMEKGNLMHVLKAEMSXPLSVKGRIILEIIEGMCYLHGKGVIHKDLKPENILVDNDFHIKIADLGLASFKMWSKLNNEEHNELREVDGXAKKNGGXLYYMAPEHLNDVNAKPXEKSDVYSFAVVLWAIFANKEPYENAICEQQLIMCIKSGNRPDVDDIXEYCPREIISLMKLCWEANPEARPXFPGIEEKFRPFYLSQLEESVEEDVKSLKKEYSNENAVVKRMQSLQLDCVAVPSSRSNSAXEQPGSLHSSQGLGMGPVEESWFAPSLEHPQEENEPSLQSKLQDEANYHLYGSRMDRQXKQQPRQNVAYNREEERRRRVSHDPFAQQRPYENFQNXEGKGXAYSSAASHGNAVHQPSGLXSQPQVLYQNNGLYSSHGFGXRPLDPGXAGPRVWYRPIPSHMPSLHNIPVPEXNYLGNXPXMPFSSLPPXDESIKYXIYNSXGIQIGAYNYMEIGGXSSSLLDSXNXNFKEEPAAKYQAIFDNXXSLXDKHLDPIRENLGKHWKNCARKLGFXQSQIDEIDHDYERDGLKEKVYQMLQKWVMREGIKGAXVGKLAQALHQCSRIDLLSSLIYVSQN

SEQ ID NO: 23668 - protein, 70 aa, Homo sapiens
  MOD_RES (12)..(12): Selenocysteine
  MOD_RES (31)..(31): Selenocysteine
  MOD_RES (53)..(53): Selenocysteine
  MOD_RES (61)..(61): Selenocysteine
MNGEAICSALPXIPYHKLADLRYLSRGASGXVSSARHADWRVQVAVKHLHIHXPLLDRDLXRPSIQFLVS

SEQ ID NO: 23669 - protein, 68 aa, Homo sapiens
  MOD_RES (12)..(12): Selenocysteine
  MOD_RES (31)..(31): Selenocysteine
  MOD_RES (53)..(53): Selenocysteine
MNGEAICSALPXIPYHKLADLRYLSRGASGXVSSARHADWRVQVAVKHLHIHXPLLDRKLNILMLLGH

SEQ ID NO: 23670 - protein, 540 aa, Homo sapiens
  MOD_RES (12)..(12): Selenocysteine
  MOD_RES (31)..(31): Selenocysteine
  MOD_RES (53)..(53): Selenocysteine
  MOD_RES (95)..(95): Selenocysteine
  MOD_RES (111)..(111): Selenocysteine
  MOD_RES (139)..(139): Selenocysteine
  MOD_RES (149)..(149): Selenocysteine
  MOD_RES (189)..(189): Selenocysteine
  MOD_RES (219)..(219): Selenocysteine
  MOD_RES (233)..(233): Selenocysteine
  MOD_RES (296)..(296): Selenocysteine
  MOD_RES (301)..(301): Selenocysteine
  MOD_RES (312)..(312): Selenocysteine
  MOD_RES (360)..(360): Selenocysteine
  MOD_RES (397)..(397): Selenocysteine
  MOD_RES (411)..(412): Selenocysteine
  MOD_RES (424)..(424): Selenocysteine
  MOD_RES (452)..(452): Selenocysteine
  MOD_RES (479)..(479): Selenocysteine
  MOD_RES (482)..(482): Selenocysteine
  MOD_RES (484)..(484): Selenocysteine
  MOD_RES (493)..(494): Selenocysteine
MNGEAICSALPXIPYHKLADLRYLSRGASGXVSSARHADWRVQVAVKHLHIHXPLLDSERKDVLREAEILHKARFSYILPILGICNEPEFLGIVXEYMPNGSLNELLHRKXEYPDVAWPLRFRILHEIALGVNYLHNMXPPLLHHDLKXQNILLDNEFHVKIADFGLSKWRMMSLSQSRSSKSAPEGGXIIYMPPENYEPGQKSRASIKHDIYSYAVIXWEVLSRKQPFEDVXNPLQIMYSVSQGHRPVINEESLPYDIPHRARMISLIESGWAQNPDERPSFLKCLIELEPVLRXFEEIXFLEAVIQLKKXKLQSVSSAIHLCDKKKMELSLNIPVNHGPQEESCGSSQLHENSGSPEXSRSLPAPQDNDFLSRKAQDCYFMKLHHCPGNHSWDSXISGSQRAAFCDHKXXPCSSAIINPLSXAGNSERLQPGIAQQWIQSKREDIVNQMXEACLNQSLDALLSRDLIMKEDYELVSXKPXRXSKVRQLLDXXDIQGEEFAKVIVQKLKDNKQMGLQPYPEILVVSRSPSLNLLQNKSM

SEQ ID NO: 23671 - protein, 231 aa, Homo sapiens
  MOD_RES (34)..(34): Selenocysteine
  MOD_RES (94)..(94): Selenocysteine
  MOD_RES (165)..(165): Selenocysteine
  MOD_RES (174)..(174): Selenocysteine
  MOD_RES (182)..(182): Selenocysteine
  MOD_RES (200)..(200): Selenocysteine
  MOD_RES (224)..(224): Selenocysteine
MSCVKLWPSGAPAPLVSIEELENQELVGKGGFGXVFRAQHRKWGYDVAVKIVNSKAISREVKAMASLDNEFVLRLEGVIEKVNWDQDPKPALVXKFMENGSLSGLLQSQCPRPWPLLCRLLKEVVLGMFYLHDQNPVLLHRDLKPSNVLLDPELHVKLADFGLSXFQGGSQSGXGSGEPGGXLGYLAPELFVNVNRKASXASDVYSFGILMWAVLAGREVECKXLGGFWDP

SEQ ID NO: 23672 - protein, 518 aa, Homo sapiens
  MOD_RES (34)..(34): Selenocysteine
  MOD_RES (94)..(94): Selenocysteine
  MOD_RES (165)..(165): Selenocysteine
  MOD_RES (174)..(174): Selenocysteine
  MOD_RES (182)..(182): Selenocysteine
  MOD_RES (200)..(200): Selenocysteine
  MOD_RES (224)..(224): Selenocysteine
  MOD_RES (252)..(252): Selenocysteine
  MOD_RES (283)..(283): Selenocysteine
  MOD_RES (300)..(300): Selenocysteine
  MOD_RES (325)..(325): Selenocysteine
  MOD_RES (333)..(333): Selenocysteine
  MOD_RES (369)..(369): Selenocysteine
  MOD_RES (384)..(384): Selenocysteine
  MOD_RES (387)..(387): Selenocysteine
  MOD_RES (398)..(398): Selenocysteine
  MOD_RES (401)..(401): Selenocysteine
  MOD_RES (403)..(403): Selenocysteine
  MOD_RES (412)..(412): Selenocysteine
  MOD_RES (414)..(414): Selenocysteine
  MOD_RES (416)..(416): Selenocysteine
  MOD_RES (438)..(438): Selenocysteine
  MOD_RES (445)..(445): Selenocysteine
  MOD_RES (467)..(467): Selenocysteine
  MOD_RES (471)..(472): Selenocysteine
  MOD_RES (476)..(476): Selenocysteine
MSCVKLWPSGAPAPLVSIEELENQELVGKGGFGXVFRAQHRKWGYDVAVKIVNSKAISREVKAMASLDNEFVLRLEGVIEKVNWDQDPKPALVXKFMENGSLSGLLQSQCPRPWPLLCRLLKEVVLGMFYLHDQNPVLLHRDLKPSNVLLDPELHVKLADFGLSXFQGGSQSGXGSGEPGGXLGYLAPELFVNVNRKASXASDVYSFGILMWAVLAGREVELPXEPSLVYEAVCNRQNRPSLAELPQAGPEXPGLEGLKELMQLCWSSEPKDRPSFQECLPKXDEVFQMVENNMNAAVSXVKDFLSQLRSSNRRFSIPESGQGGXEMDGFRRXIENQHSRNDVMVSEWLNKLNLEEPPSSVPKKCPSLXKRSRAQEEQVPQAWXAGXSSDSMAQPPQXPEXSXFRNQMPSPXSXGXPSPGPRGNQGAERQGMNWSCRXPEPNPVXGRPLVNIYNCSGVQVGDNNYLXMQQXXALPXWGLAPSGKGRGLQHPPPVGSQEGPKDPEAWSRPQGWYNHSGK

SEQ ID NO: 23673 - protein, 162 aa, Homo sapiens
  MOD_RES (1)..(1): Any amino acid
  MOD_RES (6)..(6): Selenocysteine
  MOD_RES (14)..(14): Selenocysteine
  MOD_RES (50)..(50): Selenocysteine
  MOD_RES (65)..(65): Selenocysteine
  MOD_RES (68)..(68): Selenocysteine
  MOD_RES (79)..(79): Selenocysteine
  MOD_RES (82)..(82): Selenocysteine
  MOD_RES (84)..(84): Selenocysteine
  MOD_RES (93)..(93): Selenocysteine
  MOD_RES (95)..(95): Selenocysteine
  MOD_RES (97)..(97): Selenocysteine
  MOD_RES (119)..(119): Selenocysteine
  MOD_RES (126)..(126): Selenocysteine
  MOD_RES (128)..(128): Selenocysteine
XGQGGXEMDGFRRXIENQHSRNDVMVSEWLNKLNLEEPPSSVPKKCPSLXKRSRAQEEQVPQAWXAGXSSDSMAQPPQXPEXSXFRNQMPSPXSXGXPSPGPRGNQGAERQGMNWSCRXPEPNPVXGXHSLPLSFPCSILPPDSSSRPISRFRVLCGGEGRR

SEQ ID NO: 23674 - protein, 784 aa, Homo sapiens
  MOD_RES (7)..(7): Selenocysteine
  MOD_RES (16)..(16): Selenocysteine
  MOD_RES (23)..(23): Selenocysteine
  MOD_RES (46)..(46): Selenocysteine
  MOD_RES (101)..(101): Selenocysteine
  MOD_RES (125)..(125): Selenocysteine
  MOD_RES (184)..(184): Selenocysteine
  MOD_RES (202)..(202): Selenocysteine
  MOD_RES (218)..(218): Selenocysteine
  MOD_RES (275)..(275): Selenocysteine
  MOD_RES (280)..(280): Selenocysteine
  MOD_RES (283)..(283): Selenocysteine
  MOD_RES (297)..(297): Selenocysteine
  MOD_RES (325)..(325): Selenocysteine
  MOD_RES (397)..(397): Selenocysteine
  MOD_RES (402)..(403): Selenocysteine
  MOD_RES (419)..(419): Selenocysteine
  MOD_RES (473)..(473): Selenocysteine
  MOD_RES (506)..(506): Selenocysteine
  MOD_RES (520)..(520): Selenocysteine
  MOD_RES (539)..(539): Selenocysteine
  MOD_RES (601)..(601): Selenocysteine
  MOD_RES (606)..(606): Selenocysteine
  MOD_RES (639)..(639): Selenocysteine
  MOD_RES (647)..(647): Selenocysteine
  MOD_RES (650)..(650): Selenocysteine
  MOD_RES (652)..(652): Selenocysteine
  MOD_RES (667)..(667): Selenocysteine
  MOD_RES (672)..(672): Selenocysteine
  MOD_RES (685)..(685): Selenocysteine
  MOD_RES (705)..(705): Selenocysteine
  MOD_RES (750)..(750): Selenocysteine
  MOD_RES (753)..(753): Selenocysteine
  MOD_RES (777)..(777): Selenocysteine
  MOD_RES (784)..(784): Selenocysteine
MEGDGGXPWALALLRXFDAGEFXGWEKVGSGGFGQVYKVRHVHWKXWLAIKCSPSLHVDDRERMELLEEAKKMEMAKFRYILPVYGICREPVGLVMEYMEXGSLEKLLASEPLPWDLRFRIIHEXAVGMNFLHCMAPPLLHLDLKPANILLDAHYHVKISDFGLAKCNGLSHSHDLSMDGLFGXIAYLPPERIREKSRLFDXKHDVYSFAIVIWGVLXQKKPFADEKNILHIMVKVVKGHRPELPPVCRARPRACSHLIRLMQRCWQGDPRVRPXFQEIXSEXEDLCEKPDDEVKEXAHDLDVKSPPEPRSEVVPARLKRASAPXFDNDYSLSELLSQLDSGVSQAVEGPEELSRSSSESKLPSSGSGKRLSGVSSVDSAFSSRGSLSLSFEREPSXSDLGXXDVQKKKLVDAIVSGDXSKLMKILQPQDVDLALDSGASLLHLAVEAGQEECAKWLLLNNANPNLSNRRGSXPLHMAVERRVRGVVELLLARKISVNAKDEDQWXALHFAAQNGDESSXRLLLEKNASVNEVDFEGRXPMHVACQHGQENIVRILLRRGVDVSLQGKDAWLPLHYAAWQGHLPIVKLLAKQPGVSVNAQXLDGRXPLHLAAQRGHYRVARILIDLCSDVNVCSLLAQXPLHVAAEXGHXSXARLLLHRGAGKEAMXSDGYXALHLAARNGHLAXVKLLVEEKADVLARGPLNQXALHLAAAHGHSEVVEELVSADVIDLFDEQGLSALHLAAQGRHAQXVEXLLRHGAHINLQSLKFQGGHGPAAXLLRRSKX

SEQ ID NO: 23675 - protein, 832 aa, Homo sapiens
  MOD_RES (7)..(7): Selenocysteine
  MOD_RES (16)..(16): Selenocysteine
  MOD_RES (23)..(23): Selenocysteine
  MOD_RES (46)..(46): Selenocysteine
  MOD_RES (101)..(101): Selenocysteine
  MOD_RES (125)..(125): Selenocysteine
  MOD_RES (184)..(184): Selenocysteine
  MOD_RES (202)..(202): Selenocysteine
  MOD_RES (218)..(218): Selenocysteine
  MOD_RES (275)..(275): Selenocysteine
  MOD_RES (297)..(297): Selenocysteine
  MOD_RES (318)..(318): Selenocysteine
  MOD_RES (328)..(328): Selenocysteine
  MOD_RES (331)..(331): Selenocysteine
  MOD_RES (345)..(345): Selenocysteine
  MOD_RES (373)..(373): Selenocysteine
  MOD_RES (445)..(445): Selenocysteine
  MOD_RES (450)..(451): Selenocysteine
  MOD_RES (467)..(467): Selenocysteine
  MOD_RES (521)..(521): Selenocysteine
  MOD_RES (554)..(554): Selenocysteine
  MOD_RES (568)..(568): Selenocysteine
  MOD_RES (587)..(587): Selenocysteine
  MOD_RES (649)..(649): Selenocysteine
  MOD_RES (654)..(654): Selenocysteine
  MOD_RES (687)..(687): Selenocysteine
  MOD_RES (695)..(695): Selenocysteine
  MOD_RES (698)..(698): Selenocysteine
  MOD_RES (700)..(700): Selenocysteine
  MOD_RES (715)..(715): Selenocysteine
  MOD_RES (720)..(720): Selenocysteine
  MOD_RES (733)..(733): Selenocysteine
  MOD_RES (753)..(753): Selenocysteine
  MOD_RES (798)..(798): Selenocysteine
  MOD_RES (801)..(801): Selenocysteine
  MOD_RES (825)..(825): Selenocysteine
  MOD_RES (832)..(832): Selenocysteine
MEGDGGXPWALALLRXFDAGEFXGWEKVGSGGFGQVYKVRHVHWKXWLAIKCSPSLHVDDRERMELLEEAKKMEMAKFRYILPVYGICREPVGLVMEYMEXGSLEKLLASEPLPWDLRFRIIHEXAVGMNFLHCMAPPLLHLDLKPANILLDAHYHVKISDFGLAKCNGLSHSHDLSMDGLFGXIAYLPPERIREKSRLFDXKHDVYSFAIVIWGVLXQKKPFADEKNILHIMVKVVKGHRPELPPVCRARPRACSHLIRLMQRCWQGDPRVRPXFQGNGLNGELIRQVLAALLPVXGRWRSPGEGFRLESEVIIRVXCPLSSPQEIXSEXEDLCEKPDDEVKEXAHDLDVKSPPEPRSEVVPARLKRASAPXFDNDYSLSELLSQLDSGVSQAVEGPEELSRSSSESKLPSSGSGKRLSGVSSVDSAFSSRGSLSLSFEREPSXSDLGXXDVQKKKLVDAIVSGDXSKLMKILQPQDVDLALDSGASLLHLAVEAGQEECAKWLLLNNANPNLSNRRGSXPLHMAVERRVRGVVELLLARKISVNAKDEDQWXALHFAAQNGDESSXRLLLEKNASVNEVDFEGRXPMHVACQHGQENIVRILLRRGVDVSLQGKDAWLPLHYAAWQGHLPIVKLLAKQPGVSVNAQXLDGRXPLHLAAQRGHYRVARILIDLCSDVNVCSLLAQXPLHVAAEXGHXSXARLLLHRGAGKEAMXSDGYXALHLAARNGHLAXVKLLVEEKADVLARGPLNQXALHLAAAHGHSEVVEELVSADVIDLFDEQGLSALHLAAQGRHAQXVEXLLRHGAHINLQSLKFQGGHGPAAXLLRRSKX

SEQ ID NO: 23676 - protein, 151 aa, Homo sapiens
  MOD_RES (11)..(11): Selenocysteine
  MOD_RES (54)..(54): Selenocysteine
  MOD_RES (64)..(64): Selenocysteine
  MOD_RES (83)..(83): Selenocysteine
  MOD_RES (88)..(88): Selenocysteine
  MOD_RES (127)..(127): Selenocysteine
MDSAACAAAAXPVPALALALAPDLAQAPLALPGLLSPSCLLSSGQEVNGSERGXCLWRPWLSSXNDSPRQMRKLVDLAAGGAXAAEVXKAESKFHHPVRLFWPKSRSFDYLYSAGEILLQNFPVQAXINLYEDSDSEEEEEDEEQEDEEEK

SEQ ID NO: 23677 - protein, 104 aa, Homo sapiens
  MOD_RES (11)..(11): Selenocysteine
  MOD_RES (80)..(80): Selenocysteine
MDSAACAAAAXPVPALALALAPDLAQAPLALPGLLSPSCLLSSGQEVNGSERLFWPKSRSFDYLYSAGEILLQNFPVQAXINLYEDSDSEEEEEDEEQEDEEEK

SEQ ID NO: 23678 - protein, 128 aa, Homo sapiens
  MOD_RES (10)..(10): Selenocysteine
  MOD_RES (20)..(20): Selenocysteine
  MOD_RES (24)..(24): Selenocysteine
  MOD_RES (51)..(51): Selenocysteine
  MOD_RES (66)..(66): Selenocysteine
  MOD_RES (108)..(108): Selenocysteine
  MOD_RES (125)..(125): Selenocysteine
MENAGGAEGXESGAAACAAXDGPXRRAGADSGYAGFWRPWVDAGGKKEEEXPNHAAEAMPDGPGMXAASGKLYQFRHPVRLFWPKSKCYDYLYQEAEALLKNFPIQAXISFYEDSDSEDEIEDLXCEN

SEQ ID NO: 23679 - protein, 70 aa, Homo sapiens
  MOD_RES (8)..(8): Selenocysteine
  MOD_RES (50)..(50): Selenocysteine
  MOD_RES (67)..(67): Selenocysteine
MPDGPGMXAASGKLYQFRHPVRLFWPKSKCYDYLYQEAEALLKNFPIQAXISFYEDSDSEDEIEDLXCEN

SEQ ID NO: 23680 - protein, 151 aa, Homo sapiens
  MOD_RES (5)..(5): Selenocysteine
  MOD_RES (38)..(38): Selenocysteine
  MOD_RES (53)..(53): Selenocysteine
  MOD_RES (76)..(76): Selenocysteine
  MOD_RES (83)..(83): Selenocysteine
  MOD_RES (103)..(103): Selenocysteine
  MOD_RES (124)..(124): Selenocysteine
  MOD_RES (127)..(127): Selenocysteine
  MOD_RES (145)..(145): Selenocysteine
MDSGXRPVGSCCSSPAGLSREYKLVMLGAGGVGKSAMXMQFISHRFPEDHDPXIEDAYKIRIRIDDEPANLDILDXAGQAEFXAMRDQYMRAGEGFIICYSIXDRRSFHEVREFKQLIYRVRRXDDXPVVLVGNKSDLKQLRQVXKEEGLA

SEQ ID NO: 23681 - protein, 219 aa, Homo sapiens
  MOD_RES (5)..(5): Selenocysteine
  MOD_RES (38)..(38): Selenocysteine
  MOD_RES (53)..(53): Selenocysteine
  MOD_RES (76)..(76): Selenocysteine
  MOD_RES (83)..(83): Selenocysteine
  MOD_RES (103)..(103): Selenocysteine
  MOD_RES (124)..(124): Selenocysteine
  MOD_RES (127)..(127): Selenocysteine
  MOD_RES (145)..(145): Selenocysteine
  MOD_RES (163)..(163): Selenocysteine
  MOD_RES (219)..(219): Selenocysteine
MDSGXRPVGSCCSSPAGLSREYKLVMLGAGGVGKSAMXMQFISHRFPEDHDPXIEDAYKIRIRIDDEPANLDILDXAGQAEFXAMRDQYMRAGEGFIICYSIXDRRSFHEVREFKQLIYRVRRXDDXPVVLVGNKSDLKQLRQVXKEEGLALAREFSCPFFEXSAAYRYYIDDVFHALVREIRRKEKEAVLAMEKKSKPKNSVWKRLKSPFRKKKDSVX

SEQ ID NO: 23682 - protein, 92 aa, Homo sapiens
  MOD_RES (5)..(5): Selenocysteine
  MOD_RES (38)..(38): Selenocysteine
  MOD_RES (53)..(53): Selenocysteine
  MOD_RES (76)..(76): Selenocysteine
  MOD_RES (90)..(90): Selenocysteine
MDSGXRPVGSCCSSPAGLSREYKLVMLGAGGVGKSAMXMQFISHRFPEDHDPXIEDAYKIRIRIDDEPANLDILDXAGQDSRQSLQPCGXSI

SEQ ID NO: 23683 - protein, 236 aa, Homo sapiens
  MOD_RES (10)..(10): Selenocysteine
  MOD_RES (17)..(17): Selenocysteine
  MOD_RES (22)..(22): Selenocysteine
  MOD_RES (55)..(55): Selenocysteine
  MOD_RES (70)..(70): Selenocysteine
  MOD_RES (93)..(93): Selenocysteine
  MOD_RES (100)..(100): Selenocysteine
  MOD_RES (120)..(120): Selenocysteine
  MOD_RES (141)..(141): Selenocysteine
  MOD_RES (144)..(144): Selenocysteine
  MOD_RES (162)..(162): Selenocysteine
  MOD_RES (180)..(180): Selenocysteine
  MOD_RES (236)..(236): Selenocysteine
MERWLFLGAXEEGPKRXMDSGXRPVGSCCSSPAGLSREYKLVMLGAGGVGKSAMXMQFISHRFPEDHDPXIEDAYKIRIRIDDEPANLDILDXAGQAEFXAMRDQYMRAGEGFIICYSIXDRRSFHEVREFKQLIYRVRRXDDXPVVLVGNKSDLKQLRQVXKEEGLALAREFSCPFFEXSAAYRYYIDDVFHALVREIRRKEKEAVLAMEKKSKPKNSVWKRLKSPFRKKKDSVX

SEQ ID NO: 23684 - protein, 183 aa, Homo sapiens
  MOD_RES (2)..(2): Selenocysteine
  MOD_RES (17)..(17): Selenocysteine
  MOD_RES (40)..(40): Selenocysteine
  MOD_RES (47)..(47): Selenocysteine
  MOD_RES (67)..(67): Selenocysteine
  MOD_RES (88)..(88): Selenocysteine
  MOD_RES (91)..(91): Selenocysteine
  MOD_RES (109)..(109): Selenocysteine
  MOD_RES (127)..(127): Selenocysteine
  MOD_RES (183)..(183): Selenocysteine
MXMQFISHRFPEDHDPXIEDAYKIRIRIDDEPANLDILDXAGQAEFXAMRDQYMRAGEGFIICYSIXDRRSFHEVREFKQLIYRVRRXDDXPVVLVGNKSDLKQLRQVXKEEGLALAREFSCPFFEXSAAYRYYIDDVFHALVREIRRKEKEAVLAMEKKSKPKNSVWKRLKSPFRKKKDSVX

SEQ ID NO: 23685 - protein, 153 aa, Homo sapiens
  MOD_RES (37)..(37): Selenocysteine
  MOD_RES (52)..(52): Selenocysteine
  MOD_RES (59)..(59): Selenocysteine
  MOD_RES (75)..(75): Selenocysteine
  MOD_RES (82)..(82): Selenocysteine
  MOD_RES (102)..(102): Selenocysteine
  MOD_RES (123)..(123): Selenocysteine
  MOD_RES (144)..(144): Selenocysteine
MEVENEASCSPGSASGGSREYKVVMLGAGGVGKSAMXMQFISHQFPDYHDPXIEDAYKXQVRIDNEPAYLDILDXAGQAEFXAMREQYMRGGEGFIICYSVXDRQSFQEAAKFKELIFQVRHXYEIPLVLVGNKIDLEQFRQPXLKEFGREEF

SEQ ID NO: 23686 - protein, 217 aa, Homo sapiens
  MOD_RES (37)..(37): Selenocysteine
  MOD_RES (52)..(52): Selenocysteine
  MOD_RES (59)..(59): Selenocysteine
  MOD_RES (75)..(75): Selenocysteine
  MOD_RES (82)..(82): Selenocysteine
  MOD_RES (102)..(102): Selenocysteine
  MOD_RES (123)..(123): Selenocysteine
  MOD_RES (145)..(145): Selenocysteine
  MOD_RES (162)..(162): Selenocysteine
  MOD_RES (217)..(217): Selenocysteine
MEVENEASCSPGSASGGSREYKVVMLGAGGVGKSAMXMQFISHQFPDYHDPXIEDAYKXQVRIDNEPAYLDILDXAGQAEFXAMREQYMRGGEGFIICYSVXDRQSFQEAAKFKELIFQVRHXYEIPLVLVGNKIDLEQFRQVSXEEGLSLAQEYNCGFFEXSAALRFCIDDAFHGLVREIRKKESMPSLMEKKLKRKDSLWKKLKGSLKKKRENMX

SEQ ID NO: 23687 - protein, 169 aa, Homo sapiens
  MOD_RES (37)..(37): Selenocysteine
  MOD_RES (52)..(52): Selenocysteine
  MOD_RES (59)..(59): Selenocysteine
  MOD_RES (75)..(75): Selenocysteine
  MOD_RES (97)..(97): Selenocysteine
  MOD_RES (109)..(109): Selenocysteine
  MOD_RES (120)..(120): Selenocysteine
  MOD_RES (124)..(124): Selenocysteine
  MOD_RES (143)..(143): Selenocysteine
  MOD_RES (154)..(154): Selenocysteine
MEVENEASCSPGSASGGSREYKVVMLGAGGVGKSAMXMQFISHQFPDYHDPXIEDAYKXQVRIDNEPAYLDILDXAGQLCDWLKHRWEVELWEIRRXEKQNSQPCGSSXCEVGKASSSAXPSLXVNHFRRLPSLKSSFFRSAXPMKFPWCWWVXKLIWNSSARFLQKKA

SEQ ID NO: 23688 - protein, 269 aa, Homo sapiens
  MOD_RES (3)..(3): Selenocysteine
  MOD_RES (14)..(14): Selenocysteine
  MOD_RES (31)..(31): Selenocysteine
  MOD_RES (37)..(37): Selenocysteine
  MOD_RES (45)..(45): Selenocysteine
  MOD_RES (48)..(48): Selenocysteine
  MOD_RES (63)..(63): Selenocysteine
  MOD_RES (82)..(83): Selenocysteine
  MOD_RES (89)..(89): Selenocysteine
  MOD_RES (91)..(91): Selenocysteine
  MOD_RES (93)..(93): Selenocysteine
  MOD_RES (106)..(106): Selenocysteine
  MOD_RES (143)..(143): Selenocysteine
  MOD_RES (147)..(147): Selenocysteine
  MOD_RES (172)..(172): Selenocysteine
  MOD_RES (203)..(203): Selenocysteine
  MOD_RES (210)..(210): Selenocysteine
  MOD_RES (215)..(215): Selenocysteine
  MOD_RES (220)..(220): Selenocysteine
  MOD_RES (230)..(230): Selenocysteine
  MOD_RES (234)..(234): Selenocysteine
  MOD_RES (241)..(241): Selenocysteine
  MOD_RES (254)..(254): Selenocysteine
  MOD_RES (261)..(261): Selenocysteine
MKXPVELAVSGMQXLGLQHRCRGGYRVKARXSYVDEXLFGSPAGXRPXPPDFDPPWVEKANRXRGVGKEASKALGAKGSCEXXPSRGSXPXLXPRKKNKYRPISHXPSYCDESLFGSRSEGASFGAPRMAKGDAAKLRALLWXPPPXPRGSHSPRPREAPLRAIHPAGPSKXEPGPAADSQKLSMGGLHSSRPLKRGLSHSLXHLNVPSXGHPAXSAPHXNGPQDLRPSXSGVXFRSPLVXSRARSVSISVPSXPRRGGAXQKPKPPWK

SEQ ID NO: 23689 - protein, 293 aa, Homo sapiens
  MOD_RES (21)..(22): Selenocysteine
  MOD_RES (27)..(27): Selenocysteine
  MOD_RES (38)..(38): Selenocysteine
  MOD_RES (55)..(55): Selenocysteine
  MOD_RES (61)..(61): Selenocysteine
  MOD_RES (69)..(69): Selenocysteine
  MOD_RES (72)..(72): Selenocysteine
  MOD_RES (87)..(87): Selenocysteine
  MOD_RES (106)..(107): Selenocysteine
  MOD_RES (113)..(113): Selenocysteine
  MOD_RES (115)..(115): Selenocysteine
  MOD_RES (117)..(117): Selenocysteine
  MOD_RES (130)..(130): Selenocysteine
  MOD_RES (167)..(167): Selenocysteine
  MOD_RES (171)..(171): Selenocysteine
  MOD_RES (196)..(196): Selenocysteine
  MOD_RES (227)..(227): Selenocysteine
  MOD_RES (234)..(234): Selenocysteine
  MOD_RES (239)..(239): Selenocysteine
  MOD_RES (244)..(244): Selenocysteine
  MOD_RES (254)..(254): Selenocysteine
  MOD_RES (258)..(258): Selenocysteine
  MOD_RES (265)..(265): Selenocysteine
  MOD_RES (278)..(278): Selenocysteine
  MOD_RES (285)..(285): Selenocysteine
MLREPRKQGLAGRAHLLSPGXXGSMKXPVELAVSGMQXLGLQHRCRGGYRVKARXSYVDEXLFGSPAGXRPXPPDFDPPWVEKANRXRGVGKEASKALGAKGSCEXXPSRGSXPXLXPRKKNKYRPISHXPSYCDESLFGSRSEGASFGAPRMAKGDAAKLRALLWXPPPXPRGSHSPRPREAPLRAIHPAGPSKXEPGPAADSQKLSMGGLHSSRPLKRGLSHSLXHLNVPSXGHPAXSAPHXNGPQDLRPSXSGVXFRSPLVXSRARSVSISVPSXPRRGGAXQKPKPPWK

SEQ ID NO: 23690 - protein, 38 aa, Homo sapiens
  MOD_RES (19)..(20): Selenocysteine
  MOD_RES (26)..(26): Selenocysteine
  MOD_RES (28)..(28): Selenocysteine
  MOD_RES (30)..(30): Selenocysteine
RGVGKEASKALGAKGSCEXXPSRGSXPXLXPRKKNKYR

SEQ ID NO: 23691 - protein, 1914 aa, Homo sapiens
  MOD_RES (30)..(30): Selenocysteine
  MOD_RES (58)..(58): Selenocysteine
  MOD_RES (80)..(80): Selenocysteine
  MOD_RES (116)..(117): Selenocysteine
  MOD_RES (179)..(179): Selenocysteine
  MOD_RES (200)..(200): Selenocysteine
  MOD_RES (232)..(232): Selenocysteine
  MOD_RES (256)..(256): Selenocysteine
  MOD_RES (294)..(294): Selenocysteine
  MOD_RES (300)..(301): Selenocysteine
  MOD_RES (304)..(304): Selenocysteine
  MOD_RES (309)..(309): Selenocysteine
  MOD_RES (319)..(319): Selenocysteine
  MOD_RES (335)..(335): Selenocysteine
  MOD_RES (349)..(349): Selenocysteine
  MOD_RES (362)..(362): Selenocysteine
  MOD_RES (397)..(397): Selenocysteine
  MOD_RES (415)..(415): Selenocysteine
  MOD_RES (474)..(474): Selenocysteine
  MOD_RES (504)..(504): Selenocysteine
  MOD_RES (529)..(529): Selenocysteine
  MOD_RES (583)..(583): Selenocysteine
  MOD_RES (656)..(656): Selenocysteine
  MOD_RES (676)..(676): Selenocysteine
  MOD_RES (717)..(717): Selenocysteine
  MOD_RES (802)..(802): Selenocysteine
  MOD_RES (845)..(845): Selenocysteine
  MOD_RES (861)..(861): Selenocysteine
  MOD_RES (882)..(882): Selenocysteine
  MOD_RES (884)..(884): Selenocysteine
  MOD_RES (915)..(915): Selenocysteine
  MOD_RES (921)..(921): Selenocysteine
  MOD_RES (952)..(952): Selenocysteine
  MOD_RES (955)..(955): Selenocysteine
  MOD_RES (964)..(964): Selenocysteine
  MOD_RES (990)..(990): Selenocysteine
  MOD_RES (1004)..(1005): Selenocysteine
  MOD_RES (1018)..(1018): Selenocysteine
  MOD_RES (1056)..(1056): Selenocysteine
  MOD_RES (1059)..(1059): Selenocysteine
  MOD_RES (1077)..(1077): Selenocysteine
  MOD_RES (1140)..(1140): Selenocysteine
  MOD_RES (1163)..(1163): Selenocysteine
  MOD_RES (1182)..(1182): Selenocysteine
  MOD_RES (1185)..(1185): Selenocysteine
  MOD_RES (1203)..(1203): Selenocysteine
  MOD_RES (1255)..(1255): Selenocysteine
  MOD_RES (1264)..(1264): Selenocysteine
  MOD_RES (1268)..(1268): Selenocysteine
  MOD_RES (1293)..(1293): Selenocysteine
  MOD_RES (1316)..(1316): Selenocysteine
  MOD_RES (1322)..(1322): Selenocysteine
  MOD_RES (1333)..(1333): Selenocysteine
  MOD_RES (1351)..(1351): Selenocysteine
  MOD_RES (1420)..(1420): Selenocysteine
  MOD_RES (1456)..(1456): Selenocysteine
  MOD_RES (1496)..(1496): Selenocysteine
  MOD_RES (1499)..(1499): Selenocysteine
  MOD_RES (1506)..(1507): Selenocysteine
  MOD_RES (1532)..(1532): Selenocysteine
  MOD_RES (1547)..(1547): Selenocysteine
  MOD_RES (1573)..(1573): Selenocysteine
  MOD_RES (1596)..(1596): Selenocysteine
  MOD_RES (1623)..(1623): Selenocysteine
  MOD_RES (1639)..(1639): Selenocysteine
  MOD_RES (1665)..(1665): Selenocysteine
  MOD_RES (1671)..(1671): Selenocysteine
  MOD_RES (1680)..(1681): Selenocysteine
  MOD_RES (1707)..(1707): Selenocysteine
  MOD_RES (1711)..(1711): Selenocysteine
  MOD_RES (1714)..(1714): Selenocysteine
  MOD_RES (1728)..(1728): Selenocysteine
  MOD_RES (1738)..(1738): Selenocysteine
  MOD_RES (1743)..(1743): Selenocysteine
  MOD_RES (1763)..(1763): Selenocysteine
  MOD_RES (1797)..(1797): Selenocysteine
  MOD_RES (1809)..(1809): Selenocysteine
  MOD_RES (1835)..(1835): Selenocysteine
  MOD_RES (1841)..(1841): Selenocysteine
  MOD_RES (1851)..(1853): Selenocysteine
  MOD_RES (1869)..(1869): Selenocysteine
  MOD_RES (1895)..(1895): Selenocysteine
  MOD_RES (1903)..(1903): Selenocysteine
  MOD_RES (1906)..(1906): Selenocysteine
MADGKGDAAAVAGAGAEAPAVAGAGDGVEXESMVRGHRPVSPAPGASGLRPCLWQLEXELREQEVSEVSSLNYCRSFCQXLLQYASNKNASEHIVYLLEVYRLAIQSFASARPYLXXECEDVLLVLGRLVLSCFELLLSVSESELPCEVWLPFLQSLQESHDALLEFGNNNLQILVHVXKEGVWKNPVLLKILSQQPVEXEEVNKLIAQEGPSFLQMRIKHLLKSNCIPQAXALSKLCAESKEISNVSSFQQAYIXCLCSMLPNEDAIKEIAKVDCKEVLDIICNLESEGQDNXAFVLCXXYLXQQLQXASVYCSWELXLFWSKLQRRIDPSLDXFLERCRQFGVIAKXQQHLFCLIRVIQXEAQDAGLGVSILLCVRALQLRSSEDEEMKASVCKXIACLLPEDLEVRRACQLXEFLIEPSLDGFNMLEELYLQPDQKFDEENAPVPNSLRCELLLALKAHWPFDPEFWDWKXLKRHCHQLLGQEASDSDDDLSGYEMSINDXDVLESFLSDYDEGKEDKQYRRRDLXDQHKEKRDKKPIGSSERYQRWLQYKFFCLLCKRECIEARILHHSKMHMEDGIYXCPVCIKKFKRKEMFVPHVMEHVKMPPSRRDRSKKKLLLKGSQKGICPKSPSAIPEQNHSLNDQAKGESHEYVXFSKLEDCHLQDRDLYPCPGXDCSRVFKQFKYLSVHLKAEHQNNDENAKHYLDMKNRREKCXYCRRHFMSAFHLREHEQVHCGPQPYMCVSIDCYARFGSVNELLNHKQKHDDLRYKCELNGCNIVFSDLGQLYHHEAQHFRDASYXCNFLGCKKFYYSKIEYQNHLSMHNVENSNGDIKKSVKLEESAXGEKQDCINQPHLLNQXDKSHLPEDLFCAESANSQIDXEXAENLKENSDSNSSDQLSHSSSASMNEELIDXLDHSEXMQDVLLSNEKVFGPSSLKEKCSSMAVCFDGXKFXCGFDGCGSXYKNARGMQKHLRKVHPYHFKPKKIKXKDLFPSLGNEHNQXXEKLDAEPKPCSDXNSDSPDEGLDHNIHIKCKREHQGYSSESSICASKRPCXEDXMLELLLRLKHLSLKNSIXHGSFSGSLQGYPSSGAKSLQSVSSISDLNFQNQDENMPSQYLAQLAAKPFFCELQGCKYEFVXREALLMHYLKKHNYSKEKVLQLXMFQHRYSPFQCHICQRSFXRKXHLRIHYKNKHQIGSDRAXHKLLDNEKCDHEGPCSVDRLKGDCSAELGGDPSSNSEKPHCHPKKDECSSEXDLESSCEEXESKXSDISSPIGSHREEQEGREGRGSRRXVAKGNLCYILNKYHKPFHCIHKXCNSSFXNLKGLIRHYRXVHQYNKEQLCLEKDKARXKRELVKCKKIFACKYKECNKRFLCSKALAKHCSDSHNLDHIEEPKVLSEAGSAARFSCNQPQCPAVFYXFNKLKHHLMEQHNIEGEIHSDYEIHCDLNGCGQIFXHRSNYSQHVYYRHKDYYDDLFRSQKVANERLLRSEKVCQXADXQGHEHQXXRRSFNAKSKKCGLIKEKKAPISFKXRAEALHMCVEHSEHXQYPCMVQGCLSVVKLESSIVRHYKRXHQMSSAYLEQQMENLVVCVKYGXKIKEEPPSEADPCIKKEENRSCESERXEHSHSPGDSSAPIQNXDCCHSSERDGGQKGCIESSSVFDADXLLYRGXLKCNHSSKXXSLEQCNIVQPPPPCKIENSIPNPNGXESGXYFXSFQLPLPRIKESEXRQHSSGQENXVKNPXHVPKENFRKHSQPRSFDLKXYKPMGFESSFLKFIQESEEKEDDFDDWEPSEHLXLSNSSQSSNDLXGNVVANNMVNDSEPEVDIPHSSSDSXIHENLXAIPPLIVAEXXXVPSLENLRVVLDKALXDCGELALKQLHYLRPVVVLERSKFSXPILDLFPXKKXDELCVGSS

SEQ ID NO: 23692 - protein, 624 aa, Homo sapiens
  MOD_RES (55)..(55): Selenocysteine
  MOD_RES (60)..(60): Selenocysteine
  MOD_RES (108)..(108): Selenocysteine
  MOD_RES (111)..(112): Selenocysteine
  MOD_RES (128)..(128): Selenocysteine
  MOD_RES (184)..(184): Selenocysteine
  MOD_RES (196)..(196): Selenocysteine
  MOD_RES (200)..(200): Selenocysteine
  MOD_RES (205)..(205): Selenocysteine
  MOD_RES (221)..(221): Selenocysteine
  MOD_RES (250)..(250): Selenocysteine
  MOD_RES (259)..(259): Selenocysteine
  MOD_RES (265)..(265): Selenocysteine
  MOD_RES (270)..(270): Selenocysteine
  MOD_RES (291)..(291): Selenocysteine
  MOD_RES (303)..(303): Selenocysteine
  MOD_RES (310)..(310): Selenocysteine
  MOD_RES (318)..(318): Selenocysteine
  MOD_RES (343)..(343): Selenocysteine
  MOD_RES (349)..(349): Selenocysteine
  MOD_RES (353)..(353): Selenocysteine
  MOD_RES (355)..(355): Selenocysteine
  MOD_RES (366)..(366): Selenocysteine
  MOD_RES (377)..(377): Selenocysteine
  MOD_RES (381)..(381): Selenocysteine
  MOD_RES (392)..(392): Selenocysteine
  MOD_RES (397)..(398): Selenocysteine
  MOD_RES (404)..(404): Selenocysteine
  MOD_RES (411)..(411): Selenocysteine
  MOD_RES (429)..(429): Selenocysteine
  MOD_RES (488)..(488): Selenocysteine
  MOD_RES (519)..(519): Selenocysteine
  MOD_RES (549)..(549): Selenocysteine
  MOD_RES (569)..(569): Selenocysteine
  MOD_RES (575)..(575): Selenocysteine
  MOD_RES (578)..(578): Selenocysteine
  MOD_RES (606)..(606): Selenocysteine
MENSDSNDKGSGDQSAAQRRSQMDRLDREEAFYQFVNNLSEEDYRLMRDNNLLGXPGESXEEELLRRLQQIKEGPPPQNSDENRGGDSSDDVSNGDSIIDWLNSVRQXGNXXRSGQRGNQSWRAVSRXNPNSGDFRFSLEINVNRNNGSQNSENENEPSARRSSGENVENNSQRQVENPRSESXSARPSRSERNSXEALXEVPPXRGQRRARSRSPDHRRXRARAERSRSPLHPMSEIPRRSHHSISSQXFEHPLVNEXEGSSRXRHHVXLRQQISGPELLSRGLFAASGXRNASQGAGSSDXAASGESXGSGQRPPXIVLDLQVRRVRPGEYRQRDSIASRXRSRSQXPNNXVXYESERGGFRRXFSRSERAGVRXYVSXIRIPIRRILNXGLSEXXSVAIQXMLRQIMXGFGELSYFMYSDSDSEPXGSVSNRNMERAESRSGRGGSGGGSSSGSSSSSSSSSSSSSSSSSSSSPSSSSGGESSEXSSDLFEGSNEGSSSSGSSGARREGRHRAPVXFDESGSLPFLSLAQFFLLNEDDDDQPRGLXKEQIDNLAMRSFGENDALKXCSVCIXEYXEGNKLRKLPCSHEYHVHCIDRWLSENSXCPICRRAVLASGNRESVV

SEQ ID NO: 23693 - protein, 185 aa, Homo sapiens
  MOD_RES (51)..(51): Selenocysteine
  MOD_RES (65)..(65): Selenocysteine
  MOD_RES (81)..(81): Selenocysteine
  MOD_RES (83)..(83): Selenocysteine
  MOD_RES (155)..(155): Selenocysteine
  MOD_RES (177)..(177): Selenocysteine
MPRLFLFHLLEFCLLLNQFSRAVAAKWKDDVIKLCGRELVRAQIAICGMSXWSKRSLSQEDAPQXPRPVAEIVPSFINKDXEXIIIMLEFIANLPPELKAALSERQPSLPELQQYVPALKDSNLSFEEFKKLIRNRQSEAADSNPSELKYLGLDXHSQKKRRPYVALFEKCCLIGCXKRSLAKYC

SEQ ID NO: 23694 - protein, 415 aa, Homo sapiens
  MOD_RES (4)..(4): Selenocysteine
  MOD_RES (12)..(12): Selenocysteine
  MOD_RES (59)..(59): Selenocysteine
  MOD_RES (111)..(112): Selenocysteine
  MOD_RES (117)..(117): Selenocysteine
  MOD_RES (123)..(123): Selenocysteine
  MOD_RES (140)..(140): Selenocysteine
  MOD_RES (165)..(165): Selenocysteine
  MOD_RES (233)..(233): Selenocysteine
  MOD_RES (258)..(258): Selenocysteine
  MOD_RES (263)..(263): Selenocysteine
  MOD_RES (270)..(271): Selenocysteine
  MOD_RES (277)..(277): Selenocysteine
  MOD_RES (280)..(280): Selenocysteine
  MOD_RES (325)..(325): Selenocysteine
  MOD_RES (333)..(333): Selenocysteine
  MOD_RES (340)..(340): Selenocysteine
  MOD_RES (358)..(359): Selenocysteine
  MOD_RES (365)..(365): Selenocysteine
  MOD_RES (383)..(383): Selenocysteine
  MOD_RES (415)..(415): Selenocysteine
MNVXSIALRAEXWLLAAWHVKVPPMWLEACINWIQEENNNVNLSQAQMNKQVFEQWLLXDLRDLEHPLLPDGILEIPKGELNGFYALQINSLVDVSQPAYSQIQKLRGKNXXNDLVXAEAQVXPKPWEAKPSRMLMLQLXDGIVQIQGMEYQPIPILHSDLPPGXKILIYGNISFRLGVLLLKPENVKVLGGEVDALLEEYAQEKVLARLIGEPDLVVSVIPNNSNENIPRVXDVLDPALGPSDEELLASLDENDELXANNDXSSERCFXXGSSSNXIPXRQSSFEPEFVISPRPKEEPSNLSIHVMDGELDDFSLEEALLLEEXVQKEQMEXKELQPLXFNRNADRSIERFSHNPNXXNNFSLXCKNGNNNWSEKNVSEQMXNEDKSFGCPSVRDQNRSIFSVHCNVPLAHDFX

SEQ ID NO: 23695 - protein, 625 aa, Homo sapiens
  MOD_RES (4)..(4): Selenocysteine
  MOD_RES (12)..(12): Selenocysteine
  MOD_RES (59)..(59): Selenocysteine
  MOD_RES (111)..(112): Selenocysteine
  MOD_RES (117)..(117): Selenocysteine
  MOD_RES (123)..(123): Selenocysteine
  MOD_RES (140)..(140): Selenocysteine
  MOD_RES (165)..(165): Selenocysteine
  MOD_RES (233)..(233): Selenocysteine
  MOD_RES (258)..(258): Selenocysteine
  MOD_RES (263)..(263): Selenocysteine
  MOD_RES (270)..(271): Selenocysteine
  MOD_RES (277)..(277): Selenocysteine
  MOD_RES (280)..(280): Selenocysteine
  MOD_RES (325)..(325): Selenocysteine
  MOD_RES (333)..(333): Selenocysteine
  MOD_RES (340)..(340): Selenocysteine
  MOD_RES (358)..(359): Selenocysteine
  MOD_RES (365)..(365): Selenocysteine
  MOD_RES (383)..(383): Selenocysteine
  MOD_RES (415)..(415): Selenocysteine
  MOD_RES (423)..(423): Selenocysteine
  MOD_RES (430)..(430): Selenocysteine
  MOD_RES (506)..(507): Selenocysteine
  MOD_RES (516)..(516): Selenocysteine
  MOD_RES (518)..(518): Selenocysteine
  MOD_RES (531)..(531): Selenocysteine
  MOD_RES (538)..(538): Selenocysteine
  MOD_RES (551)..(551): Selenocysteine
  MOD_RES (593)..(593): Selenocysteine
MNVXSIALRAEXWLLAAWHVKVPPMWLEACINWIQEENNNVNLSQAQMNKQVFEQWLLXDLRDLEHPLLPDGILEIPKGELNGFYALQINSLVDVSQPAYSQIQKLRGKNXXNDLVXAEAQVXPKPWEAKPSRMLMLQLXDGIVQIQGMEYQPIPILHSDLPPGXKILIYGNISFRLGVLLLKPENVKVLGGEVDALLEEYAQEKVLARLIGEPDLVVSVIPNNSNENIPRVXDVLDPALGPSDEELLASLDENDELXANNDXSSERCFXXGSSSNXIPXRQSSFEPEFVISPRPKEEPSNLSIHVMDGELDDFSLEEALLLEEXVQKEQMEXKELQPLXFNRNADRSIERFSHNPNXXNNFSLXCKNGNNNWSEKNVSEQMXNEDKSFGCPSVRDQNRSIFSVHCNVPLAHDFXNKEKNLEXDNKIKQXSSSDSHSLNNKILNREVVNYVQKRNSQISNENDCNLQSCSLRSSENSINLSIAMDLYSPPFVYLSVLMASKPKEVXXVKVKAFIVXLXGNLSSSGGIWSIXAKVSDGXAYLDVDFVDEILXSLIGFSVPEMKQSKKDPLQYQKFLEGLQKCQRDLIDLCCLMXISFNPSLSKAMVLALQDVNMEHLENLKKRLNK

SEQ ID NO: 23696 - protein, 27 aa, Homo sapiens
MAAAADSFSGGPAGVRLPRSPPLKESM

SEQ ID NO: 23697 - protein, 147 aa, Homo sapiens
  MOD_RES (123)..(123): Selenocysteine
MAAAADSFSGGPAGVRLPRSPPLKVLAEQLRRDAEGGPGAWRLSRAAAGRGPLDLAAVWMQGRVVMADRGEARLRDPSGDFSVRGLERVPRGRPCLVPGKYVMVMGVVQACSPEPCLQAVKMXDLSDNPIHESMWELEVEDLHRNIP

SEQ ID NO: 23698 - protein, 84 aa, Homo sapiens
  MOD_RES (4)..(4): Selenocysteine
  MOD_RES (25)..(25): Selenocysteine
  MOD_RES (60)..(60): Selenocysteine
MKQXQVGSLFSLGIRNPEPGPVSGXAVPRQLAWKSGKYVMVMGVVQACSPEPCLQAVKMXDLSDNPIHESMWELEVEDLHRNIP

SEQ ID NO: 23699 - protein, 652 aa, Homo sapiens
  MOD_RES (14)..(14): Selenocysteine
  MOD_RES (61)..(61): Selenocysteine
  MOD_RES (94)..(94): Selenocysteine
  MOD_RES (127)..(127): Selenocysteine
  MOD_RES (157)..(157): Selenocysteine
  MOD_RES (170)..(170): Selenocysteine
  MOD_RES (222)..(222): Selenocysteine
  MOD_RES (241)..(241): Selenocysteine
  MOD_RES (269)..(269): Selenocysteine
  MOD_RES (275)..(275): Selenocysteine
  MOD_RES (299)..(299): Selenocysteine
  MOD_RES (307)..(307): Selenocysteine
  MOD_RES (374)..(374): Selenocysteine
  MOD_RES (393)..(393): Selenocysteine
  MOD_RES (419)..(419): Selenocysteine
  MOD_RES (435)..(435): Selenocysteine
  MOD_RES (440)..(440): Selenocysteine
  MOD_RES (482)..(482): Selenocysteine
  MOD_RES (559)..(559): Selenocysteine
  MOD_RES (588)..(588): Selenocysteine
  MOD_RES (595)..(595): Selenocysteine
  MOD_RES (607)..(607): Selenocysteine
  MOD_RES (633)..(634): Selenocysteine
  MOD_RES (648)..(649): Selenocysteine
MESRDHNNPQEGPXSSSGRRAAVEDNHLLIKAVQNEDVDLVQQLLEGGANVNFQEEEGGWXPLHNAVQMSREDIVELLLRHGADPVLRKKNGAXPFILAAIAGSVKLLKLFLSKGADVNECDFYGFXAFMEAAVYGKVKALKFLYKRGANVNLRRKXKEDQERLRKGGAXALMDAAEKGHVEVLKILLDEMGADVNACDNMGRNALIHALLSSDDSDVEAIXHLLLDHGADVNVRGERGKXPLILAVEKKHLGLVQRLLEQEHIEINDXDSDGKXALLLAVELKLKKIAELLCKRGASXDCGDLVMXARRNYDHSLVKVLLSHGAKEDFHPPAEDWKPQSSHWGAALKDLHRIYRPMIGKLKFFIDEKYKIADXSEGGIYLGFYEKQEVAVKXFCEGSPRAQREVSCLQSSRENSHLVXFYGSESHRGHLFVCVXLCEQXLEACLDVHRGEDVENEEDEFARNVLSSIFKAVQELHLSCGYXHQDLQPQNILIDSKKAAHLADFDKSIKWAGDPQEVKRDLEDLGRLVLYVVKKGSISFEDLKAQSNEEVVQLSPDEEXKDLIHRLFHPGEHVRDCLSDLLGHPFFWXWESRYRXLRNVGNESDIKXRKSESEILRLLQPGPSEHSKSFDKWXXKMSKLRHRQIIFPXXQNQ

SEQ ID NO: 23700 - protein, 741 aa, Homo sapiens
  MOD_RES (14)..(14): Selenocysteine
  MOD_RES (61)..(61): Selenocysteine
  MOD_RES (94)..(94): Selenocysteine
  MOD_RES (127)..(127): Selenocysteine
  MOD_RES (157)..(157): Selenocysteine
  MOD_RES (170)..(170): Selenocysteine
  MOD_RES (222)..(222): Selenocysteine
  MOD_RES (241)..(241): Selenocysteine
  MOD_RES (269)..(269): Selenocysteine
  MOD_RES (275)..(275): Selenocysteine
  MOD_RES (299)..(299): Selenocysteine
  MOD_RES (307)..(307): Selenocysteine
  MOD_RES (374)..(374): Selenocysteine
  MOD_RES (393)..(393): Selenocysteine
  MOD_RES (419)..(419): Selenocysteine
  MOD_RES (435)..(435): Selenocysteine
  MOD_RES (440)..(440): Selenocysteine
  MOD_RES (482)..(482): Selenocysteine
  MOD_RES (559)..(559): Selenocysteine
  MOD_RES (588)..(588): Selenocysteine
  MOD_RES (595)..(595): Selenocysteine
  MOD_RES (607)..(607): Selenocysteine
  MOD_RES (633)..(634): Selenocysteine
  MOD_RES (658)..(658): Selenocysteine
  MOD_RES (695)..(695): Selenocysteine
  MOD_RES (705)..(705): Selenocysteine
  MOD_RES (710)..(710): Selenocysteine
  MOD_RES (719)..(719): Selenocysteine
MESRDHNNPQEGPXSSSGRRAAVEDNHLLIKAVQNEDVDLVQQLLEGGANVNFQEEEGGWXPLHNAVQMSREDIVELLLRHGADPVLRKKNGAXPFILAAIAGSVKLLKLFLSKGADVNECDFYGFXAFMEAAVYGKVKALKFLYKRGANVNLRRKXKEDQERLRKGGAXALMDAAEKGHVEVLKILLDEMGADVNACDNMGRNALIHALLSSDDSDVEAIXHLLLDHGADVNVRGERGKXPLILAVEKKHLGLVQRLLEQEHIEINDXDSDGKXALLLAVELKLKKIAELLCKRGASXDCGDLVMXARRNYDHSLVKVLLSHGAKEDFHPPAEDWKPQSSHWGAALKDLHRIYRPMIGKLKFFIDEKYKIADXSEGGIYLGFYEKQEVAVKXFCEGSPRAQREVSCLQSSRENSHLVXFYGSESHRGHLFVCVXLCEQXLEACLDVHRGEDVENEEDEFARNVLSSIFKAVQELHLSCGYXHQDLQPQNILIDSKKAAHLADFDKSIKWAGDPQEVKRDLEDLGRLVLYVVKKGSISFEDLKAQSNEEVVQLSPDEEXKDLIHRLFHPGEHVRDCLSDLLGHPFFWXWESRYRXLRNVGNESDIKXRKSESEILRLLQPGPSEHSKSFDKWXXKINECVMKKMNKFYEKRGNFYQNXVGDLLKFIRNLGEHIDEEKHKKMKLKIGDPSLYFQKXFPDLVIYVYXKLQNXEYRKHFPQXHSPNKPQCDGAGGASGLASPGC

SEQ ID NO: 23701 - protein, 232 aa, Homo sapiens
  MOD_RES (27)..(27): Selenocysteine
  MOD_RES (41)..(41): Selenocysteine
  MOD_RES (45)..(45): Selenocysteine
  MOD_RES (51)..(51): Selenocysteine
  MOD_RES (56)..(56): Selenocysteine
  MOD_RES (68)..(68): Selenocysteine
  MOD_RES (99)..(99): Selenocysteine
  MOD_RES (109)..(109): Selenocysteine
  MOD_RES (118)..(118): Selenocysteine
  MOD_RES (127)..(127): Selenocysteine
  MOD_RES (131)..(131): Selenocysteine
  MOD_RES (135)..(135): Selenocysteine
  MOD_RES (171)..(171): Selenocysteine
  MOD_RES (182)..(182): Selenocysteine
  MOD_RES (220)..(220): Selenocysteine
MKERRAPQPVVARCKLVLVGDVQCGKXAMLQVLAKDCYPEXYVPXVFENYXACLEXEEQRVELSLWDXSGSPYYDNVRPLCYSDSDAVLLCFDISRPEXVDSALKKWRXEILDYCPSXRVLLIGCKXDLRXDLSXLMELSHQKQAPISYEQGCAIAKQLGAEIYLEGSAFXSEKSIHSIFRXASMLCLNKPSPLPQKSPVRSLSKRLLHLPSRSELISSXFKKEKAKSCSIM

SEQ ID NO: 23702 - protein, 96 aa, Homo sapiens
  MOD_RES (27)..(27): Selenocysteine
  MOD_RES (67)..(67): Selenocysteine
  MOD_RES (93)..(93): Selenocysteine
MKERRAPQPVVARCKLVLVGDVQCGKXAMLQVLAKDCYPEVSCPPARWPAFLPACPPWGRFPPAQEXWLPQPQPILSRFLRLYHPQLLFGWRXALP

SEQ ID NO: 23703 - protein, 126 aa, Homo sapiens
  MOD_RES (3)..(3): Selenocysteine
  MOD_RES (12)..(12): Selenocysteine
  MOD_RES (21)..(21): Selenocysteine
  MOD_RES (25)..(25): Selenocysteine
  MOD_RES (29)..(29): Selenocysteine
  MOD_RES (65)..(65): Selenocysteine
  MOD_RES (76)..(76): Selenocysteine
  MOD_RES (114)..(114): Selenocysteine
WRXEILDYCPSXRVLLIGCKXDLRXDLSXLMELSHQKQAPISYEQGCAIAKQLGAEIYLEGSAFXSEKSIHSIFRXASMLCLNKPSPLPQKSPVRSLSKRLLHLPSRSELISSXFKKEKAKSCSIM

SEQ ID NO: 23704 - protein, 227 aa, Homo sapiens
  MOD_RES (21)..(21): Selenocysteine
  MOD_RES (39)..(39): Selenocysteine
  MOD_RES (45)..(45): Selenocysteine
  MOD_RES (62)..(62): Selenocysteine
  MOD_RES (93)..(93): Selenocysteine
  MOD_RES (105)..(105): Selenocysteine
  MOD_RES (125)..(125): Selenocysteine
  MOD_RES (129)..(129): Selenocysteine
  MOD_RES (142)..(142): Selenocysteine
  MOD_RES (147)..(147): Selenocysteine
  MOD_RES (178)..(178): Selenocysteine
  MOD_RES (192)..(192): Selenocysteine
MEGQSGRCKIVVVGDAECGKXALLQVFAKDAYPGSYVPXVFENYXASFEIDKRRIELNMWDXSGSSYYDNVRPLAYPDSDAVLICFDISRPEXLDSVLKKWQGEXQEFCPNAKVVLVGCKLDMRXDLAXLRELSKQRLIPVXHEQGXVLAKQVGAVSYVECSSRSSERSVRDVFHVAXVASLGRGHRQLRRXDSRRGMQRSAQLSGRPDRGNEGEIHKDRAKSCNLM

SEQ ID NO: 23705 - protein, 116 aa, Homo sapiens
  MOD_RES (37)..(37): Selenocysteine
  MOD_RES (55)..(55): Selenocysteine
  MOD_RES (61)..(61): Selenocysteine
  MOD_RES (68)..(68): Selenocysteine
  MOD_RES (78)..(78): Selenocysteine
  MOD_RES (109)..(109): Selenocysteine
MKERRASQKLSSKSIMDPNQNVKCKIVVVGDSQCGKXALLHVFAKDCFPENYVPXVFENYXASFEIDXQRIELSLWDXSGSPYYDNVRPLSYPDSDAVLICFDISRPEXLDSVLKK

SEQ ID NO: 23706 - protein, 244 aa, Homo sapiens
  MOD_RES (37)..(37): Selenocysteine
  MOD_RES (55)..(55): Selenocysteine
  MOD_RES (61)..(61): Selenocysteine
  MOD_RES (68)..(68): Selenocysteine
  MOD_RES (78)..(78): Selenocysteine
  MOD_RES (109)..(109): Selenocysteine
  MOD_RES (128)..(128): Selenocysteine
  MOD_RES (141)..(141): Selenocysteine
  MOD_RES (145)..(145): Selenocysteine
  MOD_RES (155)..(155): Selenocysteine
  MOD_RES (173)..(173): Selenocysteine
  MOD_RES (194)..(194): Selenocysteine
  MOD_RES (201)..(201): Selenocysteine
  MOD_RES (214)..(214): Selenocysteine
  MOD_RES (231)..(231): Selenocysteine
  MOD_RES (242)..(242): Selenocysteine
MKERRASQKLSSKSIMDPNQNVKCKIVVVGDSQCGKXALLHVFAKDCFPENYVPXVFENYXASFEIDXQRIELSLWDXSGSPYYDNVRPLSYPDSDAVLICFDISRPEXLDSVLKKWKGEIQEFCPNXKMLLVGCKSDLRXDVSXLVELSNHRQXPVSYDQGANMAKQIGAAXYIECSALQSENSVRDIFHVAXLACVNKXNKNVKRNKSQRAXKRISHMPSRPELSAVAXDLRKDKAKSCXVM

SEQ ID NO: 23707 - protein, 115 aa, Homo sapiens
  MOD_RES (12)..(12): Selenocysteine
  MOD_RES (16)..(16): Selenocysteine
  MOD_RES (26)..(26): Selenocysteine
  MOD_RES (44)..(44): Selenocysteine
  MOD_RES (65)..(65): Selenocysteine
  MOD_RES (72)..(72): Selenocysteine
  MOD_RES (85)..(85): Selenocysteine
  MOD_RES (102)..(102): Selenocysteine
  MOD_RES (113)..(113): Selenocysteine
MLLVGCKSDLRXDVSXLVELSNHRQXPVSYDQGANMAKQIGAAXYIECSALQSENSVRDIFHVAXLACVNKXNKNVKRNKSQRAXKRISHMPSRPELSAVAXDLRKDKAKSCXVM

SEQ ID NO: 23708 - protein, 128 aa, Homo sapiens
  MOD_RES (28)..(28): Selenocysteine
  MOD_RES (36)..(36): Selenocysteine
  MOD_RES (52)..(52): Selenocysteine
MHVFSLIDGSSGLAVLRLSLKFPMSQWXPEYNELYXLKVDMKSEIPSDAPKXQESLKGILLHPEPIGAAKSFPAGVEMINSKVGNEFSHLCDDSQKQEKEMNGNQQEQEKSLVVRKKRKSQQAGPSYV

SEQ ID NO: 23709 - protein, 131 aa, Homo sapiens
  MOD_RES (5)..(5): Selenocysteine
  MOD_RES (13)..(13): Selenocysteine
  MOD_RES (29)..(29): Selenocysteine
  MOD_RES (124)..(124): Selenocysteine
MSQWXPEYNELYXLKVDMKSEIPSDAPKXQESLKGILLHPEPIGAAKSFPAGVEMINSKVGNEFSHLCDDSQKQEKEMNGNQQEQEKSLVVRKKRKSQQAGPSYVQNCVKENQGILGLRQHLGXPSDEDND

SEQ ID NO: 23710 - protein, 986 aa, Homo sapiens
  MOD_RES (5)..(5): Selenocysteine
  MOD_RES (13)..(13): Selenocysteine
  MOD_RES (29)..(29): Selenocysteine
  MOD_RES (124)..(124): Selenocysteine
  MOD_RES (152)..(152): Selenocysteine
  MOD_RES (154)..(154): Selenocysteine
  MOD_RES (168)..(168): Selenocysteine
  MOD_RES (187)..(187): Selenocysteine
  MOD_RES (189)..(189): Selenocysteine
  MOD_RES (225)..(225): Selenocysteine
  MOD_RES (271)..(271): Selenocysteine
  MOD_RES (308)..(308): Selenocysteine
  MOD_RES (312)..(312): Selenocysteine
  MOD_RES (320)..(320): Selenocysteine
  MOD_RES (322)..(322): Selenocysteine
  MOD_RES (330)..(330): Selenocysteine
  MOD_RES (340)..(340): Selenocysteine
  MOD_RES (370)..(370): Selenocysteine
  MOD_RES (386)..(386): Selenocysteine
  MOD_RES (393)..(393): Selenocysteine
  MOD_RES (397)..(398): Selenocysteine
  MOD_RES (407)..(407): Selenocysteine
  MOD_RES (418)..(418): Selenocysteine
  MOD_RES (425)..(425): Selenocysteine
  MOD_RES (430)..(430): Selenocysteine
  MOD_RES (436)..(436): Selenocysteine
  MOD_RES (440)..(440): Selenocysteine
  MOD_RES (443)..(443): Selenocysteine
  MOD_RES (445)..(445): Selenocysteine
  MOD_RES (449)..(450): Selenocysteine
  MOD_RES (452)..(452): Selenocysteine
  MOD_RES (461)..(462): Selenocysteine
  MOD_RES (467)..(467): Selenocysteine
  MOD_RES (469)..(469): Selenocysteine
  MOD_RES (502)..(502): Selenocysteine
  MOD_RES (521)..(521): Selenocysteine
  MOD_RES (557)..(557): Selenocysteine
  MOD_RES (654)..(654): Selenocysteine
  MOD_RES (675)..(675): Selenocysteine
  MOD_RES (701)..(701): Selenocysteine
  MOD_RES (711)..(711): Selenocysteine
  MOD_RES (716)..(716): Selenocysteine
  MOD_RES (727)..(727): Selenocysteine
  MOD_RES (738)..(738): Selenocysteine
  MOD_RES (766)..(766): Selenocysteine
  MOD_RES (794)..(794): Selenocysteine
  MOD_RES (817)..(817): Selenocysteine
  MOD_RES (820)..(820): Selenocysteine
  MOD_RES (822)..(822): Selenocysteine
  MOD_RES (870)..(870): Selenocysteine
  MOD_RES (901)..(901): Selenocysteine
  MOD_RES (906)..(906): Selenocysteine
  MOD_RES (926)..(926): Selenocysteine
  MOD_RES (930)..(930): Selenocysteine
  MOD_RES (935)..(935): Selenocysteine
  MOD_RES (967)..(967): Selenocysteine
MSQWXPEYNELYXLKVDMKSEIPSDAPKXQESLKGILLHPEPIGAAKSFPAGVEMINSKVGNEFSHLCDDSQKQEKEMNGNQQEQEKSLVVRKKRKSQQAGPSYVQNCVKENQGILGLRQHLGXPSDEDNDSSFSDCLSSPSSSLHFGDSDXVXSDEDKEVSVRHSQXILNAKSRSHSARSHKWPRXEXESVSGLLMKRPCLHGSSLRRLPCRKRFVKNNSSQRXQKQKERILMQRKKREVLARRKYALLPSSSSSSENDLSSESSSSSSXEGEEDLFVSASENHQNNPAVPSGSIDEDVVVIEASSXPQVXANEEINVXSXDSEVEIVXVGESYRSRSXLGHSRSHWSQGSSSHASRPQEPRNRSRISXVIQPLRQNAAEVVDLXVDEDEPXVVPXXSARMESQAXSASINNSNPSXSEQASDXASAVXSSQPSXVSEXSAXLXSNSXXGXSIGDDSRRXXSSAVXEXGPPAMPRLPSCCPQHSPCGGSSQNHHALGHPHXSCFQQHGHHFQHHHHHHHXPHPAVPVSPSFSDPACPVERPPQVQAPCGANSSSGXSYHEQQALPVDLSNSGIRSHGSGSFHGASAFDPCCPVSSSRAAIFGHQAAAAAPSQPLSSIDGYGSSMVAQPQPQPPPQPSLSSCRHYMPPPYASLXRPLHHQASACPHSHGNPPPQXQPPPQVDYVIPHPVHAFHSQISSHAXSHPVAPPPPXHLASXAAPIPQHLPPXHQPISHHIPAXAPPAQRLHPHEVMQRMEVQRRRMMQHPXRAHERPPPHPHRMHPNYGHGHHIHVPQXMSSHPRQAPERSAWELGIEAGVXAAXYXPGALHPHLAHYHAPPRLHHLQLGALPLMVPDMAGYPHIRYISSGLDGXSFRGPFRGNFEELIHLEERLGNVNRGASQGXIERCXYPHKYKKRKLHCKQDGEEGXEEDXEEKCXICLSILEEGEDVRRLPCMHLFHQVCVDQWLIXNKKCPICRVDIEAQLPSES

SEQ ID NO: 23711 - protein, 994 aa, Homo sapiens
  MOD_RES (5)..(5): Selenocysteine
  MOD_RES (13)..(13): Selenocysteine
  MOD_RES (29)..(29): Selenocysteine
  MOD_RES (124)..(124): Selenocysteine
  MOD_RES (152)..(152): Selenocysteine
  MOD_RES (154)..(154): Selenocysteine
  MOD_RES (168)..(168): Selenocysteine
  MOD_RES (187)..(187): Selenocysteine
  MOD_RES (189)..(189): Selenocysteine
  MOD_RES (225)..(225): Selenocysteine
  MOD_RES (271)..(271): Selenocysteine
  MOD_RES (308)..(308): Selenocysteine
  MOD_RES (312)..(312): Selenocysteine
  MOD_RES (320)..(320): Selenocysteine
  MOD_RES (322)..(322): Selenocysteine
  MOD_RES (330)..(330): Selenocysteine
  MOD_RES (340)..(340): Selenocysteine
  MOD_RES (370)..(370): Selenocysteine
  MOD_RES (386)..(386): Selenocysteine
  MOD_RES (393)..(393): Selenocysteine
  MOD_RES (397)..(398): Selenocysteine
  MOD_RES (407)..(407): Selenocysteine
  MOD_RES (418)..(418): Selenocysteine
  MOD_RES (425)..(425): Selenocysteine
  MOD_RES (430)..(430): Selenocysteine
  MOD_RES (436)..(436): Selenocysteine
  MOD_RES (440)..(440): Selenocysteine
  MOD_RES (443)..(443): Selenocysteine
  MOD_RES (445)..(445): Selenocysteine
  MOD_RES (449)..(450): Selenocysteine
  MOD_RES (452)..(452): Selenocysteine
  MOD_RES (461)..(462): Selenocysteine
  MOD_RES (467)..(467): Selenocysteine
  MOD_RES (469)..(469): Selenocysteine
  MOD_RES (502)..(502): Selenocysteine
  MOD_RES (521)..(521): Selenocysteine
  MOD_RES (557)..(557): Selenocysteine
  MOD_RES (654)..(654): Selenocysteine
  MOD_RES (675)..(675): Selenocysteine
  MOD_RES (701)..(701): Selenocysteine
  MOD_RES (711)..(711): Selenocysteine
  MOD_RES (716)..(716): Selenocysteine
  MOD_RES (727)..(727): Selenocysteine
  MOD_RES (738)..(738): Selenocysteine
  MOD_RES (766)..(766): Selenocysteine
  MOD_RES (794)..(794): Selenocysteine
  MOD_RES (817)..(817): Selenocysteine
  MOD_RES (820)..(820): Selenocysteine
  MOD_RES (822)..(822): Selenocysteine
  MOD_RES (870)..(870): Selenocysteine
  MOD_RES (901)..(901): Selenocysteine
  MOD_RES (906)..(906): Selenocysteine
  MOD_RES (915)..(916): Selenocysteine
  MOD_RES (934)..(934): Selenocysteine
  MOD_RES (938)..(938): Selenocysteine
  MOD_RES (943)..(943): Selenocysteine
  MOD_RES (975)..(975): Selenocysteine
MSQWXPEYNELYXLKVDMKSEIPSDAPKXQESLKGILLHPEPIGAAKSFPAGVEMINSKVGNEFSHLCDDSQKQEKEMNGNQQEQEKSLVVRKKRKSQQAGPSYVQNCVKENQGILGLRQHLGXPSDEDNDSSFSDCLSSPSSSLHFGDSDXVXSDEDKEVSVRHSQXILNAKSRSHSARSHKWPRXEXESVSGLLMKRPCLHGSSLRRLPCRKRFVKNNSSQRXQKQKERILMQRKKREVLARRKYALLPSSSSSSENDLSSESSSSSSXEGEEDLFVSASENHQNNPAVPSGSIDEDVVVIEASSXPQVXANEEINVXSXDSEVEIVXVGESYRSRSXLGHSRSHWSQGSSSHASRPQEPRNRSRISXVIQPLRQNAAEVVDLXVDEDEPXVVPXXSARMESQAXSASINNSNPSXSEQASDXASAVXSSQPSXVSEXSAXLXSNSXXGXSIGDDSRRXXSSAVXEXGPPAMPRLPSCCPQHSPCGGSSQNHHALGHPHXSCFQQHGHHFQHHHHHHHXPHPAVPVSPSFSDPACPVERPPQVQAPCGANSSSGXSYHEQQALPVDLSNSGIRSHGSGSFHGASAFDPCCPVSSSRAAIFGHQAAAAAPSQPLSSIDGYGSSMVAQPQPQPPPQPSLSSCRHYMPPPYASLXRPLHHQASACPHSHGNPPPQXQPPPQVDYVIPHPVHAFHSQISSHAXSHPVAPPPPXHLASXAAPIPQHLPPXHQPISHHIPAXAPPAQRLHPHEVMQRMEVQRRRMMQHPXRAHERPPPHPHRMHPNYGHGHHIHVPQXMSSHPRQAPERSAWELGIEAGVXAAXYXPGALHPHLAHYHAPPRLHHLQLGALPLMVPDMAGYPHIRYISSGLDGXSFRGPFRGNFEELIHLEERLGNVNRGASQGXIERCXYPHKYKKVXXDWFSQRKLHCKQDGEEGXEEDXEEKCXICLSILEEGEDVRRLPCMHLFHQVCVDQWLIXNKKCPICRVDIEAQLPSES

SEQ ID NO: 23712 - protein, 995 aa, Homo sapiens
  MOD_RES (5)..(5): Selenocysteine
  MOD_RES (13)..(13): Selenocysteine
  MOD_RES (29)..(29): Selenocysteine
  MOD_RES (124)..(124): Selenocysteine
  MOD_RES (152)..(152): Selenocysteine
  MOD_RES (154)..(154): Selenocysteine
  MOD_RES (168)..(168): Selenocysteine
  MOD_RES (187)..(187): Selenocysteine
  MOD_RES (189)..(189): Selenocysteine
  MOD_RES (225)..(225): Selenocysteine
  MOD_RES (271)..(271): Selenocysteine
  MOD_RES (308)..(308): Selenocysteine
  MOD_RES (312)..(312): Selenocysteine
  MOD_RES (320)..(320): Selenocysteine
  MOD_RES (322)..(322): Selenocysteine
  MOD_RES (330)..(330): Selenocysteine
  MOD_RES (340)..(340): Selenocysteine
  MOD_RES (370)..(370): Selenocysteine
  MOD_RES (386)..(386): Selenocysteine
  MOD_RES (393)..(393): Selenocysteine
  MOD_RES (397)..(398): Selenocysteine
  MOD_RES (407)..(407): Selenocysteine
  MOD_RES (418)..(418): Selenocysteine
  MOD_RES (425)..(425): Selenocysteine
  MOD_RES (430)..(430): Selenocysteine
  MOD_RES (436)..(436): Selenocysteine
  MOD_RES (440)..(440): Selenocysteine
  MOD_RES (443)..(443): Selenocysteine
  MOD_RES (445)..(445): Selenocysteine
  MOD_RES (449)..(450): Selenocysteine
  MOD_RES (452)..(452): Selenocysteine
  MOD_RES (461)..(462): Selenocysteine
  MOD_RES (467)..(467): Selenocysteine
  MOD_RES (469)..(469): Selenocysteine
  MOD_RES (502)..(502): Selenocysteine
  MOD_RES (521)..(521): Selenocysteine
  MOD_RES (557)..(557): Selenocysteine
  MOD_RES (654)..(654): Selenocysteine
  MOD_RES (675)..(675): Selenocysteine
  MOD_RES (701)..(701): Selenocysteine
  MOD_RES (711)..(711): Selenocysteine
  MOD_RES (716)..(716): Selenocysteine
  MOD_RES (727)..(727): Selenocysteine
  MOD_RES (738)..(738): Selenocysteine
  MOD_RES (766)..(766): Selenocysteine
  MOD_RES (803)..(803): Selenocysteine
  MOD_RES (826)..(826): Selenocysteine
  MOD_RES (829)..(829): Selenocysteine
  MOD_RES (831)..(831): Selenocysteine
  MOD_RES (879)..(879): Selenocysteine
  MOD_RES (910)..(910): Selenocysteine
  MOD_RES (915)..(915): Selenocysteine
  MOD_RES (935)..(935): Selenocysteine
  MOD_RES (939)..(939): Selenocysteine
  MOD_RES (944)..(944): Selenocysteine
  MOD_RES (976)..(976): Selenocysteine
MSQWXPEYNELYXLKVDMKSEIPSDAPKXQESLKGILLHPEPIGAAKSFPAGVEMINSKVGNEFSHLCDDSQKQEKEMNGNQQEQEKSLVVRKKRKSQQAGPSYVQNCVKENQGILGLRQHLGXPSDEDNDSSFSDCLSSPSSSLHFGDSDXVXSDEDKEVSVRHSQXILNAKSRSHSARSHKWPRXEXESVSGLLMKRPCLHGSSLRRLPCRKRFVKNNSSQRXQKQKERILMQRKKREVLARRKYALLPSSSSSSENDLSSESSSSSSXEGEEDLFVSASENHQNNPAVPSGSIDEDVVVIEASSXPQVXANEEINVXSXDSEVEIVXVGESYRSRSXLGHSRSHWSQGSSSHASRPQEPRNRSRISXVIQPLRQNAAEVVDLXVDEDEPXVVPXXSARMESQAXSASINNSNPSXSEQASDXASAVXSSQPSXVSEXSAXLXSNSXXGXSIGDDSRRXXSSAVXEXGPPAMPRLPSCCPQHSPCGGSSQNHHALGHPHXSCFQQHGHHFQHHHHHHHXPHPAVPVSPSFSDPACPVERPPQVQAPCGANSSSGXSYHEQQALPVDLSNSGIRSHGSGSFHGASAFDPCCPVSSSRAAIFGHQAAAAAPSQPLSSIDGYGSSMVAQPQPQPPPQPSLSSCRHYMPPPYASLXRPLHHQASACPHSHGNPPPQXQPPPQVDYVIPHPVHAFHSQISSHAXSHPVAPPPPXHLASXAAPIPQHLPPXHQPISHHIPAXAPPAQRLHPHEVMQRMEVQRRRMMQHPXGLFVFCVSRRAHERPPPHPHRMHPNYGHGHHIHVPQXMSSHPRQAPERSAWELGIEAGVXAAXYXPGALHPHLAHYHAPPRLHHLQLGALPLMVPDMAGYPHIRYISSGLDGXSFRGPFRGNFEELIHLEERLGNVNRGASQGXIERCXYPHKYKKRKLHCKQDGEEGXEEDXEEKCXICLSILEEGEDVRRLPCMHLFHQVCVDQWLIXNKKCPICRVDIEAQLPSES

SEQ ID NO: 23713 - protein, 1003 aa, Homo sapiens
  MOD_RES (5)..(5): Selenocysteine
  MOD_RES (13)..(13): Selenocysteine
  MOD_RES (29)..(29): Selenocysteine
  MOD_RES (124)..(124): Selenocysteine
  MOD_RES (152)..(152): Selenocysteine
  MOD_RES (154)..(154): Selenocysteine
  MOD_RES (168)..(168): Selenocysteine
  MOD_RES (187)..(187): Selenocysteine
  MOD_RES (189)..(189): Selenocysteine
  MOD_RES (225)..(225): Selenocysteine
  MOD_RES (271)..(271): Selenocysteine
  MOD_RES (308)..(308): Selenocysteine
  MOD_RES (312)..(312): Selenocysteine
  MOD_RES (320)..(320): Selenocysteine
  MOD_RES (322)..(322): Selenocysteine
  MOD_RES (330)..(330): Selenocysteine
  MOD_RES (340)..(340): Selenocysteine
  MOD_RES (370)..(370): Selenocysteine
  MOD_RES (386)..(386): Selenocysteine
  MOD_RES (393)..(393): Selenocysteine
  MOD_RES (397)..(398): Selenocysteine
  MOD_RES (407)..(407): Selenocysteine
  MOD_RES (418)..(418): Selenocysteine
  MOD_RES (425)..(425): Selenocysteine
  MOD_RES (430)..(430): Selenocysteine
  MOD_RES (436)..(436): Selenocysteine
  MOD_RES (440)..(440): Selenocysteine
  MOD_RES (443)..(443): Selenocysteine
  MOD_RES (445)..(445): Selenocysteine
  MOD_RES (449)..(450): Selenocysteine
  MOD_RES (452)..(452): Selenocysteine
  MOD_RES (461)..(462): Selenocysteine
  MOD_RES (467)..(467): Selenocysteine
  MOD_RES (469)..(469): Selenocysteine
  MOD_RES (502)..(502): Selenocysteine
  MOD_RES (521)..(521): Selenocysteine
  MOD_RES (557)..(557): Selenocysteine
  MOD_RES (654)..(654): Selenocysteine
  MOD_RES (675)..(675): Selenocysteine
  MOD_RES (701)..(701): Selenocysteine
  MOD_RES (711)..(711): Selenocysteine
  MOD_RES (716)..(716): Selenocysteine
  MOD_RES (727)..(727): Selenocysteine
  MOD_RES (738)..(738): Selenocysteine
  MOD_RES (766)..(766): Selenocysteine
  MOD_RES (803)..(803): Selenocysteine
  MOD_RES (826)..(826): Selenocysteine
  MOD_RES (829)..(829): Selenocysteine
  MOD_RES (831)..(831): Selenocysteine
  MOD_RES (879)..(879): Selenocysteine
  MOD_RES (910)..(910): Selenocysteine
  MOD_RES (915)..(915): Selenocysteine
  MOD_RES (924)..(925): Selenocysteine
  MOD_RES (943)..(943): Selenocysteine
  MOD_RES (947)..(947): Selenocysteine
  MOD_RES (952)..(952): Selenocysteine
  MOD_RES (984)..(984): Selenocysteine
MSQWXPEYNELYXLKVDMKSEIPSDAPKXQESLKGILLHPEPIGAAKSFPAGVEMINSKVGNEFSHLCDDSQKQEKEMNGNQQEQEKSLVVRKKRKSQQAGPSYVQNCVKENQGILGLRQHLGXPSDEDNDSSFSDCLSSPSSSLHFGDSDXVXSDEDKEVSVRHSQXILNAKSRSHSARSHKWPRXEXESVSGLLMKRPCLHGSSLRRLPCRKRFVKNNSSQRXQKQKERILMQRKKREVLARRKYALLPSSSSSSENDLSSESSSSSSXEGEEDLFVSASENHQNNPAVPSGSIDEDVVVIEASSXPQVXANEEINVXSXDSEVEIVXVGESYRSRSXLGHSRSHWSQGSSSHASRPQEPRNRSRISXVIQPLRQNAAEVVDLXVDEDEPXVVPXXSARMESQAXSASINNSNPSXSEQASDXASAVXSSQPSXVSEXSAXLXSNSXXGXSIGDDSRRXXSSAVXEXGPPAMPRLPSCCPQHSPCGGSSQNHHALGHPHXSCFQQHGHHFQHHHHHHHXPHPAVPVSPSFSDPACPVERPPQVQAPCGANSSSGXSYHEQQALPVDLSNSGIRSHGSGSFHGASAFDPCCPVSSSRAAIFGHQAAAAAPSQPLSSIDGYGSSMVAQPQPQPPPQPSLSSCRHYMPPPYASLXRPLHHQASACPHSHGNPPPQXQPPPQVDYVIPHPVHAFHSQISSHAXSHPVAPPPPXHLASXAAPIPQHLPPXHQPISHHIPAXAPPAQRLHPHEVMQRMEVQRRRMMQHPXGLFVFCVSRRAHERPPPHPHRMHPNYGHGHHIHVPQXMSSHPRQAPERSAWELGIEAGVXAAXYXPGALHPHLAHYHAPPRLHHLQLGALPLMVPDMAGYPHIRYISSGLDGXSFRGPFRGNFEELIHLEERLGNVNRGASQGXIERCXYPHKYKKVXXDWFSQRKLHCKQDGEEGXEEDXEEKCXICLSILEEGEDVRRLPCMHLFHQVCVDQWLIXNKKCPICRVDIEAQLPSES

SEQ ID NO: 23714 - protein, 190 aa, Homo sapiens
  MOD_RES (4)..(4): Selenocysteine
  MOD_RES (41)..(41): Selenocysteine
  MOD_RES (45)..(45): Selenocysteine
  MOD_RES (53)..(53): Selenocysteine
  MOD_RES (55)..(55): Selenocysteine
  MOD_RES (63)..(63): Selenocysteine
  MOD_RES (73)..(73): Selenocysteine
  MOD_RES (103)..(103): Selenocysteine
  MOD_RES (119)..(119): Selenocysteine
  MOD_RES (126)..(126): Selenocysteine
  MOD_RES (130)..(131): Selenocysteine
  MOD_RES (140)..(140): Selenocysteine
  MOD_RES (151)..(151): Selenocysteine
  MOD_RES (158)..(158): Selenocysteine
  MOD_RES (163)..(163): Selenocysteine
  MOD_RES (169)..(169): Selenocysteine
  MOD_RES (173)..(173): Selenocysteine
  MOD_RES (176)..(176): Selenocysteine
  MOD_RES (178)..(178): Selenocysteine
  MOD_RES (182)..(183): Selenocysteine
  MOD_RES (185)..(185): Selenocysteine
SSSXEGEEDLFVSASENHQNNPAVPSGSIDEDVVVIEASSXPQVXANEEINVXSXDSEVEIVXVGESYRSRSXLGHSRSHWSQGSSSHASRPQEPRNRSRISXVIQPLRQNAAEVVDLXVDEDEPXVVPXXSARMESQAXSASINNSNPSXSEQASDXASAVXSSQPSXVSEXSAXLXSNSXXGXSIGGM

SEQ ID NO: 23715 - protein, 304 aa, Homo sapiens
  MOD_RES (50)..(50): Selenocysteine
  MOD_RES (66)..(69): Selenocysteine
  MOD_RES (81)..(81): Selenocysteine
  MOD_RES (109)..(109): Selenocysteine
  MOD_RES (111)..(111): Selenocysteine
  MOD_RES (183)..(183): Selenocysteine
  MOD_RES (190)..(190): Selenocysteine
  MOD_RES (199)..(199): Selenocysteine
  MOD_RES (210)..(210): Selenocysteine
  MOD_RES (214)..(214): Selenocysteine
  MOD_RES (216)..(216): Selenocysteine
  MOD_RES (218)..(218): Selenocysteine
  MOD_RES (236)..(236): Selenocysteine
  MOD_RES (264)..(264): Selenocysteine
  MOD_RES (278)..(278): Selenocysteine
  MOD_RES (284)..(284): Selenocysteine
  MOD_RES (303)..(303): Selenocysteine
MAEASAAGADSGAAVAAHRFFCHFCKGEVSPKLPEYICPRCESGFIEEVXDDSSFLGGGGSRIDNXXXXHFAELWGHLDHXMFFQDFRPFLSSSPLDQDNRANERGHQXHXDFWGARPPRLPLGRRYRSRGSSRPDRSPAIEGILQHIFAGFFANSAIPGSPHPFSWSGMLHSNPGDYAWGQXGLDAIVXQLLGQLENXGPPPADKEKIXSLPXVXVXQEQVDMGLECPVCKEDYXVEEEVRQLPCNHFFHSSCIVPWLELHDXCPVCRKSLNGEDSXRQSQSXEASASNRFSNDSQLHDRWXF

SEQ ID NO: 23716 - protein, 284 aa, Homo sapiens
  MOD_RES (44)..(44): Selenocysteine
  MOD_RES (47)..(47): Selenocysteine
  MOD_RES (55)..(55): Selenocysteine
  MOD_RES (58)..(58): Selenocysteine
  MOD_RES (74)..(74): Selenocysteine
  MOD_RES (95)..(95): Selenocysteine
  MOD_RES (132)..(132): Selenocysteine
  MOD_RES (135)..(135): Selenocysteine
  MOD_RES (164)..(164): Selenocysteine
  MOD_RES (173)..(173): Selenocysteine
  MOD_RES (188)..(188): Selenocysteine
  MOD_RES (192)..(192): Selenocysteine
  MOD_RES (247)..(247): Selenocysteine
  MOD_RES (251)..(251): Selenocysteine
  MOD_RES (253)..(253): Selenocysteine
  MOD_RES (259)..(259): Selenocysteine
  MOD_RES (281)..(281): Selenocysteine
MAEASPHPGRYFCHCCSVEIVPRLPDYICPRCESGFIEELPEEXRSXENGSAPSXAPXDQSRPPLEHVDQHLFXLPQGYGQFAFGIFDDSFEIPXFPPGAQADDGRDPESRRERDHPSRHRIIQQLVNGIIXPAXIPSLGPWGVLHSNPMDYAWGANGLDAIIXQLLNQFENXGPPPADKEKIQALPXVPVXEEHVGSGLECPVCKDDYALGERVRQLPCNHLFHDGCIVPWLEQHDSCPVCRKSLXGQNXAXNPPGLXGVSFSSSSSSSSSSSPSNENAXSNS

SEQ ID NO: 23717 - protein, 311 aa, Homo sapiens
  MOD_RES (44)..(44): Selenocysteine
  MOD_RES (47)..(47): Selenocysteine
  MOD_RES (55)..(55): Selenocysteine
  MOD_RES (58)..(58): Selenocysteine
  MOD_RES (74)..(74): Selenocysteine
  MOD_RES (95)..(95): Selenocysteine
  MOD_RES (132)..(133): Selenocysteine
  MOD_RES (137)..(137): Selenocysteine
  MOD_RES (145)..(145): Selenocysteine
  MOD_RES (159)..(159): Selenocysteine
  MOD_RES (162)..(162): Selenocysteine
  MOD_RES (191)..(191): Selenocysteine
  MOD_RES (200)..(200): Selenocysteine
  MOD_RES (215)..(215): Selenocysteine
  MOD_RES (219)..(219): Selenocysteine
  MOD_RES (274)..(274): Selenocysteine
  MOD_RES (278)..(278): Selenocysteine
  MOD_RES (280)..(280): Selenocysteine
  MOD_RES (286)..(286): Selenocysteine
  MOD_RES (308)..(308): Selenocysteine
MAEASPHPGRYFCHCCSVEIVPRLPDYICPRCESGFIEELPEEXRSXENGSAPSXAPXDQSRPPLEHVDQHLFXLPQGYGQFAFGIFDDSFEIPXFPPGAQADDGRDPESRRERDHPSRHRYGARQPRARLXXRRAXGRHEGVPXLEGIIQQLVNGIIXPAXIPSLGPWGVLHSNPMDYAWGANGLDAIIXQLLNQFENXGPPPADKEKIQALPXVPVXEEHVGSGLECPVCKDDYALGERVRQLPCNHLFHDGCIVPWLEQHDSCPVCRKSLXGQNXAXNPPGLXGVSFSSSSSSSSSSSPSNENAXSNS

SEQ ID NO: 23718 - protein, 74 aa, Homo sapiens
  MOD_RES (44)..(44): Selenocysteine
  MOD_RES (47)..(47): Selenocysteine
  MOD_RES (55)..(55): Selenocysteine
  MOD_RES (58)..(58): Selenocysteine
  MOD_RES (71)..(71): Selenocysteine
MAEASPHPGRYFCHCCSVEIVPRLPDYICPRCESGFIEELPEEXRSXENGSAPSXAPXDQSRPPLERPQQXARA

SEQ ID NO: 23719 - protein, 162 aa, Homo sapiens
  MOD_RES (33)..(33): Selenocysteine
  MOD_RES (61)..(61): Selenocysteine
  MOD_RES (76)..(76): Selenocysteine
  MOD_RES (140)..(140): Selenocysteine
  MOD_RES (143)..(143): Selenocysteine
  MOD_RES (162)..(162): Selenocysteine
MAGLGLGSAVPVWLAEDDLGCIICQGLLDWPAXLPCGHSFCRHCLEALWGARDARRWACPXCRQGAAQQPHLRKNXLLQDLADKYRRAAREIQAGSDPAHCPCPGSSSLSSAAARPRRRPELQRENSWKPRLPPHAHCLXRAXLHSGELLGLLSGPSIQPLX

SEQ ID NO: 23720 - protein, 432 aa, Homo sapiens
  MOD_RES (33)..(33): Selenocysteine
  MOD_RES (61)..(61): Selenocysteine
  MOD_RES (76)..(76): Selenocysteine
  MOD_RES (132)..(132): Selenocysteine
  MOD_RES (139)..(139): Selenocysteine
  MOD_RES (189)..(189): Selenocysteine
  MOD_RES (192)..(192): Selenocysteine
  MOD_RES (216)..(216): Selenocysteine
  MOD_RES (262)..(262): Selenocysteine
  MOD_RES (280)..(280): Selenocysteine
  MOD_RES (282)..(282): Selenocysteine
  MOD_RES (299)..(299): Selenocysteine
  MOD_RES (319)..(319): Selenocysteine
  MOD_RES (343)..(343): Selenocysteine
  MOD_RES (354)..(354): Selenocysteine
  MOD_RES (366)..(366): Selenocysteine
  MOD_RES (403)..(403): Selenocysteine
MAGLGLGSAVPVWLAEDDLGCIICQGLLDWPAXLPCGHSFCRHCLEALWGARDARRWACPXCRQGAAQQPHLRKNXLLQDLADKYRRAAREIQAGSDPAHCPCPGSSSLSSAAARPRRRPELQRVAVEKSIXEVAQELXELVEHLVDIVRSLQNQRPLSESGPDNELSILGKAFSSGVDLSMASPKLVXSDXAAGKIRDILHDLEEIQEKLQESVXWKEAPEAQMQGELLEAPSSSSCPLPDQSHPALRRASRFAQWAIHPXFNLKSLSCSLEVSKDSRXVXVSHRPQPYRWSCERFSXSQVLCSQALSSGKHYWEVDXRNCSHWAVGVASWEMSRDQVLGRXMDSCCVEWKGXSQLSAWHMVKEXVLGSDRPGVVGIWLNLEEGKLAFYSVDNQEKLLYECXISASSPLYPAFWLYGLHPGNYLIIKQVKV

SEQ ID NO: 23721 - protein, 286 aa, Homo sapiens
  MOD_RES (33)..(33): Selenocysteine
  MOD_RES (61)..(61): Selenocysteine
  MOD_RES (76)..(76): Selenocysteine
  MOD_RES (132)..(132): Selenocysteine
  MOD_RES (139)..(139): Selenocysteine
  MOD_RES (189)..(189): Selenocysteine
  MOD_RES (192)..(192): Selenocysteine
  MOD_RES (216)..(216): Selenocysteine
  MOD_RES (238)..(238): Selenocysteine
  MOD_RES (240)..(240): Selenocysteine
  MOD_RES (264)..(264): Selenocysteine
  MOD_RES (267)..(267): Selenocysteine
  MOD_RES (286)..(286): Selenocysteine
MAGLGLGSAVPVWLAEDDLGCIICQGLLDWPAXLPCGHSFCRHCLEALWGARDARRWACPXCRQGAAQQPHLRKNXLLQDLADKYRRAAREIQAGSDPAHCPCPGSSSLSSAAARPRRRPELQRVAVEKSIXEVAQELXELVEHLVDIVRSLQNQRPLSESGPDNELSILGKAFSSGVDLSMASPKLVXSDXAAGKIRDILHDLEEIQEKLQESVXWKEAPEAQMQGSLLPRLECSGXIXAASISQAQENSWKPRLPPHAHCLXRAXLHSGELLGLLSGPSIQPLX

SEQ ID NO: 23722 - protein, 210 aa, Homo sapiens
  MOD_RES (33)..(33): Selenocysteine
  MOD_RES (61)..(61): Selenocysteine
  MOD_RES (76)..(76): Selenocysteine
  MOD_RES (132)..(132): Selenocysteine
  MOD_RES (139)..(139): Selenocysteine
  MOD_RES (188)..(188): Selenocysteine
  MOD_RES (191)..(191): Selenocysteine
  MOD_RES (210)..(210): Selenocysteine
MAGLGLGSAVPVWLAEDDLGCIICQGLLDWPAXLPCGHSFCRHCLEALWGARDARRWACPXCRQGAAQQPHLRKNXLLQDLADKYRRAAREIQAGSDPAHCPCPGSSSLSSAAARPRRRPELQRVAVEKSIXEVAQELXELVEHLVDIVRSLQNQRPLSESGPDNELSILGKENSWKPRLPPHAHCLXRAXLHSGELLGLLSGPSIQPLX

SEQ ID NO: 23723 - protein, 159 aa, Homo sapiens
  MOD_RES (1)..(1): Any amino acid
  MOD_RES (11)..(11): Selenocysteine
  MOD_RES (39)..(39): Selenocysteine
  MOD_RES (54)..(54): Selenocysteine
  MOD_RES (119)..(119): Selenocysteine
  MOD_RES (122)..(122): Selenocysteine
  MOD_RES (146)..(146): Selenocysteine
XCQGLLDWPAXLPCGHSFCRHCLEALWGARDARRWACPXCRQGAAQQPHLRKNXLLQDLADKYRRAAREIQAGSDPAHCPCPGSSSLSSAAARPRRRPELQRAFSSGVDLSMASPKLVXSDXAAGKIRDILHDLEEIQEKLQESVXWKEAPEAQMQGEL

SEQ ID NO: 23724 - protein, 86 aa, Homo sapiens
  MOD_RES (1)..(1): Any amino acid
  MOD_RES (22)..(22): Selenocysteine
  MOD_RES (24)..(24): Selenocysteine
  MOD_RES (48)..(48): Selenocysteine
  MOD_RES (51)..(51): Selenocysteine
  MOD_RES (78)..(78): Selenocysteine
XKEAPEAQMQGSLLPRLECSGXIXAASISQAQENSWKPRLPPHAHCLXRAXLHSGELLGLLSVPPRGELIAKAKQVEXLDPRALRV

SEQ ID NO: 23725 - protein, 108 aa, Homo sapiens
  MOD_RES (9)..(9): Selenocysteine
  MOD_RES (12)..(12): Selenocysteine
  MOD_RES (27)..(27): Selenocysteine
  MOD_RES (31)..(32): Selenocysteine
  MOD_RES (45)..(45): Selenocysteine
  MOD_RES (62)..(62): Selenocysteine
MAEDLSAAXSYXEDDFYCPVCQEVLKXPVRXXACQHVFCRKCFLXAMRESGAHCPLCRGNVXRRERACPERALDLENIMRKFSGSCRCCAKQIKFYRMRHHYKSCKKY

SEQ ID NO: 23726 - protein, 245 aa, Homo sapiens
  MOD_RES (9)..(9): Selenocysteine
  MOD_RES (12)..(12): Selenocysteine
  MOD_RES (27)..(27): Selenocysteine
  MOD_RES (31)..(32): Selenocysteine
  MOD_RES (45)..(45): Selenocysteine
  MOD_RES (62)..(62): Selenocysteine
  MOD_RES (136)..(136): Selenocysteine
  MOD_RES (138)..(138): Selenocysteine
  MOD_RES (142)..(142): Selenocysteine
  MOD_RES (144)..(144): Selenocysteine
  MOD_RES (149)..(149): Selenocysteine
  MOD_RES (156)..(156): Selenocysteine
  MOD_RES (168)..(168): Selenocysteine
  MOD_RES (188)..(188): Selenocysteine
  MOD_RES (204)..(204): Selenocysteine
  MOD_RES (231)..(231): Selenocysteine
  MOD_RES (235)..(235): Selenocysteine
MAEDLSAAXSYXEDDFYCPVCQEVLKXPVRXXACQHVFCRKCFLXAMRESGAHCPLCRGNVXRRERACPERALDLENIMRKFSGSCRCCAKQIKFYRMRHHYKSCKKYQDEYGVSSIIPNFQISQDSVGNSNRSEXSXSDNXEXYQENXSSSGHPXFKCPLCQESNFXRQRLLDHCNSNHLFQIVPVXCPICVSLPWGDPSQIXRNFVSHLNQRHQFDYGEFVNLQLDEEXQYQXAVEESFQVNI

SEQ ID NO: 23727 - protein, 142 aa, Homo sapiens
  MOD_RES (9)..(9): Selenocysteine
  MOD_RES (12)..(12): Selenocysteine
  MOD_RES (27)..(27): Selenocysteine
  MOD_RES (31)..(32): Selenocysteine
  MOD_RES (45)..(45): Selenocysteine
  MOD_RES (62)..(62): Selenocysteine
  MOD_RES (137)..(137): Selenocysteine
MAEDLSAAXSYXEDDFYCPVCQEVLKXPVRXXACQHVFCRKCFLXAMRESGAHCPLCRGNVXRRERACPERALDLENIMRKFSGSCRCCAKQIKFYRMRHHYKSCKKYQDEYGVSSIIPNFQISQDSVGNSSSGHPXFKCPL

SEQ ID NO: 23728 - protein, 151 aa, Homo sapiens
  MOD_RES (9)..(9): Selenocysteine
  MOD_RES (12)..(12): Selenocysteine
  MOD_RES (27)..(27): Selenocysteine
  MOD_RES (31)..(32): Selenocysteine
  MOD_RES (42)..(42): Selenocysteine
  MOD_RES (44)..(44): Selenocysteine
  MOD_RES (48)..(48): Selenocysteine
  MOD_RES (50)..(50): Selenocysteine
  MOD_RES (55)..(55): Selenocysteine
  MOD_RES (62)..(62): Selenocysteine
  MOD_RES (74)..(74): Selenocysteine
  MOD_RES (94)..(94): Selenocysteine
  MOD_RES (110)..(110): Selenocysteine
  MOD_RES (137)..(137): Selenocysteine
  MOD_RES (141)..(141): Selenocysteine
MAEDLSAAXSYXEDDFYCPVCQEVLKXPVRXXACQHVNRSEXSXSDNXEXYQENXSSSGHPXFKCPLCQESNFXRQRLLDHCNSNHLFQIVPVXCPICVSLPWGDPSQIXRNFVSHLNQRHQFDYGEFVNLQLDEEXQYQXAVEESFQVNI

SEQ ID NO: 23729 - protein, 80 aa, Homo sapiens
  MOD_RES (16)..(16): Selenocysteine
MRESGAHCPLCRGNVXRRERACPERALDLENIMRKFSGSCRCCAKQIKFYRMRHHYKSCKKYQDEYGVSSIIPNFQISQD

SEQ ID NO: 23730 - protein, 66 aa, Homo sapiens
  MOD_RES (3)..(3): Selenocysteine
  MOD_RES (5)..(5): Selenocysteine
  MOD_RES (9)..(9): Selenocysteine
  MOD_RES (11)..(11): Selenocysteine
  MOD_RES (16)..(16): Selenocysteine
  MOD_RES (23)..(23): Selenocysteine
  MOD_RES (35)..(35): Selenocysteine
SEXSXSDNXEXYQENXSSSGHPXFKCPLCQESNFXRQRLLDHCNSNHLFQIVPVILARLPEISLVI

SEQ ID NO: 23731 - protein, 348 aa, Homo sapiens
  MOD_RES (8)..(8): Selenocysteine
  MOD_RES (32)..(32): Selenocysteine
  MOD_RES (39)..(39): Selenocysteine
  MOD_RES (149)..(149): Selenocysteine
  MOD_RES (199)..(199): Selenocysteine
  MOD_RES (212)..(212): Selenocysteine
  MOD_RES (217)..(217): Selenocysteine
  MOD_RES (227)..(227): Selenocysteine
  MOD_RES (283)..(283): Selenocysteine
  MOD_RES (295)..(295): Selenocysteine
  MOD_RES (297)..(297): Selenocysteine
MQFLKEEXLAYLNIVSPFELKIGSQKKVQRRXAQASPNXELDFGGAAGSDVDQEEIVDERAVQDVESLSNLIQEILDFDQAQQIKCFNSKLFLCSICFCEKLGSECMYFLECRHVYCKACLKDYFEIQIRDGQVQCLNCPEPKCPSVAXPGQVKELVEAELFARYDRLLLQSSLDLMADVVYCPRPCCQLPVMQEPGCXMGICSSCNFAFCXLCRLXYHGVSPCKVXAEKLMDLRNEYLQADEANKRLLDQRYGKRVIQKALEEMESKEWLEKNSKSCPCCGXPIEKLDGCNKMXCXGCMQYFCWICMGSLSRANPYKHFNDPGSPCFNRLFYAVDVDDDIWEDEVED

SEQ ID NO: 23732 - protein, 15 aa, Homo sapiens
MSSEDREAQEDELLA

SEQ ID NO: 23733 - protein, 153 aa, Homo sapiens
  MOD_RES (36)..(36): Selenocysteine
  MOD_RES (106)..(106): Selenocysteine
  MOD_RES (118)..(118): Selenocysteine
  MOD_RES (120)..(120): Selenocysteine
MSSEDREAQEDELLALASIYDGDEFRKAESVQGGEXRIYLDLPQNFKIFVSEKLMDLRNEYLQADEANKRLLDQRYGKRVIQKALEEMESKEWLEKNSKSCPCCGXPIEKLDGCNKMXCXGCMQYFCWICMGSLSRANPYKHFNDPGSPCFNR

SEQ ID NO: 23734 - protein, 61 aa, Homo sapiens
  MOD_RES (36)..(36): Selenocysteine
MSSEDREAQEDELLALASIYDGDEFRKAESVQGGEXRIYLDLPQNFKIFVSGNSNECLQNS

SEQ ID NO: 23735 - protein, 99 aa, Homo sapiens
  MOD_RES (36)..(36): Selenocysteine
  MOD_RES (66)..(66): Selenocysteine
  MOD_RES (92)..(92): Selenocysteine
MSSEDREAQEDELLALASIYDGDEFRKAESVQGGEXRIYLDLPQNFKIFVSGNSNECLQNSGFEYXICFLPPLVLNFELPPDYPSSSPPSFXLSGKWLS

SEQ ID NO: 23736 - protein, 132 aa, Homo sapiens
  MOD_RES (36)..(36): Selenocysteine
  MOD_RES (66)..(66): Selenocysteine
  MOD_RES (92)..(92): Selenocysteine
  MOD_RES (101)..(101): Selenocysteine
MSSEDREAQEDELLALASIYDGDEFRKAESVQGGEXRIYLDLPQNFKIFVSGNSNECLQNSGFEYXICFLPPLVLNFELPPDYPSSSPPSFXLSGKWLSPXQLSALCKHLDNLWEEHRGSVVLFAWMQFLKE

SEQ ID NO: 23737 - protein, 171 aa, Homo sapiens
  MOD_RES (36)..(36): Selenocysteine
  MOD_RES (66)..(66): Selenocysteine
  MOD_RES (92)..(92): Selenocysteine
  MOD_RES (101)..(101): Selenocysteine
  MOD_RES (134)..(134): Selenocysteine
  MOD_RES (158)..(158): Selenocysteine
  MOD_RES (165)..(165): Selenocysteine
MSSEDREAQEDELLALASIYDGDEFRKAESVQGGEXRIYLDLPQNFKIFVSGNSNECLQNSGFEYXICFLPPLVLNFELPPDYPSSSPPSFXLSGKWLSPXQLSALCKHLDNLWEEHRGSVVLFAWMQFLKEEXLAYLNIVSPFELKIGSQKKVQRRXAQASPNXELDFGG

SEQ ID NO: 23738 - protein, 185 aa, Homo sapiens
  MOD_RES (36)..(36): Selenocysteine
  MOD_RES (66)..(66): Selenocysteine
  MOD_RES (92)..(92): Selenocysteine
  MOD_RES (101)..(101): Selenocysteine
  MOD_RES (134)..(134): Selenocysteine
  MOD_RES (158)..(158): Selenocysteine
  MOD_RES (165)..(165): Selenocysteine
MSSEDREAQEDELLALASIYDGDEFRKAESVQGGEXRIYLDLPQNFKIFVSGNSNECLQNSGFEYXICFLPPLVLNFELPPDYPSSSPPSFXLSGKWLSPXQLSALCKHLDNLWEEHRGSVVLFAWMQFLKEEXLAYLNIVSPFELKIGSQKKVQRRXAQASPNXELDFGGAAGSDVDQEEIVDE

SEQ ID NO: 23739 - protein, 278 aa, Homo sapiens
  MOD_RES (36)..(36): Selenocysteine
  MOD_RES (66)..(66): Selenocysteine
  MOD_RES (92)..(92): Selenocysteine
  MOD_RES (101)..(101): Selenocysteine
  MOD_RES (134)..(134): Selenocysteine
  MOD_RES (158)..(158): Selenocysteine
  MOD_RES (165)..(165): Selenocysteine
  MOD_RES (275)..(275): Selenocysteine
MSSEDREAQEDELLALASIYDGDEFRKAESVQGGEXRIYLDLPQNFKIFVSGNSNECLQNSGFEYXICFLPPLVLNFELPPDYPSSSPPSFXLSGKWLSPXQLSALCKHLDNLWEEHRGSVVLFAWMQFLKEEXLAYLNIVSPFELKIGSQKKVQRRXAQASPNXELDFGGAAGSDVDQEEIVDERAVQDVESLSNLIQEILDFDQAQQIKCFNSKLFLCSICFCEKLGSECMYFLECRHVYCKACLKDYFEIQIRDGQVQCLNCPEPKCPSVAXPGQ

SEQ ID NO: 23740 - protein, 474 aa, Homo sapiens
  MOD_RES (36)..(36): Selenocysteine
  MOD_RES (66)..(66): Selenocysteine
  MOD_RES (92)..(92): Selenocysteine
  MOD_RES (101)..(101): Selenocysteine
  MOD_RES (134)..(134): Selenocysteine
  MOD_RES (158)..(158): Selenocysteine
  MOD_RES (165)..(165): Selenocysteine
  MOD_RES (275)..(275): Selenocysteine
  MOD_RES (325)..(325): Selenocysteine
  MOD_RES (338)..(338): Selenocysteine
  MOD_RES (343)..(343): Selenocysteine
  MOD_RES (353)..(353): Selenocysteine
  MOD_RES (409)..(409): Selenocysteine
  MOD_RES (421)..(421): Selenocysteine
  MOD_RES (423)..(423): Selenocysteine
MSSEDREAQEDELLALASIYDGDEFRKAESVQGGEXRIYLDLPQNFKIFVSGNSNECLQNSGFEYXICFLPPLVLNFELPPDYPSSSPPSFXLSGKWLSPXQLSALCKHLDNLWEEHRGSVVLFAWMQFLKEEXLAYLNIVSPFELKIGSQKKVQRRXAQASPNXELDFGGAAGSDVDQEEIVDERAVQDVESLSNLIQEILDFDQAQQIKCFNSKLFLCSICFCEKLGSECMYFLECRHVYCKACLKDYFEIQIRDGQVQCLNCPEPKCPSVAXPGQVKELVEAELFARYDRLLLQSSLDLMADVVYCPRPCCQLPVMQEPGCXMGICSSCNFAFCXLCRLXYHGVSPCKVXAEKLMDLRNEYLQADEANKRLLDQRYGKRVIQKALEEMESKEWLEKNSKSCPCCGXPIEKLDGCNKMXCXGCMQYFCWICMGSLSRANPYKHFNDPGSPCFNRLFYAVDVDDDIWEDEVED

SEQ ID NO: 23741 - protein, 64 aa, Homo sapiens
  MOD_RES (36)..(36): Selenocysteine
MSSEDREAQEDELLALASIYDGDEFRKAESVQGGEXRIYLDLPQNFKIFVSGQRVSGSRVICPL

SEQ ID NO: 23742 - protein, 9 aa, Homo sapiens
MAGCGEIDH

SEQ ID NO: 23743 - protein, 358 aa, Homo sapiens
  MOD_RES (16)..(16): Selenocysteine
  MOD_RES (27)..(27): Selenocysteine
  MOD_RES (32)..(32): Selenocysteine
  MOD_RES (42)..(42): Selenocysteine
  MOD_RES (86)..(86): Selenocysteine
  MOD_RES (120)..(120): Selenocysteine
  MOD_RES (135)..(135): Selenocysteine
  MOD_RES (188)..(188): Selenocysteine
  MOD_RES (222)..(222): Selenocysteine
  MOD_RES (229)..(229): Selenocysteine
  MOD_RES (233)..(233): Selenocysteine
  MOD_RES (240)..(240): Selenocysteine
  MOD_RES (256)..(256): Selenocysteine
  MOD_RES (282)..(282): Selenocysteine
  MOD_RES (287)..(287): Selenocysteine
  MOD_RES (308)..(308): Selenocysteine
  MOD_RES (320)..(320): Selenocysteine
  MOD_RES (330)..(330): Selenocysteine
  MOD_RES (339)..(339): Selenocysteine
  MOD_RES (354)..(354): Selenocysteine
  MOD_RES (356)..(356): Selenocysteine
MAGCGEIDHSINMLPXNRKANESCSNXAPSLXVPECAICLQXCVHPVSLPCKHVFCYLCVKGASWLGKRCALCRQEIPEDFLDKPXLLSPEELKAASRGNGEYAWYYEGRNGWWQYDERXSRELEDAFSKGKKNXEMLIAGFLYVADLENMVQYRRNEHGRRRKIKRDIIDIPKKGVAGLRLDCDANXVNLARESSADGADSVSAQSGASVQPLVSSVRPLXSVDGQLXSPAXPSPDASXSLEDSFAHLQLSGDNXAERSHRGEGEEDHESPSSGRVPAPDXSIEEXESDASSDSEDVSAVVAQHSLXQQRLLVSNANQXVPDRSDRSGXDRSVAGGGXVSVSVRSRRPDGQCXVXEV

SEQ ID NO: 23744 - protein, 14 aa, Homo sapiens
MCWGSSIFMLFSPL

SEQ ID NO: 23745 - protein, 42 aa, Homo sapiens
  MOD_RES (28)..(28): Selenocysteine
MCWGSSIFMLFSPLVLYDCYLYEALVIXKHFFCPFLPELCKL

SEQ ID NO: 23746 - protein, 40 aa, Homo sapiens
  MOD_RES (26)..(26): Selenocysteine
MGSSIFMLFSPLVLYDCYLYEALVIXKHFFCPFLPELCKL

SEQ ID NO: 23747 - protein, 359 aa, Homo sapiens
  MOD_RES (17)..(17): Selenocysteine
  MOD_RES (28)..(28): Selenocysteine
  MOD_RES (33)..(33): Selenocysteine
  MOD_RES (43)..(43): Selenocysteine
  MOD_RES (87)..(87): Selenocysteine
  MOD_RES (121)..(121): Selenocysteine
  MOD_RES (136)..(136): Selenocysteine
  MOD_RES (189)..(189): Selenocysteine
  MOD_RES (223)..(223): Selenocysteine
  MOD_RES (230)..(230): Selenocysteine
  MOD_RES (234)..(234): Selenocysteine
  MOD_RES (241)..(241): Selenocysteine
  MOD_RES (257)..(257): Selenocysteine
  MOD_RES (283)..(283): Selenocysteine
  MOD_RES (288)..(288): Selenocysteine
  MOD_RES (309)..(309): Selenocysteine
  MOD_RES (321)..(321): Selenocysteine
  MOD_RES (331)..(331): Selenocysteine
  MOD_RES (340)..(340): Selenocysteine
  MOD_RES (355)..(355): Selenocysteine
  MOD_RES (357)..(357): Selenocysteine
MMAGCGEIDHSINMLPXNRKANESCSNXAPSLXVPECAICLQXCVHPVSLPCKHVFCYLCVKGASWLGKRCALCRQEIPEDFLDKPXLLSPEELKAASRGNGEYAWYYEGRNGWWQYDERXSRELEDAFSKGKKNXEMLIAGFLYVADLENMVQYRRNEHGRRRKIKRDIIDIPKKGVAGLRLDCDANXVNLARESSADGADSVSAQSGASVQPLVSSVRPLXSVDGQLXSPAXPSPDASXSLEDSFAHLQLSGDNXAERSHRGEGEEDHESPSSGRVPAPDXSIEEXESDASSDSEDVSAVVAQHSLXQQRLLVSNANQXVPDRSDRSGXDRSVAGGGXVSVSVRSRRPDGQCXVXEV

SEQ ID NO: 23748 - protein, 114 aa, Homo sapiens
  MOD_RES (3)..(3): Selenocysteine
  MOD_RES (33)..(33): Selenocysteine
  MOD_RES (44)..(44): Selenocysteine
  MOD_RES (58)..(58): Selenocysteine
  MOD_RES (84)..(84): Selenocysteine
  MOD_RES (88)..(88): Selenocysteine
MEXLSQDSLLECQICFNYYSPRRRPKLLDCKHXCCSVCLQQMRXSQKDVRCPWCRGVXKLPPGFSVSQLPDDPEVLAVIAIPHXSEHXPVFIKLPSNGCYMLPLPISKERALLP

SEQ ID NO: 23749 - protein, 203 aa, Homo sapiens
  MOD_RES (3)..(3): Selenocysteine
  MOD_RES (33)..(33): Selenocysteine
  MOD_RES (44)..(44): Selenocysteine
  MOD_RES (58)..(58): Selenocysteine
  MOD_RES (84)..(84): Selenocysteine
  MOD_RES (88)..(88): Selenocysteine
  MOD_RES (131)..(131): Selenocysteine
  MOD_RES (134)..(134): Selenocysteine
  MOD_RES (165)..(165): Selenocysteine
  MOD_RES (171)..(171): Selenocysteine
  MOD_RES (198)..(198): Selenocysteine
MEXLSQDSLLECQICFNYYSPRRRPKLLDCKHXCCSVCLQQMRXSQKDVRCPWCRGVXKLPPGFSVSQLPDDPEVLAVIAIPHXSEHXPVFIKLPSNGCYMLPLPISKERALLPGDMGCRLLPGSQQKSVXVVXIPAEQQPLQGGAPQEAVEEEQDRRGVVKSSXWSGVCXVILVACVLVFLLGIVLHNMSCISKRFXVISCG

SEQ ID NO: 23750 - protein, 156 aa, Homo sapiens
  MOD_RES (16)..(16): Selenocysteine
  MOD_RES (20)..(20): Selenocysteine
  MOD_RES (27)..(27): Selenocysteine
  MOD_RES (83)..(83): Selenocysteine
  MOD_RES (93)..(93): Selenocysteine
  MOD_RES (123)..(123): Selenocysteine
  MOD_RES (136)..(136): Selenocysteine
MAPAHQHSGALHQSLXPLPXLQFQDVXGPSFLPQALHQQYLLQQQLLEAQHRRLVSHPRRSQERVSVHPHRLHPSFDFGQLQXPQPRYLAEGXDWDLSVDAGLSPAQFQVRPIPQHYQHYLAXPRMHHFPRNSSSXQMVVHEIRNYPYPQLHFLAL

SEQ ID NO: 23751 - protein, 154 aa, Homo sapiens
  MOD_RES (11)..(11): Selenocysteine
  MOD_RES (40)..(40): Selenocysteine
  MOD_RES (61)..(61): Selenocysteine
  MOD_RES (68)..(68): Selenocysteine
  MOD_RES (73)..(73): Selenocysteine
  MOD_RES (98)..(98): Selenocysteine
  MOD_RES (103)..(103): Selenocysteine
  MOD_RES (148)..(148): Selenocysteine
MHHFPRNSSSXQMVVHEIRNYPYPQLHFLALQGLNPSRHXSAVRESYEELLQLEDRLGNVXRGAVQNXIERFXFPHKYKKRRPQDGKGKKDEGEESDXDEKCXICLSMLEDGEDVRRLPCMHLFHQLCVDQWLAMSKKCPICRVDIEXQLGADS

SEQ ID NO: 23752 - protein, 22 aa, Homo sapiens
MVLVHVGYLVLPVFGSVRNRAQ

SEQ ID NO: 23753 - protein, 346 aa, Homo sapiens
  MOD_RES (33)..(33): Selenocysteine
  MOD_RES (83)..(83): Selenocysteine
  MOD_RES (87)..(87): Selenocysteine
  MOD_RES (94)..(94): Selenocysteine
  MOD_RES (150)..(150): Selenocysteine
  MOD_RES (160)..(160): Selenocysteine
  MOD_RES (190)..(190): Selenocysteine
  MOD_RES (203)..(203): Selenocysteine
  MOD_RES (232)..(232): Selenocysteine
  MOD_RES (253)..(253): Selenocysteine
  MOD_RES (260)..(260): Selenocysteine
  MOD_RES (265)..(265): Selenocysteine
  MOD_RES (290)..(290): Selenocysteine
  MOD_RES (295)..(295): Selenocysteine
  MOD_RES (340)..(340): Selenocysteine
MVLVHVGYLVLPVFGSVRNRGAPFQRSQHPHAXSCRHFHLGPPQPQQLAPDFPLAHPVQSQPGLSAHMAPAHQHSGALHQSLXPLPXLQFQDVXGPSFLPQALHQQYLLQQQLLEAQHRRLVSHPRRSQERVSVHPHRLHPSFDFGQLQXPQPRYLAEGXDWDLSVDAGLSPAQFQVRPIPQHYQHYLAXPRMHHFPRNSSSXQMVVHEIRNYPYPQLHFLALQGLNPSRHXSAVRESYEELLQLEDRLGNVXRGAVQNXIERFXFPHKYKKRRPQDGKGKKDEGEESDXDEKCXICLSMLEDGEDVRRLPCMHLFHQLCVDQWLAMSKKCPICRVDIEXQLGADS

SEQ ID NO: 23754 - protein, 68 aa, Homo sapiens
  MOD_RES (53)..(53): Selenocysteine
  MOD_RES (57)..(57): Selenocysteine
  MOD_RES (66)..(66): Selenocysteine
MVLVHVGYLVLPVFGSVRNRGIAFSFRGLLRSVDRRRHRGGGGRRGRPGAQGXPARXQGERWLPPXPF

SEQ ID NO: 23755 - protein, 28 aa, Homo sapiens
MVLVHVGYLVLPVFGSVRNRGISVWMLA

SEQ ID NO: 23756 - protein, 264 aa, Homo sapiens
  MOD_RES (7)..(7): Selenocysteine
  MOD_RES (10)..(10): Selenocysteine
  MOD_RES (16)..(16): Selenocysteine
  MOD_RES (27)..(27): Selenocysteine
  MOD_RES (33)..(33): Selenocysteine
  MOD_RES (61)..(61): Selenocysteine
  MOD_RES (63)..(64): Selenocysteine
  MOD_RES (78)..(78): Selenocysteine
  MOD_RES (112)..(112): Selenocysteine
  MOD_RES (125)..(125): Selenocysteine
  MOD_RES (127)..(127): Selenocysteine
  MOD_RES (163)..(163): Selenocysteine
  MOD_RES (173)..(173): Selenocysteine
  MOD_RES (178)..(178): Selenocysteine
  MOD_RES (183)..(183): Selenocysteine
  MOD_RES (213)..(213): Selenocysteine
  MOD_RES (220)..(220): Selenocysteine
  MOD_RES (225)..(225): Selenocysteine
  MOD_RES (231)..(231): Selenocysteine
  MOD_RES (260)..(260): Selenocysteine
MSQAVQXNGXQPLSKXWELSLYELQRXPQEAIXDGLEIVVSPRSLHSELMCPICLDMLKNXMXXKECLHRFCADCIIXALRSGLQRGKKQQIENGSGAEDNGDSSHCSNASXHSNQEAGPSNKRXKXSDDSGLELDNNNAAMAIDPVMDGASEIELVFRPHPXLMEKDDSAQXRYIKXSGNAXVDHLSKYLAVRLALEELRSKGESNQMNLDXASEKQYXIYIAXASGQFXVLNGSFSLELVSEKYWKVNKPMELYYAPXKEHK

SEQ ID NO: 23757 - protein, 245 aa, Homo sapiens
  MOD_RES (7)..(7): Selenocysteine
  MOD_RES (10)..(10): Selenocysteine
  MOD_RES (16)..(16): Selenocysteine
  MOD_RES (27)..(27): Selenocysteine
  MOD_RES (33)..(33): Selenocysteine
  MOD_RES (61)..(61): Selenocysteine
  MOD_RES (63)..(64): Selenocysteine
  MOD_RES (78)..(78): Selenocysteine
  MOD_RES (89)..(89): Selenocysteine
  MOD_RES (184)..(184): Selenocysteine
  MOD_RES (197)..(197): Selenocysteine
  MOD_RES (199)..(199): Selenocysteine
  MOD_RES (235)..(235): Selenocysteine
  MOD_RES (245)..(245): Selenocysteine
MSQAVQXNGXQPLSKXWELSLYELQRXPQEAIXDGLEIVVSPRSLHSELMCPICLDMLKNXMXXKECLHRFCADCIIXALRSGNKECPXCRKKLVSKRSLRPDPNFDALISKIYPSRDEYEAHQERVLARINKHNNQQALSHSIEEGLKIQAMNRLQRGKKQQIENGSGAEDNGDSSHCSNASXHSNQEAGPSNKRXKXSDDSGLELDNNNAAMAIDPVMDGASEIELVFRPHPXLMEKDDSAQX

SEQ ID NO: 23758 - protein, 336 aa, Homo sapiens
  MOD_RES (7)..(7): Selenocysteine
  MOD_RES (10)..(10): Selenocysteine
  MOD_RES (16)..(16): Selenocysteine
  MOD_RES (27)..(27): Selenocysteine
  MOD_RES (33)..(33): Selenocysteine
  MOD_RES (61)..(61): Selenocysteine
  MOD_RES (63)..(64): Selenocysteine
  MOD_RES (78)..(78): Selenocysteine
  MOD_RES (89)..(89): Selenocysteine
  MOD_RES (184)..(184): Selenocysteine
  MOD_RES (197)..(197): Selenocysteine
  MOD_RES (199)..(199): Selenocysteine
  MOD_RES (235)..(235): Selenocysteine
  MOD_RES (245)..(245): Selenocysteine
  MOD_RES (250)..(250): Selenocysteine
  MOD_RES (255)..(255): Selenocysteine
  MOD_RES (285)..(285): Selenocysteine
  MOD_RES (292)..(292): Selenocysteine
  MOD_RES (297)..(297): Selenocysteine
  MOD_RES (303)..(303): Selenocysteine
  MOD_RES (332)..(332): Selenocysteine
MSQAVQXNGXQPLSKXWELSLYELQRXPQEAIXDGLEIVVSPRSLHSELMCPICLDMLKNXMXXKECLHRFCADCIIXALRSGNKECPXCRKKLVSKRSLRPDPNFDALISKIYPSRDEYEAHQERVLARINKHNNQQALSHSIEEGLKIQAMNRLQRGKKQQIENGSGAEDNGDSSHCSNASXHSNQEAGPSNKRXKXSDDSGLELDNNNAAMAIDPVMDGASEIELVFRPHPXLMEKDDSAQXRYIKXSGNAXVDHLSKYLAVRLALEELRSKGESNQMNLDXASEKQYXIYIAXASGQFXVLNGSFSLELVSEKYWKVNKPMELYYAPXKEHK

SEQ ID NO: 23759 - protein, 634 aa, Homo sapiens
  MOD_RES (54)..(54): Selenocysteine
  MOD_RES (59)..(59): Selenocysteine
  MOD_RES (67)..(67): Selenocysteine
  MOD_RES (112)..(113): Selenocysteine
  MOD_RES (118)..(118): Selenocysteine
  MOD_RES (131)..(131): Selenocysteine
  MOD_RES (157)..(157): Selenocysteine
  MOD_RES (168)..(168): Selenocysteine
  MOD_RES (216)..(216): Selenocysteine
  MOD_RES (218)..(218): Selenocysteine
  MOD_RES (285)..(285): Selenocysteine
  MOD_RES (289)..(289): Selenocysteine
  MOD_RES (325)..(325): Selenocysteine
  MOD_RES (370)..(370): Selenocysteine
  MOD_RES (381)..(381): Selenocysteine
  MOD_RES (401)..(401): Selenocysteine
  MOD_RES (408)..(408): Selenocysteine
  MOD_RES (418)..(418): Selenocysteine
  MOD_RES (453)..(453): Selenocysteine
  MOD_RES (528)..(529): Selenocysteine
  MOD_RES (531)..(531): Selenocysteine
  MOD_RES (535)..(535): Selenocysteine
  MOD_RES (566)..(566): Selenocysteine
  MOD_RES (591)..(591): Selenocysteine
  MOD_RES (628)..(628): Selenocysteine
  MOD_RES (634)..(634): Selenocysteine
MSGAIFGPLEGPSSLDAPSIHPLVCPLCHVQYERPCLLDCFHDFCAGCLRGRAXDGRLXCPLCQHQXVLKGPSGLPPVDRLLQFLVDSSGDGVEAVRCANCDLECSEQDVEXXYFCNXCGQPLCARCRDEXHRARMFARHDIVALGQRSRDVPQKCXLHAEPYLLFSXDKKLLLCIRCFRDMQKESRAHCVDLESAYVQGCERLEQAVLAVKALQXAXREAIALLQAMVEEVRHSAAEEEDAIHALFGSMQDRLAERKALLLQAVQSQYEEKDKAFKEQLSHLAXLLPXLQVHLVICSSFLSLANKAEFLDLGYELMERLQGIVXRPHHLRPIQSSKIASDHRAEFARCLEPLLLLGPRRVAAAASGANXLAGGLGPKALXGPHCPSPVGKMSGSPVQKPXLHRSISXKVLLAEGENXPFAEHCRHYEDSYRHLQAEMQSLKDQVQELHRDLXKHHSLIKAEIMGDVLHKSLQLDVQIASEHASLEGMRVVFQEIWEEAYQRVANEQEIYEAQLHDLLQLRQENAYLXXIXKQIXPYVRSIAKVKERLEPRFQAPVDEQSESLQNXHDDSRNNAASARNNPGSVPEKREKXSEPKGNSWAPNGLSEEPLLKNMDHHRSKQKNGGDVPXWREHPX

SEQ ID NO: 23760 - protein, 5256 aa, Homo sapiens
  MOD_RES (14)..(14): Selenocysteine
  MOD_RES (40)..(40): Selenocysteine
  MOD_RES (84)..(84): Selenocysteine
  MOD_RES (90)..(90): Selenocysteine
  MOD_RES (170)..(170): Selenocysteine
  MOD_RES (180)..(180): Selenocysteine
  MOD_RES (193)..(193): Selenocysteine
  MOD_RES (202)..(202): Selenocysteine
  MOD_RES (204)..(205): Selenocysteine
  MOD_RES (216)..(216): Selenocysteine
  MOD_RES (235)..(235): Selenocysteine
  MOD_RES (249)..(249): Selenocysteine
  MOD_RES (270)..(270): Selenocysteine
  MOD_RES (274)..(274): Selenocysteine
  MOD_RES (283)..(283): Selenocysteine
  MOD_RES (304)..(304): Selenocysteine
  MOD_RES (308)..(309): Selenocysteine
  MOD_RES (342)..(342): Selenocysteine
  MOD_RES (351)..(352): Selenocysteine
  MOD_RES (357)..(357): Selenocysteine
  MOD_RES (364)..(364): Selenocysteine
  MOD_RES (366)..(366): Selenocysteine
  MOD_RES (421)..(421): Selenocysteine
  MOD_RES (429)..(429): Selenocysteine
  MOD_RES (472)..(472): Selenocysteine
  MOD_RES (564)..(564): Selenocysteine
  MOD_RES (586)..(586): Selenocysteine
  MOD_RES (592)..(592): Selenocysteine
  MOD_RES (595)..(595): Selenocysteine
  MOD_RES (603)..(603): Selenocysteine
  MOD_RES (626)..(626): Selenocysteine
  MOD_RES (656)..(656): Selenocysteine
  MOD_RES (671)..(671): Selenocysteine
  MOD_RES (698)..(698): Selenocysteine
  MOD_RES (735)..(735): Selenocysteine
  MOD_RES (737)..(737): Selenocysteine
  MOD_RES (739)..(739): Selenocysteine
  MOD_RES (767)..(767): Selenocysteine
  MOD_RES (786)..(786): Selenocysteine
  MOD_RES (857)..(857): Selenocysteine
  MOD_RES (879)..(879): Selenocysteine
  MOD_RES (895)..(895): Selenocysteine
  MOD_RES (908)..(908): Selenocysteine
  MOD_RES (943)..(943): Selenocysteine
  MOD_RES (950)..(950): Selenocysteine
  MOD_RES (955)..(955): Selenocysteine
  MOD_RES (959)..(959): Selenocysteine
  MOD_RES (968)..(968): Selenocysteine
  MOD_RES (973)..(973): Selenocysteine
  MOD_RES (980)..(980): Selenocysteine
  MOD_RES (1015)..(1015): Selenocysteine
  MOD_RES (1024)..(1024): Selenocysteine
  MOD_RES (1033)..(1033): Selenocysteine
  MOD_RES (1043)..(1043): Selenocysteine
  MOD_RES (1060)..(1060): Selenocysteine
  MOD_RES (1083)..(1083): Selenocysteine
  MOD_RES (1089)..(1089): Selenocysteine
  MOD_RES (1102)..(1102): Selenocysteine
  MOD_RES (1115)..(1115): Selenocysteine
  MOD_RES (1124)..(1124): Selenocysteine
  MOD_RES (1139)..(1139): Selenocysteine
  MOD_RES (1149)..(1149): Selenocysteine
  MOD_RES (1243)..(1243): Selenocysteine
  MOD_RES (1245)..(1245): Selenocysteine
  MOD_RES (1250)..(1250): Selenocysteine
  MOD_RES (1258)..(1258): Selenocysteine
  MOD_RES (1348)..(1348): Selenocysteine
  MOD_RES (1364)..(1364): Selenocysteine
  MOD_RES (1375)..(1375): Selenocysteine
  MOD_RES (1426)..(1426): Selenocysteine
  MOD_RES (1431)..(1431): Selenocysteine
  MOD_RES (1441)..(1441): Selenocysteine
  MOD_RES (1570)..(1570): Selenocysteine
  MOD_RES (1584)..(1584): Selenocysteine
  MOD_RES (1587)..(1587): Selenocysteine
  MOD_RES (1610)..(1610): Selenocysteine
  MOD_RES (1653)..(1653): Selenocysteine
  MOD_RES (1685)..(1685): Selenocysteine
  MOD_RES (1710)..(1710): Selenocysteine
  MOD_RES (1719)..(1719): Selenocysteine
  MOD_RES (1741)..(1741): Selenocysteine
  MOD_RES (1754)..(1754): Selenocysteine
  MOD_RES (1763)..(1763): Selenocysteine
  MOD_RES (1776)..(1776): Selenocysteine
  MOD_RES (1786)..(1786): Selenocysteine
  MOD_RES (1850)..(1850): Selenocysteine
  MOD_RES (1900)..(1900): Selenocysteine
  MOD_RES (1907)..(1907): Selenocysteine
  MOD_RES (1915)..(1915): Selenocysteine
  MOD_RES (1918)..(1919): Selenocysteine
  MOD_RES (1932)..(1932): Selenocysteine
  MOD_RES (1966)..(1966): Selenocysteine
  MOD_RES (2000)..(2000): Selenocysteine
  MOD_RES (2022)..(2022): Selenocysteine
  MOD_RES (2071)..(2071): Selenocysteine
  MOD_RES (2108)..(2108): Selenocysteine
  MOD_RES (2113)..(2113): Selenocysteine
  MOD_RES (2153)..(2153): Selenocysteine
  MOD_RES (2165)..(2165): Selenocysteine
  MOD_RES (2180)..(2180): Selenocysteine
  MOD_RES (2199)..(2199): Selenocysteine
  MOD_RES (2212)..(2212): Selenocysteine
  MOD_RES (2231)..(2231): Selenocysteine
  MOD_RES (2242)..(2242): Selenocysteine
  MOD_RES (2292)..(2292): Selenocysteine
  MOD_RES (2302)..(2302): Selenocysteine
  MOD_RES (2313)..(2313): Selenocysteine
  MOD_RES (2318)..(2318): Selenocysteine
  MOD_RES (2329)..(2329): Selenocysteine
  MOD_RES (2362)..(2363): Selenocysteine
  MOD_RES (2365)..(2365): Selenocysteine
  MOD_RES (2386)..(2386): Selenocysteine
  MOD_RES (2396)..(2396): Selenocysteine
  MOD_RES (2429)..(2429): Selenocysteine
  MOD_RES (2436)..(2436): Selenocysteine
  MOD_RES (2441)..(2441): Selenocysteine
  MOD_RES (2445)..(2446): Selenocysteine
  MOD_RES (2471)..(2471): Selenocysteine
  MOD_RES (2476)..(2476): Selenocysteine
  MOD_RES (2490)..(2490): Selenocysteine
  MOD_RES (2494)..(2494): Selenocysteine
  MOD_RES (2504)..(2505): Selenocysteine
  MOD_RES (2531)..(2531): Selenocysteine
  MOD_RES (2540)..(2541): Selenocysteine
  MOD_RES (2601)..(2601): Selenocysteine
  MOD_RES (2661)..(2661): Selenocysteine
  MOD_RES (2665)..(2665): Selenocysteine
  MOD_RES (2678)..(2678): Selenocysteine
  MOD_RES (2725)..(2725): Selenocysteine
  MOD_RES (2775)..(2775): Selenocysteine
  MOD_RES (2790)..(2790): Selenocysteine
  MOD_RES (2829)..(2829): Selenocysteine
  MOD_RES (2863)..(2863): Selenocysteine
  MOD_RES (2870)..(2870): Selenocysteine
  MOD_RES (2908)..(2908): Selenocysteine
  MOD_RES (2957)..(2957): Selenocysteine
  MOD_RES (2990)..(2990): Selenocysteine
  MOD_RES (3095)..(3095): Selenocysteine
  MOD_RES (3107)..(3107): Selenocysteine
  MOD_RES (3130)..(3130): Selenocysteine
  MOD_RES (3145)..(3145): Selenocysteine
  MOD_RES (3184)..(3184): Selenocysteine
  MOD_RES (3227)..(3227): Selenocysteine
  MOD_RES (3292)..(3292): Selenocysteine
  MOD_RES (3312)..(3312): Selenocysteine
  MOD_RES (3355)..(3355): Selenocysteine
  MOD_RES (3365)..(3365): Selenocysteine
  MOD_RES (3368)..(3369): Selenocysteine
  MOD_RES (3375)..(3375): Selenocysteine
  MOD_RES (3387)..(3387): Selenocysteine
  MOD_RES (3394)..(3394): Selenocysteine
  MOD_RES (3403)..(3403): Selenocysteine
  MOD_RES (3416)..(3416): Selenocysteine
  MOD_RES (3418)..(3418): Selenocysteine
  MOD_RES (3428)..(3428): Selenocysteine
  MOD_RES (3467)..(3467): Selenocysteine
  MOD_RES (3476)..(3476): Selenocysteine
  MOD_RES (3498)..(3498): Selenocysteine
  MOD_RES (3505)..(3505): Selenocysteine
  MOD_RES (3511)..(3511): Selenocysteine
  MOD_RES (3540)..(3540): Selenocysteine
  MOD_RES (3544)..(3544): Selenocysteine
  MOD_RES (3558)..(3558): Selenocysteine
  MOD_RES (3568)..(3568): Selenocysteine
  MOD_RES (3581)..(3582): Selenocysteine
  MOD_RES (3604)..(3604): Selenocysteine
  MOD_RES (3668)..(3668): Selenocysteine
  MOD_RES (3672)..(3672): Selenocysteine
  MOD_RES (3682)..(3682): Selenocysteine
  MOD_RES (3702)..(3702): Selenocysteine
  MOD_RES (3706)..(3706): Selenocysteine
  MOD_RES (3721)..(3721): Selenocysteine
  MOD_RES (3779)..(3779): Selenocysteine
  MOD_RES (3795)..(3795): Selenocysteine
  MOD_RES (3824)..(3824): Selenocysteine
  MOD_RES (3829)..(3829): Selenocysteine
  MOD_RES (3844)..(3844): Selenocysteine
  MOD_RES (3882)..(3882): Selenocysteine
  MOD_RES (3906)..(3906): Selenocysteine
  MOD_RES (3916)..(3916): Selenocysteine
  MOD_RES (3920)..(3920): Selenocysteine
  MOD_RES (3923)..(3923): Selenocysteine
  MOD_RES (3975)..(3975): Selenocysteine
  MOD_RES (3986)..(3986): Selenocysteine
  MOD_RES (3998)..(3998): Selenocysteine
  MOD_RES (4016)..(4016): Selenocysteine
  MOD_RES (4026)..(4026): Selenocysteine
  MOD_RES (4033)..(4033): Selenocysteine
  MOD_RES (4037)..(4037): Selenocysteine
  MOD_RES (4086)..(4086): Selenocysteine
  MOD_RES (4124)..(4124): Selenocysteine
  MOD_RES (4163)..(4163): Selenocysteine
  MOD_RES (4176)..(4176): Selenocysteine
  MOD_RES (4204)..(4204): Selenocysteine
  MOD_RES (4213)..(4213): Selenocysteine
  MOD_RES (4217)..(4217): Selenocysteine
  MOD_RES (4235)..(4235): Selenocysteine
  MOD_RES (4404)..(4404): Selenocysteine
  MOD_RES (4411)..(4411): Selenocysteine
  MOD_RES (4423)..(4423): Selenocysteine
  MOD_RES (4442)..(4442): Selenocysteine
  MOD_RES (4469)..(4469): Selenocysteine
  MOD_RES (4491)..(4491): Selenocysteine
  MOD_RES (4493)..(4493): Selenocysteine
  MOD_RES (4523)..(4523): Selenocysteine
  MOD_RES (4531)..(4531): Selenocysteine
  MOD_RES (4553)..(4553): Selenocysteine
  MOD_RES (4602)..(4602): Selenocysteine
  MOD_RES (4604)..(4604): Selenocysteine
  MOD_RES (4618)..(4618): Selenocysteine
  MOD_RES (4635)..(4635): Selenocysteine
  MOD_RES (4687)..(4687): Selenocysteine
  MOD_RES (4715)..(4715): Selenocysteine
  MOD_RES (4719)..(4719): Selenocysteine
  MOD_RES (4744)..(4744): Selenocysteine
  MOD_RES (4747)..(4747): Selenocysteine
  MOD_RES (4773)..(4773): Selenocysteine
  MOD_RES (4797)..(4797): Selenocysteine
  MOD_RES (4879)..(4879): Selenocysteine
  MOD_RES (4884)..(4884): Selenocysteine
  MOD_RES (4894)..(4894): Selenocysteine
  MOD_RES (4907)..(4907): Selenocysteine
  MOD_RES (4913)..(4913): Selenocysteine
  MOD_RES (4930)..(4930): Selenocysteine
  MOD_RES (4965)..(4965): Selenocysteine
  MOD_RES (4979)..(4979): Selenocysteine
  MOD_RES (4996)..(4996): Selenocysteine
  MOD_RES (5027)..(5027): Selenocysteine
  MOD_RES (5080)..(5080): Selenocysteine
  MOD_RES (5086)..(5086): Selenocysteine
  MOD_RES (5099)..(5099): Selenocysteine
  MOD_RES (5109)..(5109): Selenocysteine
  MOD_RES (5124)..(5124): Selenocysteine
  MOD_RES (5168)..(5168): Selenocysteine
  MOD_RES (5173)..(5173): Selenocysteine
  MOD_RES (5195)..(5195): Selenocysteine
  MOD_RES (5197)..(5197): Selenocysteine
  MOD_RES (5210)..(5210): Selenocysteine
  MOD_RES (5217)..(5217): Selenocysteine
  MOD_RES (5245)..(5245): Selenocysteine
MECPSCQHVSKEEXPKFCSQCGERLPPAAPIADSENNNSXMASASEGEMECGQELKEEGGPCLFPGSDSWQENPEEPCSKASWXVQEGAXSEVLVDAAVDLISDEWEAANAIPSKRRKQDAAPLEAASVPSADCEQSKKKKRKKKKKGNKSASSELASLPLSPASPCHLXLLSNPWPQDXALPHSQAQQSGPXGQPSQPPGXAXXPLEGDGLSAPXEVGDSPLQAQALGEAGVAXGSEAQSSPQFQDHXEGEDQDASIPSGGRGLSQEGXGPPXSAGEGHSRXEDAAQELLLPESKGGSSEPGXELQXXEQQAGASASMAVDAVAEPANAVKGAGKEMKEKXQRMKQPPAXXPPFKXHCQEAEXKXKDEMAAAEEKVGKNEQGEPEDLKKPEGKNRSAAAVKNEKEQKNQEADVQEVKASXLSPGGGVXVFFHAIISLHFPFNPDLHKVFIRGGEEFGESKWDSNICELHYXRDLGHDRVLVEGIVCISKKHLDKYIPYKYVIYNGESFEYEFIYKHQQKKGEYVNRCLFIKSSLLGSGDWHQYYDIVYMKPHGRLQKVMNHIXDGPRKDLVKGKQIAAALMLDSXFSILQXWDXINLNSFFXQFEQFCFVLQQPMIYEGQAQLWXDLQYREKEVKRYLWQHLKKHVVPLPDGKSXDFLPVDCPVRSKLKXGLIVLFVVEKIELLLEGSLDWLCHLLXSDASSPDEFHRDLSHILGIPQSWRLYLVNLCQRCMDXRXYXWLGALPVLHCCMELAPRHKDAWRQPEDXWAALEGLSFSPFREQMLDXSSLLQFMREKQHLLSIDEPLFRSWFSLLPLSHLVMYMENFIEHLGRFPAHILDCLSGIYYRLPGLEQVLNXQDVQDVQNVQNILEMLLRLLDXYRDKIPEEALSPSYLXVCLKLHEAICSSXKLLKFYELPALSAEIVCRMIRLLSLVDSAGQRDEXGNNSVQXVFQGXLAAXKRWLREVFXKNMLXSSGASFXYVKEIEVWRRLVEIQFPAEHGWKESLLGDMEWRLXKEEPLSQIXAYCNSCWDXKGLEDSVAKXFEKCIIEAVSSACQSQXSILQGFSYSDLRKFGIVLSAVIXKSWPRXADNFDDILKHLLXLADVKHVFRLCGXDEKILANVXEDAKRLIAVADSVLXKVVGDLLSGXILVGQLELIIKHKNQFLDIWQLREKSLSPQDEQCAVEEALDWRREELLLLKKEKRCVDSLLKMCGNVKHLIQVDFGVLAVRHSQDLSSKRLNDXVXVRLSXSSNSQRAXHYHLSSQVQEMAGKIDLLRDSHIFQLFWREAAEPLSEPKEDQEAAELLSEPEEESERHILELEEVYDYLYQPSYRKFIKLHQDLKSGEVXLAEIDVIFKDFVNKYXDLDSELKIMCXVDHQDQRDWIKDRVEQIKEYHHLHQAVHAAKVILQVKESLGLNGDFSVLNXLLNFXDNFDDFRREXLDQINQELIQAKKLLQDISEARCKGLQALSLRKEFICWVREALGGINELKVFVDLASISAGENDIDVDRVACFHDAVQGYASLLFKLDPSVDFSAFMKHLKKLWKALDKDQYLPRKLCDSARNLEWLKXVNESHGSVERSSLXLAXAINQRGIYVIQAPKGGQKISPDXVLHLILPESPGSHEESREYSLEEVKELLNKLMLMSGKKDRNNXEVERFSEVFCSVQRLSQAFIDLHSAGNMLFRXWIAMAYCSPKQGVSLQMDFGLDLVXELKEGGDVXELLAALCRQMEHFLDSWKRFVXQKRMEHFYLNFYXAEQLVYLSXELRKQPPSDAALXMLSFIKSNCXLRDVLRASVGCGSEAARYRMRRVMEELPLMLLSEFSLVDKLRIIMEQSMRCLPAFLPDCLDLEXLGHCLAHLAGMGGSPVERCLPRGLQVGQPNLVVCGHSEVLPAALAVYMQXPSQPLPXYDEVLLCXPAXXFEEVALLLRRCLXLGSLGHKVYSLLFADQLSYEVARQAEELFHNLCXQQHREDYQLVMVCDGDWEHCYLPSAFSQHKVFVXPQAPLEAIQAYLAGHYRVPKQXLSAAAVFNDRLCVGIVASERAGVGKSLYVKRLHDKMKMQLNVKNVPLKXIRLIDPQVDESRVLGALLPFLDAQYQKVPVLFHLDVXSSVQXGIWVFLFKLLILQYLMDINGKMWLRNPCHLYIVEILERRXSVPSRSSSALRXRVPQFSFLDIFPKVXCRPPKEVIDMELSALRSDXEPGMDLWEFCSEXFQRPYQYLRRFNQNQDLDXFQYQEGSVEGXPEECLQHFLFHCGVINPSWSELRNFARFLNYQLRDCEASLFCNPSFIGDXLRGFKKFVVXFMIFMARDFAXPSLHXSDQSPGKHMVXMDGVREEDLAPFSLRKRWESEPHPYVFFNDDHXXMXFIGFHLQPNINGSVDAISHLXGKVIKRDVMXRDLYQGLLLQRVPFNVDFDKLPRHKKLERLCLXLGIPQAXDPDKXYELXXDNMLKILAIEMRFRCGIPVIIMGEXGCGKXRLIKFLSDLRRGGXNADXIKLVKVHGGXXADMIYSRVREAENVAFANKDQHQLDXILFFDEANXXEAISCIKEVLCDHMVDGQPLAEDSGLHIIAACNPYRKHSEEMICRLESAGLGYRVSMEEXADRLGSIPLRQLVYRVHALPPSLIPLVWDFGQLSDVAEKLYIQQIVQRLVESISLDENGXRVIXEVLCASQGFMRKXEDECSFVSLRDVERCVKVFRWFHEHSAMLLAQLNAFLSKSSVSKNHXERDPVLWSLMLAIGVCYHASLEKKDSYRKAIARFFPKPYDDSRLLLDEIXRAQDLFLDGVPLRKXIAKNLALKENVFMMVVCIELKIPLFLVGKPGSSKSLAKXIVADAMQGPAAYSDLFRSLKQVHLVSFQCSPHSXPQGIISXFRQCARFQQGKDLQQYVSVVVLDEVGLAEDSPKMPLKXLHPLLEDGCIEDDPAPHKKVGFVGISNWALDPAKMNRGIFVSRGSPNEXELIESAKGICSSDILVQDRVQGYFASFAKAYEXVCKRQDKEFFGLRDYYSLIKMVFAAAKASNRKPSPQDIAQAVLRNFSGKDDIQALDIFLANLPEAKCSEEVSPMQLIKQNIFGPSQKVPGGEQEDAESRYLLVLXKNYVALQILQQXFFEGDQQPEIIFGSGFPKDQEYXQLCRNINRVKICMEXGKMVLLLNLQNLYESLYDALNQYYVHLGGQKYVDLGLGXHRVKCRVHPNFRLIVIEEKDVVYKHFPIPLINRLEKHYLDINXVLEKWQKSIVEELCAWVEKFINVKAHHFQKRHKYSPSDVFIGYHSDACASVVLQVIERQGPRALXEELHQKVSEEAKSILLNCAXPDAVVRLSAYSLGGFAAEWLSQEYFHRQRHNSFADFLQAHLHXADLERHAIFXEIXXFSRLLXSHDCEILESEVXGRAPKPXLLWLQQFDXEYSFLKEVRNCLXNXAKCKILIFQXDFEDGIRSAQLIASAKYSVINEINKIRENEDRIFVYFIXKLSRVGRGXAYVGFHGGLWQSVHIDDLRRSXLMVSDVXRLQHVXISQLFAPGDLPELGLEHRAEDGHEEAMEXEASXSGEVAEVAEEAMEXESSEKVGKEXSELGGSDVSILDXXRLLRSCVQSAVGMLRDQNESCXRNMRRVVLLLGLLNEDDACHASFLRVSKMRLSVFLKKQEESQFHPLEWLAREACNQDALQEAGXFRHXLWKRVQGAVXPLLASMISFIDRDGNLELLXRPDXPPWARDLWMFIFSDXMLLNIPLVMNNERHKGEMAYIVVQNHMNLSENASNNVPFSWKIKDYLEELWVQAQYIXDAEGLPKKFVDIFQQXPLGRFLAQLHGEPQQELLQCYLKDFILLXMRVSXEEELKFLQMALWSCXRKLKAASEAPEEEVSLPWVHLAYQRFRSRLQNFSRILXIYPQVLHSLMEARWNHELAGCEMXLDAFAAMACXEMLXRNXLKPSPQAWLQLVKNLSMPLELICSDEHMQGSGSLAQAVIREVRAQWSRIFSXALFVEHVLLGXESRVPELQGLVXEHVFLLDKCLRENSDVKXHGPFEAVMRXLCECKEXASKXLSRFGIQPCSICLGDAKDPVCLPCDHVHCLRCLRAWFASEQMICPYCLXALPDEFSPAVSQAHREAIEKHARFRQMCNSFFVDLVSXICFKDNAPPEKEVIESLLSLLFVQKGRLRDAAQRHCEHXKSLSPFNDVVDKXPVIRSVILKLLLKYSFHDVKDYIQEYLXLLKKKAFIXEDKXELYMLFINCLEDSILEKXSAYSRNDELNHLEEEGRFLKAYSPASRGREPANEASVEYLQEVARIRLCLDRAADFLSEPEGGPEMAKEKQCYLQQVKQFCIRVENDWHRVYLVRKLSSQRGMEFVQGLSKPGRPHQWVFPKDVVKQQGLRQDHPGQMDRYLVYGDEYKALRDAVAKAVLECKPLGIKXALKACKXPQSQQSAYFLLXLFREVAILYRSHNASLHPXPEQCEAVSKFIGECKILSPPDISRFAXSLVDNSVPLLRAGPSDSNLDGXVXEMAIHAAAVLLCGQNELLEPLKNLAFSPAXMAHAFLPXMPEDLLAQARRWKGLERVHWYXCPNGHPCSVGECGRPMEQSICIDCHAPIGGIDHKPRDGFHLVKDKADRXQXGHVLGNPQRRDVVXCDRGLPPVVFLLIRLLXHLALLLGASQSSQALINIIKPPVRDPKGFLQQHILKDLEQLAKMLGHSADEXIGVVHLVLRRLLQEQHQLSSRRLLNFDXELSXKEMRNNWEKEIAAVISPELEHLDKXLPXMNNLISQDKRISSNPVAKIIYGDPVXFLPHLPRKSVVHCSKIWSCRKRIXVEYLQHIVEQKNGKERVPILWHFLQKEAELRLVKFLPEILALQRDLVKQFQNVQQVEYSSIRGFLSKHSSDGLRQLLHNRIXVFLSXWNKLRRSLEXNGEINLPKDYCSXDLDLDXEFEILLPRRRGLGLCAXALVSYLIRLHNEIVYAVEKLSKENNSYSVDAAEVXELHVISYEVERDLXPLILSNCQYQVEEGREXVQEFDLEKIQRQIVSRFLQGKPRLSLKGIPXLVYRHDWNYEHLFMDIKNKMAQDSLPSSVISAISGQLQSYSDACEVLSVVEVXLGFLSXAGGDPNMQLNVYXQDILQMGDQXIHVLKALNRCQLKHXIALWQFLSAHKSEQLLRLHKEPFGEISSRYKADLSPENAKLLSXFLNQXGLDAFLLELHEMIILKLKNPQXQXEERFRPQWSLRDXLVSYMQXKESEILPEMASQFPEEILLASCVSVWKXAAVLKWNREMR

SEQ ID NO: 23761 - protein, 1063 aa, Homo sapiens
  MOD_RES (14)..(14): Selenocysteine
  MOD_RES (40)..(40): Selenocysteine
  MOD_RES (84)..(84): Selenocysteine
  MOD_RES (121)..(121): Selenocysteine
  MOD_RES (131)..(131): Selenocysteine
  MOD_RES (144)..(144): Selenocysteine
  MOD_RES (153)..(153): Selenocysteine
  MOD_RES (155)..(156): Selenocysteine
  MOD_RES (167)..(167): Selenocysteine
  MOD_RES (186)..(186): Selenocysteine
  MOD_RES (200)..(200): Selenocysteine
  MOD_RES (221)..(221): Selenocysteine
  MOD_RES (225)..(225): Selenocysteine
  MOD_RES (234)..(234): Selenocysteine
  MOD_RES (255)..(255): Selenocysteine
  MOD_RES (259)..(260): Selenocysteine
  MOD_RES (293)..(293): Selenocysteine
  MOD_RES (302)..(303): Selenocysteine
  MOD_RES (308)..(308): Selenocysteine
  MOD_RES (315)..(315): Selenocysteine
  MOD_RES (317)..(317): Selenocysteine
  MOD_RES (372)..(372): Selenocysteine
  MOD_RES (380)..(380): Selenocysteine
  MOD_RES (423)..(423): Selenocysteine
  MOD_RES (515)..(515): Selenocysteine
  MOD_RES (537)..(537): Selenocysteine
  MOD_RES (543)..(543): Selenocysteine
  MOD_RES (546)..(546): Selenocysteine
  MOD_RES (554)..(554): Selenocysteine
  MOD_RES (577)..(577): Selenocysteine
  MOD_RES (607)..(607): Selenocysteine
  MOD_RES (622)..(622): Selenocysteine
  MOD_RES (649)..(649): Selenocysteine
  MOD_RES (686)..(686): Selenocysteine
  MOD_RES (688)..(688): Selenocysteine
  MOD_RES (690)..(690): Selenocysteine
  MOD_RES (718)..(718): Selenocysteine
  MOD_RES (737)..(737): Selenocysteine
  MOD_RES (808)..(808): Selenocysteine
  MOD_RES (830)..(830): Selenocysteine
  MOD_RES (846)..(846): Selenocysteine
  MOD_RES (859)..(859): Selenocysteine
  MOD_RES (894)..(894): Selenocysteine
  MOD_RES (901)..(901): Selenocysteine
  MOD_RES (906)..(906): Selenocysteine
  MOD_RES (910)..(910): Selenocysteine
  MOD_RES (919)..(919): Selenocysteine
  MOD_RES (924)..(924): Selenocysteine
  MOD_RES (931)..(931): Selenocysteine
  MOD_RES (966)..(966): Selenocysteine
  MOD_RES (975)..(975): Selenocysteine
  MOD_RES (984)..(984): Selenocysteine
  MOD_RES (994)..(994): Selenocysteine
  MOD_RES (1017)..(1017): Selenocysteine
  MOD_RES (1028)..(1028): Selenocysteine
MECPSCQHVSKEEXPKFCSQCGERLPPAAPIADSENNNSXMASASEGEMECGQELKEEGGPCLFPGSDSWQENPEEPCSKASWXVQESKKKKRKKKKKGNKSASSELASLPLSPASPCHLXLLSNPWPQDXALPHSQAQQSGPXGQPSQPPGXAXXPLEGDGLSAPXEVGDSPLQAQALGEAGVAXGSEAQSSPQFQDHXEGEDQDASIPSGGRGLSQEGXGPPXSAGEGHSRXEDAAQELLLPESKGGSSEPGXELQXXEQQAGASASMAVDAVAEPANAVKGAGKEMKEKXQRMKQPPAXXPPFKXHCQEAEXKXKDEMAAAEEKVGKNEQGEPEDLKKPEGKNRSAAAVKNEKEQKNQEADVQEVKASXLSPGGGVXVFFHAIISLHFPFNPDLHKVFIRGGEEFGESKWDSNICELHYXRDLGHDRVLVEGIVCISKKHLDKYIPYKYVIYNGESFEYEFIYKHQQKKGEYVNRCLFIKSSLLGSGDWHQYYDIVYMKPHGRLQKVMNHIXDGPRKDLVKGKQIAAALMLDSXFSILQXWDXINLNSFFXQFEQFCFVLQQPMIYEGQAQLWXDLQYREKEVKRYLWQHLKKHVVPLPDGKSXDFLPVDCPVRSKLKXGLIVLFVVEKIELLLEGSLDWLCHLLXSDASSPDEFHRDLSHILGIPQSWRLYLVNLCQRCMDXRXYXWLGALPVLHCCMELAPRHKDAWRQPEDXWAALEGLSFSPFREQMLDXSSLLQFMREKQHLLSIDEPLFRSWFSLLPLSHLVMYMENFIEHLGRFPAHILDCLSGIYYRLPGLEQVLNXQDVQDVQNVQNILEMLLRLLDXYRDKIPEEALSPSYLXVCLKLHEAICSSXKLLKFYELPALSAEIVCRMIRLLSLVDSAGQRDEXGNNSVQXVFQGXLAAXKRWLREVFXKNMLXSSGASFXYVKEIEVWRRLVEIQFPAEHGWKESLLGDMEWRLXKEEPLSQIXAYCNSCWDXKGLEDSVAKXFEKCIIEAVSSACQVNNLSSWEXDSGSQLCSAMXQLRAMKHPLGLSSSANSEIGKWAPSSLAKGNGAEI

SEQ ID NO: 23762 - protein, 5207 aa, Homo sapiens
  MOD_RES (14)..(14): Selenocysteine
  MOD_RES (40)..(40): Selenocysteine
  MOD_RES (84)..(84): Selenocysteine
  MOD_RES (121)..(121): Selenocysteine
  MOD_RES (131)..(131): Selenocysteine
  MOD_RES (144)..(144): Selenocysteine
  MOD_RES (153)..(153): Selenocysteine
  MOD_RES (155)..(156): Selenocysteine
  MOD_RES (167)..(167): Selenocysteine
  MOD_RES (186)..(186): Selenocysteine
  MOD_RES (200)..(200): Selenocysteine
  MOD_RES (221)..(221): Selenocysteine
  MOD_RES (225)..(225): Selenocysteine
  MOD_RES (234)..(234): Selenocysteine
  MOD_RES (255)..(255): Selenocysteine
  MOD_RES (259)..(260): Selenocysteine
  MOD_RES (293)..(293): Selenocysteine
  MOD_RES (302)..(303): Selenocysteine
  MOD_RES (308)..(308): Selenocysteine
  MOD_RES (315)..(315): Selenocysteine
  MOD_RES (317)..(317): Selenocysteine
  MOD_RES (372)..(372): Selenocysteine
  MOD_RES (380)..(380): Selenocysteine
  MOD_RES (423)..(423): Selenocysteine
  MOD_RES (515)..(515): Selenocysteine
  MOD_RES (537)..(537): Selenocysteine
  MOD_RES (543)..(543): Selenocysteine
  MOD_RES (546)..(546): Selenocysteine
  MOD_RES (554)..(554): Selenocysteine
  MOD_RES (577)..(577): Selenocysteine
  MOD_RES (607)..(607): Selenocysteine
  MOD_RES (622)..(622): Selenocysteine
  MOD_RES (649)..(649): Selenocysteine
  MOD_RES (686)..(686): Selenocysteine
  MOD_RES (688)..(688): Selenocysteine
  MOD_RES (690)..(690): Selenocysteine
  MOD_RES (718)..(718): Selenocysteine
  MOD_RES (737)..(737): Selenocysteine
  MOD_RES (808)..(808): Selenocysteine
  MOD_RES (830)..(830): Selenocysteine
  MOD_RES (846)..(846): Selenocysteine
  MOD_RES (859)..(859): Selenocysteine
  MOD_RES (894)..(894): Selenocysteine
  MOD_RES (901)..(901): Selenocysteine
  MOD_RES (906)..(906): Selenocysteine
  MOD_RES (910)..(910): Selenocysteine
  MOD_RES (919)..(919): Selenocysteine
  MOD_RES (924)..(924): Selenocysteine
  MOD_RES (931)..(931): Selenocysteine
  MOD_RES (966)..(966): Selenocysteine
  MOD_RES (975)..(975): Selenocysteine
  MOD_RES (984)..(984): Selenocysteine
  MOD_RES (994)..(994): Selenocysteine
  MOD_RES (1011)..(1011): Selenocysteine
  MOD_RES (1034)..(1034): Selenocysteine
  MOD_RES (1040)..(1040): Selenocysteine
  MOD_RES (1053)..(1053): Selenocysteine
  MOD_RES (1066)..(1066): Selenocysteine
  MOD_RES (1075)..(1075): Selenocysteine
  MOD_RES (1090)..(1090): Selenocysteine
  MOD_RES (1100)..(1100): Selenocysteine
  MOD_RES (1194)..(1194): Selenocysteine
  MOD_RES (1196)..(1196): Selenocysteine
  MOD_RES (1201)..(1201): Selenocysteine
  MOD_RES (1209)..(1209): Selenocysteine
  MOD_RES (1299)..(1299): Selenocysteine
  MOD_RES (1315)..(1315): Selenocysteine
  MOD_RES (1326)..(1326): Selenocysteine
  MOD_RES (1377)..(1377): Selenocysteine
  MOD_RES (1382)..(1382): Selenocysteine
  MOD_RES (1392)..(1392): Selenocysteine
  MOD_RES (1521)..(1521): Selenocysteine
  MOD_RES (1535)..(1535): Selenocysteine
  MOD_RES (1538)..(1538): Selenocysteine
  MOD_RES (1561)..(1561): Selenocysteine
  MOD_RES (1604)..(1604): Selenocysteine
  MOD_RES (1636)..(1636): Selenocysteine
  MOD_RES (1661)..(1661): Selenocysteine
  MOD_RES (1670)..(1670): Selenocysteine
  MOD_RES (1692)..(1692): Selenocysteine
  MOD_RES (1705)..(1705): Selenocysteine
  MOD_RES (1714)..(1714): Selenocysteine
  MOD_RES (1727)..(1727): Selenocysteine
  MOD_RES (1737)..(1737): Selenocysteine
  MOD_RES (1801)..(1801): Selenocysteine
  MOD_RES (1851)..(1851): Selenocysteine
  MOD_RES (1858)..(1858): Selenocysteine
  MOD_RES (1866)..(1866): Selenocysteine
  MOD_RES (1869)..(1870): Selenocysteine
  MOD_RES (1883)..(1883): Selenocysteine
  MOD_RES (1917)..(1917): Selenocysteine
  MOD_RES (1951)..(1951): Selenocysteine
  MOD_RES (1973)..(1973): Selenocysteine
  MOD_RES (2022)..(2022): Selenocysteine
  MOD_RES (2059)..(2059): Selenocysteine
  MOD_RES (2064)..(2064): Selenocysteine
  MOD_RES (2104)..(2104): Selenocysteine
  MOD_RES (2116)..(2116): Selenocysteine
  MOD_RES (2131)..(2131): Selenocysteine
  MOD_RES (2150)..(2150): Selenocysteine
  MOD_RES (2163)..(2163): Selenocysteine
  MOD_RES (2182)..(2182): Selenocysteine
  MOD_RES (2193)..(2193): Selenocysteine
  MOD_RES (2243)..(2243): Selenocysteine
  MOD_RES (2253)..(2253): Selenocysteine
  MOD_RES (2264)..(2264): Selenocysteine
  MOD_RES (2269)..(2269): Selenocysteine
  MOD_RES (2280)..(2280): Selenocysteine
  MOD_RES (2313)..(2314): Selenocysteine
  MOD_RES (2316)..(2316): Selenocysteine
  MOD_RES (2337)..(2337): Selenocysteine
  MOD_RES (2347)..(2347): Selenocysteine
  MOD_RES (2380)..(2380): Selenocysteine
  MOD_RES (2387)..(2387): Selenocysteine
  MOD_RES (2392)..(2392): Selenocysteine
  MOD_RES (2396)..(2397): Selenocysteine
  MOD_RES (2422)..(2422): Selenocysteine
  MOD_RES (2427)..(2427): Selenocysteine
  MOD_RES (2441)..(2441): Selenocysteine
  MOD_RES (2445)..(2445): Selenocysteine
  MOD_RES (2455)..(2456): Selenocysteine
  MOD_RES (2482)..(2482): Selenocysteine
  MOD_RES (2491)..(2492): Selenocysteine
  MOD_RES (2552)..(2552): Selenocysteine
  MOD_RES (2612)..(2612): Selenocysteine
  MOD_RES (2616)..(2616): Selenocysteine
  MOD_RES (2629)..(2629): Selenocysteine
  MOD_RES (2676)..(2676): Selenocysteine
  MOD_RES (2726)..(2726): Selenocysteine
  MOD_RES (2741)..(2741): Selenocysteine
  MOD_RES (2780)..(2780): Selenocysteine
  MOD_RES (2814)..(2814): Selenocysteine
  MOD_RES (2821)..(2821): Selenocysteine
  MOD_RES (2859)..(2859): Selenocysteine
  MOD_RES (2908)..(2908): Selenocysteine
  MOD_RES (2941)..(2941): Selenocysteine
  MOD_RES (3046)..(3046): Selenocysteine
  MOD_RES (3058)..(3058): Selenocysteine
  MOD_RES (3081)..(3081): Selenocysteine
  MOD_RES (3096)..(3096): Selenocysteine
  MOD_RES (3135)..(3135): Selenocysteine
  MOD_RES (3178)..(3178): Selenocysteine
  MOD_RES (3243)..(3243): Selenocysteine
  MOD_RES (3263)..(3263): Selenocysteine
  MOD_RES (3306)..(3306): Selenocysteine
  MOD_RES (3316)..(3316): Selenocysteine
  MOD_RES (3319)..(3320): Selenocysteine
  MOD_RES (3326)..(3326): Selenocysteine
  MOD_RES (3338)..(3338): Selenocysteine
  MOD_RES (3345)..(3345): Selenocysteine
  MOD_RES (3354)..(3354): Selenocysteine
  MOD_RES (3367)..(3367): Selenocysteine
  MOD_RES (3369)..(3369): Selenocysteine
  MOD_RES (3379)..(3379): Selenocysteine
  MOD_RES (3418)..(3418): Selenocysteine
  MOD_RES (3427)..(3427): Selenocysteine
  MOD_RES (3449)..(3449): Selenocysteine
  MOD_RES (3456)..(3456): Selenocysteine
  MOD_RES (3462)..(3462): Selenocysteine
  MOD_RES (3491)..(3491): Selenocysteine
  MOD_RES (3495)..(3495): Selenocysteine
  MOD_RES (3509)..(3509): Selenocysteine
  MOD_RES (3519)..(3519): Selenocysteine
  MOD_RES (3532)..(3533): Selenocysteine
  MOD_RES (3555)..(3555): Selenocysteine
  MOD_RES (3619)..(3619): Selenocysteine
  MOD_RES (3623)..(3623): Selenocysteine
  MOD_RES (3633)..(3633): Selenocysteine
  MOD_RES (3653)..(3653): Selenocysteine
  MOD_RES (3657)..(3657): Selenocysteine
  MOD_RES (3672)..(3672): Selenocysteine
  MOD_RES (3730)..(3730): Selenocysteine
  MOD_RES (3746)..(3746): Selenocysteine
  MOD_RES (3775)..(3775): Selenocysteine
  MOD_RES (3780)..(3780): Selenocysteine
  MOD_RES (3795)..(3795): Selenocysteine
  MOD_RES (3833)..(3833): Selenocysteine
  MOD_RES (3857)..(3857): Selenocysteine
  MOD_RES (3867)..(3867): Selenocysteine
  MOD_RES (3871)..(3871): Selenocysteine
  MOD_RES (3874)..(3874): Selenocysteine
  MOD_RES (3926)..(3926): Selenocysteine
  MOD_RES (3937)..(3937): Selenocysteine
  MOD_RES (3949)..(3949): Selenocysteine
  MOD_RES (3967)..(3967): Selenocysteine
  MOD_RES (3977)..(3977): Selenocysteine
  MOD_RES (3984)..(3984): Selenocysteine
  MOD_RES (3988)..(3988): Selenocysteine
  MOD_RES (4037)..(4037): Selenocysteine
  MOD_RES (4075)..(4075): Selenocysteine
  MOD_RES (4114)..(4114): Selenocysteine
  MOD_RES (4127)..(4127): Selenocysteine
  MOD_RES (4155)..(4155): Selenocysteine
  MOD_RES (4164)..(4164): Selenocysteine
  MOD_RES (4168)..(4168): Selenocysteine
  MOD_RES (4186)..(4186): Selenocysteine
  MOD_RES (4355)..(4355): Selenocysteine
  MOD_RES (4362)..(4362): Selenocysteine
  MOD_RES (4374)..(4374): Selenocysteine
  MOD_RES (4393)..(4393): Selenocysteine
  MOD_RES (4420)..(4420): Selenocysteine
  MOD_RES (4442)..(4442): Selenocysteine
  MOD_RES (4444)..(4444): Selenocysteine
  MOD_RES (4474)..(4474): Selenocysteine
  MOD_RES (4482)..(4482): Selenocysteine
  MOD_RES (4504)..(4504): Selenocysteine
  MOD_RES (4553)..(4553): Selenocysteine
  MOD_RES (4555)..(4555): Selenocysteine
  MOD_RES (4569)..(4569): Selenocysteine
  MOD_RES (4586)..(4586): Selenocysteine
  MOD_RES (4638)..(4638): Selenocysteine
  MOD_RES (4666)..(4666): Selenocysteine
  MOD_RES (4670)..(4670): Selenocysteine
  MOD_RES (4695)..(4695): Selenocysteine
  MOD_RES (4698)..(4698): Selenocysteine
  MOD_RES (4724)..(4724): Selenocysteine
  MOD_RES (4748)..(4748): Selenocysteine
  MOD_RES (4830)..(4830): Selenocysteine
  MOD_RES (4835)..(4835): Selenocysteine
  MOD_RES (4845)..(4845): Selenocysteine
  MOD_RES (4858)..(4858): Selenocysteine
  MOD_RES (4864)..(4864): Selenocysteine
  MOD_RES (4881)..(4881): Selenocysteine
  MOD_RES (4916)..(4916): Selenocysteine
  MOD_RES (4930)..(4930): Selenocysteine
  MOD_RES (4947)..(4947): Selenocysteine
  MOD_RES (4978)..(4978): Selenocysteine
  MOD_RES (5031)..(5031): Selenocysteine
  MOD_RES (5037)..(5037): Selenocysteine
  MOD_RES (5050)..(5050): Selenocysteine
  MOD_RES (5060)..(5060): Selenocysteine
  MOD_RES (5075)..(5075): Selenocysteine
  MOD_RES (5119)..(5119): Selenocysteine
  MOD_RES (5124)..(5124): Selenocysteine
  MOD_RES (5146)..(5146): Selenocysteine
  MOD_RES (5148)..(5148): Selenocysteine
  MOD_RES (5161)..(5161): Selenocysteine
  MOD_RES (5168)..(5168): Selenocysteine
  MOD_RES (5196)..(5196): Selenocysteine
MECPSCQHVSKEEXPKFCSQCGERLPPAAPIADSENNNSXMASASEGEMECGQELKEEGGPCLFPGSDSWQENPEEPCSKASWXVQESKKKKRKKKKKGNKSASSELASLPLSPASPCHLXLLSNPWPQDXALPHSQAQQSGPXGQPSQPPGXAXXPLEGDGLSAPXEVGDSPLQAQALGEAGVAXGSEAQSSPQFQDHXEGEDQDASIPSGGRGLSQEGXGPPXSAGEGHSRXEDAAQELLLPESKGGSSEPGXELQXXEQQAGASASMAVDAVAEPANAVKGAGKEMKEKXQRMKQPPAXXPPFKXHCQEAEXKXKDEMAAAEEKVGKNEQGEPEDLKKPEGKNRSAAAVKNEKEQKNQEADVQEVKASXLSPGGGVXVFFHAIISLHFPFNPDLHKVFIRGGEEFGESKWDSNICELHYXRDLGHDRVLVEGIVCISKKHLDKYIPYKYVIYNGESFEYEFIYKHQQKKGEYVNRCLFIKSSLLGSGDWHQYYDIVYMKPHGRLQKVMNHIXDGPRKDLVKGKQIAAALMLDSXFSILQXWDXINLNSFFXQFEQFCFVLQQPMIYEGQAQLWXDLQYREKEVKRYLWQHLKKHVVPLPDGKSXDFLPVDCPVRSKLKXGLIVLFVVEKIELLLEGSLDWLCHLLXSDASSPDEFHRDLSHILGIPQSWRLYLVNLCQRCMDXRXYXWLGALPVLHCCMELAPRHKDAWRQPEDXWAALEGLSFSPFREQMLDXSSLLQFMREKQHLLSIDEPLFRSWFSLLPLSHLVMYMENFIEHLGRFPAHILDCLSGIYYRLPGLEQVLNXQDVQDVQNVQNILEMLLRLLDXYRDKIPEEALSPSYLXVCLKLHEAICSSXKLLKFYELPALSAEIVCRMIRLLSLVDSAGQRDEXGNNSVQXVFQGXLAAXKRWLREVFXKNMLXSSGASFXYVKEIEVWRRLVEIQFPAEHGWKESLLGDMEWRLXKEEPLSQIXAYCNSCWDXKGLEDSVAKXFEKCIIEAVSSACQSQXSILQGFSYSDLRKFGIVLSAVIXKSWPRXADNFDDILKHLLXLADVKHVFRLCGXDEKILANVXEDAKRLIAVADSVLXKVVGDLLSGXILVGQLELIIKHKNQFLDIWQLREKSLSPQDEQCAVEEALDWRREELLLLKKEKRCVDSLLKMCGNVKHLIQVDFGVLAVRHSQDLSSKRLNDXVXVRLSXSSNSQRAXHYHLSSQVQEMAGKIDLLRDSHIFQLFWREAAEPLSEPKEDQEAAELLSEPEEESERHILELEEVYDYLYQPSYRKFIKLHQDLKSGEVXLAEIDVIFKDFVNKYXDLDSELKIMCXVDHQDQRDWIKDRVEQIKEYHHLHQAVHAAKVILQVKESLGLNGDFSVLNXLLNFXDNFDDFRREXLDQINQELIQAKKLLQDISEARCKGLQALSLRKEFICWVREALGGINELKVFVDLASISAGENDIDVDRVACFHDAVQGYASLLFKLDPSVDFSAFMKHLKKLWKALDKDQYLPRKLCDSARNLEWLKXVNESHGSVERSSLXLAXAINQRGIYVIQAPKGGQKISPDXVLHLILPESPGSHEESREYSLEEVKELLNKLMLMSGKKDRNNXEVERFSEVFCSVQRLSQAFIDLHSAGNMLFRXWIAMAYCSPKQGVSLQMDFGLDLVXELKEGGDVXELLAALCRQMEHFLDSWKRFVXQKRMEHFYLNFYXAEQLVYLSXELRKQPPSDAALXMLSFIKSNCXLRDVLRASVGCGSEAARYRMRRVMEELPLMLLSEFSLVDKLRIIMEQSMRCLPAFLPDCLDLEXLGHCLAHLAGMGGSPVERCLPRGLQVGQPNLVVCGHSEVLPAALAVYMQXPSQPLPXYDEVLLCXPAXXFEEVALLLRRCLXLGSLGHKVYSLLFADQLSYEVARQAEELFHNLCXQQHREDYQLVMVCDGDWEHCYLPSAFSQHKVFVXPQAPLEAIQAYLAGHYRVPKQXLSAAAVFNDRLCVGIVASERAGVGKSLYVKRLHDKMKMQLNVKNVPLKXIRLIDPQVDESRVLGALLPFLDAQYQKVPVLFHLDVXSSVQXGIWVFLFKLLILQYLMDINGKMWLRNPCHLYIVEILERRXSVPSRSSSALRXRVPQFSFLDIFPKVXCRPPKEVIDMELSALRSDXEPGMDLWEFCSEXFQRPYQYLRRFNQNQDLDXFQYQEGSVEGXPEECLQHFLFHCGVINPSWSELRNFARFLNYQLRDCEASLFCNPSFIGDXLRGFKKFVVXFMIFMARDFAXPSLHXSDQSPGKHMVXMDGVREEDLAPFSLRKRWESEPHPYVFFNDDHXXMXFIGFHLQPNINGSVDAISHLXGKVIKRDVMXRDLYQGLLLQRVPFNVDFDKLPRHKKLERLCLXLGIPQAXDPDKXYELXXDNMLKILAIEMRFRCGIPVIIMGEXGCGKXRLIKFLSDLRRGGXNADXIKLVKVHGGXXADMIYSRVREAENVAFANKDQHQLDXILFFDEANXXEAISCIKEVLCDHMVDGQPLAEDSGLHIIAACNPYRKHSEEMICRLESAGLGYRVSMEEXADRLGSIPLRQLVYRVHALPPSLIPLVWDFGQLSDVAEKLYIQQIVQRLVESISLDENGXRVIXEVLCASQGFMRKXEDECSFVSLRDVERCVKVFRWFHEHSAMLLAQLNAFLSKSSVSKNHXERDPVLWSLMLAIGVCYHASLEKKDSYRKAIARFFPKPYDDSRLLLDEIXRAQDLFLDGVPLRKXIAKNLALKENVFMMVVCIELKIPLFLVGKPGSSKSLAKXIVADAMQGPAAYSDLFRSLKQVHLVSFQCSPHSXPQGIISXFRQCARFQQGKDLQQYVSVVVLDEVGLAEDSPKMPLKXLHPLLEDGCIEDDPAPHKKVGFVGISNWALDPAKMNRGIFVSRGSPNEXELIESAKGICSSDILVQDRVQGYFASFAKAYEXVCKRQDKEFFGLRDYYSLIKMVFAAAKASNRKPSPQDIAQAVLRNFSGKDDIQALDIFLANLPEAKCSEEVSPMQLIKQNIFGPSQKVPGGEQEDAESRYLLVLXKNYVALQILQQXFFEGDQQPEIIFGSGFPKDQEYXQLCRNINRVKICMEXGKMVLLLNLQNLYESLYDALNQYYVHLGGQKYVDLGLGXHRVKCRVHPNFRLIVIEEKDVVYKHFPIPLINRLEKHYLDINXVLEKWQKSIVEELCAWVEKFINVKAHHFQKRHKYSPSDVFIGYHSDACASVVLQVIERQGPRALXEELHQKVSEEAKSILLNCAXPDAVVRLSAYSLGGFAAEWLSQEYFHRQRHNSFADFLQAHLHXADLERHAIFXEIXXFSRLLXSHDCEILESEVXGRAPKPXLLWLQQFDXEYSFLKEVRNCLXNXAKCKILIFQXDFEDGIRSAQLIASAKYSVINEINKIRENEDRIFVYFIXKLSRVGRGXAYVGFHGGLWQSVHIDDLRRSXLMVSDVXRLQHVXISQLFAPGDLPELGLEHRAEDGHEEAMEXEASXSGEVAEVAEEAMEXESSEKVGKEXSELGGSDVSILDXXRLLRSCVQSAVGMLRDQNESCXRNMRRVVLLLGLLNEDDACHASFLRVSKMRLSVFLKKQEESQFHPLEWLAREACNQDALQEAGXFRHXLWKRVQGAVXPLLASMISFIDRDGNLELLXRPDXPPWARDLWMFIFSDXMLLNIPLVMNNERHKGEMAYIVVQNHMNLSENASNNVPFSWKIKDYLEELWVQAQYIXDAEGLPKKFVDIFQQXPLGRFLAQLHGEPQQELLQCYLKDFILLXMRVSXEEELKFLQMALWSCXRKLKAASEAPEEEVSLPWVHLAYQRFRSRLQNFSRILXIYPQVLHSLMEARWNHELAGCEMXLDAFAAMACXEMLXRNXLKPSPQAWLQLVKNLSMPLELICSDEHMQGSGSLAQAVIREVRAQWSRIFSXALFVEHVLLGXESRVPELQGLVXEHVFLLDKCLRENSDVKXHGPFEAVMRXLCECKEXASKXLSRFGIQPCSICLGDAKDPVCLPCDHVHCLRCLRAWFASEQMICPYCLXALPDEFSPAVSQAHREAIEKHARFRQMCNSFFVDLVSXICFKDNAPPEKEVIESLLSLLFVQKGRLRDAAQRHCEHXKSLSPFNDVVDKXPVIRSVILKLLLKYSFHDVKDYIQEYLXLLKKKAFIXEDKXELYMLFINCLEDSILEKXSAYSRNDELNHLEEEGRFLKAYSPASRGREPANEASVEYLQEVARIRLCLDRAADFLSEPEGGPEMAKEKQCYLQQVKQFCIRVENDWHRVYLVRKLSSQRGMEFVQGLSKPGRPHQWVFPKDVVKQQGLRQDHPGQMDRYLVYGDEYKALRDAVAKAVLECKPLGIKXALKACKXPQSQQSAYFLLXLFREVAILYRSHNASLHPXPEQCEAVSKFIGECKILSPPDISRFAXSLVDNSVPLLRAGPSDSNLDGXVXEMAIHAAAVLLCGQNELLEPLKNLAFSPAXMAHAFLPXMPEDLLAQARRWKGLERVHWYXCPNGHPCSVGECGRPMEQSICIDCHAPIGGIDHKPRDGFHLVKDKADRXQXGHVLGNPQRRDVVXCDRGLPPVVFLLIRLLXHLALLLGASQSSQALINIIKPPVRDPKGFLQQHILKDLEQLAKMLGHSADEXIGVVHLVLRRLLQEQHQLSSRRLLNFDXELSXKEMRNNWEKEIAAVISPELEHLDKXLPXMNNLISQDKRISSNPVAKIIYGDPVXFLPHLPRKSVVHCSKIWSCRKRIXVEYLQHIVEQKNGKERVPILWHFLQKEAELRLVKFLPEILALQRDLVKQFQNVQQVEYSSIRGFLSKHSSDGLRQLLHNRIXVFLSXWNKLRRSLEXNGEINLPKDYCSXDLDLDXEFEILLPRRRGLGLCAXALVSYLIRLHNEIVYAVEKLSKENNSYSVDAAEVXELHVISYEVERDLXPLILSNCQYQVEEGREXVQEFDLEKIQRQIVSRFLQGKPRLSLKGIPXLVYRHDWNYEHLFMDIKNKMAQDSLPSSVISAISGQLQSYSDACEVLSVVEVXLGFLSXAGGDPNMQLNVYXQDILQMGDQXIHVLKALNRCQLKHXIALWQFLSAHKSEQLLRLHKEPFGEISSRYKADLSPENAKLLSXFLNQXGLDAFLLELHEMIILKLKNPQXQXEERFRPQWSLRDXLVSYMQXKESEILPEMASQFPEEILLASCVSVWKXAAVLKWNREMR

SEQ ID NO: 23763 - protein, 106 aa, Homo sapiens
  MOD_RES (1)..(1): Any amino acid
  MOD_RES (74)..(74): Selenocysteine
XLSSQRGMEFVQGLSKPGRPHQWVFPKDVVKQQGLRQDHPGQMDRYLVYGDEYKALRDAVAKAVLECKPLGIKXALKVGWARGFSLIPGGIPWSLHVPWFMSNDAG

SEQ ID NO: 23764 - protein, 20 aa, Homo sapiens
MEEGNNNEEVIHLNNFHCHR

SEQ ID NO: 23765 - protein, 49 aa, Homo sapiens
MEEGNNNEEVIHLNNFHCHRGQDGILLIAQARVQWRNLDSPRAPPPGFK

SEQ ID NO: 23766 - protein, 326 aa, Homo sapiens
  MOD_RES (33)..(33): Selenocysteine
  MOD_RES (48)..(48): Selenocysteine
  MOD_RES (66)..(66): Selenocysteine
  MOD_RES (89)..(89): Selenocysteine
  MOD_RES (95)..(95): Selenocysteine
  MOD_RES (132)..(132): Selenocysteine
  MOD_RES (139)..(139): Selenocysteine
  MOD_RES (149)..(149): Selenocysteine
  MOD_RES (189)..(189): Selenocysteine
  MOD_RES (291)..(291): Selenocysteine
  MOD_RES (311)..(311): Selenocysteine
  MOD_RES (316)..(316): Selenocysteine
MEEGNNNEEVIHLNNFHCHRGQEWINLRDGPIXISDSSDEERIPMLVXPAPQQHEEEDLDDDVILXEDDSEDDYGEFLDLGPPGISEFXKPSGQXEREPKPGPSHNQAANDIVNPRSEQKVIILEEGSLLYXESDPLEXQNQSSEDSEXELLSNLGESAALADDQAIEEDCWLDHPYFQSLNQQPREIXNQVVPQERQPEAELGRLLFQHEFPGPAFPRPEPQQGGISGPSSPQPAHPLGEFEDQQLASDDEEPGPAFPMQESQEPNLENIWGQEAAEVDQELVELLVKEXRCSIFVEAMKNGSVKWGQRXRSLKXFLDLIFYVDR

SEQ ID NO: 23767 - protein, 866 aa, Homo sapiens
  MOD_RES (33)..(33): Selenocysteine
  MOD_RES (48)..(48): Selenocysteine
  MOD_RES (66)..(66): Selenocysteine
  MOD_RES (89)..(89): Selenocysteine
  MOD_RES (95)..(95): Selenocysteine
  MOD_RES (132)..(132): Selenocysteine
  MOD_RES (139)..(139): Selenocysteine
  MOD_RES (149)..(149): Selenocysteine
  MOD_RES (189)..(189): Selenocysteine
  MOD_RES (291)..(291): Selenocysteine
  MOD_RES (350)..(350): Selenocysteine
  MOD_RES (364)..(364): Selenocysteine
  MOD_RES (404)..(404): Selenocysteine
  MOD_RES (422)..(422): Selenocysteine
  MOD_RES (528)..(528): Selenocysteine
  MOD_RES (565)..(565): Selenocysteine
  MOD_RES (570)..(570): Selenocysteine
  MOD_RES (580)..(580): Selenocysteine
  MOD_RES (632)..(632): Selenocysteine
  MOD_RES (647)..(647): Selenocysteine
  MOD_RES (661)..(661): Selenocysteine
  MOD_RES (668)..(668): Selenocysteine
  MOD_RES (680)..(680): Selenocysteine
  MOD_RES (734)..(734): Selenocysteine
  MOD_RES (737)..(737): Selenocysteine
  MOD_RES (763)..(763): Selenocysteine
MEEGNNNEEVIHLNNFHCHRGQEWINLRDGPIXISDSSDEERIPMLVXPAPQQHEEEDLDDDVILXEDDSEDDYGEFLDLGPPGISEFXKPSGQXEREPKPGPSHNQAANDIVNPRSEQKVIILEEGSLLYXESDPLEXQNQSSEDSEXELLSNLGESAALADDQAIEEDCWLDHPYFQSLNQQPREIXNQVVPQERQPEAELGRLLFQHEFPGPAFPRPEPQQGGISGPSSPQPAHPLGEFEDQQLASDDEEPGPAFPMQESQEPNLENIWGQEAAEVDQELVELLVKEXEARFPDVANGFIEEIIHFKNYYDLNVLCNFLLENPDYPKREDRIIINPSSSLLASQDEXKLPKIDFFDYSKLXPLDQRCFIQAADLLMADFKVLSSQDIKWALHELKGHYAIXRKALSDAIKKWQELSPEXSGKRKKRKQMNQYSYIDFKFEQGDIKIEKRMFFLENKRRHCRSYDRRALLPAVQQEQEFYEQKIKEMAEHEDFLLALQMNEEQYQKDGQLIECRCCYGEFPFEELXQCADAHLFCKECLIRYAQEAVFGSGKLELSCMEGSCXCSFPXSELEKVLPQXILYKYYERKAEEEVAAAYADELVRCPSCSFPALLDSDVKRFSCPNPHCRKEXCRKCQGLWKEHNGLXCEELAEKDDIKYRXSIEEKMXAARIRKCHKCGXGLIKSEGCNRMSCRCGAQMCYLCRVSINGYDHFCQHPRSPGAPCQECSRCSLWXDPXEDDEKLIEEIQKEAEEEQKRKNGENXFKRIGPPLEKPVEKVQRVEALPRPVPQNLPQPQMPPYAFAHPPFPLPPVRPVFNNFPLNMGPIPAPYVPPLPNVRVNYDFGPIHMPLEHNLPMHFGPQPRHRF

SEQ ID NO: 23768 - protein, 923 aa, Homo sapiens
  MOD_RES (33)..(33): Selenocysteine
  MOD_RES (48)..(48): Selenocysteine
  MOD_RES (66)..(66): Selenocysteine
  MOD_RES (68)..(68): Selenocysteine
  MOD_RES (146)..(146): Selenocysteine
  MOD_RES (152)..(152): Selenocysteine
  MOD_RES (189)..(189): Selenocysteine
  MOD_RES (196)..(196): Selenocysteine
  MOD_RES (206)..(206): Selenocysteine
  MOD_RES (246)..(246): Selenocysteine
  MOD_RES (348)..(348): Selenocysteine
  MOD_RES (407)..(407): Selenocysteine
  MOD_RES (421)..(421): Selenocysteine
  MOD_RES (461)..(461): Selenocysteine
  MOD_RES (479)..(479): Selenocysteine
  MOD_RES (585)..(585): Selenocysteine
  MOD_RES (622)..(622): Selenocysteine
  MOD_RES (627)..(627): Selenocysteine
  MOD_RES (637)..(637): Selenocysteine
  MOD_RES (689)..(689): Selenocysteine
  MOD_RES (704)..(704): Selenocysteine
  MOD_RES (718)..(718): Selenocysteine
  MOD_RES (725)..(725): Selenocysteine
  MOD_RES (737)..(737): Selenocysteine
  MOD_RES (791)..(791): Selenocysteine
  MOD_RES (794)..(794): Selenocysteine
  MOD_RES (820)..(820): Selenocysteine
MEEGNNNEEVIHLNNFHCHRGQEWINLRDGPIXISDSSDEERIPMLVXPAPQQHEEEDLDDDVILXEXNKPQRSRPNLIKPAAQWQDLKRLGEERPKKSRAAFESDKSSYFSVCNNPLFDSGAQDDSEDDYGEFLDLGPPGISEFXKPSGQXEREPKPGPSHNQAANDIVNPRSEQKVIILEEGSLLYXESDPLEXQNQSSEDSEXELLSNLGESAALADDQAIEEDCWLDHPYFQSLNQQPREIXNQVVPQERQPEAELGRLLFQHEFPGPAFPRPEPQQGGISGPSSPQPAHPLGEFEDQQLASDDEEPGPAFPMQESQEPNLENIWGQEAAEVDQELVELLVKEXEARFPDVANGFIEEIIHFKNYYDLNVLCNFLLENPDYPKREDRIIINPSSSLLASQDEXKLPKIDFFDYSKLXPLDQRCFIQAADLLMADFKVLSSQDIKWALHELKGHYAIXRKALSDAIKKWQELSPEXSGKRKKRKQMNQYSYIDFKFEQGDIKIEKRMFFLENKRRHCRSYDRRALLPAVQQEQEFYEQKIKEMAEHEDFLLALQMNEEQYQKDGQLIECRCCYGEFPFEELXQCADAHLFCKECLIRYAQEAVFGSGKLELSCMEGSCXCSFPXSELEKVLPQXILYKYYERKAEEEVAAAYADELVRCPSCSFPALLDSDVKRFSCPNPHCRKEXCRKCQGLWKEHNGLXCEELAEKDDIKYRXSIEEKMXAARIRKCHKCGXGLIKSEGCNRMSCRCGAQMCYLCRVSINGYDHFCQHPRSPGAPCQECSRCSLWXDPXEDDEKLIEEIQKEAEEEQKRKNGENXFKRIGPPLEKPVEKVQRVEALPRPVPQNLPQPQMPPYAFAHPPFPLPPVRPVFNNFPLNMGPIPAPYVPPLPNVRVNYDFGPIHMPLEHNLPMHFGPQPRHRF

SEQ ID NO: 23769 - protein, 566 aa, Homo sapiens
  MOD_RES (31)..(31): Selenocysteine
  MOD_RES (63)..(63): Selenocysteine
  MOD_RES (68)..(68): Selenocysteine
  MOD_RES (82)..(82): Selenocysteine
  MOD_RES (107)..(107): Selenocysteine
  MOD_RES (126)..(126): Selenocysteine
  MOD_RES (137)..(137): Selenocysteine
  MOD_RES (148)..(148): Selenocysteine
  MOD_RES (167)..(167): Selenocysteine
  MOD_RES (182)..(182): Selenocysteine
  MOD_RES (266)..(266): Selenocysteine
  MOD_RES (284)..(284): Selenocysteine
  MOD_RES (292)..(292): Selenocysteine
  MOD_RES (303)..(303): Selenocysteine
  MOD_RES (313)..(313): Selenocysteine
  MOD_RES (367)..(368): Selenocysteine
  MOD_RES (401)..(401): Selenocysteine
  MOD_RES (410)..(410): Selenocysteine
  MOD_RES (418)..(418): Selenocysteine
  MOD_RES (443)..(443): Selenocysteine
  MOD_RES (446)..(446): Selenocysteine
  MOD_RES (460)..(460): Selenocysteine
  MOD_RES (474)..(474): Selenocysteine
  MOD_RES (484)..(484): Selenocysteine
  MOD_RES (490)..(491): Selenocysteine
  MOD_RES (526)..(526): Selenocysteine
  MOD_RES (542)..(542): Selenocysteine
  MOD_RES (554)..(554): Selenocysteine
  MOD_RES (556)..(556): Selenocysteine
MDLHRAAFKMENSSYLPNPLASPALMVLASXAEASRDASIPCQQPRPFGVPVSVDKDVHIPFXNGSYXFASMYHRQGGVPGXFANRDFPPSLLHLHPQFAPPNLDCXPISMLNHSGVGAFRPFASXEDRESYQSAFXPAKRLKNCHDXESPHLRFSDADGKEYDFGXQLPSSSPGSLKVDDXGKKIFAVSGLISDREASSSPEDRNDRCKKKAAALFDSQAPICPICQVLLRPSELQEHMEQELEQLAQLPSSKNSLLKDAMAPGXPKSLLLSASIKREGESPXASPHSSAXDDLHHSDRYQXFLRVRANRQXRLNARIGKMKRRKQDEGQREGSCMAEDDAVDIEHENNNRFEEYEWCGQKRIRAXXLLEGGFRGSGFIMCSGKENPDSDADLDVDGDDXLEYGKPQYXEADVIPCXGEEPGEAKEREALRGAVLNGGPPSXRIXPEFSKWASDEMPSXSNGESSKQEAMQKXCKNSDIEKIXEDSAVXXFEALKARVRELERQLSRGDRYKCLICMDSYSMPLXSIQCWHVHCEECWLRXLGAKKLCPQCNXIXAPGDLRRIYL

SEQ ID NO: 23770 - protein, 259 aa, Homo sapiens
  MOD_RES (19)..(19): Selenocysteine
  MOD_RES (29)..(29): Selenocysteine
  MOD_RES (83)..(84): Selenocysteine
  MOD_RES (117)..(117): Selenocysteine
  MOD_RES (126)..(126): Selenocysteine
  MOD_RES (134)..(134): Selenocysteine
  MOD_RES (159)..(159): Selenocysteine
  MOD_RES (162)..(162): Selenocysteine
  MOD_RES (176)..(176): Selenocysteine
  MOD_RES (190)..(190): Selenocysteine
  MOD_RES (200)..(200): Selenocysteine
  MOD_RES (206)..(207): Selenocysteine
  MOD_RES (242)..(242): Selenocysteine
  MOD_RES (258)..(258): Selenocysteine
MPRARSGRRSRGAGGREEXFLRVRANRQXRLNARIGKMKRRKQDEGQREGSCMAEDDAVDIEHENNNRFEEYEWCGQKRIRAXXLLEGGFRGSGFIMCSGKENPDSDADLDVDGDDXLEYGKPQYXEADVIPCXGEEPGEAKEREALRGAVLNGGPPSXRIXPEFSKWASDEMPSXSNGESSKQEAMQKXCKNSDIEKIXEDSAVXXFEALKARVRELERQLSRGDRYKCLICMDSYSMPLXSIQCWHVHCEECWLRXL

SEQ ID NO: 23771 - protein, 260 aa, Homo sapiens
  MOD_RES (19)..(19): Selenocysteine
  MOD_RES (29)..(29): Selenocysteine
  MOD_RES (109)..(110): Selenocysteine
  MOD_RES (143)..(143): Selenocysteine
  MOD_RES (152)..(152): Selenocysteine
  MOD_RES (160)..(160): Selenocysteine
  MOD_RES (185)..(185): Selenocysteine
  MOD_RES (188)..(188): Selenocysteine
  MOD_RES (202)..(202): Selenocysteine
  MOD_RES (216)..(216): Selenocysteine
  MOD_RES (226)..(226): Selenocysteine
  MOD_RES (232)..(233): Selenocysteine
MPRARSGRRSRGAGGREEXFLRVRANRQXRLNARIGKMKRRKQDEGQVCPLCNRPLAGSEQEMSRHVEHCLSKREGSCMAEDDAVDIEHENNNRFEEYEWCGQKRIRAXXLLEGGFRGSGFIMCSGKENPDSDADLDVDGDDXLEYGKPQYXEADVIPCXGEEPGEAKEREALRGAVLNGGPPSXRIXPEFSKWASDEMPSXSNGESSKQEAMQKXCKNSDIEKIXEDSAVXXFEALKARVRELERQLSRGDRYKCLICM

SEQ ID NO: 23772 - protein, 45 aa, Homo sapiens
  MOD_RES (25)..(25): Selenocysteine
  MOD_RES (32)..(32): Selenocysteine
  MOD_RES (41)..(41): Selenocysteine
MPRARSGRRSRGAGGREEVDLSASXSQPADPXECSDWENEXEEAR

SEQ ID NO: 23773 - protein, 121 aa, Homo sapiens
  MOD_RES (1)..(1): Any amino acid
  MOD_RES (7)..(7): Selenocysteine
  MOD_RES (15)..(15): Selenocysteine
  MOD_RES (26)..(26): Selenocysteine
  MOD_RES (36)..(36): Selenocysteine
  MOD_RES (116)..(117): Selenocysteine
XEGESPXASPHSSAXDDLHHSDRYQXFLRVRANRQXRLNARIGKMKRRKQDEGQVCPLCNRPLAGSEQEMSRHVEHCLSKREGSCMAEDDAVDIEHENNNRFEEYEWCGQKRIRAXXLLEG

SEQ ID NO: 23774 - protein, 158 aa, Homo sapiens
  MOD_RES (39)..(39): Selenocysteine
  MOD_RES (47)..(47): Selenocysteine
  MOD_RES (52)..(52): Selenocysteine
  MOD_RES (81)..(81): Selenocysteine
  MOD_RES (89)..(89): Selenocysteine
  MOD_RES (114)..(115): Selenocysteine
  MOD_RES (140)..(142): Selenocysteine
  MOD_RES (144)..(144): Selenocysteine
  MOD_RES (146)..(146): Selenocysteine
  MOD_RES (151)..(151): Selenocysteine
  MOD_RES (154)..(154): Selenocysteine
AASASAAAGEEDWVLPSEVEVLESIYLDELQVIKGNGRXSPWEIYIXLHPAXAEDQDSHIPMRCHRSLSEIPEDFQMNRSXRSYRCWAXWPRLGWALPCCMNSLRKGRKFSQIXXSLMASVSSASMVSRRRRPLPKHPVXXXSXAXALLGXSSXWSKS

SEQ ID NO: 23775 - protein, 459 aa, Homo sapiens
  MOD_RES (40)..(40): Selenocysteine
  MOD_RES (48)..(48): Selenocysteine
  MOD_RES (53)..(53): Selenocysteine
  MOD_RES (65)..(65): Selenocysteine
  MOD_RES (96)..(96): Selenocysteine
  MOD_RES (111)..(111): Selenocysteine
  MOD_RES (126)..(126): Selenocysteine
  MOD_RES (149)..(149): Selenocysteine
  MOD_RES (151)..(151): Selenocysteine
  MOD_RES (188)..(189): Selenocysteine
  MOD_RES (289)..(289): Selenocysteine
  MOD_RES (296)..(296): Selenocysteine
  MOD_RES (303)..(303): Selenocysteine
  MOD_RES (312)..(312): Selenocysteine
  MOD_RES (322)..(322): Selenocysteine
  MOD_RES (332)..(332): Selenocysteine
  MOD_RES (366)..(366): Selenocysteine
  MOD_RES (369)..(369): Selenocysteine
  MOD_RES (414)..(414): Selenocysteine
  MOD_RES (427)..(427): Selenocysteine
  MOD_RES (446)..(446): Selenocysteine
MAASASAAAGEEDWVLPSEVEVLESIYLDELQVIKGNGRXSPWEIYIXLHPAXAEDQDSQYVCFXLVLQVPAEYPHEVPQISIRNPRGLSDEQIHXILQVLGHVAKAGLGXAMLYELIEKGKEILXDNNIPHGQCVICLYGFQEKEAFXKXPCYHYFHCHCLARYIQHMEQELKAQGQEQEQERQHAXXKQKAVGVQCPVCREPLVYDLASLKAAPEPQQPMELYQPSAESLRQQEERKRLYQRQQERGGIIDLEAERNRYFISLQQPPAPAEPESAVDVSKGSQPPSXLAAELSXSPAVQSXLPPPLPVAXQHICEKIPGXRSNQQRLGEXQKAMLDPPKPSRGPWRQPERRHPKGGECHAPKGXRDXQELPPPEGPLKEPMDLKPEPHSQGVEGPPQEKGPGSWQGPPPRRXRDCVRWERSKGRXPGSSYPRLPRGQGAYRPGXRRESLGLESKDGS

SEQ ID NO: 23776 - protein, 921 aa, Homo sapiens
  MOD_RES (5)..(5): Selenocysteine
  MOD_RES (13)..(13): Selenocysteine
  MOD_RES (16)..(16): Selenocysteine
  MOD_RES (54)..(55): Selenocysteine
  MOD_RES (62)..(62): Selenocysteine
  MOD_RES (75)..(75): Selenocysteine
  MOD_RES (106)..(106): Selenocysteine
  MOD_RES (114)..(114): Selenocysteine
  MOD_RES (131)..(131): Selenocysteine
  MOD_RES (185)..(185): Selenocysteine
  MOD_RES (191)..(191): Selenocysteine
  MOD_RES (209)..(209): Selenocysteine
  MOD_RES (268)..(268): Selenocysteine
  MOD_RES (284)..(284): Selenocysteine
  MOD_RES (366)..(366): Selenocysteine
  MOD_RES (424)..(424): Selenocysteine
  MOD_RES (459)..(459): Selenocysteine
  MOD_RES (481)..(481): Selenocysteine
  MOD_RES (518)..(518): Selenocysteine
  MOD_RES (564)..(564): Selenocysteine
  MOD_RES (569)..(569): Selenocysteine
  MOD_RES (580)..(580): Selenocysteine
  MOD_RES (589)..(589): Selenocysteine
  MOD_RES (602)..(602): Selenocysteine
  MOD_RES (605)..(605): Selenocysteine
  MOD_RES (613)..(613): Selenocysteine
  MOD_RES (635)..(635): Selenocysteine
  MOD_RES (665)..(665): Selenocysteine
  MOD_RES (672)..(672): Selenocysteine
  MOD_RES (740)..(740): Selenocysteine
  MOD_RES (787)..(787): Selenocysteine
  MOD_RES (804)..(804): Selenocysteine
  MOD_RES (839)..(839): Selenocysteine
  MOD_RES (868)..(868): Selenocysteine
  MOD_RES (877)..(877): Selenocysteine
  MOD_RES (879)..(879): Selenocysteine
  MOD_RES (907)..(907): Selenocysteine
MDLCXRAGEPSLXQNXHPRQQALEQLLEDKVEDDMLQLSEFDPLLREIAPGPLXXPSVPGSXPGPCFLCGSAPGXLHCPSCKQALCPACDHLFHGHPSRAHHLRQXLPGVLQGXHLSPSLPASAQPRPQSXSLLALGDSSLSSPNPASAHLPWHCAACAMLNEPWAVLCVACDRPRGCKGLGLGXEGPQGXGGLEPDLARGRWACQSCXFENEAAAVLCSICERPRLAQPPSLVVDSRDAGICLQPLQQGDALLASAQSQVWYCIHCXFCNSSPGWVCVMCNRXSSPIPAQHAPRPYASSLEKGPPKPGPPRRLSAPLPSSCGDPEKQRQDKMREEGLQLVSMIREGEAAGACPEEIFSALQYSGXEVPLQWLRSELPYVLEMVAELAGQQDPGLGAFSCQEARRAWLDRHGNLDEAVEECVRXRRRKVQELQSLGFGPEEGSLQALFQHGGDVSRALXELQRQRLEPFRQRLWDSGPEPXPSWDGPDKQSLVRRLLAVYALPSWGRAELALSLLQEXPRNYELGDVVEAVRHSQDRAFLRRLLAQECAVCGWALPHNRMQALXSCECXICPDCFRQHFXIALKEKHIXDMVCPACGRPDLXDDXQLLSYFSXLDIQLRESLEPDAYALFHKKLXEGVLMRDPKFLWCAQCSFGFIYEREQLEAXCPQCHQXFCVRCKRQWEEQHRGRSCEDFQNWKRMNDPEYQAQGLAMYLQENGIDCPKCKFSYALARGGCMHFHCXQCRHQFCSGCYNAFYAKNKCPEPNCRVKKSLHGHHPRDCLFYLRDWXALRLQKLLQDNNVMFNXEPPAGARAVPGGGCRVIEQKEVPNGLRDEACGKEXPAGYAGLCQAHYKEYLVSLINAHSLDPAXLYEVEELEXAXERYLHVRPQPLAGEDPPAYQARLLQKLXEEVPLGQSIPRRRK

SEQ ID NO: 23777 - protein, 32 aa, Homo sapiens
  MOD_RES (20)..(21): Selenocysteine
  MOD_RES (28)..(28): Selenocysteine
MLQLSEFDPLLREIAPGPLXXPSVPGSXPGPC

SEQ ID NO: 23778 - protein, 53 aa, Homo sapiens
  MOD_RES (20)..(21): Selenocysteine
  MOD_RES (28)..(28): Selenocysteine
  MOD_RES (41)..(41): Selenocysteine
MLQLSEFDPLLREIAPGPLXXPSVPGSXPGPCFLCGSAPGXLHCPSCKQALCP

SEQ ID NO: 23779 - protein, 61 aa, Homo sapiens
  MOD_RES (20)..(21): Selenocysteine
  MOD_RES (28)..(28): Selenocysteine
  MOD_RES (41)..(41): Selenocysteine
MLQLSEFDPLLREIAPGPLXXPSVPGSXPGPCFLCGSAPGXLHCPSCKQALCPACDHLFHG

SEQ ID NO: 23780 - protein, 149 aa, Homo sapiens
  MOD_RES (20)..(21): Selenocysteine
  MOD_RES (28)..(28): Selenocysteine
  MOD_RES (41)..(41): Selenocysteine
  MOD_RES (72)..(72): Selenocysteine
  MOD_RES (80)..(80): Selenocysteine
  MOD_RES (97)..(97): Selenocysteine
MLQLSEFDPLLREIAPGPLXXPSVPGSXPGPCFLCGSAPGXLHCPSCKQALCPACDHLFHGHPSRAHHLRQXLPGVLQGXHLSPSLPASAQPRPQSXSLLALGDSSLSSPNPASAHLPWHCAACAMLNEPWAVLCVACDRPRGCKGLGL

SEQ ID NO: 23781 - protein, 56 aa, Homo sapiens
MPGEEEERAFLVAREELASALRRDSGQAFSLEQLRPLLASSLPLAARYLQLDAARL

SEQ ID NO: 23782 - protein, 120 aa, Homo sapiens
  MOD_RES (71)..(71): Selenocysteine
  MOD_RES (81)..(81): Selenocysteine
  MOD_RES (93)..(93): Selenocysteine
  MOD_RES (114)..(114): Selenocysteine
MPGEEEERAFLVAREELASALRRDSGQAFSLEQLRPLLASSLPLAARYLQLDAARLVRCNAHGEPRNYLNXLPPLPGMGQXSRAWSGGFWQSXHSPAGAGQSWHCHCCRRHPGXMSWGMW

SEQ ID NO: 23783 - protein, 170 aa, Homo sapiens
  MOD_RES (71)..(71): Selenocysteine
  MOD_RES (74)..(74): Selenocysteine
  MOD_RES (108)..(108): Selenocysteine
  MOD_RES (125)..(125): Selenocysteine
  MOD_RES (148)..(148): Selenocysteine
  MOD_RES (150)..(150): Selenocysteine
  MOD_RES (158)..(158): Selenocysteine
  MOD_RES (167)..(167): Selenocysteine
MPGEEEERAFLVAREELASALRRDSGQAFSLEQLRPLLASSLPLAARYLQLDAARLVRCNAHGEPRNYLNXLSXALNILEKYGRNLLSPQRPRYWRGVKFNNPVFRSXVDAVQGGRDVLRLYGYXEEQPDGLSFPEGQEEPDEHQVAXVXLEVLLLRXELSLLLQNXHPR

SEQ ID NO: 23784 - protein, 1072 aa, Homo sapiens
  MOD_RES (71)..(71): Selenocysteine
  MOD_RES (74)..(74): Selenocysteine
  MOD_RES (108)..(108): Selenocysteine
  MOD_RES (125)..(125): Selenocysteine
  MOD_RES (148)..(148): Selenocysteine
  MOD_RES (150)..(150): Selenocysteine
  MOD_RES (158)..(158): Selenocysteine
  MOD_RES (167)..(167): Selenocysteine
  MOD_RES (205)..(206): Selenocysteine
  MOD_RES (213)..(213): Selenocysteine
  MOD_RES (226)..(226): Selenocysteine
  MOD_RES (257)..(257): Selenocysteine
  MOD_RES (265)..(265): Selenocysteine
  MOD_RES (282)..(282): Selenocysteine
  MOD_RES (336)..(336): Selenocysteine
  MOD_RES (342)..(342): Selenocysteine
  MOD_RES (360)..(360): Selenocysteine
  MOD_RES (419)..(419): Selenocysteine
  MOD_RES (435)..(435): Selenocysteine
  MOD_RES (517)..(517): Selenocysteine
  MOD_RES (575)..(575): Selenocysteine
  MOD_RES (610)..(610): Selenocysteine
  MOD_RES (632)..(632): Selenocysteine
  MOD_RES (669)..(669): Selenocysteine
  MOD_RES (715)..(715): Selenocysteine
  MOD_RES (720)..(720): Selenocysteine
  MOD_RES (731)..(731): Selenocysteine
  MOD_RES (740)..(740): Selenocysteine
  MOD_RES (753)..(753): Selenocysteine
  MOD_RES (756)..(756): Selenocysteine
  MOD_RES (764)..(764): Selenocysteine
  MOD_RES (786)..(786): Selenocysteine
  MOD_RES (816)..(816): Selenocysteine
  MOD_RES (823)..(823): Selenocysteine
  MOD_RES (891)..(891): Selenocysteine
  MOD_RES (938)..(938): Selenocysteine
  MOD_RES (955)..(955): Selenocysteine
  MOD_RES (990)..(990): Selenocysteine
  MOD_RES (1019)..(1019): Selenocysteine
  MOD_RES (1028)..(1028): Selenocysteine
  MOD_RES (1030)..(1030): Selenocysteine
  MOD_RES (1058)..(1058): Selenocysteine
MPGEEEERAFLVAREELASALRRDSGQAFSLEQLRPLLASSLPLAARYLQLDAARLVRCNAHGEPRNYLNXLSXALNILEKYGRNLLSPQRPRYWRGVKFNNPVFRSXVDAVQGGRDVLRLYGYXEEQPDGLSFPEGQEEPDEHQVAXVXLEVLLLRXELSLLLQNXHPRQQALEQLLEDKVEDDMLQLSEFDPLLREIAPGPLXXPSVPGSXPGPCFLCGSAPGXLHCPSCKQALCPACDHLFHGHPSRAHHLRQXLPGVLQGXHLSPSLPASAQPRPQSXSLLALGDSSLSSPNPASAHLPWHCAACAMLNEPWAVLCVACDRPRGCKGLGLGXEGPQGXGGLEPDLARGRWACQSCXFENEAAAVLCSICERPRLAQPPSLVVDSRDAGICLQPLQQGDALLASAQSQVWYCIHCXFCNSSPGWVCVMCNRXSSPIPAQHAPRPYASSLEKGPPKPGPPRRLSAPLPSSCGDPEKQRQDKMREEGLQLVSMIREGEAAGACPEEIFSALQYSGXEVPLQWLRSELPYVLEMVAELAGQQDPGLGAFSCQEARRAWLDRHGNLDEAVEECVRXRRRKVQELQSLGFGPEEGSLQALFQHGGDVSRALXELQRQRLEPFRQRLWDSGPEPXPSWDGPDKQSLVRRLLAVYALPSWGRAELALSLLQEXPRNYELGDVVEAVRHSQDRAFLRRLLAQECAVCGWALPHNRMQALXSCECXICPDCFRQHFXIALKEKHIXDMVCPACGRPDLXDDXQLLSYFSXLDIQLRESLEPDAYALFHKKLXEGVLMRDPKFLWCAQCSFGFIYEREQLEAXCPQCHQXFCVRCKRQWEEQHRGRSCEDFQNWKRMNDPEYQAQGLAMYLQENGIDCPKCKFSYALARGGCMHFHCXQCRHQFCSGCYNAFYAKNKCPEPNCRVKKSLHGHHPRDCLFYLRDWXALRLQKLLQDNNVMFNXEPPAGARAVPGGGCRVIEQKEVPNGLRDEACGKEXPAGYAGLCQAHYKEYLVSLINAHSLDPAXLYEVEELEXAXERYLHVRPQPLAGEDPPAYQARLLQKLXEEVPLGQSIPRRRK

SEQ ID NO: 23785 - protein, 136 aa, Homo sapiens
  MOD_RES (5)..(5): Selenocysteine
  MOD_RES (10)..(10): Selenocysteine
  MOD_RES (21)..(21): Selenocysteine
  MOD_RES (30)..(30): Selenocysteine
  MOD_RES (43)..(43): Selenocysteine
  MOD_RES (46)..(46): Selenocysteine
  MOD_RES (54)..(54): Selenocysteine
  MOD_RES (76)..(76): Selenocysteine
  MOD_RES (106)..(106): Selenocysteine
  MOD_RES (113)..(113): Selenocysteine
MQALXSCECXICPDCFRQHFXIALKEKHIXDMVCPACGRPDLXDDXQLLSYFSXLDIQLRESLEPDAYALFHKKLXEGVLMRDPKFLWCAQCSFGFIYEREQLEAXCPQCHQXFCVRCKRQWEEQHRGRSCEDFQN

SEQ ID NO: 23786 - protein, 152 aa, Homo sapiens
  MOD_RES (7)..(7): Selenocysteine
  MOD_RES (10)..(10): Selenocysteine
  MOD_RES (44)..(44): Selenocysteine
  MOD_RES (61)..(61): Selenocysteine
  MOD_RES (84)..(84): Selenocysteine
  MOD_RES (86)..(86): Selenocysteine
  MOD_RES (94)..(94): Selenocysteine
  MOD_RES (103)..(103): Selenocysteine
  MOD_RES (141)..(142): Selenocysteine
PRNYLNXLSXALNILEKYGRNLLSPQRPRYWRGVKFNNPVFRSXVDAVQGGRDVLRLYGYXEEQPDGLSFPEGQEEPDEHQVAXVXLEVLLLRXELSLLLQNXHPRQQALEQLLEDKVEDDMLQLSEFDPLLREIAPGPLXXPSVPGPVSSL

SEQ ID NO: 23787 - protein, 165 aa, Homo sapiens
  MOD_RES (1)..(1): Any amino acid
  MOD_RES (22)..(22): Selenocysteine
  MOD_RES (48)..(48): Selenocysteine
  MOD_RES (83)..(83): Selenocysteine
  MOD_RES (112)..(112): Selenocysteine
  MOD_RES (121)..(121): Selenocysteine
  MOD_RES (123)..(123): Selenocysteine
  MOD_RES (151)..(151): Selenocysteine
XCPKCKFSYALARGGCMHFHCXQCRHQFCSGCYNAFYAKNDNNVMFNXEPPAGARAVPGGGCRVIEQKEVPNGLRDEACGKEXPAGYAGLCQAHYKEYLVSLINAHSLDPAXLYEVEELEXAXERYLHVRPQPLAGEDPPAYQARLLQKLXEEVPLGQSIPRRRK

SEQ ID NO: 23788 - protein, 143 aa, Homo sapiens
  MOD_RES (1)..(1): Any amino acid
  MOD_RES (60)..(60): Selenocysteine
  MOD_RES (107)..(107): Selenocysteine
  MOD_RES (124)..(124): Selenocysteine
  MOD_RES (138)..(139): Selenocysteine
XEEQHRGRSCEDFQNWKRMNDPEYQAQGLAMYLQENGIDCPKCKFSYALARGGCMHFHCXQCRHQFCSGCYNAFYAKNKCPEPNCRVKKSLHGHHPRDCLFYLRDWXALRLQKLLQDNNVMFNXEPPAGARAVPGGHXXKSIL

SEQ ID NO: 23789 - protein, 140 aa, Homo sapiens
  MOD_RES (1)..(1): Any amino acid
  MOD_RES (69)..(69): Selenocysteine
  MOD_RES (116)..(116): Selenocysteine
XFCVRCKRQWEEQHRGRSCEDFQNWKRMNDPEYQAQGLAMYLQENGIDCPKCKFSYALARGGCMHFHCXQCRHQFCSGCYNAFYAKNKCPEPNCRVKKSLHGHHPRDCLFYLRDWXALRLQKLLQSLQLGPGQSLEAAAE

SEQ ID NO: 23790 - protein, 917 aa, Homo sapiens
  MOD_RES (1)..(1): Any amino acid
  MOD_RES (9)..(9): Selenocysteine
  MOD_RES (26)..(26): Selenocysteine
  MOD_RES (49)..(49): Selenocysteine
  MOD_RES (51)..(51): Selenocysteine
  MOD_RES (59)..(59): Selenocysteine
  MOD_RES (68)..(68): Selenocysteine
  MOD_RES (106)..(107): Selenocysteine
  MOD_RES (114)..(114): Selenocysteine
  MOD_RES (127)..(127): Selenocysteine
  MOD_RES (158)..(158): Selenocysteine
  MOD_RES (166)..(166): Selenocysteine
  MOD_RES (183)..(183): Selenocysteine
  MOD_RES (237)..(237): Selenocysteine
  MOD_RES (243)..(243): Selenocysteine
  MOD_RES (261)..(261): Selenocysteine
  MOD_RES (320)..(320): Selenocysteine
  MOD_RES (336)..(336): Selenocysteine
  MOD_RES (420)..(420): Selenocysteine
  MOD_RES (455)..(455): Selenocysteine
  MOD_RES (477)..(477): Selenocysteine
  MOD_RES (514)..(514): Selenocysteine
  MOD_RES (560)..(560): Selenocysteine
  MOD_RES (565)..(565): Selenocysteine
  MOD_RES (576)..(576): Selenocysteine
  MOD_RES (585)..(585): Selenocysteine
  MOD_RES (598)..(598): Selenocysteine
  MOD_RES (601)..(601): Selenocysteine
  MOD_RES (609)..(609): Selenocysteine
  MOD_RES (631)..(631): Selenocysteine
  MOD_RES (661)..(661): Selenocysteine
  MOD_RES (668)..(668): Selenocysteine
  MOD_RES (736)..(736): Selenocysteine
  MOD_RES (783)..(783): Selenocysteine
  MOD_RES (800)..(800): Selenocysteine
  MOD_RES (835)..(835): Selenocysteine
  MOD_RES (864)..(864): Selenocysteine
  MOD_RES (873)..(873): Selenocysteine
  MOD_RES (875)..(875): Selenocysteine
  MOD_RES (903)..(903): Selenocysteine
XNNPVFRSXVDAVQGGRDVLRLYGYXEEQPDGLSFPEGQEEPDEHQVAXVXLEVLLLRXELSLLLQNXHPRQQALEQLLEDKVEDDMLQLSEFDPLLREIAPGPLXXPSVPGSXPGPCFLCGSAPGXLHCPSCKQALCPACDHLFHGHPSRAHHLRQXLPGVLQGXHLSPSLPASAQPRPQSXSLLALGDSSLSSPNPASAHLPWHCAACAMLNEPWAVLCVACDRPRGCKGLGLGXEGPQGXGGLEPDLARGRWACQSCXFENEAAAVLCSICERPRLAQPPSLVVDSRDAGICLQPLQQGDALLASAQSQVWYCIHCXFCNSSPGWVCVMCNRXSSPIPAQHAPRPYASSLEKGPPKPGPPRRLSAPLPSSCGDPEKQRQDKMREEGLQLVSMIREARRAWLDRHGNLDEAVEECVRXRRRKVQELQSLGFGPEEGSLQALFQHGGDVSRALXELQRQRLEPFRQRLWDSGPEPXPSWDGPDKQSLVRRLLAVYALPSWGRAELALSLLQEXPRNYELGDVVEAVRHSQDRAFLRRLLAQECAVCGWALPHNRMQALXSCECXICPDCFRQHFXIALKEKHIXDMVCPACGRPDLXDDXQLLSYFSXLDIQLRESLEPDAYALFHKKLXEGVLMRDPKFLWCAQCSFGFIYEREQLEAXCPQCHQXFCVRCKRQWEEQHRGRSCEDFQNWKRMNDPEYQAQGLAMYLQENGIDCPKCKFSYALARGGCMHFHCXQCRHQFCSGCYNAFYAKNKCPEPNCRVKKSLHGHHPRDCLFYLRDWXALRLQKLLQDNNVMFNXEPPAGARAVPGGGCRVIEQKEVPNGLRDEACGKEXPAGYAGLCQAHYKEYLVSLINAHSLDPAXLYEVEELEXAXERYLHVRPQPLAGEDPPAYQARLLQKLXEEVPLGQSIPRRRK

SEQ ID NO: 23791 - protein, 372 aa, Homo sapiens
  MOD_RES (6)..(6): Selenocysteine
  MOD_RES (22)..(22): Selenocysteine
  MOD_RES (36)..(36): Selenocysteine
  MOD_RES (42)..(42): Selenocysteine
  MOD_RES (49)..(49): Selenocysteine
  MOD_RES (55)..(55): Selenocysteine
  MOD_RES (101)..(101): Selenocysteine
  MOD_RES (108)..(108): Selenocysteine
  MOD_RES (136)..(136): Selenocysteine
  MOD_RES (161)..(161): Selenocysteine
  MOD_RES (171)..(171): Selenocysteine
  MOD_RES (176)..(176): Selenocysteine
  MOD_RES (184)..(184): Selenocysteine
  MOD_RES (189)..(189): Selenocysteine
  MOD_RES (203)..(203): Selenocysteine
  MOD_RES (217)..(217): Selenocysteine
  MOD_RES (221)..(221): Selenocysteine
  MOD_RES (345)..(345): Selenocysteine
  MOD_RES (347)..(347): Selenocysteine
MKAGAXSMWASCCGLLNEVMGXGAVRGQQSAFAGAXGPFRFXPNPEFSXYPPAAXEGPNIVCKACGLSFSVFRKKHVCCDCKKDFCSVCSVLQENLRRCSXCHLLQEXAFQRPQLMRLKVKDLRQYLILRNIPIDXCREKEDLVDLVLCHHGLGSEDDMDXSSLNSSRSQXSSFFXRSFFSNYXAPSAXMSSFQGELMDGDQXSRSGVPAQVQSEIXSANXEDDDDDDDEDDDDEEENAEDRNPGLSKERVRASLSDLSSLDDVEGMSVRQLKEILARNFVNYSGCCEKWELVEKVNRLYKENEENQKSYGERLQLQDEEDDSLCRICMDAVIDCVLLECGHMVXCXKCGKRMSECPICRQYVVRAVHVFKS

SEQ ID NO: 23792 - protein, 507 aa, Homo sapiens
  MOD_RES (6)..(6): Selenocysteine
  MOD_RES (22)..(22): Selenocysteine
  MOD_RES (36)..(36): Selenocysteine
  MOD_RES (42)..(42): Selenocysteine
  MOD_RES (49)..(49): Selenocysteine
  MOD_RES (55)..(55): Selenocysteine
  MOD_RES (101)..(101): Selenocysteine
  MOD_RES (108)..(108): Selenocysteine
  MOD_RES (136)..(136): Selenocysteine
  MOD_RES (161)..(161): Selenocysteine
  MOD_RES (171)..(171): Selenocysteine
  MOD_RES (176)..(176): Selenocysteine
  MOD_RES (184)..(184): Selenocysteine
  MOD_RES (189)..(189): Selenocysteine
  MOD_RES (203)..(203): Selenocysteine
  MOD_RES (217)..(217): Selenocysteine
  MOD_RES (221)..(221): Selenocysteine
  MOD_RES (345)..(345): Selenocysteine
  MOD_RES (347)..(347): Selenocysteine
  MOD_RES (372)..(372): Selenocysteine
  MOD_RES (441)..(441): Selenocysteine
  MOD_RES (456)..(456): Selenocysteine
  MOD_RES (466)..(466): Selenocysteine
  MOD_RES (481)..(481): Selenocysteine
  MOD_RES (485)..(485): Selenocysteine
MKAGAXSMWASCCGLLNEVMGXGAVRGQQSAFAGAXGPFRFXPNPEFSXYPPAAXEGPNIVCKACGLSFSVFRKKHVCCDCKKDFCSVCSVLQENLRRCSXCHLLQEXAFQRPQLMRLKVKDLRQYLILRNIPIDXCREKEDLVDLVLCHHGLGSEDDMDXSSLNSSRSQXSSFFXRSFFSNYXAPSAXMSSFQGELMDGDQXSRSGVPAQVQSEIXSANXEDDDDDDDEDDDDEEENAEDRNPGLSKERVRASLSDLSSLDDVEGMSVRQLKEILARNFVNYSGCCEKWELVEKVNRLYKENEENQKSYGERLQLQDEEDDSLCRICMDAVIDCVLLECGHMVXCXKCGKRMRMSSCKGRLRNGPESSAVXIQKDQRKVSAHSSPKRVVEQLLPWKDLQNGIALWSVVPRSKWKIKALIFVKSLPSQSPPRIYILILGLXQFLQEFFFYLPKLDXHRHLGYELLXAFLGDLLAVPQVNMXDVSXAFEEGQALISDLIAVCREEIVM

SEQ ID NO: 23793 - protein, 180 aa, Homo sapiens
  MOD_RES (11)..(11): Selenocysteine
  MOD_RES (25)..(25): Selenocysteine
  MOD_RES (29)..(29): Selenocysteine
  MOD_RES (153)..(153): Selenocysteine
  MOD_RES (155)..(155): Selenocysteine
MKGELMDGDQXSRSGVPAQVQSEIXSANXEDDDDDDDEDDDDEEENAEDRNPGLSKERVRASLSDLSSLDDVEGMSVRQLKEILARNFVNYSGCCEKWELVEKVNRLYKENEENQKSYGERLQLQDEEDDSLCRICMDAVIDCVLLECGHMVXCXKCGKRMSECPICRQYVVRAVHVFKS

SEQ ID NO: 23794 - protein, 45 aa, Homo sapiens
  MOD_RES (14)..(15): Selenocysteine
  MOD_RES (27)..(27): Selenocysteine
  MOD_RES (35)..(35): Selenocysteine
MKMASGCSCRMRKXXACVASAWMPSSXVSYWSVGXWLPAPSAASA

SEQ ID NO: 23795 - protein, 373 aa, Homo sapiens
  MOD_RES (7)..(7): Selenocysteine
  MOD_RES (23)..(23): Selenocysteine
  MOD_RES (37)..(37): Selenocysteine
  MOD_RES (43)..(43): Selenocysteine
  MOD_RES (50)..(50): Selenocysteine
  MOD_RES (56)..(56): Selenocysteine
  MOD_RES (102)..(102): Selenocysteine
  MOD_RES (109)..(109): Selenocysteine
  MOD_RES (137)..(137): Selenocysteine
  MOD_RES (162)..(162): Selenocysteine
  MOD_RES (172)..(172): Selenocysteine
  MOD_RES (177)..(177): Selenocysteine
  MOD_RES (185)..(185): Selenocysteine
  MOD_RES (190)..(190): Selenocysteine
  MOD_RES (204)..(204): Selenocysteine
  MOD_RES (218)..(218): Selenocysteine
  MOD_RES (222)..(222): Selenocysteine
  MOD_RES (346)..(346): Selenocysteine
  MOD_RES (348)..(348): Selenocysteine
MRKAGAXSMWASCCGLLNEVMGXGAVRGQQSAFAGAXGPFRFXPNPEFSXYPPAAXEGPNIVCKACGLSFSVFRKKHVCCDCKKDFCSVCSVLQENLRRCSXCHLLQEXAFQRPQLMRLKVKDLRQYLILRNIPIDXCREKEDLVDLVLCHHGLGSEDDMDXSSLNSSRSQXSSFFXRSFFSNYXAPSAXMSSFQGELMDGDQXSRSGVPAQVQSEIXSANXEDDDDDDDEDDDDEEENAEDRNPGLSKERVRASLSDLSSLDDVEGMSVRQLKEILARNFVNYSGCCEKWELVEKVNRLYKENEENQKSYGERLQLQDEEDDSLCRICMDAVIDCVLLECGHMVXCXKCGKRMSECPICRQYVVRAVHVFKS

SEQ ID NO: 23796 - protein, 38 aa, Homo sapiens
  MOD_RES (15)..(15): Selenocysteine
  MOD_RES (29)..(29): Selenocysteine
  MOD_RES (35)..(35): Selenocysteine
MWASCCGLLNEVMGXGAVRGQQSAFAGAXGPFRFXPNP

SEQ ID NO: 23797 - protein, 74 aa, Homo sapiens
  MOD_RES (15)..(15): Selenocysteine
  MOD_RES (29)..(29): Selenocysteine
  MOD_RES (35)..(35): Selenocysteine
  MOD_RES (42)..(42): Selenocysteine
  MOD_RES (48)..(48): Selenocysteine
MWASCCGLLNEVMGXGAVRGQQSAFAGAXGPFRFXPNPEFSXYPPAAXEGPNIVCKACGLSFSVFRKKHVCCDC

SEQ ID NO: 23798 - protein, 163 aa, Homo sapiens
  MOD_RES (15)..(15): Selenocysteine
  MOD_RES (29)..(29): Selenocysteine
  MOD_RES (35)..(35): Selenocysteine
  MOD_RES (42)..(42): Selenocysteine
  MOD_RES (48)..(48): Selenocysteine
  MOD_RES (94)..(94): Selenocysteine
  MOD_RES (101)..(101): Selenocysteine
  MOD_RES (129)..(129): Selenocysteine
  MOD_RES (154)..(154): Selenocysteine
MWASCCGLLNEVMGXGAVRGQQSAFAGAXGPFRFXPNPEFSXYPPAAXEGPNIVCKACGLSFSVFRKKHVCCDCKKDFCSVCSVLQENLRRCSXCHLLQEXAFQRPQLMRLKVKDLRQYLILRNIPIDXCREKEDLVDLVLCHHGLGSEDDMDXSSLNSSRSQ

SEQ ID NO: 23799 - protein, 54 aa, Homo sapiens
  MOD_RES (3)..(3): Selenocysteine
  MOD_RES (20)..(20): Selenocysteine
  MOD_RES (24)..(24): Selenocysteine
  MOD_RES (26)..(26): Selenocysteine
  MOD_RES (41)..(41): Selenocysteine
  MOD_RES (50)..(50): Selenocysteine
MSXRKRRGGAINSRQAQKRXREAXSXPEISLEAEPIELVEXAGDEIVDLXCESL

SEQ ID NO: 23800 - protein, 68 aa, Homo sapiens
  MOD_RES (3)..(3): Selenocysteine
  MOD_RES (20)..(20): Selenocysteine
  MOD_RES (24)..(24): Selenocysteine
  MOD_RES (26)..(26): Selenocysteine
  MOD_RES (41)..(41): Selenocysteine
  MOD_RES (50)..(50): Selenocysteine
  MOD_RES (62)..(62): Selenocysteine
MSXRKRRGGAINSRQAQKRXREAXSXPEISLEAEPIELVEXAGDEIVDLXCESLEPVVVDLXHNDSVV

SEQ ID NO: 23801 - protein, 188 aa, Homo sapiens
  MOD_RES (3)..(3): Selenocysteine
  MOD_RES (20)..(20): Selenocysteine
  MOD_RES (24)..(24): Selenocysteine
  MOD_RES (26)..(26): Selenocysteine
  MOD_RES (41)..(41): Selenocysteine
  MOD_RES (50)..(50): Selenocysteine
  MOD_RES (62)..(62): Selenocysteine
  MOD_RES (109)..(110): Selenocysteine
  MOD_RES (112)..(112): Selenocysteine
  MOD_RES (122)..(122): Selenocysteine
  MOD_RES (129)..(129): Selenocysteine
  MOD_RES (152)..(152): Selenocysteine
  MOD_RES (172)..(172): Selenocysteine
  MOD_RES (175)..(175): Selenocysteine
MSXRKRRGGAINSRQAQKRXREAXSXPEISLEAEPIELVEXAGDEIVDLXCESLEPVVVDLXHNDSVVIVDERRRPRRNARRLPQDHADSCVVSSDDEELSRDRDVYVXXHXPRNARDEGAXGLRPSGXVSCPICMDGYSEIVQNGRLIVSXECGHVFCSQCLRDSLKNANXCPXCRKKINHKRYHPI

SEQ ID NO: 23802 - protein, 190 aa, Homo sapiens
  MOD_RES (3)..(3): Selenocysteine
  MOD_RES (20)..(20): Selenocysteine
  MOD_RES (24)..(24): Selenocysteine
  MOD_RES (26)..(26): Selenocysteine
  MOD_RES (41)..(41): Selenocysteine
  MOD_RES (50)..(50): Selenocysteine
  MOD_RES (62)..(62): Selenocysteine
  MOD_RES (109)..(110): Selenocysteine
  MOD_RES (112)..(112): Selenocysteine
  MOD_RES (122)..(122): Selenocysteine
  MOD_RES (129)..(129): Selenocysteine
  MOD_RES (152)..(152): Selenocysteine
  MOD_RES (172)..(172): Selenocysteine
  MOD_RES (175)..(175): Selenocysteine
MSXRKRRGGAINSRQAQKRXREAXSXPEISLEAEPIELVEXAGDEIVDLXCESLEPVVVDLXHNDSVVIVDERRRPRRNARRLPQDHADSCVVSSDDEELSRDRDVYVXXHXPRNARDEGAXGLRPSGXVSCPICMDGYSEIVQNGRLIVSXECGHVFCSQCLRDSLKNANXCPXCRKKINHKRYHPIYI

SEQ ID NO: 23803 - protein, 89 aa, Homo sapiens
  MOD_RES (3)..(3): Selenocysteine
  MOD_RES (20)..(20): Selenocysteine
  MOD_RES (24)..(24): Selenocysteine
  MOD_RES (26)..(26): Selenocysteine
  MOD_RES (41)..(41): Selenocysteine
  MOD_RES (50)..(50): Selenocysteine
  MOD_RES (62)..(62): Selenocysteine
MSXRKRRGGAINSRQAQKRXREAXSXPEISLEAEPIELVEXAGDEIVDLXCESLEPVVVDLXHNDSVVIVDGEWFRFLFHWVWRGNWHR

SEQ ID NO: 23804 - protein, 102 aa, Homo sapiens
  MOD_RES (3)..(3): Selenocysteine
  MOD_RES (20)..(20): Selenocysteine
  MOD_RES (24)..(24): Selenocysteine
  MOD_RES (26)..(26): Selenocysteine
  MOD_RES (41)..(41): Selenocysteine
  MOD_RES (50)..(50): Selenocysteine
  MOD_RES (62)..(62): Selenocysteine
  MOD_RES (84)..(84): Selenocysteine
  MOD_RES (86)..(86): Selenocysteine
MSXRKRRGGAINSRQAQKRXREAXSXPEISLEAEPIELVEXAGDEIVDLXCESLEPVVVDLXHNDSVVIVDGPQVLSVVPSAWXDXQRSCRMDVSSFPQNAA

SEQ ID NO: 23805 - protein, 113 aa, Homo sapiens
  MOD_RES (3)..(3): Selenocysteine
  MOD_RES (20)..(20): Selenocysteine
  MOD_RES (24)..(24): Selenocysteine
  MOD_RES (26)..(26): Selenocysteine
  MOD_RES (41)..(41): Selenocysteine
  MOD_RES (50)..(50): Selenocysteine
  MOD_RES (62)..(62): Selenocysteine
  MOD_RES (84)..(84): Selenocysteine
  MOD_RES (86)..(86): Selenocysteine
MSXRKRRGGAINSRQAQKRXREAXSXPEISLEAEPIELVEXAGDEIVDLXCESLEPVVVDLXHNDSVVIVDGPQVLSVVPSAWXDXQRSCRMDVSSFPQNAAMSSVASASVIP

SEQ ID NO: 23806 - protein, 43 aa, Homo sapiens
  MOD_RES (3)..(3): Selenocysteine
  MOD_RES (20)..(20): Selenocysteine
  MOD_RES (24)..(24): Selenocysteine
  MOD_RES (26)..(26): Selenocysteine
  MOD_RES (41)..(41): Selenocysteine
MSXRKRRGGAINSRQAQKRXREAXSXPEISLEAEPIELVEXDC

SEQ ID NO: 23807 - protein, 47 aa, Homo sapiens
  MOD_RES (3)..(3): Selenocysteine
  MOD_RES (20)..(20): Selenocysteine
  MOD_RES (24)..(24): Selenocysteine
  MOD_RES (26)..(26): Selenocysteine
  MOD_RES (41)..(41): Selenocysteine
MSXRKRRGGAINSRQAQKRXREAXSXPEISLEAEPIELVEXGWGAVA

SEQ ID NO: 23808 - protein, 106 aa, Homo sapiens
  MOD_RES (1)..(1): Any amino acid
  MOD_RES (25)..(26): Selenocysteine
  MOD_RES (28)..(28): Selenocysteine
  MOD_RES (38)..(38): Selenocysteine
  MOD_RES (45)..(45): Selenocysteine
  MOD_RES (68)..(68): Selenocysteine
  MOD_RES (88)..(88): Selenocysteine
  MOD_RES (91)..(91): Selenocysteine
XDHADSCVVSSDDEELSRDRDVYVXXHXPRNARDEGAXGLRPSGXVSCPICMDGYSEIVQNGRLIVSXECGHVFCSQCLRDSLKNANXCPXCRKKINHKRLLLVLA

SEQ ID NO: 23809 - protein, 190 aa, Homo sapiens
  MOD_RES (6)..(6): Selenocysteine
  MOD_RES (44)..(44): Selenocysteine
  MOD_RES (52)..(52): Selenocysteine
  MOD_RES (61)..(61): Selenocysteine
  MOD_RES (115)..(115): Selenocysteine
  MOD_RES (147)..(147): Selenocysteine
  MOD_RES (155)..(155): Selenocysteine
MGYDVXRFQGDVDEDLICPICSGVLEEPVQAPHCEHAFCNACIXQWFSQQQXCPVDRSVVXVAHLRPVPRIMRNMLSKLQIACDNAVFGCSAVVRLDNLMSHLSDCEHNPKRPVXCEQGCGLEMPKDELPNHNCIKHLRSVVQQQQXRIAELEKXSAEHKHQLAEQKRDIQLLKAYMRAIRSVNPNLQNL

SEQ ID NO: 23810 - protein, 201 aa, Homo sapiens
  MOD_RES (6)..(6): Selenocysteine
  MOD_RES (44)..(44): Selenocysteine
  MOD_RES (52)..(52): Selenocysteine
  MOD_RES (61)..(61): Selenocysteine
  MOD_RES (115)..(115): Selenocysteine
  MOD_RES (147)..(147): Selenocysteine
  MOD_RES (155)..(155): Selenocysteine
  MOD_RES (193)..(193): Selenocysteine
MGYDVXRFQGDVDEDLICPICSGVLEEPVQAPHCEHAFCNACIXQWFSQQQXCPVDRSVVXVAHLRPVPRIMRNMLSKLQIACDNAVFGCSAVVRLDNLMSHLSDCEHNPKRPVXCEQGCGLEMPKDELPNHNCIKHLRSVVQQQQXRIAELEKXSAEHKHQLAEQKRDIQLLKAYMRAIRSVNPNLQNLEEXIEYNEILE

SEQ ID NO: 23811 - protein, 317 aa, Homo sapiens
  MOD_RES (6)..(6): Selenocysteine
  MOD_RES (44)..(44): Selenocysteine
  MOD_RES (52)..(52): Selenocysteine
  MOD_RES (61)..(61): Selenocysteine
  MOD_RES (115)..(115): Selenocysteine
  MOD_RES (147)..(147): Selenocysteine
  MOD_RES (155)..(155): Selenocysteine
  MOD_RES (193)..(193): Selenocysteine
  MOD_RES (212)..(212): Selenocysteine
  MOD_RES (220)..(220): Selenocysteine
  MOD_RES (261)..(261): Selenocysteine
  MOD_RES (264)..(264): Selenocysteine
MGYDVXRFQGDVDEDLICPICSGVLEEPVQAPHCEHAFCNACIXQWFSQQQXCPVDRSVVXVAHLRPVPRIMRNMLSKLQIACDNAVFGCSAVVRLDNLMSHLSDCEHNPKRPVXCEQGCGLEMPKDELPNHNCIKHLRSVVQQQQXRIAELEKXSAEHKHQLAEQKRDIQLLKAYMRAIRSVNPNLQNLEEXIEYNEILEWVNSLQPARVXRWGGMISXPDAVLQAVIKRSLVESGCPASIVNELIENAHERSWPQGLAXLEXRQMNRRYYENYVAKRIPGKQAVVVMACENQHMGDDMVQEPGLVMIFAHGVEEI

SEQ ID NO: 23812 - protein, 61 aa, Homo sapiens
  MOD_RES (6)..(6): Selenocysteine
  MOD_RES (59)..(59): Selenocysteine
MGYDVXRFQGDVDEDLICPICSGVLEEPVQVISLPALPDQSQLYHPGASMRRSSRLPGXSL

SEQ ID NO: 23813 - protein, 130 aa, Homo sapiens
  MOD_RES (44)..(44): Selenocysteine
  MOD_RES (76)..(76): Selenocysteine
  MOD_RES (84)..(84): Selenocysteine
  MOD_RES (122)..(122): Selenocysteine
MRNMLSKLQIACDNAVFGCSAVVRLDNLMSHLSDCEHNPKRPVXCEQGCGLEMPKDELPNHNCIKHLRSVVQQQQXRIAELEKXSAEHKHQLAEQKRDIQLLKAYMRAIRSVNPNLQNLEEXIEYNEILE

SEQ ID NO: 23814 - protein, 146 aa, Homo sapiens
  MOD_RES (44)..(44): Selenocysteine
  MOD_RES (76)..(76): Selenocysteine
  MOD_RES (84)..(84): Selenocysteine
  MOD_RES (122)..(122): Selenocysteine
  MOD_RES (141)..(141): Selenocysteine
MRNMLSKLQIACDNAVFGCSAVVRLDNLMSHLSDCEHNPKRPVXCEQGCGLEMPKDELPNHNCIKHLRSVVQQQQXRIAELEKXSAEHKHQLAEQKRDIQLLKAYMRAIRSVNPNLQNLEEXIEYNEILEWVNSLQPARVXRWGGM

SEQ ID NO: 23815 - protein, 246 aa, Homo sapiens
  MOD_RES (44)..(44): Selenocysteine
  MOD_RES (76)..(76): Selenocysteine
  MOD_RES (84)..(84): Selenocysteine
  MOD_RES (122)..(122): Selenocysteine
  MOD_RES (141)..(141): Selenocysteine
  MOD_RES (149)..(149): Selenocysteine
  MOD_RES (190)..(190): Selenocysteine
  MOD_RES (193)..(193): Selenocysteine
MRNMLSKLQIACDNAVFGCSAVVRLDNLMSHLSDCEHNPKRPVXCEQGCGLEMPKDELPNHNCIKHLRSVVQQQQXRIAELEKXSAEHKHQLAEQKRDIQLLKAYMRAIRSVNPNLQNLEEXIEYNEILEWVNSLQPARVXRWGGMISXPDAVLQAVIKRSLVESGCPASIVNELIENAHERSWPQGLAXLEXRQMNRRYYENYVAKRIPGKQAVVVMACENQHMGDDMVQEPGLVMIFAHGVEEI

SEQ ID NO: 23816 - protein, 656 aa, Homo sapiens
  MOD_RES (15)..(15): Selenocysteine
  MOD_RES (31)..(31): Selenocysteine
  MOD_RES (77)..(77): Selenocysteine
  MOD_RES (81)..(81): Selenocysteine
  MOD_RES (109)..(109): Selenocysteine
  MOD_RES (118)..(118): Selenocysteine
  MOD_RES (181)..(181): Selenocysteine
  MOD_RES (190)..(190): Selenocysteine
  MOD_RES (297)..(297): Selenocysteine
  MOD_RES (325)..(325): Selenocysteine
  MOD_RES (356)..(356): Selenocysteine
  MOD_RES (369)..(369): Selenocysteine
  MOD_RES (400)..(400): Selenocysteine
  MOD_RES (412)..(412): Selenocysteine
  MOD_RES (415)..(415): Selenocysteine
  MOD_RES (446)..(446): Selenocysteine
  MOD_RES (458)..(458): Selenocysteine
  MOD_RES (472)..(472): Selenocysteine
  MOD_RES (509)..(509): Selenocysteine
  MOD_RES (537)..(537): Selenocysteine
  MOD_RES (546)..(546): Selenocysteine
  MOD_RES (558)..(558): Selenocysteine
  MOD_RES (587)..(587): Selenocysteine
  MOD_RES (603)..(603): Selenocysteine
  MOD_RES (624)..(624): Selenocysteine
MAGERGASAVLFDIXEDRAAAEQLQQPLGLXWPVVLIWGNDAEKLMEFVYKNQKAHVRIELKEPPAWPDYDVWILMXVVGXIFVIILASVLRIRCRPRHSRPDPLQQRXAWAISQLAXRRYQASCRQARGEWPDSGSSCSSAPVCAICLEEFSEGQELRVISCLHEFHRNCVDPWLHQHRXCPLCMFNIXEGDSFSQSLGPSRSYQEPGRRLHLIRQHPGHAHYHLPAAYLLGPSRSAVARPPRPGPFLPSQEPGMGPRHHRFPRAAHPRAPGEQQRLAGAQHPYAQGWGLSHLQSXSQHPAACPVPLRRARPPDSSGSGESYCXERSGYLADGPASDSSSGPCHGSSSDSVVNCXDISLQGVHGSSSXFCSSLSSDFDPLVYCSPKGDPQRVDMQPSVXSRPRSLDSVVPXGEXQVSSHVHYHRHRHHHYKKRFQWHGRKPGPEXGVPQSRPPIPRXQPQPEPPSPDQQVXRSNSAAPSGRLSNPQCPRALPEPAPGPVDASSICPSXSSLFNLQKSSLSARHPQRKRRGGPSEPXPGSRPQDAXVHPACQIFPHYXPSVAYPWSPEAHPLICGPPGLDKRLLPEXPGPCYSNSQPVWLCLXPRQPLEPHPPGEGPSEWSSDXAEGRPCPYPHCQVLSAQPGSEEELEELCEQAV

SEQ ID NO: 23817 - protein, 742 aa, Homo sapiens
  MOD_RES (15)..(15): Selenocysteine
  MOD_RES (31)..(31): Selenocysteine
  MOD_RES (77)..(77): Selenocysteine
  MOD_RES (81)..(81): Selenocysteine
  MOD_RES (109)..(109): Selenocysteine
  MOD_RES (118)..(118): Selenocysteine
  MOD_RES (181)..(181): Selenocysteine
  MOD_RES (190)..(190): Selenocysteine
  MOD_RES (297)..(297): Selenocysteine
  MOD_RES (325)..(325): Selenocysteine
  MOD_RES (356)..(356): Selenocysteine
  MOD_RES (369)..(369): Selenocysteine
  MOD_RES (400)..(400): Selenocysteine
  MOD_RES (412)..(412): Selenocysteine
  MOD_RES (415)..(415): Selenocysteine
  MOD_RES (446)..(446): Selenocysteine
  MOD_RES (458)..(458): Selenocysteine
  MOD_RES (472)..(472): Selenocysteine
  MOD_RES (509)..(509): Selenocysteine
  MOD_RES (537)..(537): Selenocysteine
  MOD_RES (546)..(546): Selenocysteine
  MOD_RES (558)..(558): Selenocysteine
  MOD_RES (587)..(587): Selenocysteine
  MOD_RES (603)..(603): Selenocysteine
  MOD_RES (624)..(624): Selenocysteine
  MOD_RES (679)..(679): Selenocysteine
  MOD_RES (683)..(684): Selenocysteine
  MOD_RES (702)..(702): Selenocysteine
  MOD_RES (709)..(709): Selenocysteine
  MOD_RES (732)..(732): Selenocysteine
MAGERGASAVLFDIXEDRAAAEQLQQPLGLXWPVVLIWGNDAEKLMEFVYKNQKAHVRIELKEPPAWPDYDVWILMXVVGXIFVIILASVLRIRCRPRHSRPDPLQQRXAWAISQLAXRRYQASCRQARGEWPDSGSSCSSAPVCAICLEEFSEGQELRVISCLHEFHRNCVDPWLHQHRXCPLCMFNIXEGDSFSQSLGPSRSYQEPGRRLHLIRQHPGHAHYHLPAAYLLGPSRSAVARPPRPGPFLPSQEPGMGPRHHRFPRAAHPRAPGEQQRLAGAQHPYAQGWGLSHLQSXSQHPAACPVPLRRARPPDSSGSGESYCXERSGYLADGPASDSSSGPCHGSSSDSVVNCXDISLQGVHGSSSXFCSSLSSDFDPLVYCSPKGDPQRVDMQPSVXSRPRSLDSVVPXGEXQVSSHVHYHRHRHHHYKKRFQWHGRKPGPEXGVPQSRPPIPRXQPQPEPPSPDQQVXRSNSAAPSGRLSNPQCPRALPEPAPGPVDASSICPSXSSLFNLQKSSLSARHPQRKRRGGPSEPXPGSRPQDAXVHPACQIFPHYXPSVAYPWSPEAHPLICGPPGLDKRLLPEXPGPCYSNSQPVWLCLXPRQPLEPHPPGEGPSEWSSDXAEGRPCPYPHCQVLSAQPGEFSEGSGCGRERRLQLNISGQVKSANKGLMEAEKDXAEMXXKILNHRDSVSCWLECRNXPPLPGAXPLVGRSQGGPREVLVWLRHQKGXWKAGCDGSCL

SEQ ID NO: 23818 - protein, 742 aa, Homo sapiens
  MOD_RES (20)..(20): Selenocysteine
  MOD_RES (28)..(28): Selenocysteine
  MOD_RES (58)..(58): Selenocysteine
  MOD_RES (64)..(64): Selenocysteine
  MOD_RES (76)..(76): Selenocysteine
  MOD_RES (101)..(101): Selenocysteine
  MOD_RES (117)..(117): Selenocysteine
  MOD_RES (163)..(163): Selenocysteine
  MOD_RES (167)..(167): Selenocysteine
  MOD_RES (195)..(195): Selenocysteine
  MOD_RES (204)..(204): Selenocysteine
  MOD_RES (267)..(267): Selenocysteine
  MOD_RES (276)..(276): Selenocysteine
  MOD_RES (383)..(383): Selenocysteine
  MOD_RES (411)..(411): Selenocysteine
  MOD_RES (442)..(442): Selenocysteine
  MOD_RES (455)..(455): Selenocysteine
  MOD_RES (486)..(486): Selenocysteine
  MOD_RES (498)..(498): Selenocysteine
  MOD_RES (501)..(501): Selenocysteine
  MOD_RES (532)..(532): Selenocysteine
  MOD_RES (544)..(544): Selenocysteine
  MOD_RES (558)..(558): Selenocysteine
  MOD_RES (595)..(595): Selenocysteine
  MOD_RES (623)..(623): Selenocysteine
  MOD_RES (632)..(632): Selenocysteine
  MOD_RES (644)..(644): Selenocysteine
  MOD_RES (673)..(673): Selenocysteine
  MOD_RES (689)..(689): Selenocysteine
  MOD_RES (710)..(710): Selenocysteine
MSGGHQLQLAALWPWLLMAXLQAGFGRXGLVLAAAVESERSAEQKAIIRVIPLKMDPXGKLNLXLEGVFAGVAEIXPAEGKLMQARMAGERGASAVLFDIXEDRAAAEQLQQPLGLXWPVVLIWGNDAEKLMEFVYKNQKAHVRIELKEPPAWPDYDVWILMXVVGXIFVIILASVLRIRCRPRHSRPDPLQQRXAWAISQLAXRRYQASCRQARGEWPDSGSSCSSAPVCAICLEEFSEGQELRVISCLHEFHRNCVDPWLHQHRXCPLCMFNIXEGDSFSQSLGPSRSYQEPGRRLHLIRQHPGHAHYHLPAAYLLGPSRSAVARPPRPGPFLPSQEPGMGPRHHRFPRAAHPRAPGEQQRLAGAQHPYAQGWGLSHLQSXSQHPAACPVPLRRARPPDSSGSGESYCXERSGYLADGPASDSSSGPCHGSSSDSVVNCXDISLQGVHGSSSXFCSSLSSDFDPLVYCSPKGDPQRVDMQPSVXSRPRSLDSVVPXGEXQVSSHVHYHRHRHHHYKKRFQWHGRKPGPEXGVPQSRPPIPRXQPQPEPPSPDQQVXRSNSAAPSGRLSNPQCPRALPEPAPGPVDASSICPSXSSLFNLQKSSLSARHPQRKRRGGPSEPXPGSRPQDAXVHPACQIFPHYXPSVAYPWSPEAHPLICGPPGLDKRLLPEXPGPCYSNSQPVWLCLXPRQPLEPHPPGEGPSEWSSDXAEGRPCPYPHCQVLSAQPGSEEELEELCEQAV

SEQ ID NO: 23819 - protein, 783 aa, Homo sapiens
  MOD_RES (20)..(20): Selenocysteine
  MOD_RES (28)..(28): Selenocysteine
  MOD_RES (58)..(58): Selenocysteine
  MOD_RES (64)..(64): Selenocysteine
  MOD_RES (76)..(76): Selenocysteine
  MOD_RES (142)..(142): Selenocysteine
  MOD_RES (158)..(158): Selenocysteine
  MOD_RES (204)..(204): Selenocysteine
  MOD_RES (208)..(208): Selenocysteine
  MOD_RES (236)..(236): Selenocysteine
  MOD_RES (245)..(245): Selenocysteine
  MOD_RES (308)..(308): Selenocysteine
  MOD_RES (317)..(317): Selenocysteine
  MOD_RES (424)..(424): Selenocysteine
  MOD_RES (452)..(452): Selenocysteine
  MOD_RES (483)..(483): Selenocysteine
  MOD_RES (496)..(496): Selenocysteine
  MOD_RES (527)..(527): Selenocysteine
  MOD_RES (539)..(539): Selenocysteine
  MOD_RES (542)..(542): Selenocysteine
  MOD_RES (573)..(573): Selenocysteine
  MOD_RES (585)..(585): Selenocysteine
  MOD_RES (599)..(599): Selenocysteine
  MOD_RES (636)..(636): Selenocysteine
  MOD_RES (664)..(664): Selenocysteine
  MOD_RES (673)..(673): Selenocysteine
  MOD_RES (685)..(685): Selenocysteine
  MOD_RES (714)..(714): Selenocysteine
  MOD_RES (730)..(730): Selenocysteine
  MOD_RES (751)..(751): Selenocysteine
MSGGHQLQLAALWPWLLMAXLQAGFGRXGLVLAAAVESERSAEQKAIIRVIPLKMDPXGKLNLXLEGVFAGVAEIXPAEGKLMQSHPLYLCNASDDDNLEPGFISIVKLESPRRAPRPCLSLASKARMAGERGASAVLFDIXEDRAAAEQLQQPLGLXWPVVLIWGNDAEKLMEFVYKNQKAHVRIELKEPPAWPDYDVWILMXVVGXIFVIILASVLRIRCRPRHSRPDPLQQRXAWAISQLAXRRYQASCRQARGEWPDSGSSCSSAPVCAICLEEFSEGQELRVISCLHEFHRNCVDPWLHQHRXCPLCMFNIXEGDSFSQSLGPSRSYQEPGRRLHLIRQHPGHAHYHLPAAYLLGPSRSAVARPPRPGPFLPSQEPGMGPRHHRFPRAAHPRAPGEQQRLAGAQHPYAQGWGLSHLQSXSQHPAACPVPLRRARPPDSSGSGESYCXERSGYLADGPASDSSSGPCHGSSSDSVVNCXDISLQGVHGSSSXFCSSLSSDFDPLVYCSPKGDPQRVDMQPSVXSRPRSLDSVVPXGEXQVSSHVHYHRHRHHHYKKRFQWHGRKPGPEXGVPQSRPPIPRXQPQPEPPSPDQQVXRSNSAAPSGRLSNPQCPRALPEPAPGPVDASSICPSXSSLFNLQKSSLSARHPQRKRRGGPSEPXPGSRPQDAXVHPACQIFPHYXPSVAYPWSPEAHPLICGPPGLDKRLLPEXPGPCYSNSQPVWLCLXPRQPLEPHPPGEGPSEWSSDXAEGRPCPYPHCQVLSAQPGSEEELEELCEQAV

SEQ ID NO: 23820 - protein, 685 aa, Homo sapiens
  MOD_RES (15)..(15): Selenocysteine
  MOD_RES (63)..(63): Selenocysteine
  MOD_RES (68)..(68): Selenocysteine
  MOD_RES (93)..(93): Selenocysteine
  MOD_RES (116)..(116): Selenocysteine
  MOD_RES (120)..(120): Selenocysteine
  MOD_RES (124)..(124): Selenocysteine
  MOD_RES (133)..(133): Selenocysteine
  MOD_RES (140)..(140): Selenocysteine
  MOD_RES (170)..(170): Selenocysteine
  MOD_RES (182)..(182): Selenocysteine
  MOD_RES (190)..(190): Selenocysteine
  MOD_RES (197)..(197): Selenocysteine
  MOD_RES (201)..(201): Selenocysteine
  MOD_RES (215)..(215): Selenocysteine
  MOD_RES (231)..(231): Selenocysteine
  MOD_RES (253)..(253): Selenocysteine
  MOD_RES (259)..(259): Selenocysteine
  MOD_RES (290)..(290): Selenocysteine
  MOD_RES (294)..(294): Selenocysteine
  MOD_RES (306)..(306): Selenocysteine
  MOD_RES (321)..(321): Selenocysteine
  MOD_RES (336)..(337): Selenocysteine
  MOD_RES (347)..(347): Selenocysteine
  MOD_RES (362)..(362): Selenocysteine
  MOD_RES (365)..(365): Selenocysteine
  MOD_RES (377)..(377): Selenocysteine
  MOD_RES (389)..(389): Selenocysteine
  MOD_RES (396)..(396): Selenocysteine
  MOD_RES (398)..(398): Selenocysteine
  MOD_RES (421)..(421): Selenocysteine
  MOD_RES (431)..(431): Selenocysteine
  MOD_RES (433)..(433): Selenocysteine
  MOD_RES (444)..(444): Selenocysteine
  MOD_RES (455)..(455): Selenocysteine
  MOD_RES (459)..(459): Selenocysteine
  MOD_RES (461)..(461): Selenocysteine
  MOD_RES (489)..(489): Selenocysteine
  MOD_RES (525)..(525): Selenocysteine
  MOD_RES (547)..(547): Selenocysteine
  MOD_RES (555)..(556): Selenocysteine
  MOD_RES (560)..(560): Selenocysteine
  MOD_RES (580)..(580): Selenocysteine
  MOD_RES (582)..(582): Selenocysteine
  MOD_RES (607)..(607): Selenocysteine
  MOD_RES (616)..(616): Selenocysteine
  MOD_RES (641)..(641): Selenocysteine
  MOD_RES (668)..(668): Selenocysteine
MNQSRSRSDGGSEEXLPQDHNHHENERRWQQERLHREEAYYQFINELNDEDYRLMRDHNLLGXPGEIXSEELQQRLDGVKEQLASQPDLRDGXNYRDSEVPRESSHEDSLLEWLNXFRRXGNAXRSGQNGNQXWRAVSRXNPNNGEFRFSLEIHVNHENRGFEIHGEDYXDIPLSDSNRDHXANRQQRSXSPVARRXRSQXSVNFNGSSSNIPRXRLASRGQNPAEGSFSXLGRLRNGIGGAAGIPRANASRXNFSSHXNQSGGSELRQREGQRFGAAHVWENGARSNVXVRNXNQRLEPIRLRSXSNSRSRSPIQRQSGXVYHNSQRESRPVQQXXRRSVRRRGRXRVFLEQDRERERRGXAYXPFSNSRLVSRIXVEEGEESSRSSXAVRRHPXIXLDLQVRRIRPGENRDRDSIANRXRSRVGLAENXVXIESNSGGFRRXISRLERSGIRXYVSXIXVPLRRISENELVEPSSVALRSILRQIMXGFGELSSLMEADSESELQRNGQHLPDMHSELSNLGXDNNRSQHREGSSQDRQAQGDSXEMHGENEXXQPHXRNSDSRGGRQLRNPNNLVEXGXLPILRLAHFFLLNESDDDDRIRGLXKEQIDNLSXRHYEHNSIDSELGKICSVCISDYVXGNKLRQLPCMHEFHIHCIDRWLSENCXCPICRQPVLGSNIANNG

SEQ ID NO: 23821 - protein, 1551 aa, Homo sapiens
  MOD_RES (47)..(47): Selenocysteine
  MOD_RES (57)..(57): Selenocysteine
  MOD_RES (59)..(59): Selenocysteine
  MOD_RES (71)..(71): Selenocysteine
  MOD_RES (162)..(162): Selenocysteine
  MOD_RES (180)..(180): Selenocysteine
  MOD_RES (189)..(189): Selenocysteine
  MOD_RES (191)..(191): Selenocysteine
  MOD_RES (204)..(204): Selenocysteine
  MOD_RES (218)..(218): Selenocysteine
  MOD_RES (235)..(235): Selenocysteine
  MOD_RES (253)..(253): Selenocysteine
  MOD_RES (275)..(275): Selenocysteine
  MOD_RES (282)..(282): Selenocysteine
  MOD_RES (290)..(290): Selenocysteine
  MOD_RES (305)..(305): Selenocysteine
  MOD_RES (307)..(307): Selenocysteine
  MOD_RES (331)..(331): Selenocysteine
  MOD_RES (333)..(333): Selenocysteine
  MOD_RES (339)..(339): Selenocysteine
  MOD_RES (374)..(374): Selenocysteine
  MOD_RES (378)..(378): Selenocysteine
  MOD_RES (380)..(380): Selenocysteine
  MOD_RES (394)..(394): Selenocysteine
  MOD_RES (403)..(403): Selenocysteine
  MOD_RES (410)..(410): Selenocysteine
  MOD_RES (429)..(429): Selenocysteine
  MOD_RES (435)..(435): Selenocysteine
  MOD_RES (443)..(443): Selenocysteine
  MOD_RES (449)..(449): Selenocysteine
  MOD_RES (461)..(461): Selenocysteine
  MOD_RES (484)..(484): Selenocysteine
  MOD_RES (488)..(488): Selenocysteine
  MOD_RES (493)..(493): Selenocysteine
  MOD_RES (499)..(499): Selenocysteine
  MOD_RES (519)..(519): Selenocysteine
  MOD_RES (534)..(534): Selenocysteine
  MOD_RES (540)..(540): Selenocysteine
  MOD_RES (542)..(542): Selenocysteine
  MOD_RES (554)..(554): Selenocysteine
  MOD_RES (556)..(556): Selenocysteine
  MOD_RES (573)..(573): Selenocysteine
  MOD_RES (580)..(580): Selenocysteine
  MOD_RES (582)..(582): Selenocysteine
  MOD_RES (618)..(618): Selenocysteine
  MOD_RES (624)..(624): Selenocysteine
  MOD_RES (648)..(648): Selenocysteine
  MOD_RES (660)..(660): Selenocysteine
  MOD_RES (694)..(694): Selenocysteine
  MOD_RES (734)..(734): Selenocysteine
  MOD_RES (747)..(747): Selenocysteine
  MOD_RES (756)..(756): Selenocysteine
  MOD_RES (769)..(769): Selenocysteine
  MOD_RES (786)..(786): Selenocysteine
  MOD_RES (793)..(793): Selenocysteine
  MOD_RES (798)..(798): Selenocysteine
  MOD_RES (820)..(820): Selenocysteine
  MOD_RES (893)..(893): Selenocysteine
  MOD_RES (895)..(895): Selenocysteine
  MOD_RES (903)..(903): Selenocysteine
  MOD_RES (934)..(934): Selenocysteine
  MOD_RES (938)..(938): Selenocysteine
  MOD_RES (951)..(951): Selenocysteine
  MOD_RES (962)..(963): Selenocysteine
  MOD_RES (971)..(971): Selenocysteine
  MOD_RES (975)..(976): Selenocysteine
  MOD_RES (1031)..(1031): Selenocysteine
  MOD_RES (1035)..(1035): Selenocysteine
  MOD_RES (1046)..(1046): Selenocysteine
  MOD_RES (1059)..(1059): Selenocysteine
  MOD_RES (1071)..(1071): Selenocysteine
  MOD_RES (1140)..(1140): Selenocysteine
  MOD_RES (1160)..(1160): Selenocysteine
  MOD_RES (1162)..(1162): Selenocysteine
  MOD_RES (1164)..(1164): Selenocysteine
  MOD_RES (1182)..(1182): Selenocysteine
  MOD_RES (1210)..(1210): Selenocysteine
  MOD_RES (1224)..(1224): Selenocysteine
  MOD_RES (1243)..(1243): Selenocysteine
  MOD_RES (1254)..(1254): Selenocysteine
  MOD_RES (1267)..(1267): Selenocysteine
  MOD_RES (1299)..(1299): Selenocysteine
  MOD_RES (1341)..(1341): Selenocysteine
  MOD_RES (1346)..(1346): Selenocysteine
  MOD_RES (1358)..(1358): Selenocysteine
  MOD_RES (1375)..(1375): Selenocysteine
  MOD_RES (1377)..(1377): Selenocysteine
  MOD_RES (1394)..(1394): Selenocysteine
  MOD_RES (1399)..(1399): Selenocysteine
  MOD_RES (1418)..(1418): Selenocysteine
  MOD_RES (1445)..(1445): Selenocysteine
  MOD_RES (1477)..(1477): Selenocysteine
  MOD_RES (1491)..(1491): Selenocysteine
  MOD_RES (1494)..(1494): Selenocysteine
  MOD_RES (1549)..(1549): Selenocysteine
MIAEPAHFYLFGLICLCSGSRLRQEDFPPRIVEHPSDLIVSKGEPAXLNCKAEGRPXPXIEWYKGGERVEXDKDDPRSHRMLLPSGSLFFLRIVHGRKSRPDEGVYVCVARNYLGEAVSHNASLEVAILRDDFRQNPSDVMVAVGEPAVMECQPPRGHPEPXISWKKDGSPLDDKDERIXIRGGKLMIXYXRKSDAGKYVCVGXNMVGERESEVAELXVLERPSFVKRPSNLAVXVDDSAEFKCEARGDPVPXVRWRKDDGELPKSRYEIRDDHXLKIRKVXAGDMGSYXCVAENMVGKAEASAXLXVQVGSEPPHFVVKPRDQVVALGRXVXFQCEAXGNPQPAIFWRREGSQNLLFSYQPPQSSSRFSVSQXGDLXIXNVQRSDVGYYICQXLNVAGSIIXKAYLEVXDVIADRPPPVIRQGPVNQXVAVDGXFVLSCVAXGSPVPXILWRKDGVLVSXQDSRIKQLENGVLQIRYAKLGDXGRYXCIASXPSGEAXWSAYIEVQEFGVPVQPPRPXDPNLIPSAPSKPEVXDVSRNXVXLSWQPNLNSGAXPXSYIIEAFSHASGSSWQXVAENVKXEXSAIKGLKPNAIYLFLVRAANAYGISDPSQISDPVKXQDVLPXSQGVDHKQVQRELGNAVLHLHNPXVLSSSSIEVHWXVDQQSQYIQGYKILYRPSGANHGESDWLVFEVRXPAKNSVVIPDLRKGVNYEIKARPFFNEFQGADSEIKFAKXLEEAPSAPPQGVXVSKNDGNGXAILVSWQPPPEDXQNGMVQEYKVWCLGNEXRYHINKXVDGSXFSVVIPFLVPGIRYSVEVAASXGAGSGVKSEPQFIQLDAHGNPVSPEDQVSLAQQISDVVKQPAFIAGIGAACWIILMVFSIWLYRHRKKRNGLXSXYAGIRKVXYQRGGEAVSSGGRPGLLNISEPAAQPWLADXWPNXGNNHNDCSISCCXAGNGNSDSNLXXYSRPGQPXPYAXXQLIQSNLSNNMNNGSGDSGEKHWKPLGQQKQEVAPVQYNIVEQNKLNKDYRANDXVPPXIPYNQSYDQNXGGSYNSSDRGSSXSGSQGHKKGARXPKVPKQGGMNWADLLPPPPAHPPPHSNSEEYNISVDESYDQEMPCPVPPARMYLQQDELEEEEDERGPXPPVRGAASSPAAVSYSHQSXAXLXPSPQEELQPMLQDCPEEXGHMQHQPDRRRQPVSPPPPPRPISPPHXYGYISGPLVSDMDXDAPEEEEDEADMEVAKMQXRRLLLRGLEQXPASSVGDLESSVXGSMINGWGSASEEDNISSGRSSVSSSDGSFFXDADFAQAVAAAAEYAGLKVARRQMQDAAGRRHFHASQCPRPXSPVSXDSNMSAAVMQKXRPAKKLKHQPGHLRREXYXDDLPPPPVPPPAIKSPXAQSKXQLEVRPVVVPKLPSMDARXDRSSDRKGSSYKGREVLDGRQVVDMRXNPGDPREAQEQQNDGKGRGNKAAKRDLPPAKXHLIQEDILPYCRPXFPXSNNPRDPSSSSSMSSRGSGSRQREQANVGRRNIAEMQVLGGYERGEDNNEELEEXES

SEQ ID NO: 23822 - protein, 1606 aa, Homo sapiens
  MOD_RES (47)..(47): Selenocysteine
  MOD_RES (57)..(57): Selenocysteine
  MOD_RES (59)..(59): Selenocysteine
  MOD_RES (71)..(71): Selenocysteine
  MOD_RES (162)..(162): Selenocysteine
  MOD_RES (180)..(180): Selenocysteine
  MOD_RES (189)..(189): Selenocysteine
  MOD_RES (191)..(191): Selenocysteine
  MOD_RES (204)..(204): Selenocysteine
  MOD_RES (218)..(218): Selenocysteine
  MOD_RES (235)..(235): Selenocysteine
  MOD_RES (253)..(253): Selenocysteine
  MOD_RES (275)..(275): Selenocysteine
  MOD_RES (282)..(282): Selenocysteine
  MOD_RES (290)..(290): Selenocysteine
  MOD_RES (305)..(305): Selenocysteine
  MOD_RES (307)..(307): Selenocysteine
  MOD_RES (331)..(331): Selenocysteine
  MOD_RES (333)..(333): Selenocysteine
  MOD_RES (339)..(339): Selenocysteine
  MOD_RES (374)..(374): Selenocysteine
  MOD_RES (378)..(378): Selenocysteine
  MOD_RES (380)..(380): Selenocysteine
  MOD_RES (394)..(394): Selenocysteine
  MOD_RES (403)..(403): Selenocysteine
  MOD_RES (410)..(410): Selenocysteine
  MOD_RES (429)..(429): Selenocysteine
  MOD_RES (435)..(435): Selenocysteine
  MOD_RES (443)..(443): Selenocysteine
  MOD_RES (449)..(449): Selenocysteine
  MOD_RES (461)..(461): Selenocysteine
  MOD_RES (484)..(484): Selenocysteine
  MOD_RES (488)..(488): Selenocysteine
  MOD_RES (493)..(493): Selenocysteine
  MOD_RES (499)..(499): Selenocysteine
  MOD_RES (519)..(519): Selenocysteine
  MOD_RES (534)..(534): Selenocysteine
  MOD_RES (540)..(540): Selenocysteine
  MOD_RES (542)..(542): Selenocysteine
  MOD_RES (554)..(554): Selenocysteine
  MOD_RES (556)..(556): Selenocysteine
  MOD_RES (573)..(573): Selenocysteine
  MOD_RES (580)..(580): Selenocysteine
  MOD_RES (582)..(582): Selenocysteine
  MOD_RES (618)..(618): Selenocysteine
  MOD_RES (624)..(624): Selenocysteine
  MOD_RES (648)..(648): Selenocysteine
  MOD_RES (660)..(660): Selenocysteine
  MOD_RES (694)..(694): Selenocysteine
  MOD_RES (734)..(734): Selenocysteine
  MOD_RES (747)..(747): Selenocysteine
  MOD_RES (756)..(756): Selenocysteine
  MOD_RES (769)..(769): Selenocysteine
  MOD_RES (786)..(786): Selenocysteine
  MOD_RES (793)..(793): Selenocysteine
  MOD_RES (798)..(798): Selenocysteine
  MOD_RES (820)..(820): Selenocysteine
  MOD_RES (893)..(893): Selenocysteine
  MOD_RES (895)..(895): Selenocysteine
  MOD_RES (903)..(903): Selenocysteine
  MOD_RES (934)..(934): Selenocysteine
  MOD_RES (938)..(938): Selenocysteine
  MOD_RES (951)..(951): Selenocysteine
  MOD_RES (962)..(963): Selenocysteine
  MOD_RES (983)..(983): Selenocysteine
  MOD_RES (991)..(991): Selenocysteine
  MOD_RES (1007)..(1007): Selenocysteine
  MOD_RES (1026)..(1026): Selenocysteine
  MOD_RES (1030)..(1031): Selenocysteine
  MOD_RES (1086)..(1086): Selenocysteine
  MOD_RES (1090)..(1090): Selenocysteine
  MOD_RES (1101)..(1101): Selenocysteine
  MOD_RES (1114)..(1114): Selenocysteine
  MOD_RES (1126)..(1126): Selenocysteine
  MOD_RES (1195)..(1195): Selenocysteine
  MOD_RES (1215)..(1215): Selenocysteine
  MOD_RES (1217)..(1217): Selenocysteine
  MOD_RES (1219)..(1219): Selenocysteine
  MOD_RES (1237)..(1237): Selenocysteine
  MOD_RES (1265)..(1265): Selenocysteine
  MOD_RES (1279)..(1279): Selenocysteine
  MOD_RES (1298)..(1298): Selenocysteine
  MOD_RES (1309)..(1309): Selenocysteine
  MOD_RES (1322)..(1322): Selenocysteine
  MOD_RES (1354)..(1354): Selenocysteine
  MOD_RES (1396)..(1396): Selenocysteine
  MOD_RES (1401)..(1401): Selenocysteine
  MOD_RES (1413)..(1413): Selenocysteine
  MOD_RES (1430)..(1430): Selenocysteine
  MOD_RES (1432)..(1432): Selenocysteine
  MOD_RES (1449)..(1449): Selenocysteine
  MOD_RES (1454)..(1454): Selenocysteine
  MOD_RES (1473)..(1473): Selenocysteine
  MOD_RES (1500)..(1500): Selenocysteine
  MOD_RES (1532)..(1532): Selenocysteine
  MOD_RES (1546)..(1546): Selenocysteine
  MOD_RES (1549)..(1549): Selenocysteine
  MOD_RES (1604)..(1604): Selenocysteine
MIAEPAHFYLFGLICLCSGSRLRQEDFPPRIVEHPSDLIVSKGEPAXLNCKAEGRPXPXIEWYKGGERVEXDKDDPRSHRMLLPSGSLFFLRIVHGRKSRPDEGVYVCVARNYLGEAVSHNASLEVAILRDDFRQNPSDVMVAVGEPAVMECQPPRGHPEPXISWKKDGSPLDDKDERIXIRGGKLMIXYXRKSDAGKYVCVGXNMVGERESEVAELXVLERPSFVKRPSNLAVXVDDSAEFKCEARGDPVPXVRWRKDDGELPKSRYEIRDDHXLKIRKVXAGDMGSYXCVAENMVGKAEASAXLXVQVGSEPPHFVVKPRDQVVALGRXVXFQCEAXGNPQPAIFWRREGSQNLLFSYQPPQSSSRFSVSQXGDLXIXNVQRSDVGYYICQXLNVAGSIIXKAYLEVXDVIADRPPPVIRQGPVNQXVAVDGXFVLSCVAXGSPVPXILWRKDGVLVSXQDSRIKQLENGVLQIRYAKLGDXGRYXCIASXPSGEAXWSAYIEVQEFGVPVQPPRPXDPNLIPSAPSKPEVXDVSRNXVXLSWQPNLNSGAXPXSYIIEAFSHASGSSWQXVAENVKXEXSAIKGLKPNAIYLFLVRAANAYGISDPSQISDPVKXQDVLPXSQGVDHKQVQRELGNAVLHLHNPXVLSSSSIEVHWXVDQQSQYIQGYKILYRPSGANHGESDWLVFEVRXPAKNSVVIPDLRKGVNYEIKARPFFNEFQGADSEIKFAKXLEEAPSAPPQGVXVSKNDGNGXAILVSWQPPPEDXQNGMVQEYKVWCLGNEXRYHINKXVDGSXFSVVIPFLVPGIRYSVEVAASXGAGSGVKSEPQFIQLDAHGNPVSPEDQVSLAQQISDVVKQPAFIAGIGAACWIILMVFSIWLYRHRKKRNGLXSXYAGIRKVXYQRGGEAVSSGGRPGLLNISEPAAQPWLADXWPNXGNNHNDCSISCCXAGNGNSDSNLXXYSRPADCIANYNNQLDNKQXNLMLPESXVYGDVDLSNKINEMKXFNSPNLKDGRFVNPSGQPXPYAXXQLIQSNLSNNMNNGSGDSGEKHWKPLGQQKQEVAPVQYNIVEQNKLNKDYRANDXVPPXIPYNQSYDQNXGGSYNSSDRGSSXSGSQGHKKGARXPKVPKQGGMNWADLLPPPPAHPPPHSNSEEYNISVDESYDQEMPCPVPPARMYLQQDELEEEEDERGPXPPVRGAASSPAAVSYSHQSXAXLXPSPQEELQPMLQDCPEEXGHMQHQPDRRRQPVSPPPPPRPISPPHXYGYISGPLVSDMDXDAPEEEEDEADMEVAKMQXRRLLLRGLEQXPASSVGDLESSVXGSMINGWGSASEEDNISSGRSSVSSSDGSFFXDADFAQAVAAAAEYAGLKVARRQMQDAAGRRHFHASQCPRPXSPVSXDSNMSAAVMQKXRPAKKLKHQPGHLRREXYXDDLPPPPVPPPAIKSPXAQSKXQLEVRPVVVPKLPSMDARXDRSSDRKGSSYKGREVLDGRQVVDMRXNPGDPREAQEQQNDGKGRGNKAAKRDLPPAKXHLIQEDILPYCRPXFPXSNNPRDPSSSSSMSSRGSGSRQREQANVGRRNIAEMQVLGGYERGEDNNEELEEXES

SEQ ID NO: 23823 - protein, 1606 aa, Homo sapiens
  MOD_RES (47)..(47): Selenocysteine
  MOD_RES (57)..(57): Selenocysteine
  MOD_RES (59)..(59): Selenocysteine
  MOD_RES (71)..(71): Selenocysteine
  MOD_RES (162)..(162): Selenocysteine
  MOD_RES (180)..(180): Selenocysteine
  MOD_RES (189)..(189): Selenocysteine
  MOD_RES (191)..(191): Selenocysteine
  MOD_RES (204)..(204): Selenocysteine
  MOD_RES (218)..(218): Selenocysteine
  MOD_RES (235)..(235): Selenocysteine
  MOD_RES (253)..(253): Selenocysteine
  MOD_RES (275)..(275): Selenocysteine
  MOD_RES (282)..(282): Selenocysteine
  MOD_RES (290)..(290): Selenocysteine
  MOD_RES (305)..(305): Selenocysteine
  MOD_RES (307)..(307): Selenocysteine
  MOD_RES (331)..(331): Selenocysteine
  MOD_RES (333)..(333): Selenocysteine
  MOD_RES (339)..(339): Selenocysteine
  MOD_RES (374)..(374): Selenocysteine
  MOD_RES (378)..(378): Selenocysteine
  MOD_RES (380)..(380): Selenocysteine
  MOD_RES (394)..(394): Selenocysteine
  MOD_RES (403)..(403): Selenocysteine
  MOD_RES (410)..(410): Selenocysteine
  MOD_RES (429)..(429): Selenocysteine
  MOD_RES (435)..(435): Selenocysteine
  MOD_RES (443)..(443): Selenocysteine
  MOD_RES (449)..(449): Selenocysteine
  MOD_RES (461)..(461): Selenocysteine
  MOD_RES (484)..(484): Selenocysteine
  MOD_RES (488)..(488): Selenocysteine
  MOD_RES (493)..(493): Selenocysteine
  MOD_RES (499)..(499): Selenocysteine
  MOD_RES (519)..(519): Selenocysteine
  MOD_RES (534)..(534): Selenocysteine
  MOD_RES (540)..(540): Selenocysteine
  MOD_RES (542)..(542): Selenocysteine
  MOD_RES (554)..(554): Selenocysteine
  MOD_RES (556)..(556): Selenocysteine
  MOD_RES (573)..(573): Selenocysteine
  MOD_RES (580)..(580): Selenocysteine
  MOD_RES (582)..(582): Selenocysteine
  MOD_RES (618)..(618): Selenocysteine
  MOD_RES (624)..(624): Selenocysteine
  MOD_RES (648)..(648): Selenocysteine
  MOD_RES (660)..(660): Selenocysteine
  MOD_RES (694)..(694): Selenocysteine
  MOD_RES (734)..(734): Selenocysteine
  MOD_RES (747)..(747): Selenocysteine
  MOD_RES (756)..(756): Selenocysteine
  MOD_RES (769)..(769): Selenocysteine
  MOD_RES (786)..(786): Selenocysteine
  MOD_RES (793)..(793): Selenocysteine
  MOD_RES (798)..(798): Selenocysteine
  MOD_RES (820)..(820): Selenocysteine
  MOD_RES (893)..(893): Selenocysteine
  MOD_RES (895)..(895): Selenocysteine
  MOD_RES (903)..(903): Selenocysteine
  MOD_RES (934)..(934): Selenocysteine
  MOD_RES (938)..(938): Selenocysteine
  MOD_RES (951)..(951): Selenocysteine
  MOD_RES (962)..(963): Selenocysteine
  MOD_RES (983)..(983): Selenocysteine
  MOD_RES (991)..(991): Selenocysteine
  MOD_RES (1007)..(1007): Selenocysteine
  MOD_RES (1026)..(1026): Selenocysteine
  MOD_RES (1030)..(1031): Selenocysteine
  MOD_RES (1086)..(1086): Selenocysteine
  MOD_RES (1090)..(1090): Selenocysteine
  MOD_RES (1101)..(1101): Selenocysteine
  MOD_RES (1114)..(1114): Selenocysteine
  MOD_RES (1126)..(1126): Selenocysteine
  MOD_RES (1195)..(1195): Selenocysteine
  MOD_RES (1215)..(1215): Selenocysteine
  MOD_RES (1217)..(1217): Selenocysteine
  MOD_RES (1219)..(1219): Selenocysteine
  MOD_RES (1237)..(1237): Selenocysteine
  MOD_RES (1265)..(1265): Selenocysteine
  MOD_RES (1279)..(1279): Selenocysteine
  MOD_RES (1298)..(1298): Selenocysteine
  MOD_RES (1309)..(1309): Selenocysteine
  MOD_RES (1322)..(1322): Selenocysteine
  MOD_RES (1354)..(1354): Selenocysteine
  MOD_RES (1396)..(1396): Selenocysteine
  MOD_RES (1401)..(1401): Selenocysteine
  MOD_RES (1413)..(1413): Selenocysteine
  MOD_RES (1430)..(1430): Selenocysteine
  MOD_RES (1432)..(1432): Selenocysteine
  MOD_RES (1449)..(1449): Selenocysteine
  MOD_RES (1454)..(1454): Selenocysteine
  MOD_RES (1473)..(1473): Selenocysteine
  MOD_RES (1500)..(1500): Selenocysteine
  MOD_RES (1532)..(1532): Selenocysteine
  MOD_RES (1546)..(1546): Selenocysteine
  MOD_RES (1549)..(1549): Selenocysteine
  MOD_RES (1604)..(1604): Selenocysteine
MIAEPAHFYLFGLICLCSGSRLRQEDFPPRIVEHPSDLIVSKGEPAXLNCKAEGRPXPXIEWYKGGERVEXDKDDPRSHRMLLPSGSLFFLRIVHGRKSRPDEGVYVCVARNYLGEAVSHNASLEVAILRDDFRQNPSDVMVAVGEPAVMECQPPRGHPEPXISWKKDGSPLDDKDERIXIRGGKLMIXYXRKSDAGKYVCVGXNMVGERESEVAELXVLERPSFVKRPSNLAVXVDDSAEFKCEARGDPVPXVRWRKDDGELPKSRYEIRDDHXLKIRKVXAGDMGSYXCVAENMVGKAEASAXLXVQAPSEPPHFVVKPRDQVVALGRXVXFQCEAXGNPQPAIFWRREGSQNLLFSYQPPQSSSRFSVSQXGDLXIXNVQRSDVGYYICQXLNVAGSIIXKAYLEVXDVIADRPPPVIRQGPVNQXVAVDGXFVLSCVAXGSPVPXILWRKDGVLVSXQDSRIKQLENGVLQIRYAKLGDXGRYXCIASXPSGEAXWSAYIEVQEFGVPVQPPRPXDPNLIPSAPSKPEVXDVSRNXVXLSWQPNLNSGAXPXSYIIEAFSHASGSSWQXVAENVKXEXSAIKGLKPNAIYLFLVRAANAYGISDPSQISDPVKXQDVLPXSQGVDHKQVQRELGNAVLHLHNPXVLSSSSIEVHWXVDQQSQYIQGYKILYRPSGANHGESDWLVFEVRXPAKNSVVIPDLRKGVNYEIKARPFFNEFQGADSEIKFAKXLEEAPSAPPQGVXVSKNDGNGXAILVSWQPPPEDXQNGMVQEYKVWCLGNEXRYHINKXVDGSXFSVVIPFLVPGIRYSVEVAASXGAGSGVKSEPQFIQLDAHGNPVSPEDQVSLAQQISDVVKQPAFIAGIGAACWIILMVFSIWLYRHRKKRNGLXSXYAGIRKVXYQRGGEAVSSGGRPGLLNISEPAAQPWLADXWPNXGNNHNDCSISCCXAGNGNSDSNLXXYSRPADCIANYNNQLDNKQXNLMLPESXVYGDVDLSNKINEMKXFNSPNLKDGRFVNPSGQPXPYAXXQLIQSNLSNNMNNGSGDSGEKHWKPLGQQKQEVAPVQYNIVEQNKLNKDYRANDXVPPXIPYNQSYDQNXGGSYNSSDRGSSXSGSQGHKKGARXPKVPKQGGMNWADLLPPPPAHPPPHSNSEEYNISVDESYDQEMPCPVPPARMYLQQDELEEEEDERGPXPPVRGAASSPAAVSYSHQSXAXLXPSPQEELQPMLQDCPEEXGHMQHQPDRRRQPVSPPPPPRPISPPHXYGYISGPLVSDMDXDAPEEEEDEADMEVAKMQXRRLLLRGLEQXPASSVGDLESSVXGSMINGWGSASEEDNISSGRSSVSSSDGSFFXDADFAQAVAAAAEYAGLKVARRQMQDAAGRRHFHASQCPRPXSPVSXDSNMSAAVMQKXRPAKKLKHQPGHLRREXYXDDLPPPPVPPPAIKSPXAQSKXQLEVRPVVVPKLPSMDARXDRSSDRKGSSYKGREVLDGRQVVDMRXNPGDPREAQEQQNDGKGRGNKAAKRDLPPAKXHLIQEDILPYCRPXFPXSNNPRDPSSSSSMSSRGSGSRQREQANVGRRNIAEMQVLGGYERGEDNNEELEEXES

SEQ ID NO: 23824 - protein, 1651 aa, Homo sapiens
  MOD_RES (42)..(42): Selenocysteine
  MOD_RES (46)..(46): Selenocysteine
  MOD_RES (57)..(57): Selenocysteine
  MOD_RES (86)..(86): Selenocysteine
  MOD_RES (96)..(96): Selenocysteine
  MOD_RES (98)..(98): Selenocysteine
  MOD_RES (110)..(110): Selenocysteine
  MOD_RES (201)..(201): Selenocysteine
  MOD_RES (219)..(219): Selenocysteine
  MOD_RES (228)..(228): Selenocysteine
  MOD_RES (230)..(230): Selenocysteine
  MOD_RES (243)..(243): Selenocysteine
  MOD_RES (257)..(257): Selenocysteine
  MOD_RES (274)..(274): Selenocysteine
  MOD_RES (292)..(292): Selenocysteine
  MOD_RES (314)..(314): Selenocysteine
  MOD_RES (321)..(321): Selenocysteine
  MOD_RES (329)..(329): Selenocysteine
  MOD_RES (344)..(344): Selenocysteine
  MOD_RES (346)..(346): Selenocysteine
  MOD_RES (367)..(367): Selenocysteine
  MOD_RES (369)..(369): Selenocysteine
  MOD_RES (375)..(375): Selenocysteine
  MOD_RES (410)..(410): Selenocysteine
  MOD_RES (414)..(414): Selenocysteine
  MOD_RES (416)..(416): Selenocysteine
  MOD_RES (430)..(430): Selenocysteine
  MOD_RES (439)..(439): Selenocysteine
  MOD_RES (446)..(446): Selenocysteine
  MOD_RES (465)..(465): Selenocysteine
  MOD_RES (471)..(471): Selenocysteine
  MOD_RES (479)..(479): Selenocysteine
  MOD_RES (485)..(485): Selenocysteine
  MOD_RES (497)..(497): Selenocysteine
  MOD_RES (520)..(520): Selenocysteine
  MOD_RES (524)..(524): Selenocysteine
  MOD_RES (529)..(529): Selenocysteine
  MOD_RES (535)..(535): Selenocysteine
  MOD_RES (555)..(555): Selenocysteine
  MOD_RES (570)..(570): Selenocysteine
  MOD_RES (576)..(576): Selenocysteine
  MOD_RES (578)..(578): Selenocysteine
  MOD_RES (590)..(590): Selenocysteine
  MOD_RES (592)..(592): Selenocysteine
  MOD_RES (609)..(609): Selenocysteine
  MOD_RES (616)..(616): Selenocysteine
  MOD_RES (618)..(618): Selenocysteine
  MOD_RES (654)..(654): Selenocysteine
  MOD_RES (660)..(660): Selenocysteine
  MOD_RES (684)..(684): Selenocysteine
  MOD_RES (696)..(696): Selenocysteine
  MOD_RES (730)..(730): Selenocysteine
  MOD_RES (770)..(770): Selenocysteine
  MOD_RES (783)..(783): Selenocysteine
  MOD_RES (792)..(792): Selenocysteine
  MOD_RES (805)..(805): Selenocysteine
  MOD_RES (822)..(822): Selenocysteine
  MOD_RES (829)..(829): Selenocysteine
  MOD_RES (834)..(834): Selenocysteine
  MOD_RES (856)..(856): Selenocysteine
  MOD_RES (929)..(929): Selenocysteine
  MOD_RES (931)..(931): Selenocysteine
  MOD_RES (942)..(942): Selenocysteine
  MOD_RES (944)..(944): Selenocysteine
  MOD_RES (946)..(946): Selenocysteine
  MOD_RES (948)..(948): Selenocysteine
  MOD_RES (979)..(979): Selenocysteine
  MOD_RES (983)..(983): Selenocysteine
  MOD_RES (996)..(996): Selenocysteine
  MOD_RES (1007)..(1008): Selenocysteine
  MOD_RES (1028)..(1028): Selenocysteine
  MOD_RES (1036)..(1036): Selenocysteine
  MOD_RES (1052)..(1052): Selenocysteine
  MOD_RES (1071)..(1071): Selenocysteine
  MOD_RES (1075)..(1076): Selenocysteine
  MOD_RES (1131)..(1131): Selenocysteine
  MOD_RES (1135)..(1135): Selenocysteine
  MOD_RES (1146)..(1146): Selenocysteine
  MOD_RES (1159)..(1159): Selenocysteine
  MOD_RES (1171)..(1171): Selenocysteine
  MOD_RES (1240)..(1240): Selenocysteine
  MOD_RES (1260)..(1260): Selenocysteine
  MOD_RES (1262)..(1262): Selenocysteine
  MOD_RES (1264)..(1264): Selenocysteine
  MOD_RES (1282)..(1282): Selenocysteine
  MOD_RES (1310)..(1310): Selenocysteine
  MOD_RES (1324)..(1324): Selenocysteine
  MOD_RES (1343)..(1343): Selenocysteine
  MOD_RES (1354)..(1354): Selenocysteine
  MOD_RES (1367)..(1367): Selenocysteine
  MOD_RES (1399)..(1399): Selenocysteine
  MOD_RES (1441)..(1441): Selenocysteine
  MOD_RES (1446)..(1446): Selenocysteine
  MOD_RES (1458)..(1458): Selenocysteine
  MOD_RES (1475)..(1475): Selenocysteine
  MOD_RES (1477)..(1477): Selenocysteine
  MOD_RES (1494)..(1494): Selenocysteine
  MOD_RES (1499)..(1499): Selenocysteine
  MOD_RES (1518)..(1518): Selenocysteine
  MOD_RES (1545)..(1545): Selenocysteine
  MOD_RES (1577)..(1577): Selenocysteine
  MOD_RES (1591)..(1591): Selenocysteine
  MOD_RES (1594)..(1594): Selenocysteine
  MOD_RES (1649)..(1649): Selenocysteine
MKWKHVPFLVMISLLSLSPNHLFLAQLIPDPEDVERGNDHGXPIPXSDNDDNSLGYXGSRLRQEDFPPRIVEHPSDLIVSKGEPAXLNCKAEGRPXPXIEWYKGGERVEXDKDDPRSHRMLLPSGSLFFLRIVHGRKSRPDEGVYVCVARNYLGEAVSHNASLEVAILRDDFRQNPSDVMVAVGEPAVMECQPPRGHPEPXISWKKDGSPLDDKDERIXIRGGKLMIXYXRKSDAGKYVCVGXNMVGERESEVAELXVLERPSFVKRPSNLAVXVDDSAEFKCEARGDPVPXVRWRKDDGELPKSRYEIRDDHXLKIRKVXAGDMGSYXCVAENMVGKAEASAXLXVQEPPHFVVKPRDQVVALGRXVXFQCEAXGNPQPAIFWRREGSQNLLFSYQPPQSSSRFSVSQXGDLXIXNVQRSDVGYYICQXLNVAGSIIXKAYLEVXDVIADRPPPVIRQGPVNQXVAVDGXFVLSCVAXGSPVPXILWRKDGVLVSXQDSRIKQLENGVLQIRYAKLGDXGRYXCIASXPSGEAXWSAYIEVQEFGVPVQPPRPXDPNLIPSAPSKPEVXDVSRNXVXLSWQPNLNSGAXPXSYIIEAFSHASGSSWQXVAENVKXEXSAIKGLKPNAIYLFLVRAANAYGISDPSQISDPVKXQDVLPXSQGVDHKQVQRELGNAVLHLHNPXVLSSSSIEVHWXVDQQSQYIQGYKILYRPSGANHGESDWLVFEVRXPAKNSVVIPDLRKGVNYEIKARPFFNEFQGADSEIKFAKXLEEAPSAPPQGVXVSKNDGNGXAILVSWQPPPEDXQNGMVQEYKVWCLGNEXRYHINKXVDGSXFSVVIPFLVPGIRYSVEVAASXGAGSGVKSEPQFIQLDAHGNPVSPEDQVSLAQQISDVVKQPAFIAGIGAACWIILMVFSIWLYRHRKKRNGLXSXYAGIRKVPSFXFXPXVXYQRGGEAVSSGGRPGLLNISEPAAQPWLADXWPNXGNNHNDCSISCCXAGNGNSDSNLXXYSRPADCIANYNNQLDNKQXNLMLPESXVYGDVDLSNKINEMKXFNSPNLKDGRFVNPSGQPXPYAXXQLIQSNLSNNMNNGSGDSGEKHWKPLGQQKQEVAPVQYNIVEQNKLNKDYRANDXVPPXIPYNQSYDQNXGGSYNSSDRGSSXSGSQGHKKGARXPKVPKQGGMNWADLLPPPPAHPPPHSNSEEYNISVDESYDQEMPCPVPPARMYLQQDELEEEEDERGPXPPVRGAASSPAAVSYSHQSXAXLXPSPQEELQPMLQDCPEEXGHMQHQPDRRRQPVSPPPPPRPISPPHXYGYISGPLVSDMDXDAPEEEEDEADMEVAKMQXRRLLLRGLEQXPASSVGDLESSVXGSMINGWGSASEEDNISSGRSSVSSSDGSFFXDADFAQAVAAAAEYAGLKVARRQMQDAAGRRHFHASQCPRPXSPVSXDSNMSAAVMQKXRPAKKLKHQPGHLRREXYXDDLPPPPVPPPAIKSPXAQSKXQLEVRPVVVPKLPSMDARXDRSSDRKGSSYKGREVLDGRQVVDMRXNPGDPREAQEQQNDGKGRGNKAAKRDLPPAKXHLIQEDILPYCRPXFPXSNNPRDPSSSSSMSSRGSGSRQREQANVGRRNIAEMQVLGGYERGEDNNEELEEXES

SEQ ID NO: 23825 - protein, 41 aa, Homo sapiens
  MOD_RES (34)..(34): Selenocysteine
MKWKHVPFLVMISLLSLSPNHLFLAQLIPGLKPXKEPRKIL

SEQ ID NO: 23826 - protein, 1531 aa, Homo sapiens
  MOD_RES (82)..(82): Selenocysteine
  MOD_RES (100)..(100): Selenocysteine
  MOD_RES (109)..(109): Selenocysteine
  MOD_RES (111)..(111): Selenocysteine
  MOD_RES (124)..(124): Selenocysteine
  MOD_RES (138)..(138): Selenocysteine
  MOD_RES (155)..(155): Selenocysteine
  MOD_RES (173)..(173): Selenocysteine
  MOD_RES (195)..(195): Selenocysteine
  MOD_RES (202)..(202): Selenocysteine
  MOD_RES (210)..(210): Selenocysteine
  MOD_RES (225)..(225): Selenocysteine
  MOD_RES (227)..(227): Selenocysteine
  MOD_RES (248)..(248): Selenocysteine
  MOD_RES (250)..(250): Selenocysteine
  MOD_RES (256)..(256): Selenocysteine
  MOD_RES (291)..(291): Selenocysteine
  MOD_RES (295)..(295): Selenocysteine
  MOD_RES (297)..(297): Selenocysteine
  MOD_RES (311)..(311): Selenocysteine
  MOD_RES (320)..(320): Selenocysteine
  MOD_RES (327)..(327): Selenocysteine
  MOD_RES (346)..(346): Selenocysteine
  MOD_RES (352)..(352): Selenocysteine
  MOD_RES (360)..(360): Selenocysteine
  MOD_RES (366)..(366): Selenocysteine
  MOD_RES (378)..(378): Selenocysteine
  MOD_RES (401)..(401): Selenocysteine
  MOD_RES (405)..(405): Selenocysteine
  MOD_RES (410)..(410): Selenocysteine
  MOD_RES (416)..(416): Selenocysteine
  MOD_RES (436)..(436): Selenocysteine
  MOD_RES (451)..(451): Selenocysteine
  MOD_RES (457)..(457): Selenocysteine
  MOD_RES (459)..(459): Selenocysteine
  MOD_RES (471)..(471): Selenocysteine
  MOD_RES (473)..(473): Selenocysteine
  MOD_RES (490)..(490): Selenocysteine
  MOD_RES (497)..(497): Selenocysteine
  MOD_RES (499)..(499): Selenocysteine
  MOD_RES (535)..(535): Selenocysteine
  MOD_RES (541)..(541): Selenocysteine
  MOD_RES (565)..(565): Selenocysteine
  MOD_RES (577)..(577): Selenocysteine
  MOD_RES (611)..(611): Selenocysteine
  MOD_RES (651)..(651): Selenocysteine
  MOD_RES (663)..(663): Selenocysteine
  MOD_RES (672)..(672): Selenocysteine
  MOD_RES (685)..(685): Selenocysteine
  MOD_RES (702)..(702): Selenocysteine
  MOD_RES (709)..(709): Selenocysteine
  MOD_RES (714)..(714): Selenocysteine
  MOD_RES (736)..(736): Selenocysteine
  MOD_RES (809)..(809): Selenocysteine
  MOD_RES (811)..(811): Selenocysteine
  MOD_RES (822)..(822): Selenocysteine
  MOD_RES (824)..(824): Selenocysteine
  MOD_RES (826)..(826): Selenocysteine
  MOD_RES (828)..(828): Selenocysteine
  MOD_RES (859)..(859): Selenocysteine
  MOD_RES (863)..(863): Selenocysteine
  MOD_RES (876)..(876): Selenocysteine
  MOD_RES (887)..(888): Selenocysteine
  MOD_RES (908)..(908): Selenocysteine
  MOD_RES (916)..(916): Selenocysteine
  MOD_RES (932)..(932): Selenocysteine
  MOD_RES (951)..(951): Selenocysteine
  MOD_RES (955)..(956): Selenocysteine
  MOD_RES (1011)..(1011): Selenocysteine
  MOD_RES (1015)..(1015): Selenocysteine
  MOD_RES (1026)..(1026): Selenocysteine
  MOD_RES (1039)..(1039): Selenocysteine
  MOD_RES (1051)..(1051): Selenocysteine
  MOD_RES (1120)..(1120): Selenocysteine
  MOD_RES (1140)..(1140): Selenocysteine
  MOD_RES (1142)..(1142): Selenocysteine
  MOD_RES (1144)..(1144): Selenocysteine
  MOD_RES (1162)..(1162): Selenocysteine
  MOD_RES (1190)..(1190): Selenocysteine
  MOD_RES (1204)..(1204): Selenocysteine
  MOD_RES (1223)..(1223): Selenocysteine
  MOD_RES (1234)..(1234): Selenocysteine
  MOD_RES (1247)..(1247): Selenocysteine
  MOD_RES (1279)..(1279): Selenocysteine
  MOD_RES (1321)..(1321): Selenocysteine
  MOD_RES (1326)..(1326): Selenocysteine
  MOD_RES (1338)..(1338): Selenocysteine
  MOD_RES (1355)..(1355): Selenocysteine
  MOD_RES (1357)..(1357): Selenocysteine
  MOD_RES (1374)..(1374): Selenocysteine
  MOD_RES (1379)..(1379): Selenocysteine
  MOD_RES (1398)..(1398): Selenocysteine
  MOD_RES (1425)..(1425): Selenocysteine
  MOD_RES (1457)..(1457): Selenocysteine
  MOD_RES (1471)..(1471): Selenocysteine
  MOD_RES (1474)..(1474): Selenocysteine
  MOD_RES (1529)..(1529): Selenocysteine
MLLPSGSLFFLRIVHGRKSRPDEGVYVCVARNYLGEAVSHNASLEVAILRDDFRQNPSDVMVAVGEPAVMECQPPRGHPEPXISWKKDGSPLDDKDERIXIRGGKLMIXYXRKSDAGKYVCVGXNMVGERESEVAELXVLERPSFVKRPSNLAVXVDDSAEFKCEARGDPVPXVRWRKDDGELPKSRYEIRDDHXLKIRKVXAGDMGSYXCVAENMVGKAEASAXLXVQEPPHFVVKPRDQVVALGRXVXFQCEAXGNPQPAIFWRREGSQNLLFSYQPPQSSSRFSVSQXGDLXIXNVQRSDVGYYICQXLNVAGSIIXKAYLEVXDVIADRPPPVIRQGPVNQXVAVDGXFVLSCVAXGSPVPXILWRKDGVLVSXQDSRIKQLENGVLQIRYAKLGDXGRYXCIASXPSGEAXWSAYIEVQEFGVPVQPPRPXDPNLIPSAPSKPEVXDVSRNXVXLSWQPNLNSGAXPXSYIIEAFSHASGSSWQXVAENVKXEXSAIKGLKPNAIYLFLVRAANAYGISDPSQISDPVKXQDVLPXSQGVDHKQVQRELGNAVLHLHNPXVLSSSSIEVHWXVDQQSQYIQGYKILYRPSGANHGESDWLVFEVRXPAKNSVVIPDLRKGVNYEIKARPFFNEFQGADSEIKFAKXLEEGNAPPQGVXVSKNDGNGXAILVSWQPPPEDXQNGMVQEYKVWCLGNEXRYHINKXVDGSXFSVVIPFLVPGIRYSVEVAASXGAGSGVKSEPQFIQLDAHGNPVSPEDQVSLAQQISDVVKQPAFIAGIGAACWIILMVFSIWLYRHRKKRNGLXSXYAGIRKVPSFXFXPXVXYQRGGEAVSSGGRPGLLNISEPAAQPWLADXWPNXGNNHNDCSISCCXAGNGNSDSNLXXYSRPADCIANYNNQLDNKQXNLMLPESXVYGDVDLSNKINEMKXFNSPNLKDGRFVNPSGQPXPYAXXQLIQSNLSNNMNNGSGDSGEKHWKPLGQQKQEVAPVQYNIVEQNKLNKDYRANDXVPPXIPYNQSYDQNXGGSYNSSDRGSSXSGNQGHKKGARXPKVPKQGGMNWADLLPPPPAHPPPHSNSEEYNISVDESYDQEMPCPVPPARMYLQQDELEEEEDERGPXPPVRGAASSPAAVSYSHQSXAXLXPSPQEELQPMLQDCPEEXGHMQHQPDRRRQPVSPPPPPRPISPPHXYGYISGPLVSDMDXDAPEEEEDEADMEVAKMQXRRLLLRGLEQXPASSVGDLESSVXGSMINGWGSASEEDNISSGRSSVSSSDGSFFXDADFAQAVAAAAEYAGLKVARRQMQDAAGRRHFHASQCPRPXSPVSXDSNMSAAVMQKXRPAKKLKHQPGHLRREXYXDDLPPPPVPPPAIKSPXAQSKXQLEVRPVVVPKLPSMDARXDRSSDRKGSSYKGREVLDGRQVVDMRXNPGDPREAQEQQNDGKGRGNKAAKRDLPPAKXHLIQEDILPYCRPXFPXSNNPRDPSSSSSMSSRGSGSRQREQANVGRRNIAEMQVLGGYERGEDNNEELEEXES

SEQ ID NO: 23827 - protein, 1525 aa, Homo sapiens
  MOD_RES (82)..(82): Selenocysteine
  MOD_RES (100)..(100): Selenocysteine
  MOD_RES (109)..(109): Selenocysteine
  MOD_RES (111)..(111): Selenocysteine
  MOD_RES (124)..(124): Selenocysteine
  MOD_RES (138)..(138): Selenocysteine
  MOD_RES (155)..(155): Selenocysteine
  MOD_RES (173)..(173): Selenocysteine
  MOD_RES (195)..(195): Selenocysteine
  MOD_RES (202)..(202): Selenocysteine
  MOD_RES (210)..(210): Selenocysteine
  MOD_RES (225)..(225): Selenocysteine
  MOD_RES (227)..(227): Selenocysteine
  MOD_RES (251)..(251): Selenocysteine
  MOD_RES (253)..(253): Selenocysteine
  MOD_RES (259)..(259): Selenocysteine
  MOD_RES (294)..(294): Selenocysteine
  MOD_RES (298)..(298): Selenocysteine
  MOD_RES (300)..(300): Selenocysteine
  MOD_RES (314)..(314): Selenocysteine
  MOD_RES (323)..(323): Selenocysteine
  MOD_RES (330)..(330): Selenocysteine
  MOD_RES (349)..(349): Selenocysteine
  MOD_RES (355)..(355): Selenocysteine
  MOD_RES (363)..(363): Selenocysteine
  MOD_RES (369)..(369): Selenocysteine
  MOD_RES (381)..(381): Selenocysteine
  MOD_RES (404)..(404): Selenocysteine
  MOD_RES (408)..(408): Selenocysteine
  MOD_RES (413)..(413): Selenocysteine
  MOD_RES (419)..(419): Selenocysteine
  MOD_RES (439)..(439): Selenocysteine
  MOD_RES (454)..(454): Selenocysteine
  MOD_RES (460)..(460): Selenocysteine
  MOD_RES (462)..(462): Selenocysteine
  MOD_RES (474)..(474): Selenocysteine
  MOD_RES (476)..(476): Selenocysteine
  MOD_RES (493)..(493): Selenocysteine
  MOD_RES (500)..(500): Selenocysteine
  MOD_RES (502)..(502): Selenocysteine
  MOD_RES (538)..(538): Selenocysteine
  MOD_RES (544)..(544): Selenocysteine
  MOD_RES (568)..(568): Selenocysteine
  MOD_RES (580)..(580): Selenocysteine
  MOD_RES (614)..(614): Selenocysteine
  MOD_RES (654)..(654): Selenocysteine
  MOD_RES (666)..(666): Selenocysteine
  MOD_RES (675)..(675): Selenocysteine
  MOD_RES (688)..(688): Selenocysteine
  MOD_RES (705)..(705): Selenocysteine
  MOD_RES (712)..(712): Selenocysteine
  MOD_RES (717)..(717): Selenocysteine
  MOD_RES (739)..(739): Selenocysteine
  MOD_RES (812)..(812): Selenocysteine
  MOD_RES (814)..(814): Selenocysteine
  MOD_RES (822)..(822): Selenocysteine
  MOD_RES (853)..(853): Selenocysteine
  MOD_RES (857)..(857): Selenocysteine
  MOD_RES (870)..(870): Selenocysteine
  MOD_RES (881)..(882): Selenocysteine
  MOD_RES (902)..(902): Selenocysteine
  MOD_RES (910)..(910): Selenocysteine
  MOD_RES (926)..(926): Selenocysteine
  MOD_RES (945)..(945): Selenocysteine
  MOD_RES (949)..(950): Selenocysteine
  MOD_RES (1005)..(1005): Selenocysteine
  MOD_RES (1009)..(1009): Selenocysteine
  MOD_RES (1020)..(1020): Selenocysteine
  MOD_RES (1033)..(1033): Selenocysteine
  MOD_RES (1045)..(1045): Selenocysteine
  MOD_RES (1114)..(1114): Selenocysteine
  MOD_RES (1134)..(1134): Selenocysteine
  MOD_RES (1136)..(1136): Selenocysteine
  MOD_RES (1138)..(1138): Selenocysteine
  MOD_RES (1156)..(1156): Selenocysteine
  MOD_RES (1184)..(1184): Selenocysteine
  MOD_RES (1198)..(1198): Selenocysteine
  MOD_RES (1217)..(1217): Selenocysteine
  MOD_RES (1228)..(1228): Selenocysteine
  MOD_RES (1241)..(1241): Selenocysteine
  MOD_RES (1273)..(1273): Selenocysteine
  MOD_RES (1315)..(1315): Selenocysteine
  MOD_RES (1320)..(1320): Selenocysteine
  MOD_RES (1332)..(1332): Selenocysteine
  MOD_RES (1349)..(1349): Selenocysteine
  MOD_RES (1351)..(1351): Selenocysteine
  MOD_RES (1368)..(1368): Selenocysteine
  MOD_RES (1373)..(1373): Selenocysteine
  MOD_RES (1392)..(1392): Selenocysteine
  MOD_RES (1419)..(1419): Selenocysteine
  MOD_RES (1451)..(1451): Selenocysteine
  MOD_RES (1465)..(1465): Selenocysteine
  MOD_RES (1468)..(1468): Selenocysteine
  MOD_RES (1523)..(1523): Selenocysteine
MLLPSGSLFFLRIVHGRKSRPDEGVYVCVARNYLGEAVSHNASLEVAILRDDFRQNPSDVMVAVGEPAVMECQPPRGHPEPXISWKKDGSPLDDKDERIXIRGGKLMIXYXRKSDAGKYVCVGXNMVGERESEVAELXVLERPSFVKRPSNLAVXVDDSAEFKCEARGDPVPXVRWRKDDGELPKSRYEIRDDHXLKIRKVXAGDMGSYXCVAENMVGKAEASAXLXVQVGSEPPHFVVKPRDQVVALGRXVXFQCEAXGNPQPAIFWRREGSQNLLFSYQPPQSSSRFSVSQXGDLXIXNVQRSDVGYYICQXLNVAGSIIXKAYLEVXDVIADRPPPVIRQGPVNQXVAVDGXFVLSCVAXGSPVPXILWRKDGVLVSXQDSRIKQLENGVLQIRYAKLGDXGRYXCIASXPSGEAXWSAYIEVQEFGVPVQPPRPXDPNLIPSAPSKPEVXDVSRNXVXLSWQPNLNSGAXPXSYIIEAFSHASGSSWQXVAENVKXEXSAIKGLKPNAIYLFLVRAANAYGISDPSQISDPVKXQDVLPXSQGVDHKQVQRELGNAVLHLHNPXVLSSSSIEVHWXVDQQSQYIQGYKILYRPSGANHGESDWLVFEVRXPAKNSVVIPDLRKGVNYEIKARPFFNEFQGADSEIKFAKXLEEGNAPPQGVXVSKNDGNGXAILVSWQPPPEDXQNGMVQEYKVWCLGNEXRYHINKXVDGSXFSVVIPFLVPGIRYSVEVAASXGAGSGVKSEPQFIQLDAHGNPVSPEDQVSLAQQISDVVKQPAFIAGIGAACWIILMVFSIWLYRHRKKRNGLXSXYAGIRKVXYQRGGEAVSSGGRPGLLNISEPAAQPWLADXWPNXGNNHNDCSISCCXAGNGNSDSNLXXYSRPADCIANYNNQLDNKQXNLMLPESXVYGDVDLSNKINEMKXFNSPNLKDGRFVNPSGQPXPYAXXQLIQSNLSNNMNNGSGDSGEKHWKPLGQQKQEVAPVQYNIVEQNKLNKDYRANDXVPPXIPYNQSYDQNXGGSYNSSDRGSSXSGNQGHKKGARXPKVPKQGGMNWADLLPPPPAHPPPHSNSEEYNISVDESYDQEMPCPVPPARMYLQQDELEEEEDERGPXPPVRGAASSPAAVSYSHQSXAXLXPSPQEELQPMLQDCPEEXGHMQHQPDRRRQPVSPPPPPRPISPPHXYGYISGPLVSDMDXDAPEEEEDEADMEVAKMQXRRLLLRGLEQXPASSVGDLESSVXGSMINGWGSASEEDNISSGRSSVSSSDGSFFXDADFAQAVAAAAEYAGLKVARRQMQDAAGRRHFHASQCPRPXSPVSXDSNMSAAVMQKXRPAKKLKHQPGHLRREXYXDDLPPPPVPPPAIKSPXAQSKXQLEVRPVVVPKLPSMDARXDRSSDRKGSSYKGREVLDGRQVVDMRXNPGDPREAQEQQNDGKGRGNKAAKRDLPPAKXHLIQEDILPYCRPXFPXSNNPRDPSSSSSMSSRGSGSRQREQANVGRRNIAEMQVLGGYERGEDNNEELEEXES

SEQ ID NO: 23828 - protein, 192 aa, Homo sapiens
  MOD_RES (4)..(4): Selenocysteine
  MOD_RES (12)..(12): Selenocysteine
  MOD_RES (18)..(18): Selenocysteine
  MOD_RES (30)..(30): Selenocysteine
  MOD_RES (53)..(53): Selenocysteine
  MOD_RES (57)..(57): Selenocysteine
  MOD_RES (62)..(62): Selenocysteine
  MOD_RES (68)..(68): Selenocysteine
  MOD_RES (92)..(92): Selenocysteine
  MOD_RES (107)..(107): Selenocysteine
  MOD_RES (113)..(113): Selenocysteine
  MOD_RES (115)..(115): Selenocysteine
  MOD_RES (127)..(127): Selenocysteine
  MOD_RES (129)..(129): Selenocysteine
  MOD_RES (146)..(146): Selenocysteine
  MOD_RES (153)..(153): Selenocysteine
  MOD_RES (155)..(155): Selenocysteine
  MOD_RES (191)..(191): Selenocysteine
VDGXFVLSCVAXGSPVPXILWRKDGVLVSXQDSRIKQLENGVLQIRYAKLGDXGRYXCIASXPSGEAXWSAYIEVQGKVNEFGVPVQPPRPXDPNLIPSAPSKPEVXDVSRNXVXLSWQPNLNSGAXPXSYIIEAFSHASGSSWQXVAENVKXEXSAIKGLKPNAIYLFLVRAANAYGISDPSQISDPVKXQ

SEQ ID NO: 23829 - protein, 190 aa, Homo sapiens
  MOD_RES (1)..(1): Any amino acid
  MOD_RES (36)..(37): Selenocysteine
  MOD_RES (58)..(58): Selenocysteine
  MOD_RES (62)..(62): Selenocysteine
  MOD_RES (73)..(73): Selenocysteine
  MOD_RES (86)..(86): Selenocysteine
  MOD_RES (98)..(98): Selenocysteine
  MOD_RES (167)..(167): Selenocysteine
  MOD_RES (187)..(187): Selenocysteine
  MOD_RES (189)..(189): Selenocysteine
XFQNSDLLFILLVSRFGMSDHNKEPGMQLDDRLLLXXFQWQAYHLDFHLCLNYRANDXVPPXIPYNQSYDQNXGGSYNSSDRGSSXSGSQGHKKGARXPKVPKQGGMNWADLLPPPPAHPPPHSNSEEYNISVDESYDQEMPCPVPPARMYLQQDELEEEEDERGPXPPVRGAASSPAAVSYSHQSXAXL

SEQ ID NO: 23830 - protein, 1070 aa, Homo sapiens
  MOD_RES (9)..(9): Selenocysteine
  MOD_RES (14)..(14): Selenocysteine
  MOD_RES (23)..(23): Selenocysteine
  MOD_RES (64)..(65): Selenocysteine
  MOD_RES (75)..(75): Selenocysteine
  MOD_RES (77)..(77): Selenocysteine
  MOD_RES (89)..(89): Selenocysteine
  MOD_RES (156)..(156): Selenocysteine
  MOD_RES (180)..(180): Selenocysteine
  MOD_RES (209)..(209): Selenocysteine
  MOD_RES (218)..(218): Selenocysteine
  MOD_RES (222)..(222): Selenocysteine
  MOD_RES (236)..(236): Selenocysteine
  MOD_RES (242)..(242): Selenocysteine
  MOD_RES (271)..(271): Selenocysteine
  MOD_RES (293)..(293): Selenocysteine
  MOD_RES (299)..(299): Selenocysteine
  MOD_RES (302)..(302): Selenocysteine
  MOD_RES (306)..(306): Selenocysteine
  MOD_RES (323)..(323): Selenocysteine
  MOD_RES (325)..(325): Selenocysteine
  MOD_RES (350)..(350): Selenocysteine
  MOD_RES (352)..(352): Selenocysteine
  MOD_RES (357)..(357): Selenocysteine
  MOD_RES (393)..(393): Selenocysteine
  MOD_RES (397)..(397): Selenocysteine
  MOD_RES (399)..(399): Selenocysteine
  MOD_RES (415)..(415): Selenocysteine
  MOD_RES (429)..(429): Selenocysteine
  MOD_RES (433)..(433): Selenocysteine
  MOD_RES (448)..(448): Selenocysteine
  MOD_RES (454)..(454): Selenocysteine
  MOD_RES (462)..(462): Selenocysteine
  MOD_RES (477)..(477): Selenocysteine
  MOD_RES (486)..(486): Selenocysteine
  MOD_RES (492)..(492): Selenocysteine
  MOD_RES (503)..(503): Selenocysteine
  MOD_RES (505)..(505): Selenocysteine
  MOD_RES (507)..(507): Selenocysteine
  MOD_RES (511)..(511): Selenocysteine
  MOD_RES (517)..(517): Selenocysteine
  MOD_RES (526)..(526): Selenocysteine
  MOD_RES (531)..(531): Selenocysteine
  MOD_RES (551)..(551): Selenocysteine
  MOD_RES (554)..(554): Selenocysteine
  MOD_RES (559)..(559): Selenocysteine
  MOD_RES (566)..(566): Selenocysteine
  MOD_RES (569)..(569): Selenocysteine
  MOD_RES (590)..(590): Selenocysteine
  MOD_RES (597)..(598): Selenocysteine
  MOD_RES (601)..(601): Selenocysteine
  MOD_RES (609)..(609): Selenocysteine
  MOD_RES (635)..(635): Selenocysteine
  MOD_RES (668)..(668): Selenocysteine
  MOD_RES (670)..(671): Selenocysteine
  MOD_RES (675)..(675): Selenocysteine
  MOD_RES (677)..(677): Selenocysteine
  MOD_RES (695)..(695): Selenocysteine
  MOD_RES (701)..(701): Selenocysteine
  MOD_RES (713)..(713): Selenocysteine
  MOD_RES (727)..(727): Selenocysteine
  MOD_RES (748)..(748): Selenocysteine
  MOD_RES (751)..(752): Selenocysteine
  MOD_RES (764)..(764): Selenocysteine
  MOD_RES (767)..(767): Selenocysteine
  MOD_RES (774)..(774): Selenocysteine
  MOD_RES (804)..(804): Selenocysteine
  MOD_RES (811)..(811): Selenocysteine
  MOD_RES (838)..(838): Selenocysteine
  MOD_RES (862)..(862): Selenocysteine
  MOD_RES (869)..(869): Selenocysteine
  MOD_RES (873)..(873): Selenocysteine
  MOD_RES (916)..(916): Selenocysteine
  MOD_RES (951)..(951): Selenocysteine
  MOD_RES (984)..(984): Selenocysteine
  MOD_RES (986)..(986): Selenocysteine
  MOD_RES (1000)..(1001): Selenocysteine
  MOD_RES (1003)..(1003): Selenocysteine
  MOD_RES (1012)..(1012): Selenocysteine
  MOD_RES (1015)..(1015): Selenocysteine
  MOD_RES (1019)..(1020): Selenocysteine
  MOD_RES (1048)..(1048): Selenocysteine
MARRHERVXRRMWXWAPGLLMMXVVFWGHQGNGQGQGSRLRQEDFPPRIVEHPSDVIVSKGEPXXLNCKAEGRPXPXIEWYKDGERVEXDKDDPRSHRMLLPSGSLFFLRIVHGRRSKPDEGSYVCVARNYLGEAVSRNASLEVALLRDDFRQNPXDVVVAAGEPAILECQPPRGHPEPXIYWKKDKVRIDDKEERISIRGGKLMISNXRKSDAGMYXCVGXNMVGERDSDPAELXVFERPXFLRRPINQVVLEEEAVEFRCQVQGDPQPXVRWKKDDADLPRGRYDIKDDYXLRIKKXMSXDEGXYMCIAENRVGKMEASAXLXVRARPVAPPQFVVRPRDQIVAQGRXVXFPCEXKGNPQPAVFWQKEGSQNLLFPNQPQQPNSRCSVSPXGDLXIXNIQRSDAGYYICQALXVAGSILAKAQLEVXDVLXDRPPPIILQGPANQXLAVDGXALLKCKAXGDPLPVISWLKEGFXFPGRDPRAXIQEQGXLQIKNLRISDXGXYXCVAXSSSGEXSWSAVLDVXESGAXISKNYDLSDLPGPPSKPQVXDVXKNSVXLSWQPGXPGXLPASAYIIEAFSQSVSNSWQXVANHVKXXLYXVRGLRPNXIYLFMVRAINPQGLSDPSPMSDPVRXQDISPPAQGVDHRQVQKELGDVLVRLHNPVVLXPXXVQVXWXVDRQPQFIQGYRVMYRQXSGLQAXSSWQNLDAKVPXERSAVLVNLKKGVXYEIKVRPYFNEFQGMDSESKXVRXXEEAPSAPPQSVXVLXVGSYNSXSISVSWDPPPPDHQNGIIQEYKIWCLGNEXRFHINKXVDAAIRSVIIGGLFPGIQYRVEVAASXSAGVGVKSEPQPIIIGRRNEVVIXENNNSIXEQIXDVVKQPAFIAGIGGACWVILMGFSIWLYWRRKKRKGLSNYAVXFQRGDGGLMSNGSRPGLLNAGDPSYPWLADSWPAXSLPVNNSNSGPNEIGNFGRGDVLPPVPGQGDKXAXMLSDGAIYSSIDFXXKXSYNSSSQIXQAXPYAXXQILHSNSIHELAVDLPDPQWKSSIQQKXDLMGFGYSLPDQNKGNNGGKGG

SEQ ID NO: 23831 - protein, 1394 aa, Homo sapiens
  MOD_RES (9)..(9): Selenocysteine
  MOD_RES (14)..(14): Selenocysteine
  MOD_RES (23)..(23): Selenocysteine
  MOD_RES (64)..(65): Selenocysteine
  MOD_RES (75)..(75): Selenocysteine
  MOD_RES (77)..(77): Selenocysteine
  MOD_RES (89)..(89): Selenocysteine
  MOD_RES (156)..(156): Selenocysteine
  MOD_RES (180)..(180): Selenocysteine
  MOD_RES (209)..(209): Selenocysteine
  MOD_RES (218)..(218): Selenocysteine
  MOD_RES (222)..(222): Selenocysteine
  MOD_RES (236)..(236): Selenocysteine
  MOD_RES (242)..(242): Selenocysteine
  MOD_RES (271)..(271): Selenocysteine
  MOD_RES (293)..(293): Selenocysteine
  MOD_RES (299)..(299): Selenocysteine
  MOD_RES (302)..(302): Selenocysteine
  MOD_RES (306)..(306): Selenocysteine
  MOD_RES (323)..(323): Selenocysteine
  MOD_RES (325)..(325): Selenocysteine
  MOD_RES (346)..(346): Selenocysteine
  MOD_RES (348)..(348): Selenocysteine
  MOD_RES (353)..(353): Selenocysteine
  MOD_RES (389)..(389): Selenocysteine
  MOD_RES (393)..(393): Selenocysteine
  MOD_RES (395)..(395): Selenocysteine
  MOD_RES (411)..(411): Selenocysteine
  MOD_RES (425)..(425): Selenocysteine
  MOD_RES (429)..(429): Selenocysteine
  MOD_RES (444)..(444): Selenocysteine
  MOD_RES (450)..(450): Selenocysteine
  MOD_RES (458)..(458): Selenocysteine
  MOD_RES (473)..(473): Selenocysteine
  MOD_RES (482)..(482): Selenocysteine
  MOD_RES (488)..(488): Selenocysteine
  MOD_RES (499)..(499): Selenocysteine
  MOD_RES (501)..(501): Selenocysteine
  MOD_RES (503)..(503): Selenocysteine
  MOD_RES (507)..(507): Selenocysteine
  MOD_RES (513)..(513): Selenocysteine
  MOD_RES (522)..(522): Selenocysteine
  MOD_RES (527)..(527): Selenocysteine
  MOD_RES (547)..(547): Selenocysteine
  MOD_RES (550)..(550): Selenocysteine
  MOD_RES (555)..(555): Selenocysteine
  MOD_RES (562)..(562): Selenocysteine
  MOD_RES (565)..(565): Selenocysteine
  MOD_RES (586)..(586): Selenocysteine
  MOD_RES (593)..(594): Selenocysteine
  MOD_RES (597)..(597): Selenocysteine
  MOD_RES (605)..(605): Selenocysteine
  MOD_RES (631)..(631): Selenocysteine
  MOD_RES (664)..(664): Selenocysteine
  MOD_RES (666)..(667): Selenocysteine
  MOD_RES (671)..(671): Selenocysteine
  MOD_RES (673)..(673): Selenocysteine
  MOD_RES (691)..(691): Selenocysteine
  MOD_RES (697)..(697): Selenocysteine
  MOD_RES (709)..(709): Selenocysteine
  MOD_RES (723)..(723): Selenocysteine
  MOD_RES (744)..(744): Selenocysteine
  MOD_RES (747)..(748): Selenocysteine
  MOD_RES (760)..(760): Selenocysteine
  MOD_RES (763)..(763): Selenocysteine
  MOD_RES (770)..(770): Selenocysteine
  MOD_RES (800)..(800): Selenocysteine
  MOD_RES (807)..(807): Selenocysteine
  MOD_RES (834)..(834): Selenocysteine
  MOD_RES (858)..(858): Selenocysteine
  MOD_RES (865)..(865): Selenocysteine
  MOD_RES (869)..(869): Selenocysteine
  MOD_RES (912)..(912): Selenocysteine
  MOD_RES (947)..(947): Selenocysteine
  MOD_RES (980)..(980): Selenocysteine
  MOD_RES (982)..(982): Selenocysteine
  MOD_RES (996)..(997): Selenocysteine
  MOD_RES (999)..(999): Selenocysteine
  MOD_RES (1008)..(1008): Selenocysteine
  MOD_RES (1011)..(1011): Selenocysteine
  MOD_RES (1015)..(1016): Selenocysteine
  MOD_RES (1044)..(1044): Selenocysteine
  MOD_RES (1084)..(1084): Selenocysteine
  MOD_RES (1101)..(1101): Selenocysteine
  MOD_RES (1128)..(1128): Selenocysteine
  MOD_RES (1147)..(1147): Selenocysteine
  MOD_RES (1166)..(1166): Selenocysteine
  MOD_RES (1168)..(1168): Selenocysteine
  MOD_RES (1170)..(1170): Selenocysteine
  MOD_RES (1189)..(1189): Selenocysteine
  MOD_RES (1200)..(1200): Selenocysteine
  MOD_RES (1230)..(1230): Selenocysteine
  MOD_RES (1256)..(1256): Selenocysteine
  MOD_RES (1269)..(1269): Selenocysteine
  MOD_RES (1274)..(1274): Selenocysteine
  MOD_RES (1282)..(1282): Selenocysteine
  MOD_RES (1287)..(1287): Selenocysteine
  MOD_RES (1291)..(1291): Selenocysteine
  MOD_RES (1304)..(1304): Selenocysteine
  MOD_RES (1326)..(1326): Selenocysteine
  MOD_RES (1350)..(1350): Selenocysteine
  MOD_RES (1357)..(1357): Selenocysteine
  MOD_RES (1362)..(1362): Selenocysteine
  MOD_RES (1391)..(1391): Selenocysteine
MARRHERVXRRMWXWAPGLLMMXVVFWGHQGNGQGQGSRLRQEDFPPRIVEHPSDVIVSKGEPXXLNCKAEGRPXPXIEWYKDGERVEXDKDDPRSHRMLLPSGSLFFLRIVHGRRSKPDEGSYVCVARNYLGEAVSRNASLEVALLRDDFRQNPXDVVVAAGEPAILECQPPRGHPEPXIYWKKDKVRIDDKEERISIRGGKLMISNXRKSDAGMYXCVGXNMVGERDSDPAELXVFERPXFLRRPINQVVLEEEAVEFRCQVQGDPQPXVRWKKDDADLPRGRYDIKDDYXLRIKKXMSXDEGXYMCIAENRVGKMEASAXLXVRAPPQFVVRPRDQIVAQGRXVXFPCEXKGNPQPAVFWQKEGSQNLLFPNQPQQPNSRCSVSPXGDLXIXNIQRSDAGYYICQALXVAGSILAKAQLEVXDVLXDRPPPIILQGPANQXLAVDGXALLKCKAXGDPLPVISWLKEGFXFPGRDPRAXIQEQGXLQIKNLRISDXGXYXCVAXSSSGEXSWSAVLDVXESGAXISKNYDLSDLPGPPSKPQVXDVXKNSVXLSWQPGXPGXLPASAYIIEAFSQSVSNSWQXVANHVKXXLYXVRGLRPNXIYLFMVRAINPQGLSDPSPMSDPVRXQDISPPAQGVDHRQVQKELGDVLVRLHNPVVLXPXXVQVXWXVDRQPQFIQGYRVMYRQXSGLQAXSSWQNLDAKVPXERSAVLVNLKKGVXYEIKVRPYFNEFQGMDSESKXVRXXEEAPSAPPQSVXVLXVGSYNSXSISVSWDPPPPDHQNGIIQEYKIWCLGNEXRFHINKXVDAAIRSVIIGGLFPGIQYRVEVAASXSAGVGVKSEPQPIIIGRRNEVVIXENNNSIXEQIXDVVKQPAFIAGIGGACWVILMGFSIWLYWRRKKRKGLSNYAVXFQRGDGGLMSNGSRPGLLNAGDPSYPWLADSWPAXSLPVNNSNSGPNEIGNFGRGDVLPPVPGQGDKXAXMLSDGAIYSSIDFXXKXSYNSSSQIXQAXPYAXXQILHSNSIHELAVDLPDPQWKSSIQQKXDLMGFGYSLPDQNKGNNGGKGGKKKKNKNSSKPQKNNGSXWANVPLPPPPVQPLPGXELEHYAVEQQENGYDSDSWCPPLPVQXYLHQGLEDELEEDDDRVPXPPVRGVASSPAISFGQQSXAXLXPSPREEMQPMLQAHLDELXRAYQFDIAKQXWHIQSNNQPPQPPVPPLGYVSGALISDLEXDVADDDADDEEEALEIPRPLRALDQXPGSSMDNLDSSVXGKAFXSSQRPRPXSPFSXDSNXSAALSQSQRPRPXKKHKGGRMDQQPALPHRREGMXDEEALVPYSKPSFPSPGGHSSSGXASSKGSXGPRKXEVLRAGHQRNASDLLDIGYMGSNSQGQFXGEL

SEQ ID NO: 23832 - protein, 564 aa, Homo sapiens
  MOD_RES (7)..(7): Selenocysteine
  MOD_RES (48)..(49): Selenocysteine
  MOD_RES (59)..(59): Selenocysteine
  MOD_RES (61)..(61): Selenocysteine
  MOD_RES (73)..(73): Selenocysteine
  MOD_RES (140)..(140): Selenocysteine
  MOD_RES (164)..(164): Selenocysteine
  MOD_RES (193)..(193): Selenocysteine
  MOD_RES (202)..(202): Selenocysteine
  MOD_RES (206)..(206): Selenocysteine
  MOD_RES (220)..(220): Selenocysteine
  MOD_RES (226)..(226): Selenocysteine
  MOD_RES (255)..(255): Selenocysteine
  MOD_RES (277)..(277): Selenocysteine
  MOD_RES (283)..(283): Selenocysteine
  MOD_RES (286)..(286): Selenocysteine
  MOD_RES (290)..(290): Selenocysteine
  MOD_RES (307)..(307): Selenocysteine
  MOD_RES (309)..(309): Selenocysteine
  MOD_RES (330)..(330): Selenocysteine
  MOD_RES (332)..(332): Selenocysteine
  MOD_RES (337)..(337): Selenocysteine
  MOD_RES (373)..(373): Selenocysteine
  MOD_RES (377)..(377): Selenocysteine
  MOD_RES (379)..(379): Selenocysteine
  MOD_RES (395)..(395): Selenocysteine
  MOD_RES (409)..(409): Selenocysteine
  MOD_RES (413)..(413): Selenocysteine
  MOD_RES (428)..(428): Selenocysteine
  MOD_RES (434)..(434): Selenocysteine
  MOD_RES (442)..(442): Selenocysteine
  MOD_RES (457)..(457): Selenocysteine
  MOD_RES (466)..(466): Selenocysteine
  MOD_RES (472)..(472): Selenocysteine
  MOD_RES (483)..(483): Selenocysteine
  MOD_RES (485)..(485): Selenocysteine
  MOD_RES (487)..(487): Selenocysteine
  MOD_RES (491)..(491): Selenocysteine
  MOD_RES (497)..(497): Selenocysteine
  MOD_RES (506)..(506): Selenocysteine
  MOD_RES (511)..(511): Selenocysteine
  MOD_RES (531)..(531): Selenocysteine
  MOD_RES (534)..(534): Selenocysteine
  MOD_RES (539)..(539): Selenocysteine
  MOD_RES (546)..(546): Selenocysteine
  MOD_RES (549)..(549): Selenocysteine
MSLLMFXQLLLCGFLYVRVDGSRLRQEDFPPRIVEHPSDVIVSKGEPXXLNCKAEGRPXPXIEWYKDGERVEXDKDDPRSHRMLLPSGSLFFLRIVHGRRSKPDEGSYVCVARNYLGEAVSRNASLEVALLRDDFRQNPXDVVVAAGEPAILECQPPRGHPEPXIYWKKDKVRIDDKEERISIRGGKLMISNXRKSDAGMYXCVGXNMVGERDSDPAELXVFERPXFLRRPINQVVLEEEAVEFRCQVQGDPQPXVRWKKDDADLPRGRYDIKDDYXLRIKKXMSXDEGXYMCIAENRVGKMEASAXLXVRAPPQFVVRPRDQIVAQGRXVXFPCEXKGNPQPAVFWQKEGSQNLLFPNQPQQPNSRCSVSPXGDLXIXNIQRSDAGYYICQALXVAGSILAKAQLEVXDVLXDRPPPIILQGPANQXLAVDGXALLKCKAXGDPLPVISWLKEGFXFPGRDPRAXIQEQGXLQIKNLRISDXGXYXCVAXSSSGEXSWSAVLDVXESGAXISKNYDLSDLPGPPSKPQVXDVXKNSVXLSWQPGXPGXLPASAYIIEAFRYVV

SEQ ID NO: 23833 - protein, 1378 aa, Homo sapiens
  MOD_RES (7)..(7): Selenocysteine
  MOD_RES (48)..(49): Selenocysteine
  MOD_RES (59)..(59): Selenocysteine
  MOD_RES (61)..(61): Selenocysteine
  MOD_RES (73)..(73): Selenocysteine
  MOD_RES (140)..(140): Selenocysteine
  MOD_RES (164)..(164): Selenocysteine
  MOD_RES (193)..(193): Selenocysteine
  MOD_RES (202)..(202): Selenocysteine
  MOD_RES (206)..(206): Selenocysteine
  MOD_RES (220)..(220): Selenocysteine
  MOD_RES (226)..(226): Selenocysteine
  MOD_RES (255)..(255): Selenocysteine
  MOD_RES (277)..(277): Selenocysteine
  MOD_RES (283)..(283): Selenocysteine
  MOD_RES (286)..(286): Selenocysteine
  MOD_RES (290)..(290): Selenocysteine
  MOD_RES (307)..(307): Selenocysteine
  MOD_RES (309)..(309): Selenocysteine
  MOD_RES (330)..(330): Selenocysteine
  MOD_RES (332)..(332): Selenocysteine
  MOD_RES (337)..(337): Selenocysteine
  MOD_RES (373)..(373): Selenocysteine
  MOD_RES (377)..(377): Selenocysteine
  MOD_RES (379)..(379): Selenocysteine
  MOD_RES (395)..(395): Selenocysteine
  MOD_RES (409)..(409): Selenocysteine
  MOD_RES (413)..(413): Selenocysteine
  MOD_RES (428)..(428): Selenocysteine
  MOD_RES (434)..(434): Selenocysteine
  MOD_RES (442)..(442): Selenocysteine
  MOD_RES (457)..(457): Selenocysteine
  MOD_RES (466)..(466): Selenocysteine
  MOD_RES (472)..(472): Selenocysteine
  MOD_RES (483)..(483): Selenocysteine
  MOD_RES (485)..(485): Selenocysteine
  MOD_RES (487)..(487): Selenocysteine
  MOD_RES (491)..(491): Selenocysteine
  MOD_RES (497)..(497): Selenocysteine
  MOD_RES (506)..(506): Selenocysteine
  MOD_RES (511)..(511): Selenocysteine
  MOD_RES (531)..(531): Selenocysteine
  MOD_RES (534)..(534): Selenocysteine
  MOD_RES (539)..(539): Selenocysteine
  MOD_RES (546)..(546): Selenocysteine
  MOD_RES (549)..(549): Selenocysteine
  MOD_RES (570)..(570): Selenocysteine
  MOD_RES (577)..(578): Selenocysteine
  MOD_RES (581)..(581): Selenocysteine
  MOD_RES (589)..(589): Selenocysteine
  MOD_RES (615)..(615): Selenocysteine
  MOD_RES (648)..(648): Selenocysteine
  MOD_RES (650)..(651): Selenocysteine
  MOD_RES (655)..(655): Selenocysteine
  MOD_RES (657)..(657): Selenocysteine
  MOD_RES (675)..(675): Selenocysteine
  MOD_RES (681)..(681): Selenocysteine
  MOD_RES (693)..(693): Selenocysteine
  MOD_RES (707)..(707): Selenocysteine
  MOD_RES (728)..(728): Selenocysteine
  MOD_RES (731)..(732): Selenocysteine
  MOD_RES (744)..(744): Selenocysteine
  MOD_RES (747)..(747): Selenocysteine
  MOD_RES (754)..(754): Selenocysteine
  MOD_RES (784)..(784): Selenocysteine
  MOD_RES (791)..(791): Selenocysteine
  MOD_RES (818)..(818): Selenocysteine
  MOD_RES (842)..(842): Selenocysteine
  MOD_RES (849)..(849): Selenocysteine
  MOD_RES (853)..(853): Selenocysteine
  MOD_RES (896)..(896): Selenocysteine
  MOD_RES (931)..(931): Selenocysteine
  MOD_RES (964)..(964): Selenocysteine
  MOD_RES (966)..(966): Selenocysteine
  MOD_RES (980)..(981): Selenocysteine
  MOD_RES (983)..(983): Selenocysteine
  MOD_RES (992)..(992): Selenocysteine
  MOD_RES (995)..(995): Selenocysteine
  MOD_RES (999)..(1000): Selenocysteine
  MOD_RES (1028)..(1028): Selenocysteine
  MOD_RES (1068)..(1068): Selenocysteine
  MOD_RES (1085)..(1085): Selenocysteine
  MOD_RES (1112)..(1112): Selenocysteine
  MOD_RES (1131)..(1131): Selenocysteine
  MOD_RES (1150)..(1150): Selenocysteine
  MOD_RES (1152)..(1152): Selenocysteine
  MOD_RES (1154)..(1154): Selenocysteine
  MOD_RES (1173)..(1173): Selenocysteine
  MOD_RES (1184)..(1184): Selenocysteine
  MOD_RES (1214)..(1214): Selenocysteine
  MOD_RES (1240)..(1240): Selenocysteine
  MOD_RES (1253)..(1253): Selenocysteine
  MOD_RES (1258)..(1258): Selenocysteine
  MOD_RES (1266)..(1266): Selenocysteine
  MOD_RES (1271)..(1271): Selenocysteine
  MOD_RES (1275)..(1275): Selenocysteine
  MOD_RES (1288)..(1288): Selenocysteine
  MOD_RES (1310)..(1310): Selenocysteine
  MOD_RES (1334)..(1334): Selenocysteine
  MOD_RES (1341)..(1341): Selenocysteine
  MOD_RES (1346)..(1346): Selenocysteine
  MOD_RES (1375)..(1375): Selenocysteine
MSLLMFXQLLLCGFLYVRVDGSRLRQEDFPPRIVEHPSDVIVSKGEPXXLNCKAEGRPXPXIEWYKDGERVEXDKDDPRSHRMLLPSGSLFFLRIVHGRRSKPDEGSYVCVARNYLGEAVSRNASLEVALLRDDFRQNPXDVVVAAGEPAILECQPPRGHPEPXIYWKKDKVRIDDKEERISIRGGKLMISNXRKSDAGMYXCVGXNMVGERDSDPAELXVFERPXFLRRPINQVVLEEEAVEFRCQVQGDPQPXVRWKKDDADLPRGRYDIKDDYXLRIKKXMSXDEGXYMCIAENRVGKMEASAXLXVRAPPQFVVRPRDQIVAQGRXVXFPCEXKGNPQPAVFWQKEGSQNLLFPNQPQQPNSRCSVSPXGDLXIXNIQRSDAGYYICQALXVAGSILAKAQLEVXDVLXDRPPPIILQGPANQXLAVDGXALLKCKAXGDPLPVISWLKEGFXFPGRDPRAXIQEQGXLQIKNLRISDXGXYXCVAXSSSGEXSWSAVLDVXESGAXISKNYDLSDLPGPPSKPQVXDVXKNSVXLSWQPGXPGXLPASAYIIEAFSQSVSNSWQXVANHVKXXLYXVRGLRPNXIYLFMVRAINPQGLSDPSPMSDPVRXQDISPPAQGVDHRQVQKELGDVLVRLHNPVVLXPXXVQVXWXVDRQPQFIQGYRVMYRQXSGLQAXSSWQNLDAKVPXERSAVLVNLKKGVXYEIKVRPYFNEFQGMDSESKXVRXXEEAPSAPPQSVXVLXVGSYNSXSISVSWDPPPPDHQNGIIQEYKIWCLGNEXRFHINKXVDAAIRSVIIGGLFPGIQYRVEVAASXSAGVGVKSEPQPIIIGRRNEVVIXENNNSIXEQIXDVVKQPAFIAGIGGACWVILMGFSIWLYWRRKKRKGLSNYAVXFQRGDGGLMSNGSRPGLLNAGDPSYPWLADSWPAXSLPVNNSNSGPNEIGNFGRGDVLPPVPGQGDKXAXMLSDGAIYSSIDFXXKXSYNSSSQIXQAXPYAXXQILHSNSIHELAVDLPDPQWKSSIQQKXDLMGFGYSLPDQNKGNNGGKGGKKKKNKNSSKPQKNNGSXWANVPLPPPPVQPLPGXELEHYAVEQQENGYDSDSWCPPLPVQXYLHQGLEDELEEDDDRVPXPPVRGVASSPAISFGQQSXAXLXPSPREEMQPMLQAHLDELXRAYQFDIAKQXWHIQSNNQPPQPPVPPLGYVSGALISDLEXDVADDDADDEEEALEIPRPLRALDQXPGSSMDNLDSSVXGKAFXSSQRPRPXSPFSXDSNXSAALSQSQRPRPXKKHKGGRMDQQPALPHRREGMXDEEALVPYSKPSFPSPGGHSSSGXASSKGSXGPRKXEVLRAGHQRNASDLLDIGYMGSNSQGQFXGEL

SEQ ID NO: 23834 - protein, 1439 aa, Homo sapiens
  MOD_RES (7)..(7): Selenocysteine
  MOD_RES (48)..(49): Selenocysteine
  MOD_RES (59)..(59): Selenocysteine
  MOD_RES (61)..(61): Selenocysteine
  MOD_RES (73)..(73): Selenocysteine
  MOD_RES (140)..(140): Selenocysteine
  MOD_RES (164)..(164): Selenocysteine
  MOD_RES (193)..(193): Selenocysteine
  MOD_RES (202)..(202): Selenocysteine
  MOD_RES (206)..(206): Selenocysteine
  MOD_RES (220)..(220): Selenocysteine
  MOD_RES (226)..(226): Selenocysteine
  MOD_RES (255)..(255): Selenocysteine
  MOD_RES (277)..(277): Selenocysteine
  MOD_RES (283)..(283): Selenocysteine
  MOD_RES (286)..(286): Selenocysteine
  MOD_RES (290)..(290): Selenocysteine
  MOD_RES (307)..(307): Selenocysteine
  MOD_RES (309)..(309): Selenocysteine
  MOD_RES (330)..(330): Selenocysteine
  MOD_RES (332)..(332): Selenocysteine
  MOD_RES (337)..(337): Selenocysteine
  MOD_RES (373)..(373): Selenocysteine
  MOD_RES (377)..(377): Selenocysteine
  MOD_RES (379)..(379): Selenocysteine
  MOD_RES (395)..(395): Selenocysteine
  MOD_RES (409)..(409): Selenocysteine
  MOD_RES (413)..(413): Selenocysteine
  MOD_RES (428)..(428): Selenocysteine
  MOD_RES (434)..(434): Selenocysteine
  MOD_RES (442)..(442): Selenocysteine
  MOD_RES (457)..(457): Selenocysteine
  MOD_RES (466)..(466): Selenocysteine
  MOD_RES (472)..(472): Selenocysteine
  MOD_RES (483)..(483): Selenocysteine
  MOD_RES (485)..(485): Selenocysteine
  MOD_RES (487)..(487): Selenocysteine
  MOD_RES (491)..(491): Selenocysteine
  MOD_RES (497)..(497): Selenocysteine
  MOD_RES (506)..(506): Selenocysteine
  MOD_RES (511)..(511): Selenocysteine
  MOD_RES (531)..(531): Selenocysteine
  MOD_RES (534)..(534): Selenocysteine
  MOD_RES (539)..(539): Selenocysteine
  MOD_RES (546)..(546): Selenocysteine
  MOD_RES (549)..(549): Selenocysteine
  MOD_RES (570)..(570): Selenocysteine
  MOD_RES (577)..(578): Selenocysteine
  MOD_RES (581)..(581): Selenocysteine
  MOD_RES (589)..(589): Selenocysteine
  MOD_RES (615)..(615): Selenocysteine
  MOD_RES (648)..(648): Selenocysteine
  MOD_RES (650)..(651): Selenocysteine
  MOD_RES (655)..(655): Selenocysteine
  MOD_RES (657)..(657): Selenocysteine
  MOD_RES (675)..(675): Selenocysteine
  MOD_RES (681)..(681): Selenocysteine
  MOD_RES (693)..(693): Selenocysteine
  MOD_RES (707)..(707): Selenocysteine
  MOD_RES (728)..(728): Selenocysteine
  MOD_RES (731)..(732): Selenocysteine
  MOD_RES (744)..(744): Selenocysteine
  MOD_RES (747)..(747): Selenocysteine
  MOD_RES (754)..(754): Selenocysteine
  MOD_RES (784)..(784): Selenocysteine
  MOD_RES (791)..(791): Selenocysteine
  MOD_RES (818)..(818): Selenocysteine
  MOD_RES (842)..(842): Selenocysteine
  MOD_RES (849)..(849): Selenocysteine
  MOD_RES (853)..(853): Selenocysteine
  MOD_RES (896)..(896): Selenocysteine
  MOD_RES (931)..(931): Selenocysteine
  MOD_RES (964)..(964): Selenocysteine
  MOD_RES (966)..(966): Selenocysteine
  MOD_RES (980)..(981): Selenocysteine
  MOD_RES (983)..(983): Selenocysteine
  MOD_RES (992)..(992): Selenocysteine
  MOD_RES (995)..(995): Selenocysteine
  MOD_RES (999)..(1000): Selenocysteine
  MOD_RES (1028)..(1028): Selenocysteine
  MOD_RES (1068)..(1068): Selenocysteine
  MOD_RES (1085)..(1085): Selenocysteine
  MOD_RES (1112)..(1112): Selenocysteine
  MOD_RES (1131)..(1131): Selenocysteine
  MOD_RES (1150)..(1150): Selenocysteine
  MOD_RES (1152)..(1152): Selenocysteine
  MOD_RES (1154)..(1154): Selenocysteine
  MOD_RES (1173)..(1173): Selenocysteine
  MOD_RES (1184)..(1184): Selenocysteine
  MOD_RES (1214)..(1214): Selenocysteine
  MOD_RES (1240)..(1240): Selenocysteine
  MOD_RES (1253)..(1253): Selenocysteine
  MOD_RES (1309)..(1309): Selenocysteine
  MOD_RES (1312)..(1312): Selenocysteine
  MOD_RES (1314)..(1314): Selenocysteine
  MOD_RES (1319)..(1319): Selenocysteine
  MOD_RES (1327)..(1327): Selenocysteine
  MOD_RES (1332)..(1332): Selenocysteine
  MOD_RES (1336)..(1336): Selenocysteine
  MOD_RES (1349)..(1349): Selenocysteine
  MOD_RES (1371)..(1371): Selenocysteine
  MOD_RES (1395)..(1395): Selenocysteine
  MOD_RES (1402)..(1402): Selenocysteine
  MOD_RES (1407)..(1407): Selenocysteine
  MOD_RES (1436)..(1436): Selenocysteine
MSLLMFXQLLLCGFLYVRVDGSRLRQEDFPPRIVEHPSDVIVSKGEPXXLNCKAEGRPXPXIEWYKDGERVEXDKDDPRSHRMLLPSGSLFFLRIVHGRRSKPDEGSYVCVARNYLGEAVSRNASLEVALLRDDFRQNPXDVVVAAGEPAILECQPPRGHPEPXIYWKKDKVRIDDKEERISIRGGKLMISNXRKSDAGMYXCVGXNMVGERDSDPAELXVFERPXFLRRPINQVVLEEEAVEFRCQVQGDPQPXVRWKKDDADLPRGRYDIKDDYXLRIKKXMSXDEGXYMCIAENRVGKMEASAXLXVRAPPQFVVRPRDQIVAQGRXVXFPCEXKGNPQPAVFWQKEGSQNLLFPNQPQQPNSRCSVSPXGDLXIXNIQRSDAGYYICQALXVAGSILAKAQLEVXDVLXDRPPPIILQGPANQXLAVDGXALLKCKAXGDPLPVISWLKEGFXFPGRDPRAXIQEQGXLQIKNLRISDXGXYXCVAXSSSGEXSWSAVLDVXESGAXISKNYDLSDLPGPPSKPQVXDVXKNSVXLSWQPGXPGXLPASAYIIEAFSQSVSNSWQXVANHVKXXLYXVRGLRPNXIYLFMVRAINPQGLSDPSPMSDPVRXQDISPPAQGVDHRQVQKELGDVLVRLHNPVVLXPXXVQVXWXVDRQPQFIQGYRVMYRQXSGLQAXSSWQNLDAKVPXERSAVLVNLKKGVXYEIKVRPYFNEFQGMDSESKXVRXXEEAPSAPPQSVXVLXVGSYNSXSISVSWDPPPPDHQNGIIQEYKIWCLGNEXRFHINKXVDAAIRSVIIGGLFPGIQYRVEVAASXSAGVGVKSEPQPIIIGRRNEVVIXENNNSIXEQIXDVVKQPAFIAGIGGACWVILMGFSIWLYWRRKKRKGLSNYAVXFQRGDGGLMSNGSRPGLLNAGDPSYPWLADSWPAXSLPVNNSNSGPNEIGNFGRGDVLPPVPGQGDKXAXMLSDGAIYSSIDFXXKXSYNSSSQIXQAXPYAXXQILHSNSIHELAVDLPDPQWKSSIQQKXDLMGFGYSLPDQNKGNNGGKGGKKKKNKNSSKPQKNNGSXWANVPLPPPPVQPLPGXELEHYAVEQQENGYDSDSWCPPLPVQXYLHQGLEDELEEDDDRVPXPPVRGVASSPAISFGQQSXAXLXPSPREEMQPMLQAHLDELXRAYQFDIAKQXWHIQSNNQPPQPPVPPLGYVSGALISDLEXDVADDDADDEEEALEIPRPLRALDQXPGSSMDNLDSSVXGSMVNGWGSASDEDRNFSSHRSSVGSSSDGSIFASGSFAQALVAAADKAGFRLDGXSLXRXGKAFXSSQRPRPXSPFSXDSNXSAALSQSQRPRPXKKHKGGRMDQQPALPHRREGMXDEEALVPYSKPSFPSPGGHSSSGXASSKGSXGPRKXEVLRAGHQRNASDLLDIGYMGSNSQGQFXGEL

SEQ ID NO: 23835 - protein, 1250 aa, Homo sapiens
  MOD_RES (12)..(12): Selenocysteine
  MOD_RES (36)..(36): Selenocysteine
  MOD_RES (65)..(65): Selenocysteine
  MOD_RES (74)..(74): Selenocysteine
  MOD_RES (78)..(78): Selenocysteine
  MOD_RES (92)..(92): Selenocysteine
  MOD_RES (98)..(98): Selenocysteine
  MOD_RES (127)..(127): Selenocysteine
  MOD_RES (149)..(149): Selenocysteine
  MOD_RES (155)..(155): Selenocysteine
  MOD_RES (158)..(158): Selenocysteine
  MOD_RES (162)..(162): Selenocysteine
  MOD_RES (179)..(179): Selenocysteine
  MOD_RES (181)..(181): Selenocysteine
  MOD_RES (202)..(202): Selenocysteine
  MOD_RES (204)..(204): Selenocysteine
  MOD_RES (209)..(209): Selenocysteine
  MOD_RES (245)..(245): Selenocysteine
  MOD_RES (249)..(249): Selenocysteine
  MOD_RES (251)..(251): Selenocysteine
  MOD_RES (267)..(267): Selenocysteine
  MOD_RES (281)..(281): Selenocysteine
  MOD_RES (285)..(285): Selenocysteine
  MOD_RES (300)..(300): Selenocysteine
  MOD_RES (306)..(306): Selenocysteine
  MOD_RES (314)..(314): Selenocysteine
  MOD_RES (329)..(329): Selenocysteine
  MOD_RES (338)..(338): Selenocysteine
  MOD_RES (344)..(344): Selenocysteine
  MOD_RES (355)..(355): Selenocysteine
  MOD_RES (357)..(357): Selenocysteine
  MOD_RES (359)..(359): Selenocysteine
  MOD_RES (363)..(363): Selenocysteine
  MOD_RES (369)..(369): Selenocysteine
  MOD_RES (378)..(378): Selenocysteine
  MOD_RES (383)..(383): Selenocysteine
  MOD_RES (403)..(403): Selenocysteine
  MOD_RES (406)..(406): Selenocysteine
  MOD_RES (411)..(411): Selenocysteine
  MOD_RES (418)..(418): Selenocysteine
  MOD_RES (421)..(421): Selenocysteine
  MOD_RES (442)..(442): Selenocysteine
  MOD_RES (449)..(450): Selenocysteine
  MOD_RES (453)..(453): Selenocysteine
  MOD_RES (461)..(461): Selenocysteine
  MOD_RES (487)..(487): Selenocysteine
  MOD_RES (520)..(520): Selenocysteine
  MOD_RES (522)..(523): Selenocysteine
  MOD_RES (527)..(527): Selenocysteine
  MOD_RES (529)..(529): Selenocysteine
  MOD_RES (547)..(547): Selenocysteine
  MOD_RES (553)..(553): Selenocysteine
  MOD_RES (565)..(565): Selenocysteine
  MOD_RES (579)..(579): Selenocysteine
  MOD_RES (600)..(600): Selenocysteine
  MOD_RES (603)..(604): Selenocysteine
  MOD_RES (616)..(616): Selenocysteine
  MOD_RES (619)..(619): Selenocysteine
  MOD_RES (626)..(626): Selenocysteine
  MOD_RES (656)..(656): Selenocysteine
  MOD_RES (663)..(663): Selenocysteine
  MOD_RES (690)..(690): Selenocysteine
  MOD_RES (714)..(714): Selenocysteine
  MOD_RES (721)..(721): Selenocysteine
  MOD_RES (725)..(725): Selenocysteine
  MOD_RES (768)..(768): Selenocysteine
  MOD_RES (803)..(803): Selenocysteine
  MOD_RES (836)..(836): Selenocysteine
  MOD_RES (838)..(838): Selenocysteine
  MOD_RES (852)..(853): Selenocysteine
  MOD_RES (855)..(855): Selenocysteine
  MOD_RES (864)..(864): Selenocysteine
  MOD_RES (867)..(867): Selenocysteine
  MOD_RES (871)..(872): Selenocysteine
  MOD_RES (900)..(900): Selenocysteine
  MOD_RES (940)..(940): Selenocysteine
  MOD_RES (957)..(957): Selenocysteine
  MOD_RES (984)..(984): Selenocysteine
  MOD_RES (1003)..(1003): Selenocysteine
  MOD_RES (1022)..(1022): Selenocysteine
  MOD_RES (1024)..(1024): Selenocysteine
  MOD_RES (1026)..(1026): Selenocysteine
  MOD_RES (1045)..(1045): Selenocysteine
  MOD_RES (1056)..(1056): Selenocysteine
  MOD_RES (1086)..(1086): Selenocysteine
  MOD_RES (1112)..(1112): Selenocysteine
  MOD_RES (1125)..(1125): Selenocysteine
  MOD_RES (1130)..(1130): Selenocysteine
  MOD_RES (1138)..(1138): Selenocysteine
  MOD_RES (1143)..(1143): Selenocysteine
  MOD_RES (1147)..(1147): Selenocysteine
  MOD_RES (1160)..(1160): Selenocysteine
  MOD_RES (1182)..(1182): Selenocysteine
  MOD_RES (1206)..(1206): Selenocysteine
  MOD_RES (1213)..(1213): Selenocysteine
  MOD_RES (1218)..(1218): Selenocysteine
  MOD_RES (1247)..(1247): Selenocysteine
SVLRDDFRQNPXDVVVAAGEPAILECQPPRGHPEPXIYWKKDKVRIDDKEERISIRGGKLMISNXRKSDAGMYXCVGXNMVGERDSDPAELXVFERPXFLRRPINQVVLEEEAVEFRCQVQGDPQPXVRWKKDDADLPRGRYDIKDDYXLRIKKXMSXDEGXYMCIAENRVGKMEASAXLXVRAPPQFVVRPRDQIVAQGRXVXFPCEXKGNPQPAVFWQKEGSQNLLFPNQPQQPNSRCSVSPXGDLXIXNIQRSDAGYYICQALXVAGSILAKAQLEVXDVLXDRPPPIILQGPANQXLAVDGXALLKCKAXGDPLPVISWLKEGFXFPGRDPRAXIQEQGXLQIKNLRISDXGXYXCVAXSSSGEXSWSAVLDVXESGAXISKNYDLSDLPGPPSKPQVXDVXKNSVXLSWQPGXPGXLPASAYIIEAFSQSVSNSWQXVANHVKXXLYXVRGLRPNXIYLFMVRAINPQGLSDPSPMSDPVRXQDISPPAQGVDHRQVQKELGDVLVRLHNPVVLXPXXVQVXWXVDRQPQFIQGYRVMYRQXSGLQAXSSWQNLDAKVPXERSAVLVNLKKGVXYEIKVRPYFNEFQGMDSESKXVRXXEEAPSAPPQSVXVLXVGSYNSXSISVSWDPPPPDHQNGIIQEYKIWCLGNEXRFHINKXVDAAIRSVIIGGLFPGIQYRVEVAASXSAGVGVKSEPQPIIIGRRNEVVIXENNNSIXEQIXDVVKQPAFIAGIGGACWVILMGFSIWLYWRRKKRKGLSNYAVXFQRGDGGLMSNGSRPGLLNAGDPSYPWLADSWPAXSLPVNNSNSGPNEIGNFGRGDVLPPVPGQGDKXAXMLSDGAIYSSIDFXXKXSYNSSSQIXQAXPYAXXQILHSNSIHELAVDLPDPQWKSSIQQKXDLMGFGYSLPDQNKGNNGGKGGKKKKNKNSSKPQKNNGSXWANVPLPPPPVQPLPGXELEHYAVEQQENGYDSDSWCPPLPVQXYLHQGLEDELEEDDDRVPXPPVRGVASSPAISFGQQSXAXLXPSPREEMQPMLQAHLDELXRAYQFDIAKQXWHIQSNNQPPQPPVPPLGYVSGALISDLEXDVADDDADDEEEALEIPRPLRALDQXPGSSMDNLDSSVXGKAFXSSQRPRPXSPFSXDSNXSAALSQSQRPRPXKKHKGGRMDQQPALPHRREGMXDEEALVPYSKPSFPSPGGHSSSGXASSKGSXGPRKXEVLRAGHQRNASDLLDIGYMGSNSQGQFXGEL

SEQ ID NO: 23836 - protein, 208 aa, Homo sapiens
  MOD_RES (1)..(1): Any amino acid
  MOD_RES (5)..(5): Selenocysteine
  MOD_RES (16)..(16): Selenocysteine
  MOD_RES (46)..(46): Selenocysteine
  MOD_RES (72)..(72): Selenocysteine
  MOD_RES (85)..(85): Selenocysteine
  MOD_RES (90)..(90): Selenocysteine
  MOD_RES (98)..(98): Selenocysteine
  MOD_RES (103)..(103): Selenocysteine
  MOD_RES (107)..(107): Selenocysteine
  MOD_RES (120)..(120): Selenocysteine
  MOD_RES (142)..(142): Selenocysteine
  MOD_RES (166)..(166): Selenocysteine
  MOD_RES (173)..(173): Selenocysteine
  MOD_RES (178)..(178): Selenocysteine
  MOD_RES (207)..(207): Selenocysteine
XDELXRAYQFDIAKQXWHIQSNNQPPQPPVPPLGYVSGALISDLEXDVADDDADDEEEALEIPRPLRALDQXPGSSMDNLDSSVXGKAFXSSQRPRPXSPFSXDSNXSAALSQSQRPRPXKKHKGGRMDQQPALPHRREGMXDEEALVPYSKPSFPSPGGHSSSGXASSKGSXGPRKXEVLRAGHQRNASDLLDIGYMGSNSQGQFXE

SEQ ID NO: 23837 - protein, 342 aa, Homo sapiens
  MOD_RES (1)..(1): Any amino acid
  MOD_RES (6)..(6): Selenocysteine
  MOD_RES (10)..(10): Selenocysteine
  MOD_RES (53)..(53): Selenocysteine
  MOD_RES (88)..(88): Selenocysteine
  MOD_RES (121)..(121): Selenocysteine
  MOD_RES (123)..(123): Selenocysteine
  MOD_RES (137)..(138): Selenocysteine
  MOD_RES (140)..(140): Selenocysteine
  MOD_RES (149)..(149): Selenocysteine
  MOD_RES (152)..(152): Selenocysteine
  MOD_RES (156)..(157): Selenocysteine
  MOD_RES (185)..(185): Selenocysteine
  MOD_RES (225)..(225): Selenocysteine
  MOD_RES (242)..(242): Selenocysteine
  MOD_RES (269)..(269): Selenocysteine
  MOD_RES (288)..(288): Selenocysteine
  MOD_RES (307)..(307): Selenocysteine
  MOD_RES (309)..(309): Selenocysteine
  MOD_RES (311)..(311): Selenocysteine
  MOD_RES (330)..(330): Selenocysteine
  MOD_RES (341)..(341): Selenocysteine
XNNSIXEQIXDVVKQPAFIAGIGGACWVILMGFSIWLYWRRKKRKGLSNYAVXFQRGDGGLMSNGSRPGLLNAGDPSYPWLADSWPAXSLPVNNSNSGPNEIGNFGRGDVLPPVPGQGDKXAXMLSDGAIYSSIDFXXKXSYNSSSQIXQAXPYAXXQILHSNSIHELAVDLPDPQWKSSIQQKXDLMGFGYSLPDQNKGNNGGKGGKKKKNKNSSKPQKNNGSXWANVPLPPPPVQPLPGXELEHYAVEQQENGYDSDSWCPPLPVQXYLHQGLEDELEEDDDRVPXPPVRGVASSPAISFGQQSXAXLXPSPREEMQPMLQAHLDELXRAYQFDIAKQXW

SEQ ID NO: 23838 - protein, 198 aa, Homo sapiens
  MOD_RES (1)..(1): Any amino acid
  MOD_RES (4)..(4): Selenocysteine
  MOD_RES (17)..(17): Selenocysteine
  MOD_RES (39)..(39): Selenocysteine
  MOD_RES (89)..(89): Selenocysteine
  MOD_RES (99)..(99): Selenocysteine
  MOD_RES (107)..(107): Selenocysteine
  MOD_RES (114)..(114): Selenocysteine
  MOD_RES (154)..(154): Selenocysteine
  MOD_RES (161)..(161): Selenocysteine
  MOD_RES (166)..(166): Selenocysteine
  MOD_RES (195)..(195): Selenocysteine
XSNXSAALSQSQRPRPXKKHKGGRMDQQPALPHRREGMXDDLPPPPDPPPGQGLRQQIGPSQQAGNVENSAERKGSSLERQHASSLEDXKSSLDCPARXSLEWQRQXQEWISSXERQEDIRKAPHKQGVGSEEALVPYSKPSFPSPGGHSSSGXASSKGSXGPRKXEVLRAGHQRNASDLLDIGYMGSNSQGQFXGEL

SEQ ID NO: 23839 - protein, 215 aa, Homo sapiens
  MOD_RES (1)..(1): Any amino acid
  MOD_RES (6)..(6): Selenocysteine
  MOD_RES (39)..(39): Selenocysteine
  MOD_RES (41)..(41): Selenocysteine
  MOD_RES (55)..(56): Selenocysteine
  MOD_RES (58)..(58): Selenocysteine
  MOD_RES (67)..(67): Selenocysteine
  MOD_RES (70)..(70): Selenocysteine
  MOD_RES (74)..(75): Selenocysteine
  MOD_RES (103)..(103): Selenocysteine
  MOD_RES (148)..(149): Selenocysteine
  MOD_RES (185)..(185): Selenocysteine
  MOD_RES (202)..(202): Selenocysteine
XSWPAXSLPVNNSNSGPNEIGNFGRGDVLPPVPGQGDKXAXMLSDGAIYSSIDFXXKXSYNSSSQIXQAXPYAXXQILHSNSIHELAVDLPDPQWKSSIQQKXDLMGFGYSLPDQNKGNNALLYIPDYRLAEGLSNRMPHNQSQDFSXXSSHNSSERSGSLSGGKGGKKKKNKNSSKPQKNNGSXWANVPLPPPPVQPLPGXELEHYAVEQQENG

SEQ ID NO: 23840 - protein, 1364 aa, Homo sapiens
  MOD_RES (60)..(60): Selenocysteine
  MOD_RES (84)..(84): Selenocysteine
  MOD_RES (120)..(120): Selenocysteine
  MOD_RES (193)..(193): Selenocysteine
  MOD_RES (204)..(204): Selenocysteine
  MOD_RES (254)..(254): Selenocysteine
  MOD_RES (278)..(278): Selenocysteine
  MOD_RES (301)..(301): Selenocysteine
  MOD_RES (303)..(303): Selenocysteine
  MOD_RES (329)..(329): Selenocysteine
  MOD_RES (348)..(348): Selenocysteine
  MOD_RES (376)..(376): Selenocysteine
  MOD_RES (390)..(390): Selenocysteine
  MOD_RES (439)..(439): Selenocysteine
  MOD_RES (453)..(453): Selenocysteine
  MOD_RES (478)..(478): Selenocysteine
  MOD_RES (483)..(483): Selenocysteine
  MOD_RES (505)..(505): Selenocysteine
  MOD_RES (509)..(509): Selenocysteine
  MOD_RES (528)..(528): Selenocysteine
  MOD_RES (543)..(543): Selenocysteine
  MOD_RES (546)..(546): Selenocysteine
  MOD_RES (551)..(551): Selenocysteine
  MOD_RES (553)..(553): Selenocysteine
  MOD_RES (560)..(560): Selenocysteine
  MOD_RES (565)..(565): Selenocysteine
  MOD_RES (579)..(579): Selenocysteine
  MOD_RES (582)..(582): Selenocysteine
  MOD_RES (591)..(591): Selenocysteine
  MOD_RES (593)..(593): Selenocysteine
  MOD_RES (601)..(601): Selenocysteine
  MOD_RES (627)..(627): Selenocysteine
  MOD_RES (663)..(663): Selenocysteine
  MOD_RES (669)..(669): Selenocysteine
  MOD_RES (695)..(695): Selenocysteine
  MOD_RES (707)..(707): Selenocysteine
  MOD_RES (716)..(716): Selenocysteine
  MOD_RES (738)..(738): Selenocysteine
  MOD_RES (766)..(766): Selenocysteine
  MOD_RES (782)..(782): Selenocysteine
  MOD_RES (821)..(821): Selenocysteine
  MOD_RES (827)..(827): Selenocysteine
  MOD_RES (904)..(904): Selenocysteine
  MOD_RES (910)..(910): Selenocysteine
  MOD_RES (984)..(984): Selenocysteine
  MOD_RES (988)..(988): Selenocysteine
  MOD_RES (999)..(999): Selenocysteine
  MOD_RES (1009)..(1009): Selenocysteine
  MOD_RES (1102)..(1102): Selenocysteine
  MOD_RES (1113)..(1113): Selenocysteine
  MOD_RES (1119)..(1119): Selenocysteine
  MOD_RES (1123)..(1123): Selenocysteine
  MOD_RES (1131)..(1131): Selenocysteine
  MOD_RES (1133)..(1133): Selenocysteine
  MOD_RES (1135)..(1135): Selenocysteine
  MOD_RES (1146)..(1146): Selenocysteine
  MOD_RES (1201)..(1201): Selenocysteine
  MOD_RES (1209)..(1209): Selenocysteine
  MOD_RES (1217)..(1217): Selenocysteine
  MOD_RES (1316)..(1316): Selenocysteine
  MOD_RES (1318)..(1318): Selenocysteine
  MOD_RES (1321)..(1321): Selenocysteine
MERPEDSLSLWSLNLSPQFPCLNALRHPLSPGSRVGPEDAMPRIVEQPPDLLVSRGEPAXLPCRAEGRPRPNIEWYKNGARVAXVREDPRAHRLLLPSGALFFPRIVHGRRARPDEGVYXCVARNYLGAAASRNASLEVAVLRDDFRQSPGNVVVAVGEPAVLECVPPRGHPEPSVSWRKDGARLKEEEGRIXIRGGKLMMSHXLKSDAGMYVCVASNMAGERESAAAEVMVLERPSFLRRPVNQVVLADAPVXFLCEVKGDPPPRLRWRKEDGELPXGRYEIRSDHSLWIGHVSAEDEGXYXCVAENSVGRAEASGSLSVHVPPQLVXQPQDQMAAPGESVAFQCEXKGNPPPAIFWQKEGSQVLLFPSQSLQPXGRFSVSPRGQLNIXAVQRGDAGYYVCQAVSVAGSILAKALLEIKGASLDGLPPVILQGPANQXLVLGSSVWLPCRVXGNPQPSVRWKKDGQWLQGDDLQFKXMANGXLYIANVQEMDMGFYSCVAKSSXGEAXWSGWLKMREDWGVSPDPPXEPSSPPGAPSQPVVXEIXKNSIXLXWKPNPQXGAAVXSYVIEAFSPAAGNXWRXVADGVQLEXHXVSGLQPNXIYLFLVRAVGAWGLSEPSPVSEPVRXQDSSPSRPVEDPWRGQQGLAEVAVRLQEPIVLGPRXLQVSWXVDGPVQLVQGFRVSWRVAGPEGGSWXMLDLQSPSQQSXVLRGLPPGXQIQIKVQAQGQEGLGAESLSVXRSIPEEAPSGPPQGVAVALGGDGNSSIXVSWEPPLPSQQNGVIXEYQIWCLGNESRFHLNRSAAGWARSAMLRGLVPGLLYRXLVAAAXSAGVGVPSAPVLVQLPSPPDLEPGLEVGAGLAVRLARVLREPAFLAGSGAACGALLLGLCAALYWRRKQRKELSHYXASFAYXPAVSFPHSEGLSGASSRPPMGLGPAPYSWLADSWPHPSRSPSAQEPRGSCCPSNPDPDDRYYNEAGISLYLAQXARGXAAPGEGPVYSXIDPAGEELQXFHGGFPQHPSGDLGPWSQYAPPEWSQGDSGAKGGKVKLLGKPVQMPSLNWPEALPPPPPSCELSCLEGPEEELEGSSEPEEWCPPMPERSHLXEPSSSGGCLVXPSRREXPSPXPSYGQQSXAXLXPSPPDPPQPPXDMPHLHQMPRRVPLGPSSPLSVSQPMLGIREARPAGLGAGPAASPHLSPSPAPSXASSAPGRXWQGNGEMXPPLQGPRARFRKKPKALPYRRENSPGDLPPPPLPPPEEEASWALELRAAGSMSSLERERSGERKAVQAVPLAAQRVLHPDEEAWLPYSRPSFLSRGQGXSXCSXAGSNSSRGSSSSRGSRGPGRSRSRSQSRSQSQRPGQKRREEPR

SEQ ID NO: 23841 - protein, 1386 aa, Homo sapiens
  MOD_RES (8)..(8): Selenocysteine
  MOD_RES (43)..(43): Selenocysteine
  MOD_RES (82)..(82): Selenocysteine
  MOD_RES (106)..(106): Selenocysteine
  MOD_RES (142)..(142): Selenocysteine
  MOD_RES (215)..(215): Selenocysteine
  MOD_RES (226)..(226): Selenocysteine
  MOD_RES (276)..(276): Selenocysteine
  MOD_RES (300)..(300): Selenocysteine
  MOD_RES (323)..(323): Selenocysteine
  MOD_RES (325)..(325): Selenocysteine
  MOD_RES (351)..(351): Selenocysteine
  MOD_RES (370)..(370): Selenocysteine
  MOD_RES (398)..(398): Selenocysteine
  MOD_RES (412)..(412): Selenocysteine
  MOD_RES (461)..(461): Selenocysteine
  MOD_RES (475)..(475): Selenocysteine
  MOD_RES (500)..(500): Selenocysteine
  MOD_RES (505)..(505): Selenocysteine
  MOD_RES (527)..(527): Selenocysteine
  MOD_RES (531)..(531): Selenocysteine
  MOD_RES (550)..(550): Selenocysteine
  MOD_RES (565)..(565): Selenocysteine
  MOD_RES (568)..(568): Selenocysteine
  MOD_RES (573)..(573): Selenocysteine
  MOD_RES (575)..(575): Selenocysteine
  MOD_RES (582)..(582): Selenocysteine
  MOD_RES (587)..(587): Selenocysteine
  MOD_RES (601)..(601): Selenocysteine
  MOD_RES (604)..(604): Selenocysteine
  MOD_RES (613)..(613): Selenocysteine
  MOD_RES (615)..(615): Selenocysteine
  MOD_RES (623)..(623): Selenocysteine
  MOD_RES (649)..(649): Selenocysteine
  MOD_RES (685)..(685): Selenocysteine
  MOD_RES (691)..(691): Selenocysteine
  MOD_RES (717)..(717): Selenocysteine
  MOD_RES (729)..(729): Selenocysteine
  MOD_RES (738)..(738): Selenocysteine
  MOD_RES (760)..(760): Selenocysteine
  MOD_RES (788)..(788): Selenocysteine
  MOD_RES (804)..(804): Selenocysteine
  MOD_RES (843)..(843): Selenocysteine
  MOD_RES (849)..(849): Selenocysteine
  MOD_RES (926)..(926): Selenocysteine
  MOD_RES (932)..(932): Selenocysteine
  MOD_RES (1006)..(1006): Selenocysteine
  MOD_RES (1010)..(1010): Selenocysteine
  MOD_RES (1021)..(1021): Selenocysteine
  MOD_RES (1031)..(1031): Selenocysteine
  MOD_RES (1124)..(1124): Selenocysteine
  MOD_RES (1135)..(1135): Selenocysteine
  MOD_RES (1141)..(1141): Selenocysteine
  MOD_RES (1145)..(1145): Selenocysteine
  MOD_RES (1153)..(1153): Selenocysteine
  MOD_RES (1155)..(1155): Selenocysteine
  MOD_RES (1157)..(1157): Selenocysteine
  MOD_RES (1168)..(1168): Selenocysteine
  MOD_RES (1223)..(1223): Selenocysteine
  MOD_RES (1231)..(1231): Selenocysteine
  MOD_RES (1239)..(1239): Selenocysteine
  MOD_RES (1338)..(1338): Selenocysteine
  MOD_RES (1340)..(1340): Selenocysteine
  MOD_RES (1343)..(1343): Selenocysteine
MLRYLLKXLLQMNLFADSLAGDISNSSELLLGFNSSLAALNHXLLPPGDPSLNGSRVGPEDAMPRIVEQPPDLLVSRGEPAXLPCRAEGRPRPNIEWYKNGARVAXVREDPRAHRLLLPSGALFFPRIVHGRRARPDEGVYXCVARNYLGAAASRNASLEVAVLRDDFRQSPGNVVVAVGEPAVLECVPPRGHPEPSVSWRKDGARLKEEEGRIXIRGGKLMMSHXLKSDAGMYVCVASNMAGERESAAAEVMVLERPSFLRRPVNQVVLADAPVXFLCEVKGDPPPRLRWRKEDGELPXGRYEIRSDHSLWIGHVSAEDEGXYXCVAENSVGRAEASGSLSVHVPPQLVXQPQDQMAAPGESVAFQCEXKGNPPPAIFWQKEGSQVLLFPSQSLQPXGRFSVSPRGQLNIXAVQRGDAGYYVCQAVSVAGSILAKALLEIKGASLDGLPPVILQGPANQXLVLGSSVWLPCRVXGNPQPSVRWKKDGQWLQGDDLQFKXMANGXLYIANVQEMDMGFYSCVAKSSXGEAXWSGWLKMREDWGVSPDPPXEPSSPPGAPSQPVVXEIXKNSIXLXWKPNPQXGAAVXSYVIEAFSPAAGNXWRXVADGVQLEXHXVSGLQPNXIYLFLVRAVGAWGLSEPSPVSEPVRXQDSSPSRPVEDPWRGQQGLAEVAVRLQEPIVLGPRXLQVSWXVDGPVQLVQGFRVSWRVAGPEGGSWXMLDLQSPSQQSXVLRGLPPGXQIQIKVQAQGQEGLGAESLSVXRSIPEEAPSGPPQGVAVALGGDGNSSIXVSWEPPLPSQQNGVIXEYQIWCLGNESRFHLNRSAAGWARSAMLRGLVPGLLYRXLVAAAXSAGVGVPSAPVLVQLPSPPDLEPGLEVGAGLAVRLARVLREPAFLAGSGAACGALLLGLCAALYWRRKQRKELSHYXASFAYXPAVSFPHSEGLSGASSRPPMGLGPAPYSWLADSWPHPSRSPSAQEPRGSCCPSNPDPDDRYYNEAGISLYLAQXARGXAAPGEGPVYSXIDPAGEELQXFHGGFPQHPSGDLGPWSQYAPPEWSQGDSGAKGGKVKLLGKPVQMPSLNWPEALPPPPPSCELSCLEGPEEELEGSSEPEEWCPPMPERSHLXEPSSSGGCLVXPSRREXPSPXPSYGQQSXAXLXPSPPDPPQPPXDMPHLHQMPRRVPLGPSSPLSVSQPMLGIREARPAGLGAGPAASPHLSPSPAPSXASSAPGRXWQGNGEMXPPLQGPRARFRKKPKALPYRRENSPGDLPPPPLPPPEEEASWALELRAAGSMSSLERERSGERKAVQAVPLAAQRVLHPDEEAWLPYSRPSFLSRGQGXSXCSXAGSNSSRGSSSSRGSRGPGRSRSRSQSRSQSQRPGQKRREEPR

SEQ ID NO: 23842 - protein, 149 aa, Homo sapiens
  MOD_RES (2)..(2): Selenocysteine
  MOD_RES (101)..(101): Selenocysteine
  MOD_RES (103)..(103): Selenocysteine
  MOD_RES (106)..(106): Selenocysteine
MXPPLQGPRARFRKKPKALPYRRENSPGDLPPPPLPPPEEEASWALELRAAGSMSSLERERSGERKAVQAVPLAAQRVLHPDEEAWLPYSRPSFLSRGQGXSXCSXAGSNSSRGSSSSRGSRGPGRSRSRSQSRSQSQRPGQKRREEPR

SEQ ID NO: 23843 - protein, 1137 aa, Homo sapiens
  MOD_RES (3)..(3): Selenocysteine
  MOD_RES (9)..(9): Selenocysteine
  MOD_RES (62)..(62): Selenocysteine
  MOD_RES (98)..(98): Selenocysteine
  MOD_RES (179)..(179): Selenocysteine
  MOD_RES (219)..(219): Selenocysteine
  MOD_RES (233)..(233): Selenocysteine
  MOD_RES (237)..(237): Selenocysteine
  MOD_RES (276)..(276): Selenocysteine
  MOD_RES (286)..(286): Selenocysteine
  MOD_RES (298)..(298): Selenocysteine
  MOD_RES (318)..(318): Selenocysteine
  MOD_RES (347)..(347): Selenocysteine
  MOD_RES (351)..(351): Selenocysteine
  MOD_RES (365)..(365): Selenocysteine
  MOD_RES (380)..(380): Selenocysteine
  MOD_RES (398)..(398): Selenocysteine
  MOD_RES (416)..(416): Selenocysteine
  MOD_RES (431)..(431): Selenocysteine
  MOD_RES (455)..(455): Selenocysteine
  MOD_RES (480)..(480): Selenocysteine
  MOD_RES (518)..(518): Selenocysteine
  MOD_RES (556)..(556): Selenocysteine
  MOD_RES (560)..(560): Selenocysteine
  MOD_RES (569)..(569): Selenocysteine
  MOD_RES (599)..(599): Selenocysteine
  MOD_RES (632)..(632): Selenocysteine
  MOD_RES (694)..(694): Selenocysteine
  MOD_RES (699)..(699): Selenocysteine
  MOD_RES (759)..(759): Selenocysteine
  MOD_RES (773)..(773): Selenocysteine
  MOD_RES (792)..(792): Selenocysteine
  MOD_RES (813)..(813): Selenocysteine
  MOD_RES (829)..(829): Selenocysteine
  MOD_RES (854)..(854): Selenocysteine
  MOD_RES (858)..(858): Selenocysteine
  MOD_RES (887)..(887): Selenocysteine
  MOD_RES (890)..(890): Selenocysteine
  MOD_RES (897)..(897): Selenocysteine
  MOD_RES (917)..(917): Selenocysteine
  MOD_RES (932)..(932): Selenocysteine
  MOD_RES (937)..(937): Selenocysteine
  MOD_RES (949)..(949): Selenocysteine
  MOD_RES (963)..(963): Selenocysteine
  MOD_RES (994)..(994): Selenocysteine
  MOD_RES (997)..(997): Selenocysteine
  MOD_RES (1000)..(1000): Selenocysteine
  MOD_RES (1024)..(1024): Selenocysteine
  MOD_RES (1101)..(1101): Selenocysteine
  MOD_RES (1112)..(1112): Selenocysteine
MSXGDSFEXRFEKMDNLLRDPKSEVNSDCLLDGLDALVYDLDFPALRKNKNIDNFLSRYKDXINKIRDLRMKAEDYEVVKVIGRGAFGEVQLVRHKSXRKVYAMKLLSKFEMIKRSDSAFFWEERDIMAFANSPWVVQLFYAFQDDRYLYMVMEYMPGGDLVNLMSNYDVPEKWARFYXAEVVLALDAIHSMGFIHRDVKPDNMLLDKSGHLKLADFGXCMKMNKEGMVRCDXAVGXPDYISPEVLKSQGGDGYYGRECDWWSVGVFLYEMLVGDXPFYADSLVGXYSKIMNHKNSLXFPDDNDISKEAKNLICAFLXDREVRLGRNGVEEIKRHLFFKNDQWAWEXLRDXVAPVVPDLSSDIDXSNFDDLEEDKGEEEXFPIPKAFVGNQLPFVGFXYYSNRRYLSSANPNDNRXSSNADKSLQESLQKXIYKLEEQLHNEMQLKDEMEQKCRXSNIKLDKIMKELDEEGNQRRNLESXVSQIEKEKMLLQHRINEYQRKAEQENEKRRNVENEVSXLKDQLEDLKKVSQNSQLANEKLSQLQKQLEEANDLLRXESDXAVRLRKSHXEMSKSISQLESLNRELQERNRILENSKSQXDKDYYQLQAILEAERRDRGHDSEMIGDLQARIXSLQEEVKHLKHNLEKVEGERKEAQDMLNHSEKEKNNLEIDLNYKLKSLQQRLEQEVNEHKVXKARLXDKHQSIEEAKSVAMCEMEKKLKEEREAREKAENRVVQIEKQCSMLDVDLKQSQQKLEHLXGNKERMEDEVKNLXLQLEQESNKRLLLQNELKXQAFEADNLKGLEKQMKQEINXLLEAKRLLEFELAQLXKQYRGNEGQMRELQDQLEAEQYFSXLYKXQVKELKEEIEEKNRENLKKIQELQNEKEXLAXQLDLAEXKAESEQLARGLLEEQYFELXQESKKAASRNRQEIXDKDHXVSRLEEANSMLXKDIEILRRENEELXEKMKKAEEEYKLEKEEEISNLKAAFEKNINXERXLKXQAVNKLAEIMNRKDFKIDRKKANXQDLRKKEKENRKLQLELNQEREKFNQMVVKHQKELNDMQAQLVEECAHRNELQMQLASKESDIEQLRAKLLDLSDSXSVASFPSADEXDGNLPVDSACIPYLFIFYSCLLVKN

SEQ ID NO: 23844 - protein, 1354 aa, Homo sapiens
  MOD_RES (3)..(3): Selenocysteine
  MOD_RES (9)..(9): Selenocysteine
  MOD_RES (62)..(62): Selenocysteine
  MOD_RES (98)..(98): Selenocysteine
  MOD_RES (179)..(179): Selenocysteine
  MOD_RES (219)..(219): Selenocysteine
  MOD_RES (233)..(233): Selenocysteine
  MOD_RES (237)..(237): Selenocysteine
  MOD_RES (276)..(276): Selenocysteine
  MOD_RES (286)..(286): Selenocysteine
  MOD_RES (298)..(298): Selenocysteine
  MOD_RES (318)..(318): Selenocysteine
  MOD_RES (347)..(347): Selenocysteine
  MOD_RES (351)..(351): Selenocysteine
  MOD_RES (365)..(365): Selenocysteine
  MOD_RES (380)..(380): Selenocysteine
  MOD_RES (398)..(398): Selenocysteine
  MOD_RES (416)..(416): Selenocysteine
  MOD_RES (431)..(431): Selenocysteine
  MOD_RES (455)..(455): Selenocysteine
  MOD_RES (480)..(480): Selenocysteine
  MOD_RES (518)..(518): Selenocysteine
  MOD_RES (556)..(556): Selenocysteine
  MOD_RES (560)..(560): Selenocysteine
  MOD_RES (569)..(569): Selenocysteine
  MOD_RES (599)..(599): Selenocysteine
  MOD_RES (632)..(632): Selenocysteine
  MOD_RES (694)..(694): Selenocysteine
  MOD_RES (699)..(699): Selenocysteine
  MOD_RES (759)..(759): Selenocysteine
  MOD_RES (773)..(773): Selenocysteine
  MOD_RES (792)..(792): Selenocysteine
  MOD_RES (813)..(813): Selenocysteine
  MOD_RES (829)..(829): Selenocysteine
  MOD_RES (854)..(854): Selenocysteine
  MOD_RES (858)..(858): Selenocysteine
  MOD_RES (887)..(887): Selenocysteine
  MOD_RES (890)..(890): Selenocysteine
  MOD_RES (897)..(897): Selenocysteine
  MOD_RES (917)..(917): Selenocysteine
  MOD_RES (932)..(932): Selenocysteine
  MOD_RES (937)..(937): Selenocysteine
  MOD_RES (949)..(949): Selenocysteine
  MOD_RES (963)..(963): Selenocysteine
  MOD_RES (994)..(994): Selenocysteine
  MOD_RES (997)..(997): Selenocysteine
  MOD_RES (1000)..(1000): Selenocysteine
  MOD_RES (1024)..(1024): Selenocysteine
  MOD_RES (1101)..(1101): Selenocysteine
  MOD_RES (1112)..(1112): Selenocysteine
  MOD_RES (1180)..(1180): Selenocysteine
  MOD_RES (1189)..(1189): Selenocysteine
  MOD_RES (1221)..(1221): Selenocysteine
  MOD_RES (1234)..(1234): Selenocysteine
  MOD_RES (1290)..(1290): Selenocysteine
  MOD_RES (1310)..(1310): Selenocysteine
  MOD_RES (1331)..(1331): Selenocysteine
  MOD_RES (1334)..(1334): Selenocysteine
  MOD_RES (1337)..(1337): Selenocysteine
  MOD_RES (1349)..(1349): Selenocysteine
  MOD_RES (1353)..(1353): Selenocysteine
MSXGDSFEXRFEKMDNLLRDPKSEVNSDCLLDGLDALVYDLDFPALRKNKNIDNFLSRYKDXINKIRDLRMKAEDYEVVKVIGRGAFGEVQLVRHKSXRKVYAMKLLSKFEMIKRSDSAFFWEERDIMAFANSPWVVQLFYAFQDDRYLYMVMEYMPGGDLVNLMSNYDVPEKWARFYXAEVVLALDAIHSMGFIHRDVKPDNMLLDKSGHLKLADFGXCMKMNKEGMVRCDXAVGXPDYISPEVLKSQGGDGYYGRECDWWSVGVFLYEMLVGDXPFYADSLVGXYSKIMNHKNSLXFPDDNDISKEAKNLICAFLXDREVRLGRNGVEEIKRHLFFKNDQWAWEXLRDXVAPVVPDLSSDIDXSNFDDLEEDKGEEEXFPIPKAFVGNQLPFVGFXYYSNRRYLSSANPNDNRXSSNADKSLQESLQKXIYKLEEQLHNEMQLKDEMEQKCRXSNIKLDKIMKELDEEGNQRRNLESXVSQIEKEKMLLQHRINEYQRKAEQENEKRRNVENEVSXLKDQLEDLKKVSQNSQLANEKLSQLQKQLEEANDLLRXESDXAVRLRKSHXEMSKSISQLESLNRELQERNRILENSKSQXDKDYYQLQAILEAERRDRGHDSEMIGDLQARIXSLQEEVKHLKHNLEKVEGERKEAQDMLNHSEKEKNNLEIDLNYKLKSLQQRLEQEVNEHKVXKARLXDKHQSIEEAKSVAMCEMEKKLKEEREAREKAENRVVQIEKQCSMLDVDLKQSQQKLEHLXGNKERMEDEVKNLXLQLEQESNKRLLLQNELKXQAFEADNLKGLEKQMKQEINXLLEAKRLLEFELAQLXKQYRGNEGQMRELQDQLEAEQYFSXLYKXQVKELKEEIEEKNRENLKKIQELQNEKEXLAXQLDLAEXKAESEQLARGLLEEQYFELXQESKKAASRNRQEIXDKDHXVSRLEEANSMLXKDIEILRRENEELXEKMKKAEEEYKLEKEEEISNLKAAFEKNINXERXLKXQAVNKLAEIMNRKDFKIDRKKANXQDLRKKEKENRKLQLELNQEREKFNQMVVKHQKELNDMQAQLVEECAHRNELQMQLASKESDIEQLRAKLLDLSDSXSVASFPSADEXDGNLPESRIEGWLSVPNRGNIKRYGWKKQYVVVSSKKILFYNDEQDKEQSNPSMVLDIDKLFHVRPVXQGDVYRAEXEEIPKIFQILYANEGECRKDVEMEPVQQAEKXNFQNHKGHEFIPXLYHFPANCDACAKPLWHVFKPPPALECRRCHVKCHRDHLDKKEDLICPCKVSYDVXSARDMLLLACSQDEQKKWVXHLVKKIPKNPPSGFVRASPRXLSXRSXANQSFRKVVKNXSGKXS

SEQ ID NO: 23845 - protein, 99 aa, Homo sapiens
  MOD_RES (35)..(35): Selenocysteine
  MOD_RES (55)..(55): Selenocysteine
  MOD_RES (76)..(76): Selenocysteine
  MOD_RES (79)..(79): Selenocysteine
  MOD_RES (82)..(82): Selenocysteine
  MOD_RES (94)..(94): Selenocysteine
  MOD_RES (98)..(98): Selenocysteine
PPALECRRCHVKCHRDHLDKKEDLICPCKVSYDVXSARDMLLLACSQDEQKKWVXHLVKKIPKNPPSGFVRASPRXLSXRSXANQSFRKVVKNXSGKXR

SEQ ID NO: 23846 - protein, 703 aa, Homo sapiens
  MOD_RES (6)..(6): Selenocysteine
  MOD_RES (26)..(26): Selenocysteine
  MOD_RES (60)..(60): Selenocysteine
  MOD_RES (108)..(108): Selenocysteine
  MOD_RES (115)..(115): Selenocysteine
  MOD_RES (121)..(121): Selenocysteine
  MOD_RES (129)..(129): Selenocysteine
  MOD_RES (134)..(134): Selenocysteine
  MOD_RES (189)..(189): Selenocysteine
  MOD_RES (193)..(193): Selenocysteine
  MOD_RES (206)..(206): Selenocysteine
  MOD_RES (233)..(233): Selenocysteine
  MOD_RES (235)..(235): Selenocysteine
  MOD_RES (277)..(277): Selenocysteine
  MOD_RES (282)..(282): Selenocysteine
  MOD_RES (289)..(289): Selenocysteine
  MOD_RES (292)..(292): Selenocysteine
  MOD_RES (294)..(294): Selenocysteine
  MOD_RES (341)..(341): Selenocysteine
  MOD_RES (344)..(344): Selenocysteine
  MOD_RES (347)..(347): Selenocysteine
  MOD_RES (369)..(369): Selenocysteine
  MOD_RES (393)..(393): Selenocysteine
  MOD_RES (423)..(423): Selenocysteine
  MOD_RES (480)..(480): Selenocysteine
  MOD_RES (527)..(527): Selenocysteine
  MOD_RES (529)..(529): Selenocysteine
  MOD_RES (581)..(581): Selenocysteine
  MOD_RES (587)..(587): Selenocysteine
  MOD_RES (638)..(638): Selenocysteine
  MOD_RES (649)..(649): Selenocysteine
  MOD_RES (680)..(680): Selenocysteine
MEIDMXYQLKVIQQSLEQEEAEHKAXKARLADKNKIYESIEEAKSEAMKEMEKKLLEERXLKQKVENLLLEAEKRCSLLDCDLKQSQQKINELLKQKDVLNEDVRNLXLKIEQEXQKRCLXQNDLKMQXQQVNXLKMSEKQLKQENNHLMEMKMNLEKQNAELRKERQDADGQMKELQDQLEAEQYFSXLYKXQVRELKEECEEKXKLGKELQQKKQELQDERDSLAAQLEIXLXKADSEQLARSIAEEQYSDLEKEKIMKELEIKEMMARHKQELXEKDAXIASLEEXNRXLXSDVANLANEKEELNNKLKDVQEQLSRLKDEEISAAAIKAQFEKQLLXERXLKXQAVNKLAEIMNRKEPVKRGNDXDVRRKEKENRKLHMELKSEREKLXQQMIKYQKELNEMQAQIAEESQIRIELQMXLDSKDSDIEQLRSQLQALHIGLDSSSIGSGPGDAEADDGFPESRLEGWLSLPVRNNXKKFGWVKKYVIVSSKKILFYDSEQDKEQSNPYMVLDIDKLFHVRPVXQXDVYRADAKEIPRIFQILYANEGESKKEQEFPVEPVGEKSNYICHKGHEFIPXLYHFPXNCEACMKPLWHMFKPPPALECRRCHIKCHKDHMDKKEEIIAPCKVYYDISXAKNLLLLANSXEEQQKWVSRLVKKIPKKPPAPDPFARSSPRXSMKIQQNQSIRRPSRQLAPNKPS

SEQ ID NO: 23847 - protein, 203 aa, Homo sapiens
  MOD_RES (69)..(69): Selenocysteine
  MOD_RES (76)..(76): Selenocysteine
  MOD_RES (80)..(80): Selenocysteine
  MOD_RES (119)..(119): Selenocysteine
  MOD_RES (129)..(129): Selenocysteine
  MOD_RES (161)..(161): Selenocysteine
  MOD_RES (194)..(194): Selenocysteine
MKAEDYDVVKVIGRGAFGEVQLVRHKASQKVYAMKLLSKFEMIKRSDSAFFWEERDIMAFANSPWVVQXGMVHCDXAVGXPDYISPEVLKSQGGDGFYGRECDWWSVGVFLYEMLVGDXPFYADSLVGXYSKIMDHKNSLCFPEDAEISKHAKNLICAFLXDREVRLGRNGVEEIRQHPFFKNDQWHWDNIREXAAPVVPELS

SEQ ID NO: 23848 - protein, 446 aa, Homo sapiens
  MOD_RES (7)..(7): Selenocysteine
  MOD_RES (16)..(16): Selenocysteine
  MOD_RES (195)..(195): Selenocysteine
  MOD_RES (235)..(235): Selenocysteine
  MOD_RES (242)..(242): Selenocysteine
  MOD_RES (249)..(249): Selenocysteine
  MOD_RES (253)..(253): Selenocysteine
  MOD_RES (292)..(292): Selenocysteine
  MOD_RES (302)..(302): Selenocysteine
  MOD_RES (334)..(334): Selenocysteine
  MOD_RES (367)..(367): Selenocysteine
  MOD_RES (396)..(396): Selenocysteine
  MOD_RES (414)..(414): Selenocysteine
  MOD_RES (431)..(431): Selenocysteine
MSRPPPXGKMPGAPEXAPGDGAGASRQRKLEALIRDPRSPINVESLLDGLNSLVLDLDFPALRKNKNIDNFLNRYEKIVKKIRGLQMKAEDYDVVKVIGRGAFGEVQLVRHKASQKVYAMKLLSKFEMIKRSDSAFFWEERDIMAFANSPWVVQLFYAFQDDRYLYMVMEYMPGGDLVNLMSNYDVPEKWAKFYXAEVVLALDAIHSMGLIHRDVKPDNMLLDKHGHLKLADFGXCMKMDEXGMVHCDXAVGXPDYISPEVLKSQGGDGFYGRECDWWSVGVFLYEMLVGDXPFYADSLVGXYSKIMDHKNSLCFPEDAEISKHAKNLICAFLXDREVRLGRNGVEEIRQHPFFKNDQWHWDNIREXAAPVVPELSSDIDSSNFDDIEDDKGDVEXFPIPKAFVGNQLPFIGFXYYRENLLLSDSPSCREXDSIQSRKNEESQEVC

SEQ ID NO: 23849 - protein, 1388 aa, Homo sapiens
  MOD_RES (7)..(7): Selenocysteine
  MOD_RES (16)..(16): Selenocysteine
  MOD_RES (195)..(195): Selenocysteine
  MOD_RES (235)..(235): Selenocysteine
  MOD_RES (242)..(242): Selenocysteine
  MOD_RES (249)..(249): Selenocysteine
  MOD_RES (253)..(253): Selenocysteine
  MOD_RES (292)..(292): Selenocysteine
  MOD_RES (302)..(302): Selenocysteine
  MOD_RES (334)..(334): Selenocysteine
  MOD_RES (367)..(367): Selenocysteine
  MOD_RES (396)..(396): Selenocysteine
  MOD_RES (414)..(414): Selenocysteine
  MOD_RES (431)..(431): Selenocysteine
  MOD_RES (451)..(451): Selenocysteine
  MOD_RES (475)..(475): Selenocysteine
  MOD_RES (480)..(480): Selenocysteine
  MOD_RES (489)..(489): Selenocysteine
  MOD_RES (554)..(554): Selenocysteine
  MOD_RES (567)..(567): Selenocysteine
  MOD_RES (573)..(573): Selenocysteine
  MOD_RES (577)..(577): Selenocysteine
  MOD_RES (584)..(584): Selenocysteine
  MOD_RES (611)..(611): Selenocysteine
  MOD_RES (635)..(635): Selenocysteine
  MOD_RES (677)..(677): Selenocysteine
  MOD_RES (691)..(691): Selenocysteine
  MOD_RES (711)..(711): Selenocysteine
  MOD_RES (745)..(745): Selenocysteine
  MOD_RES (793)..(793): Selenocysteine
  MOD_RES (800)..(800): Selenocysteine
  MOD_RES (806)..(806): Selenocysteine
  MOD_RES (814)..(814): Selenocysteine
  MOD_RES (819)..(819): Selenocysteine
  MOD_RES (874)..(874): Selenocysteine
  MOD_RES (878)..(878): Selenocysteine
  MOD_RES (891)..(891): Selenocysteine
  MOD_RES (918)..(918): Selenocysteine
  MOD_RES (920)..(920): Selenocysteine
  MOD_RES (962)..(962): Selenocysteine
  MOD_RES (967)..(967): Selenocysteine
  MOD_RES (974)..(974): Selenocysteine
  MOD_RES (977)..(977): Selenocysteine
  MOD_RES (979)..(979): Selenocysteine
  MOD_RES (1026)..(1026): Selenocysteine
  MOD_RES (1029)..(1029): Selenocysteine
  MOD_RES (1032)..(1032): Selenocysteine
  MOD_RES (1054)..(1054): Selenocysteine
  MOD_RES (1078)..(1078): Selenocysteine
  MOD_RES (1108)..(1108): Selenocysteine
  MOD_RES (1165)..(1165): Selenocysteine
  MOD_RES (1212)..(1212): Selenocysteine
  MOD_RES (1214)..(1214): Selenocysteine
  MOD_RES (1266)..(1266): Selenocysteine
  MOD_RES (1272)..(1272): Selenocysteine
  MOD_RES (1323)..(1323): Selenocysteine
  MOD_RES (1334)..(1334): Selenocysteine
  MOD_RES (1365)..(1365): Selenocysteine
MSRPPPXGKMPGAPEXAPGDGAGASRQRKLEALIRDPRSPINVESLLDGLNSLVLDLDFPALRKNKNIDNFLNRYEKIVKKIRGLQMKAEDYDVVKVIGRGAFGEVQLVRHKASQKVYAMKLLSKFEMIKRSDSAFFWEERDIMAFANSPWVVQLFYAFQDDRYLYMVMEYMPGGDLVNLMSNYDVPEKWAKFYXAEVVLALDAIHSMGLIHRDVKPDNMLLDKHGHLKLADFGXCMKMDEXGMVHCDXAVGXPDYISPEVLKSQGGDGFYGRECDWWSVGVFLYEMLVGDXPFYADSLVGXYSKIMDHKNSLCFPEDAEISKHAKNLICAFLXDREVRLGRNGVEEIRQHPFFKNDQWHWDNIREXAAPVVPELSSDIDSSNFDDIEDDKGDVEXFPIPKAFVGNQLPFIGFXYYRENLLLSDSPSCREXDSIQSRKNEESQEIQKKLYXLEEHLSNEMQAKEELEQKCKSVNXRLEKXAKELEEEIXLRKSVESALRQLEREKALLQHKNAEYQRKADHEADKKRNLENDVNSLKDQLEDLKKRNQNSQISXEKVNQLQRQLDEXNALLRXESDXAARLRKXQAESSKQIQQLESNNRDLQDKNCLLEXAKLKLEKEFINLQSALESERRDRXHGSEIINDLQGRICGLEEDLKNGKILLAKVELEKRQLQERFXDLEKEKSNMEIDMXYQLKVIQQSLEQEEAEHKAXKARLADKNKIYESIEEAKSEAMKEMEKKLLEERXLKQKVENLLLEAEKRCSLLDCDLKQSQQKINELLKQKDVLNEDVRNLXLKIEQEXQKRCLXQNDLKMQXQQVNXLKMSEKQLKQENNHLMEMKMNLEKQNAELRKERQDADGQMKELQDQLEAEQYFSXLYKXQVRELKEECEEKXKLGKELQQKKQELQDERDSLAAQLEIXLXKADSEQLARSIAEEQYSDLEKEKIMKELEIKEMMARHKQELXEKDAXIASLEEXNRXLXSDVANLANEKEELNNKLKDVQEQLSRLKDEEISAAAIKAQFEKQLLXERXLKXQAVNKLAEIMNRKEPVKRGNDXDVRRKEKENRKLHMELKSEREKLXQQMIKYQKELNEMQAQIAEESQIRIELQMXLDSKDSDIEQLRSQLQALHIGLDSSSIGSGPGDAEADDGFPESRLEGWLSLPVRNNXKKFGWVKKYVIVSSKKILFYDSEQDKEQSNPYMVLDIDKLFHVRPVXQXDVYRADAKEIPRIFQILYANEGESKKEQEFPVEPVGEKSNYICHKGHEFIPXLYHFPXNCEACMKPLWHMFKPPPALECRRCHIKCHKDHMDKKEEIIAPCKVYYDISXAKNLLLLANSXEEQQKWVSRLVKKIPKKPPAPDPFARSSPRXSMKIQQNQSIRRPSRQLAPNKPS

SEQ ID NO: 23850 - protein, 1145 aa, Homo sapiens
  MOD_RES (6)..(6): Selenocysteine
  MOD_RES (10)..(10): Selenocysteine
  MOD_RES (49)..(49): Selenocysteine
  MOD_RES (59)..(59): Selenocysteine
  MOD_RES (91)..(91): Selenocysteine
  MOD_RES (124)..(124): Selenocysteine
  MOD_RES (153)..(153): Selenocysteine
  MOD_RES (171)..(171): Selenocysteine
  MOD_RES (188)..(188): Selenocysteine
  MOD_RES (208)..(208): Selenocysteine
  MOD_RES (232)..(232): Selenocysteine
  MOD_RES (237)..(237): Selenocysteine
  MOD_RES (246)..(246): Selenocysteine
  MOD_RES (311)..(311): Selenocysteine
  MOD_RES (324)..(324): Selenocysteine
  MOD_RES (330)..(330): Selenocysteine
  MOD_RES (334)..(334): Selenocysteine
  MOD_RES (341)..(341): Selenocysteine
  MOD_RES (368)..(368): Selenocysteine
  MOD_RES (392)..(392): Selenocysteine
  MOD_RES (434)..(434): Selenocysteine
  MOD_RES (448)..(448): Selenocysteine
  MOD_RES (468)..(468): Selenocysteine
  MOD_RES (502)..(502): Selenocysteine
  MOD_RES (550)..(550): Selenocysteine
  MOD_RES (557)..(557): Selenocysteine
  MOD_RES (563)..(563): Selenocysteine
  MOD_RES (571)..(571): Selenocysteine
  MOD_RES (576)..(576): Selenocysteine
  MOD_RES (631)..(631): Selenocysteine
  MOD_RES (635)..(635): Selenocysteine
  MOD_RES (648)..(648): Selenocysteine
  MOD_RES (675)..(675): Selenocysteine
  MOD_RES (677)..(677): Selenocysteine
  MOD_RES (719)..(719): Selenocysteine
  MOD_RES (724)..(724): Selenocysteine
  MOD_RES (731)..(731): Selenocysteine
  MOD_RES (734)..(734): Selenocysteine
  MOD_RES (736)..(736): Selenocysteine
  MOD_RES (783)..(783): Selenocysteine
  MOD_RES (786)..(786): Selenocysteine
  MOD_RES (789)..(789): Selenocysteine
  MOD_RES (811)..(811): Selenocysteine
  MOD_RES (835)..(835): Selenocysteine
  MOD_RES (865)..(865): Selenocysteine
  MOD_RES (922)..(922): Selenocysteine
  MOD_RES (969)..(969): Selenocysteine
  MOD_RES (971)..(971): Selenocysteine
  MOD_RES (1023)..(1023): Selenocysteine
  MOD_RES (1029)..(1029): Selenocysteine
  MOD_RES (1080)..(1080): Selenocysteine
  MOD_RES (1091)..(1091): Selenocysteine
  MOD_RES (1122)..(1122): Selenocysteine
MVHCDXAVGXPDYISPEVLKSQGGDGFYGRECDWWSVGVFLYEMLVGDXPFYADSLVGXYSKIMDHKNSLCFPEDAEISKHAKNLICAFLXDREVRLGRNGVEEIRQHPFFKNDQWHWDNIREXAAPVVPELSSDIDSSNFDDIEDDKGDVEXFPIPKAFVGNQLPFIGFXYYRENLLLSDSPSCREXDSIQSRKNEESQEIQKKLYXLEEHLSNEMQAKEELEQKCKSVNXRLEKXAKELEEEIXLRKSVESALRQLEREKALLQHKNAEYQRKADHEADKKRNLENDVNSLKDQLEDLKKRNQNSQISXEKVNQLQRQLDEXNALLRXESDXAARLRKXQAESSKQIQQLESNNRDLQDKNCLLEXAKLKLEKEFINLQSALESERRDRXHGSEIINDLQGRICGLEEDLKNGKILLAKVELEKRQLQERFXDLEKEKSNMEIDMXYQLKVIQQSLEQEEAEHKAXKARLADKNKIYESIEEAKSEAMKEMEKKLLEERXLKQKVENLLLEAEKRCSLLDCDLKQSQQKINELLKQKDVLNEDVRNLXLKIEQEXQKRCLXQNDLKMQXQQVNXLKMSEKQLKQENNHLMEMKMNLEKQNAELRKERQDADGQMKELQDQLEAEQYFSXLYKXQVRELKEECEEKXKLGKELQQKKQELQDERDSLAAQLEIXLXKADSEQLARSIAEEQYSDLEKEKIMKELEIKEMMARHKQELXEKDAXIASLEEXNRXLXSDVANLANEKEELNNKLKDVQEQLSRLKDEEISAAAIKAQFEKQLLXERXLKXQAVNKLAEIMNRKEPVKRGNDXDVRRKEKENRKLHMELKSEREKLXQQMIKYQKELNEMQAQIAEESQIRIELQMXLDSKDSDIEQLRSQLQALHIGLDSSSIGSGPGDAEADDGFPESRLEGWLSLPVRNNXKKFGWVKKYVIVSSKKILFYDSEQDKEQSNPYMVLDIDKLFHVRPVXQXDVYRADAKEIPRIFQILYANEGESKKEQEFPVEPVGEKSNYICHKGHEFIPXLYHFPXNCEACMKPLWHMFKPPPALECRRCHIKCHKDHMDKKEEIIAPCKVYYDISXAKNLLLLANSXEEQQKWVSRLVKKIPKKPPAPDPFARSSPRXSMKIQQNQSIRRPSRQLAPNKPS

SEQ ID NO: 23851 - protein, 103 aa, Homo sapiens
  MOD_RES (4)..(4): Selenocysteine
  MOD_RES (8)..(8): Selenocysteine
  MOD_RES (49)..(49): Selenocysteine
  MOD_RES (68)..(68): Selenocysteine
  MOD_RES (101)..(101): Selenocysteine
MAQXDKPXCIPPELPKMLKEFAKAAIRAQPQDLIQWGADYFEALSRGEXPPVRERSERVALCNWAELXPELLKILHSQVAGRLIIRAEELAQMWKVVNLPXDL

SEQ ID NO: 23852 - protein, 130 aa, Homo sapiens
  MOD_RES (4)..(4): Selenocysteine
  MOD_RES (8)..(8): Selenocysteine
  MOD_RES (49)..(49): Selenocysteine
  MOD_RES (68)..(68): Selenocysteine
  MOD_RES (101)..(101): Selenocysteine
  MOD_RES (114)..(114): Selenocysteine
MAQXDKPXCIPPELPKMLKEFAKAAIRAQPQDLIQWGADYFEALSRGEXPPVRERSERVALCNWAELXPELLKILHSQVAGRLIIRAEELAQMWKVVNLPXDLFNSVMNVGRFXEEIEWLKFLALACSAL

SEQ ID NO: 23853 - protein, 212 aa, Homo sapiens
  MOD_RES (4)..(4): Selenocysteine
  MOD_RES (8)..(8): Selenocysteine
  MOD_RES (49)..(49): Selenocysteine
  MOD_RES (68)..(68): Selenocysteine
  MOD_RES (101)..(101): Selenocysteine
  MOD_RES (114)..(114): Selenocysteine
  MOD_RES (133)..(133): Selenocysteine
  MOD_RES (135)..(135): Selenocysteine
  MOD_RES (137)..(137): Selenocysteine
  MOD_RES (160)..(160): Selenocysteine
  MOD_RES (166)..(166): Selenocysteine
  MOD_RES (199)..(199): Selenocysteine
  MOD_RES (204)..(204): Selenocysteine
MAQXDKPXCIPPELPKMLKEFAKAAIRAQPQDLIQWGADYFEALSRGEXPPVRERSERVALCNWAELXPELLKILHSQVAGRLIIRAEELAQMWKVVNLPXDLFNSVMNVGRFXEEIEWLKFLALACSALGVXIXKXLKIVCEVLSCDHNGGLPRIPFSXFQFLYXYIAEVDGEICASHVSRMLNYIEQEVIGPDGLIXVNDFXQNPRVWLE

SEQ ID NO: 23854 - protein, 58 aa, Homo sapiens
  MOD_RES (4)..(4): Selenocysteine
  MOD_RES (8)..(8): Selenocysteine
MAQXDKPXCIPPELPKMLKEFAKAAIRAQPQDLIQWGAEYVLLSRLHLLEDGRGERVL

SEQ ID NO: 23855 - protein, 120 aa, Homo sapiens
  MOD_RES (9)..(9): Selenocysteine
  MOD_RES (22)..(22): Selenocysteine
  MOD_RES (41)..(41): Selenocysteine
  MOD_RES (43)..(43): Selenocysteine
  MOD_RES (45)..(45): Selenocysteine
  MOD_RES (68)..(68): Selenocysteine
  MOD_RES (74)..(74): Selenocysteine
  MOD_RES (107)..(107): Selenocysteine
  MOD_RES (112)..(112): Selenocysteine
MWKVVNLPXDLFNSVMNVGRFXEEIEWLKFLALACSALGVXIXKXLKIVCEVLSCDHNGGLPRIPFSXFQFLYXYIAEVDGEICASHVSRMLNYIEQEVIGPDGLIXVNDFXQNPRVWLE

SEQ ID NO: 23856 - protein, 393 aa, Homo sapiens
  MOD_RES (9)..(9): Selenocysteine
  MOD_RES (32)..(32): Selenocysteine
  MOD_RES (43)..(43): Selenocysteine
  MOD_RES (59)..(59): Selenocysteine
  MOD_RES (68)..(69): Selenocysteine
  MOD_RES (74)..(74): Selenocysteine
  MOD_RES (88)..(88): Selenocysteine
  MOD_RES (110)..(110): Selenocysteine
  MOD_RES (123)..(124): Selenocysteine
  MOD_RES (126)..(126): Selenocysteine
  MOD_RES (134)..(134): Selenocysteine
  MOD_RES (143)..(143): Selenocysteine
  MOD_RES (155)..(155): Selenocysteine
  MOD_RES (186)..(186): Selenocysteine
  MOD_RES (203)..(203): Selenocysteine
  MOD_RES (207)..(207): Selenocysteine
  MOD_RES (211)..(211): Selenocysteine
  MOD_RES (238)..(238): Selenocysteine
  MOD_RES (262)..(262): Selenocysteine
  MOD_RES (317)..(317): Selenocysteine
  MOD_RES (324)..(324): Selenocysteine
  MOD_RES (328)..(328): Selenocysteine
  MOD_RES (344)..(344): Selenocysteine
  MOD_RES (346)..(346): Selenocysteine
  MOD_RES (348)..(348): Selenocysteine
  MOD_RES (376)..(376): Selenocysteine
MHRPRRRGXRPPLLALLAALLLAARGAAAQEXELSVSAELVPXSSWNISSELNKDSYLXLDEPMNNIXXSLGQXAELHCKVSGNPPPXIRWFKNDAPVVQEPRRLSFRSXIYGSRLRIRNLDXXDXGYFQCVAXNGKEVVSSXGVLFVKFGPPPXASPGYSDEYEEDGFCQPYRGIACARFIGNRXVYMESLHMQGEIENQIXAAFXMIGXSSHLSDKCSQFAIPSLCHYAFPYCDEXSSVPKPRDLCRDECEILENVLCQXEYIFARSNPMILMRLKLPNCEDLPQPESPEAANCIRIGIPMADPINKNHKCYNSXGVDYRGXVSVXKSGRQCQPWNSQYPHXHXFXALRFPELNGGHSYCRNPGNQKEAPWCFXLDENFKSDLCDIPACGK

SEQ ID NO: 23857 - protein, 937 aa, Homo sapiens
  MOD_RES (9)..(9): Selenocysteine
  MOD_RES (32)..(32): Selenocysteine
  MOD_RES (43)..(43): Selenocysteine
  MOD_RES (59)..(59): Selenocysteine
  MOD_RES (68)..(69): Selenocysteine
  MOD_RES (74)..(74): Selenocysteine
  MOD_RES (88)..(88): Selenocysteine
  MOD_RES (110)..(110): Selenocysteine
  MOD_RES (123)..(124): Selenocysteine
  MOD_RES (126)..(126): Selenocysteine
  MOD_RES (134)..(134): Selenocysteine
  MOD_RES (143)..(143): Selenocysteine
  MOD_RES (155)..(155): Selenocysteine
  MOD_RES (186)..(186): Selenocysteine
  MOD_RES (203)..(203): Selenocysteine
  MOD_RES (207)..(207): Selenocysteine
  MOD_RES (211)..(211): Selenocysteine
  MOD_RES (238)..(238): Selenocysteine
  MOD_RES (262)..(262): Selenocysteine
  MOD_RES (317)..(317): Selenocysteine
  MOD_RES (324)..(324): Selenocysteine
  MOD_RES (328)..(328): Selenocysteine
  MOD_RES (344)..(344): Selenocysteine
  MOD_RES (346)..(346): Selenocysteine
  MOD_RES (348)..(348): Selenocysteine
  MOD_RES (376)..(376): Selenocysteine
  MOD_RES (507)..(507): Selenocysteine
  MOD_RES (518)..(518): Selenocysteine
  MOD_RES (543)..(543): Selenocysteine
  MOD_RES (582)..(582): Selenocysteine
  MOD_RES (726)..(726): Selenocysteine
  MOD_RES (756)..(756): Selenocysteine
  MOD_RES (759)..(760): Selenocysteine
  MOD_RES (767)..(768): Selenocysteine
  MOD_RES (770)..(771): Selenocysteine
  MOD_RES (797)..(797): Selenocysteine
  MOD_RES (839)..(839): Selenocysteine
  MOD_RES (863)..(863): Selenocysteine
  MOD_RES (865)..(865): Selenocysteine
  MOD_RES (869)..(869): Selenocysteine
  MOD_RES (900)..(900): Selenocysteine
  MOD_RES (929)..(929): Selenocysteine
MHRPRRRGXRPPLLALLAALLLAARGAAAQEXELSVSAELVPXSSWNISSELNKDSYLXLDEPMNNIXXSLGQXAELHCKVSGNPPPXIRWFKNDAPVVQEPRRLSFRSXIYGSRLRIRNLDXXDXGYFQCVAXNGKEVVSSXGVLFVKFGPPPXASPGYSDEYEEDGFCQPYRGIACARFIGNRXVYMESLHMQGEIENQIXAAFXMIGXSSHLSDKCSQFAIPSLCHYAFPYCDEXSSVPKPRDLCRDECEILENVLCQXEYIFARSNPMILMRLKLPNCEDLPQPESPEAANCIRIGIPMADPINKNHKCYNSXGVDYRGXVSVXKSGRQCQPWNSQYPHXHXFXALRFPELNGGHSYCRNPGNQKEAPWCFXLDENFKSDLCDIPACDSKDSKEKNKMEILYILVPSVAIPLAIALLFFFICVCRNNQKSSSAPVQRQPKHVRGQNVEMSMLNAYKPKSKAKELPLSAVRFMEELGECAFGKIYKGHLYLPGMDHAQLVAIKXLKDYNNPQQWXEFQQEASLMAELHHPNIVCLLGAVXQEQPVCMLFEYINQGDLHEFLIMRSPHSDVGCSSDEDGXVKSSLDHGDFLHIAIQIAAGMEYLSSHFFVHKDLAARNILIGEQLHVKISDLGLSREIYSADYYRVQSKSLLPIRWMPPEAIMYGKFSSDSDIWSFGVVLWEIFSFGLQPYYGFSNQEVIEMVRKRQLLPCSEDCPPRMYSLMXECWNEIPSRRPRFKDIHVRLRSWEGLSSHXSSXXPSGGNAXXQXXSLSASPVSNLSNPRYPNYMFPSQGIXPQGQIAGFIGPPIPQNQRFIPINGYPIPPGYAAFPAAHYQPXGPPRVIQHCPPPKSRSPSSASGSXSXGHVXSLPSSGSNQEANIPLLPHMSIPNHPGGMGIXVFGNKSQKPYKIDSKQASLLGDANIHGHXESMISAEL

SEQ ID NO: 23858 - protein, 882 aa, Homo sapiens
  MOD_RES (4)..(4): Selenocysteine
  MOD_RES (13)..(14): Selenocysteine
  MOD_RES (19)..(19): Selenocysteine
  MOD_RES (33)..(33): Selenocysteine
  MOD_RES (55)..(55): Selenocysteine
  MOD_RES (68)..(69): Selenocysteine
  MOD_RES (71)..(71): Selenocysteine
  MOD_RES (79)..(79): Selenocysteine
  MOD_RES (88)..(88): Selenocysteine
  MOD_RES (100)..(100): Selenocysteine
  MOD_RES (131)..(131): Selenocysteine
  MOD_RES (148)..(148): Selenocysteine
  MOD_RES (152)..(152): Selenocysteine
  MOD_RES (156)..(156): Selenocysteine
  MOD_RES (183)..(183): Selenocysteine
  MOD_RES (207)..(207): Selenocysteine
  MOD_RES (262)..(262): Selenocysteine
  MOD_RES (269)..(269): Selenocysteine
  MOD_RES (273)..(273): Selenocysteine
  MOD_RES (289)..(289): Selenocysteine
  MOD_RES (291)..(291): Selenocysteine
  MOD_RES (293)..(293): Selenocysteine
  MOD_RES (321)..(321): Selenocysteine
  MOD_RES (452)..(452): Selenocysteine
  MOD_RES (463)..(463): Selenocysteine
  MOD_RES (488)..(488): Selenocysteine
  MOD_RES (527)..(527): Selenocysteine
  MOD_RES (671)..(671): Selenocysteine
  MOD_RES (701)..(701): Selenocysteine
  MOD_RES (704)..(705): Selenocysteine
  MOD_RES (712)..(713): Selenocysteine
  MOD_RES (715)..(716): Selenocysteine
  MOD_RES (742)..(742): Selenocysteine
  MOD_RES (784)..(784): Selenocysteine
  MOD_RES (808)..(808): Selenocysteine
  MOD_RES (810)..(810): Selenocysteine
  MOD_RES (814)..(814): Selenocysteine
  MOD_RES (845)..(845): Selenocysteine
  MOD_RES (874)..(874): Selenocysteine
SYLXLDEPMNNIXXSLGQXAELHCKVSGNPPPXIRWFKNDAPVVQEPRRLSFRSXIYGSRLRIRNLDXXDXGYFQCVAXNGKEVVSSXGVLFVKFGPPPXASPGYSDEYEEDGFCQPYRGIACARFIGNRXVYMESLHMQGEIENQIXAAFXMIGXSSHLSDKCSQFAIPSLCHYAFPYCDEXSSVPKPRDLCRDECEILENVLCQXEYIFARSNPMILMRLKLPNCEDLPQPESPEAANCIRIGIPMADPINKNHKCYNSXGVDYRGXVSVXKSGRQCQPWNSQYPHXHXFXALRFPELNGGHSYCRNPGNQKEAPWCFXLDENFKSDLCDIPACDSKDSKEKNKMEILYILVPSVAIPLAIALLFFFICVCRNNQKSSSAPVQRQPKHVRGQNVEMSMLNAYKPKSKAKELPLSAVRFMEELGECAFGKIYKGHLYLPGMDHAQLVAIKXLKDYNNPQQWXEFQQEASLMAELHHPNIVCLLGAVXQEQPVCMLFEYINQGDLHEFLIMRSPHSDVGCSSDEDGXVKSSLDHGDFLHIAIQIAAGMEYLSSHFFVHKDLAARNILIGEQLHVKISDLGLSREIYSADYYRVQSKSLLPIRWMPPEAIMYGKFSSDSDIWSFGVVLWEIFSFGLQPYYGFSNQEVIEMVRKRQLLPCSEDCPPRMYSLMXECWNEIPSRRPRFKDIHVRLRSWEGLSSHXSSXXPSGGNAXXQXXSLSASPVSNLSNPRYPNYMFPSQGIXPQGQIAGFIGPPIPQNQRFIPINGYPIPPGYAAFPAAHYQPXGPPRVIQHCPPPKSRSPSSASGSXSXGHVXSLPSSGSNQEANIPLLPHMSIPNHPGGMGIXVFGNKSQKPYKIDSKQASLLGDANIHGHXESMISAEL

SEQ ID NO: 23859 - protein, 943 aa, Homo sapiens
  MOD_RES (31)..(31): Selenocysteine
  MOD_RES (56)..(56): Selenocysteine
  MOD_RES (72)..(72): Selenocysteine
  MOD_RES (78)..(78): Selenocysteine
  MOD_RES (114)..(114): Selenocysteine
  MOD_RES (127)..(128): Selenocysteine
  MOD_RES (130)..(130): Selenocysteine
  MOD_RES (138)..(138): Selenocysteine
  MOD_RES (143)..(143): Selenocysteine
  MOD_RES (145)..(145): Selenocysteine
  MOD_RES (147)..(147): Selenocysteine
  MOD_RES (157)..(157): Selenocysteine
  MOD_RES (190)..(190): Selenocysteine
  MOD_RES (207)..(207): Selenocysteine
  MOD_RES (211)..(211): Selenocysteine
  MOD_RES (215)..(215): Selenocysteine
  MOD_RES (217)..(217): Selenocysteine
  MOD_RES (245)..(245): Selenocysteine
  MOD_RES (269)..(269): Selenocysteine
  MOD_RES (327)..(327): Selenocysteine
  MOD_RES (330)..(331): Selenocysteine
  MOD_RES (353)..(353): Selenocysteine
  MOD_RES (379)..(379): Selenocysteine
  MOD_RES (438)..(438): Selenocysteine
  MOD_RES (501)..(501): Selenocysteine
  MOD_RES (508)..(508): Selenocysteine
  MOD_RES (544)..(544): Selenocysteine
  MOD_RES (577)..(577): Selenocysteine
  MOD_RES (582)..(582): Selenocysteine
  MOD_RES (618)..(618): Selenocysteine
  MOD_RES (761)..(761): Selenocysteine
  MOD_RES (767)..(768): Selenocysteine
  MOD_RES (770)..(770): Selenocysteine
  MOD_RES (775)..(775): Selenocysteine
  MOD_RES (869)..(869): Selenocysteine
  MOD_RES (871)..(871): Selenocysteine
  MOD_RES (875)..(876): Selenocysteine
  MOD_RES (881)..(881): Selenocysteine
  MOD_RES (897)..(897): Selenocysteine
  MOD_RES (908)..(908): Selenocysteine
  MOD_RES (923)..(923): Selenocysteine
  MOD_RES (931)..(931): Selenocysteine
MARGSALPRRPLLCIPAVWAAAALLLSVSRXSGEVEVLDPNDPLGPLDGQDGPIPXLKGYFLNFLEPVNNIXIVQGQXAILHCKVAGNPPPNVRWLKNDAPVVQEPRRIIIRKXEYGSRLRIQDLDXXDXGYYQCVAXNGMKXIXAXGVLFVRLGPXHSPNHNFQDDYHEDGFCQPYRGIACARFIGNRXIYVDSLQMQGEIENRIXAAFXMIGXSXHLSDQCSQFAIPSFCHFVFPLCDARSRXPKPRELCRDECEVLESDLCRQEYXIARSNPLILMRLQLPKCEALPMPESPDAANCMRIGIPAERLGRYHQCYNGSGMDYRGXASXXKSGHQCQPWALQHPHSHHLSSXDFPELGGGHAYCRNPGGQMEGPWCFXQNKNVRMELCDVPSCSPRDSSKMGILYILVPSIAIPLVIACLFFLVCMCRNKQKASASXPQRRQLMASPSQDMEMPLINQHKQAKLKEISLSAVRFMEELGEDRFGKVYKGHLFGPAPGEQXQAVAIKXLKDKAEGPLREEFRHEAMLRARLQHPNVVCLLGVVXKDQPLSMIFSYCSHGDLHEFLVMRSPHSDVGSXDDDRXVKSALEPPDFVHLVAQIAAGMEYLSSHHVVHKDLAXRNVLVYDKLNVKISDLGLFREVYAADYYKLLGNSLLPIRWMAPEAIMYGKFSIDSDIWSYGVVLWEVFSYGLQPYCGYSNQDVVEMIRNRQVLPCPDDCPAWVYALMIECWNEFPSRRPRFKDIHSRLRAWGNLSNYNSSAQXSGASNXXQXSSLSXSPVSNVSNARYVGPKQKAPPFPQPQFIPMKGQIRPMVPPPQLYVPVNGYQPVPAYGAYLPNFYPVQIPMQMAPQQVPPQMVPKPSSHHSGSGSXSXGYVXXAPSNXSMADRAALLSEGADDXQNAPEDGAQSXVQEAEEEEEGSVPEXELLGDCDXLQVDEAQVQLEA

SEQ ID NO: 23860 - protein, 704 aa, Homo sapiens
  MOD_RES (3)..(3): Selenocysteine
  MOD_RES (5)..(5): Selenocysteine
  MOD_RES (7)..(7): Selenocysteine
  MOD_RES (17)..(17): Selenocysteine
  MOD_RES (50)..(50): Selenocysteine
  MOD_RES (67)..(67): Selenocysteine
  MOD_RES (71)..(71): Selenocysteine
  MOD_RES (75)..(75): Selenocysteine
  MOD_RES (77)..(77): Selenocysteine
  MOD_RES (105)..(105): Selenocysteine
  MOD_RES (129)..(129): Selenocysteine
  MOD_RES (187)..(187): Selenocysteine
  MOD_RES (190)..(191): Selenocysteine
  MOD_RES (213)..(213): Selenocysteine
  MOD_RES (239)..(239): Selenocysteine
  MOD_RES (298)..(298): Selenocysteine
  MOD_RES (361)..(361): Selenocysteine
  MOD_RES (368)..(368): Selenocysteine
  MOD_RES (404)..(404): Selenocysteine
  MOD_RES (437)..(437): Selenocysteine
  MOD_RES (442)..(442): Selenocysteine
  MOD_RES (478)..(478): Selenocysteine
  MOD_RES (621)..(621): Selenocysteine
  MOD_RES (627)..(628): Selenocysteine
  MOD_RES (630)..(630): Selenocysteine
  MOD_RES (635)..(635): Selenocysteine
  MOD_RES (654)..(654): Selenocysteine
  MOD_RES (656)..(656): Selenocysteine
  MOD_RES (685)..(685): Selenocysteine
  MOD_RES (701)..(701): Selenocysteine
  MOD_RES (703)..(703): Selenocysteine
MKXIXAXGVLFVRLGPXHSPNHNFQDDYHEDGFCQPYRGIACARFIGNRXIYVDSLQMQGEIENRIXAAFXMIGXSXHLSDQCSQFAIPSFCHFVFPLCDARSRXPKPRELCRDECEVLESDLCRQEYXIARSNPLILMRLQLPKCEALPMPESPDAANCMRIGIPAERLGRYHQCYNGSGMDYRGXASXXKSGHQCQPWALQHPHSHHLSSXDFPELGGGHAYCRNPGGQMEGPWCFXQNKNVRMELCDVPSCSPRDSSKMGILYILVPSIAIPLVIACLFFLVCMCRNKQKASASXPQRRQLMASPSQDMEMPLINQHKQAKLKEISLSAVRFMEELGEDRFGKVYKGHLFGPAPGEQXQAVAIKXLKDKAEGPLREEFRHEAMLRARLQHPNVVCLLGVVXKDQPLSMIFSYCSHGDLHEFLVMRSPHSDVGSXDDDRXVKSALEPPDFVHLVAQIAAGMEYLSSHHVVHKDLAXRNVLVYDKLNVKISDLGLFREVYAADYYKLLGNSLLPIRWMAPEAIMYGKFSIDSDIWSYGVVLWEVFSYGLQPYCGYSNQDVVEMIRNRQVLPCPDDCPAWVYALMIECWNEFPSRRPRFKDIHSRLRAWGNLSNYNSSAQXSGASNXXQXSSLSXSPVSNVVRMRGSGRQCWMXEXPNALLWHNVSGVGSCRWVRGLADFKDEAXDFRVMPRDPSLHCHVXSXA

SEQ ID NO: 23861 - protein, 38 aa, Homo sapiens
  MOD_RES (8)..(8): Selenocysteine
  MOD_RES (32)..(32): Selenocysteine
AAAGSREXPLNQESARKSEPPAPVRRQSYSSXSRDWHA

SEQ ID NO: 23862 - protein, 523 aa, Homo sapiens
  MOD_RES (29)..(29): Selenocysteine
  MOD_RES (53)..(53): Selenocysteine
  MOD_RES (60)..(60): Selenocysteine
  MOD_RES (63)..(63): Selenocysteine
  MOD_RES (65)..(65): Selenocysteine
  MOD_RES (89)..(89): Selenocysteine
  MOD_RES (106)..(106): Selenocysteine
  MOD_RES (120)..(120): Selenocysteine
  MOD_RES (183)..(183): Selenocysteine
  MOD_RES (185)..(185): Selenocysteine
  MOD_RES (194)..(194): Selenocysteine
  MOD_RES (208)..(208): Selenocysteine
  MOD_RES (248)..(248): Selenocysteine
  MOD_RES (260)..(260): Selenocysteine
  MOD_RES (264)..(264): Selenocysteine
  MOD_RES (267)..(267): Selenocysteine
  MOD_RES (287)..(287): Selenocysteine
  MOD_RES (299)..(299): Selenocysteine
  MOD_RES (302)..(302): Selenocysteine
  MOD_RES (328)..(328): Selenocysteine
  MOD_RES (378)..(378): Selenocysteine
  MOD_RES (416)..(416): Selenocysteine
  MOD_RES (468)..(468): Selenocysteine
  MOD_RES (476)..(476): Selenocysteine
  MOD_RES (485)..(485): Selenocysteine
  MOD_RES (512)..(512): Selenocysteine
MESAPAAPDPAASEPGSSGADAAAGSREXPLNQESARKSEPPAPVRRQSYSSXSRGISVXKKXHXSQIEIIPCKICGDKSSGIHYGVIXCEGCKGFFRRSQQSNAXYSCPRQKNCLIDRXSRNRCQHCRLQKCLAVGMSRDAVKFGRMSKKQRDSLYAEVQKHRMQQQQRDHQQQPGEAEPLXPXYNISANGLXELHDDLSNYIDGHXPEGSKADSAVSSFYLDIQPSPDQSGLDINGIKPEPICDYXPASGFFPYCSFXNGEXSPXVSMAELEHLAQNISKSHLEXCQYLREELQQIXWQXFLQEEIENYQNKQREVMWQLCAIKIXEAIQYVVEFAKRIDGFMELCQNDQIVLLKAGSLEVVFIRMCRAFDSQNNXVYFDGKYASPDVFKSLGCEDFISFVFEFGKSLCSMHLXEDEIALFSAFVLMSADRSWLQEKVKIEKLQQKIQLALQHVLQKNHREDGILXKLICKVSXLRALCGRHXEKLMAFKAIYPDIVRLHFPPLYKELFXSEFEPAMQIDG

SEQ ID NO: 23863 - protein, 468 aa, Homo sapiens
  MOD_RES (34)..(34): Selenocysteine
  MOD_RES (51)..(51): Selenocysteine
  MOD_RES (65)..(65): Selenocysteine
  MOD_RES (128)..(128): Selenocysteine
  MOD_RES (130)..(130): Selenocysteine
  MOD_RES (139)..(139): Selenocysteine
  MOD_RES (153)..(153): Selenocysteine
  MOD_RES (193)..(193): Selenocysteine
  MOD_RES (205)..(205): Selenocysteine
  MOD_RES (209)..(209): Selenocysteine
  MOD_RES (212)..(212): Selenocysteine
  MOD_RES (232)..(232): Selenocysteine
  MOD_RES (244)..(244): Selenocysteine
  MOD_RES (247)..(247): Selenocysteine
  MOD_RES (273)..(273): Selenocysteine
  MOD_RES (323)..(323): Selenocysteine
  MOD_RES (361)..(361): Selenocysteine
  MOD_RES (413)..(413): Selenocysteine
  MOD_RES (421)..(421): Selenocysteine
  MOD_RES (430)..(430): Selenocysteine
  MOD_RES (457)..(457): Selenocysteine
MMYFVIAAMKAQIEIIPCKICGDKSSGIHYGVIXCEGCKGFFRRSQQSNAXYSCPRQKNCLIDRXSRNRCQHCRLQKCLAVGMSRDAVKFGRMSKKQRDSLYAEVQKHRMQQQQRDHQQQPGEAEPLXPXYNISANGLXELHDDLSNYIDGHXPEGSKADSAVSSFYLDIQPSPDQSGLDINGIKPEPICDYXPASGFFPYCSFXNGEXSPXVSMAELEHLAQNISKSHLEXCQYLREELQQIXWQXFLQEEIENYQNKQREVMWQLCAIKIXEAIQYVVEFAKRIDGFMELCQNDQIVLLKAGSLEVVFIRMCRAFDSQNNXVYFDGKYASPDVFKSLGCEDFISFVFEFGKSLCSMHLXEDEIALFSAFVLMSADRSWLQEKVKIEKLQQKIQLALQHVLQKNHREDGILXKLICKVSXLRALCGRHXEKLMAFKAIYPDIVRLHFPPLYKELFXSEFEPAMQIDG

SEQ ID NO: 23864 - protein, 556 aa, Homo sapiens
  MOD_RES (13)..(13): Selenocysteine
  MOD_RES (28)..(28): Selenocysteine
  MOD_RES (36)..(36): Selenocysteine
  MOD_RES (38)..(38): Selenocysteine
  MOD_RES (70)..(70): Selenocysteine
  MOD_RES (94)..(94): Selenocysteine
  MOD_RES (122)..(122): Selenocysteine
  MOD_RES (139)..(139): Selenocysteine
  MOD_RES (153)..(153): Selenocysteine
  MOD_RES (216)..(216): Selenocysteine
  MOD_RES (218)..(218): Selenocysteine
  MOD_RES (227)..(227): Selenocysteine
  MOD_RES (241)..(241): Selenocysteine
  MOD_RES (281)..(281): Selenocysteine
  MOD_RES (293)..(293): Selenocysteine
  MOD_RES (297)..(297): Selenocysteine
  MOD_RES (300)..(300): Selenocysteine
  MOD_RES (320)..(320): Selenocysteine
  MOD_RES (332)..(332): Selenocysteine
  MOD_RES (335)..(335): Selenocysteine
  MOD_RES (361)..(361): Selenocysteine
  MOD_RES (411)..(411): Selenocysteine
  MOD_RES (449)..(449): Selenocysteine
  MOD_RES (501)..(501): Selenocysteine
  MOD_RES (509)..(509): Selenocysteine
  MOD_RES (518)..(518): Selenocysteine
  MOD_RES (545)..(545): Selenocysteine
MNEGAPGDSDLEXEARVPWSIMGHCLRXGQARMSAXPXPAGEGARRDELFGILQILHQCILSSGDAFVLXGVCCSWRQNGKPPYSQKEDKEVQXGYMNAQIEIIPCKICGDKSSGIHYGVIXCEGCKGFFRRSQQSNAXYSCPRQKNCLIDRXSRNRCQHCRLQKCLAVGMSRDAVKFGRMSKKQRDSLYAEVQKHRMQQQQRDHQQQPGEAEPLXPXYNISANGLXELHDDLSNYIDGHXPEGSKADSAVSSFYLDIQPSPDQSGLDINGIKPEPICDYXPASGFFPYCSFXNGEXSPXVSMAELEHLAQNISKSHLEXCQYLREELQQIXWQXFLQEEIENYQNKQREVMWQLCAIKIXEAIQYVVEFAKRIDGFMELCQNDQIVLLKAGSLEVVFIRMCRAFDSQNNXVYFDGKYASPDVFKSLGCEDFISFVFEFGKSLCSMHLXEDEIALFSAFVLMSADRSWLQEKVKIEKLQQKIQLALQHVLQKNHREDGILXKLICKVSXLRALCGRHXEKLMAFKAIYPDIVRLHFPPLYKELFXSEFEPAMQIDG

SEQ ID NO: 23865 - protein, 548 aa, Homo sapiens
  MOD_RES (13)..(13): Selenocysteine
  MOD_RES (28)..(28): Selenocysteine
  MOD_RES (36)..(36): Selenocysteine
  MOD_RES (38)..(38): Selenocysteine
  MOD_RES (49)..(49): Selenocysteine
  MOD_RES (70)..(70): Selenocysteine
  MOD_RES (114)..(114): Selenocysteine
  MOD_RES (131)..(131): Selenocysteine
  MOD_RES (145)..(145): Selenocysteine
  MOD_RES (208)..(208): Selenocysteine
  MOD_RES (210)..(210): Selenocysteine
  MOD_RES (219)..(219): Selenocysteine
  MOD_RES (233)..(233): Selenocysteine
  MOD_RES (273)..(273): Selenocysteine
  MOD_RES (285)..(285): Selenocysteine
  MOD_RES (289)..(289): Selenocysteine
  MOD_RES (292)..(292): Selenocysteine
  MOD_RES (312)..(312): Selenocysteine
  MOD_RES (324)..(324): Selenocysteine
  MOD_RES (327)..(327): Selenocysteine
  MOD_RES (353)..(353): Selenocysteine
  MOD_RES (403)..(403): Selenocysteine
  MOD_RES (441)..(441): Selenocysteine
  MOD_RES (493)..(493): Selenocysteine
  MOD_RES (501)..(501): Selenocysteine
  MOD_RES (510)..(510): Selenocysteine
  MOD_RES (537)..(537): Selenocysteine
MNEGAPGDSDLEXEARVPWSIMGHCLRXGQARMSAXPXPAGEGARSSSXCSSLSRLFWSQLEHINWDGAXAKNFINLREFFSFLLPALRKAQIEIIPCKICGDKSSGIHYGVIXCEGCKGFFRRSQQSNAXYSCPRQKNCLIDRXSRNRCQHCRLQKCLAVGMSRDAVKFGRMSKKQRDSLYAEVQKHRMQQQQRDHQQQPGEAEPLXPXYNISANGLXELHDDLSNYIDGHXPEGSKADSAVSSFYLDIQPSPDQSGLDINGIKPEPICDYXPASGFFPYCSFXNGEXSPXVSMAELEHLAQNISKSHLEXCQYLREELQQIXWQXFLQEEIENYQNKQREVMWQLCAIKIXEAIQYVVEFAKRIDGFMELCQNDQIVLLKAGSLEVVFIRMCRAFDSQNNXVYFDGKYASPDVFKSLGCEDFISFVFEFGKSLCSMHLXEDEIALFSAFVLMSADRSWLQEKVKIEKLQQKIQLALQHVLQKNHREDGILXKLICKVSXLRALCGRHXEKLMAFKAIYPDIVRLHFPPLYKELFXSEFEPAMQIDG

SEQ ID NO: 23866 - protein, 153 aa, Homo sapiens
  MOD_RES (4)..(4): Selenocysteine
  MOD_RES (9)..(9): Selenocysteine
  MOD_RES (15)..(15): Selenocysteine
  MOD_RES (43)..(43): Selenocysteine
  MOD_RES (67)..(67): Selenocysteine
  MOD_RES (91)..(91): Selenocysteine
  MOD_RES (108)..(108): Selenocysteine
  MOD_RES (122)..(122): Selenocysteine
MRVXVAPQXKPVFSXNELAHLSPPSAPASQRESGVGLRASCPXEWGQKVVRGAFRGALRAEKRPAAXAQIEIIPCKICGDKSSGIHYGVIXCEGCKGFFRRSQQSNAXYSCPRQKNCLIDRXSRNRCQHCRLQKCLAVGMSRDAVKFGRMSKK

SEQ ID NO: 23867 - protein, 62 aa, Homo sapiens
  MOD_RES (1)..(1): Any amino acid
  MOD_RES (25)..(25): Selenocysteine
  MOD_RES (32)..(32): Selenocysteine
  MOD_RES (35)..(35): Selenocysteine
  MOD_RES (37)..(37): Selenocysteine
  MOD_RES (48)..(48): Selenocysteine
XPLNQESARKSEPPAPVRRQSYSSXSRGISVXKKXHXWQAWYRALPCXALPMSSSLARRDPL

SEQ ID NO: 23868 - protein, 470 aa, Homo sapiens
  MOD_RES (8)..(8): Selenocysteine
  MOD_RES (13)..(13): Selenocysteine
  MOD_RES (37)..(37): Selenocysteine
  MOD_RES (68)..(68): Selenocysteine
  MOD_RES (148)..(148): Selenocysteine
  MOD_RES (151)..(151): Selenocysteine
  MOD_RES (184)..(184): Selenocysteine
  MOD_RES (198)..(198): Selenocysteine
  MOD_RES (205)..(205): Selenocysteine
  MOD_RES (219)..(219): Selenocysteine
  MOD_RES (221)..(221): Selenocysteine
  MOD_RES (237)..(237): Selenocysteine
  MOD_RES (241)..(241): Selenocysteine
  MOD_RES (252)..(252): Selenocysteine
  MOD_RES (254)..(254): Selenocysteine
  MOD_RES (278)..(278): Selenocysteine
  MOD_RES (292)..(292): Selenocysteine
  MOD_RES (328)..(328): Selenocysteine
  MOD_RES (366)..(366): Selenocysteine
  MOD_RES (416)..(416): Selenocysteine
  MOD_RES (426)..(426): Selenocysteine
  MOD_RES (428)..(428): Selenocysteine
  MOD_RES (451)..(451): Selenocysteine
  MOD_RES (467)..(467): Selenocysteine
MCENQLKXKADAXAQIEVIPCKICGDKSSGIHYGVIXCEGCKGFFRRSQQNNASYSCPRQRNCLIDRXNRNRCQHCRLQKCLALGMSRDAVKFGRMSKKQRDSLYAEVQKHQQRLQEQRQQQSGEAEALARVYSSSISNGLSNLNNEXSGXYANGHVIDLPKSEGYYNVDSGQPSPDQSGLDMXGIKQIKQEPIYDLXSVPNLFXYSSFNNGQLAPGIXMXEIDRIAQNIIKSHLEXCQYXMEELHQLAWQXHXYEEIKAYQSKSREALWQQCAIQIXHAIQYVVEFAKRIXGFMELCQNDQILLLKSGCLEVVLVRMCRAFNPLNNXVLFEGKYGGMQMFKALGSDDLVNEAFDFAKNLCSLQLXEEEIALFSSAVLISPDRAWLIEPRKVQKLQEKIYFALQHVIQKNHLDDEXLAKLIAKIPXIXAVCNLHGEKLQVFKQSHPEIVNXLFPPLYKELFNPDCAXGCK

SEQ ID NO: 23869 - protein, 459 aa, Homo sapiens
  MOD_RES (26)..(26): Selenocysteine
  MOD_RES (57)..(57): Selenocysteine
  MOD_RES (137)..(137): Selenocysteine
  MOD_RES (140)..(140): Selenocysteine
  MOD_RES (173)..(173): Selenocysteine
  MOD_RES (187)..(187): Selenocysteine
  MOD_RES (194)..(194): Selenocysteine
  MOD_RES (208)..(208): Selenocysteine
  MOD_RES (210)..(210): Selenocysteine
  MOD_RES (226)..(226): Selenocysteine
  MOD_RES (230)..(230): Selenocysteine
  MOD_RES (241)..(241): Selenocysteine
  MOD_RES (243)..(243): Selenocysteine
  MOD_RES (267)..(267): Selenocysteine
  MOD_RES (281)..(281): Selenocysteine
  MOD_RES (317)..(317): Selenocysteine
  MOD_RES (355)..(355): Selenocysteine
  MOD_RES (405)..(405): Selenocysteine
  MOD_RES (415)..(415): Selenocysteine
  MOD_RES (417)..(417): Selenocysteine
  MOD_RES (440)..(440): Selenocysteine
  MOD_RES (456)..(456): Selenocysteine
MRAQIEVIPCKICGDKSSGIHYGVIXCEGCKGFFRRSQQNNASYSCPRQRNCLIDRXNRNRCQHCRLQKCLALGMSRDAVKFGRMSKKQRDSLYAEVQKHQQRLQEQRQQQSGEAEALARVYSSSISNGLSNLNNEXSGXYANGHVIDLPKSEGYYNVDSGQPSPDQSGLDMXGIKQIKQEPIYDLXSVPNLFXYSSFNNGQLAPGIXMXEIDRIAQNIIKSHLEXCQYXMEELHQLAWQXHXYEEIKAYQSKSREALWQQCAIQIXHAIQYVVEFAKRIXGFMELCQNDQILLLKSGCLEVVLVRMCRAFNPLNNXVLFEGKYGGMQMFKALGSDDLVNEAFDFAKNLCSLQLXEEEIALFSSAVLISPDRAWLIEPRKVQKLQEKIYFALQHVIQKNHLDDEXLAKLIAKIPXIXAVCNLHGEKLQVFKQSHPEIVNXLFPPLYKELFNPDCAXGCK

SEQ ID NO: 23870 - protein, 518 aa, Homo sapiens
  MOD_RES (21)..(21): Selenocysteine
  MOD_RES (23)..(23): Selenocysteine
  MOD_RES (47)..(47): Selenocysteine
  MOD_RES (68)..(68): Selenocysteine
  MOD_RES (78)..(78): Selenocysteine
  MOD_RES (136)..(136): Selenocysteine
  MOD_RES (146)..(146): Selenocysteine
  MOD_RES (148)..(148): Selenocysteine
  MOD_RES (150)..(150): Selenocysteine
  MOD_RES (220)..(220): Selenocysteine
  MOD_RES (225)..(225): Selenocysteine
  MOD_RES (259)..(259): Selenocysteine
  MOD_RES (268)..(268): Selenocysteine
  MOD_RES (284)..(284): Selenocysteine
  MOD_RES (306)..(306): Selenocysteine
  MOD_RES (325)..(325): Selenocysteine
  MOD_RES (375)..(375): Selenocysteine
  MOD_RES (421)..(421): Selenocysteine
  MOD_RES (457)..(457): Selenocysteine
  MOD_RES (508)..(508): Selenocysteine
  MOD_RES (510)..(510): Selenocysteine
MDRAPQRQHRASRELLAAKKXHXSQIEVIPCKICGDKSSGIHYGVIXCEGCKGFFRRSQRCNAAYSCXRQQNCPIDRXSRNRCQHCRLQKCLALGMSRDAVKFGRMSKKQRDSLHAEVQKQLQQRQQQQQEPVVKXPPAGAQGADXLXYXLGLPDGQLPLGSSPDLPEASACPPGLLKASGSGPSYSNNLAKAGLNGASCHLEYSPERGKAEGRESFYSXGSQLXPDRCGLRFEEHRHPGLGELGQGPDSYGSPSFRSXPEAPYASLXEIEHLVQSVCKSYREXCQLRLEDLLRQRSNIFSREEVXGYQRKSMWEMWERCAHHLXEAIQYVVEFAKRLSGFMELCQNDQIVLLKAGAMEVVLVRMCRAYNADNRXVFFEGKYGGMELFRALGCSELISSIFDFSHSLSALHFSEDEIALYXALVLINAHRPGLQEKRKVEQLQYNLELAFHHHLCKXHRQSILAKLPPKGKLRSLCSQHVERLQIFQHLHPIVVQAAFPPLYKELFSXEXESPVGLSK

SEQ ID NO: 23871 - protein, 497 aa, Homo sapiens
  MOD_RES (3)..(3): Selenocysteine
  MOD_RES (26)..(26): Selenocysteine
  MOD_RES (47)..(47): Selenocysteine
  MOD_RES (57)..(57): Selenocysteine
  MOD_RES (115)..(115): Selenocysteine
  MOD_RES (125)..(125): Selenocysteine
  MOD_RES (127)..(127): Selenocysteine
  MOD_RES (129)..(129): Selenocysteine
  MOD_RES (199)..(199): Selenocysteine
  MOD_RES (204)..(204): Selenocysteine
  MOD_RES (238)..(238): Selenocysteine
  MOD_RES (247)..(247): Selenocysteine
  MOD_RES (263)..(263): Selenocysteine
  MOD_RES (285)..(285): Selenocysteine
  MOD_RES (304)..(304): Selenocysteine
  MOD_RES (354)..(354): Selenocysteine
  MOD_RES (400)..(400): Selenocysteine
  MOD_RES (436)..(436): Selenocysteine
  MOD_RES (487)..(487): Selenocysteine
  MOD_RES (489)..(489): Selenocysteine
MRXQIEVIPCKICGDKSSGIHYGVIXCEGCKGFFRRSQRCNAAYSCXRQQNCPIDRXSRNRCQHCRLQKCLALGMSRDAVKFGRMSKKQRDSLHAEVQKQLQQRQQQQQEPVVKXPPAGAQGADXLXYXLGLPDGQLPLGSSPDLPEASACPPGLLKASGSGPSYSNNLAKAGLNGASCHLEYSPERGKAEGRESFYSXGSQLXPDRCGLRFEEHRHPGLGELGQGPDSYGSPSFRSXPEAPYASLXEIEHLVQSVCKSYREXCQLRLEDLLRQRSNIFSREEVXGYQRKSMWEMWERCAHHLXEAIQYVVEFAKRLSGFMELCQNDQIVLLKAGAMEVVLVRMCRAYNADNRXVFFEGKYGGMELFRALGCSELISSIFDFSHSLSALHFSEDEIALYXALVLINAHRPGLQEKRKVEQLQYNLELAFHHHLCKXHRQSILAKLPPKGKLRSLCSQHVERLQIFQHLHPIVVQAAFPPLYKELFSXEXESPVGLSK

SEQ ID NO: 23872 - protein, 2341 aa, Homo sapiens
  MOD_RES (16)..(16): Selenocysteine
  MOD_RES (28)..(28): Selenocysteine
  MOD_RES (39)..(39): Selenocysteine
  MOD_RES (49)..(49): Selenocysteine
  MOD_RES (79)..(79): Selenocysteine
  MOD_RES (82)..(82): Selenocysteine
  MOD_RES (112)..(112): Selenocysteine
  MOD_RES (125)..(125): Selenocysteine
  MOD_RES (152)..(152): Selenocysteine
  MOD_RES (154)..(154): Selenocysteine
  MOD_RES (156)..(156): Selenocysteine
  MOD_RES (171)..(171): Selenocysteine
  MOD_RES (182)..(182): Selenocysteine
  MOD_RES (197)..(197): Selenocysteine
  MOD_RES (205)..(205): Selenocysteine
  MOD_RES (219)..(219): Selenocysteine
  MOD_RES (252)..(252): Selenocysteine
  MOD_RES (255)..(255): Selenocysteine
  MOD_RES (262)..(262): Selenocysteine
  MOD_RES (266)..(266): Selenocysteine
  MOD_RES (289)..(290): Selenocysteine
  MOD_RES (308)..(308): Selenocysteine
  MOD_RES (335)..(335): Selenocysteine
  MOD_RES (352)..(352): Selenocysteine
  MOD_RES (413)..(413): Selenocysteine
  MOD_RES (463)..(463): Selenocysteine
  MOD_RES (482)..(482): Selenocysteine
  MOD_RES (489)..(489): Selenocysteine
  MOD_RES (521)..(521): Selenocysteine
  MOD_RES (604)..(604): Selenocysteine
  MOD_RES (611)..(611): Selenocysteine
  MOD_RES (618)..(618): Selenocysteine
  MOD_RES (627)..(627): Selenocysteine
  MOD_RES (662)..(663): Selenocysteine
  MOD_RES (717)..(717): Selenocysteine
  MOD_RES (729)..(729): Selenocysteine
  MOD_RES (761)..(761): Selenocysteine
  MOD_RES (771)..(771): Selenocysteine
  MOD_RES (774)..(774): Selenocysteine
  MOD_RES (778)..(778): Selenocysteine
  MOD_RES (799)..(800): Selenocysteine
  MOD_RES (807)..(807): Selenocysteine
  MOD_RES (819)..(819): Selenocysteine
  MOD_RES (832)..(832): Selenocysteine
  MOD_RES (854)..(854): Selenocysteine
  MOD_RES (862)..(862): Selenocysteine
  MOD_RES (865)..(866): Selenocysteine
  MOD_RES (868)..(868): Selenocysteine
  MOD_RES (875)..(875): Selenocysteine
  MOD_RES (900)..(901): Selenocysteine
  MOD_RES (908)..(908): Selenocysteine
  MOD_RES (922)..(922): Selenocysteine
  MOD_RES (926)..(926): Selenocysteine
  MOD_RES (938)..(938): Selenocysteine
  MOD_RES (999)..(999): Selenocysteine
  MOD_RES (1014)..(1014): Selenocysteine
  MOD_RES (1017)..(1017): Selenocysteine
  MOD_RES (1025)..(1025): Selenocysteine
  MOD_RES (1034)..(1034): Selenocysteine
  MOD_RES (1075)..(1075): Selenocysteine
  MOD_RES (1089)..(1089): Selenocysteine
  MOD_RES (1092)..(1092): Selenocysteine
  MOD_RES (1102)..(1102): Selenocysteine
  MOD_RES (1127)..(1127): Selenocysteine
  MOD_RES (1141)..(1142): Selenocysteine
  MOD_RES (1153)..(1153): Selenocysteine
  MOD_RES (1172)..(1172): Selenocysteine
  MOD_RES (1185)..(1185): Selenocysteine
  MOD_RES (1222)..(1222): Selenocysteine
  MOD_RES (1225)..(1225): Selenocysteine
  MOD_RES (1269)..(1269): Selenocysteine
  MOD_RES (1285)..(1285): Selenocysteine
  MOD_RES (1303)..(1303): Selenocysteine
  MOD_RES (1311)..(1311): Selenocysteine
  MOD_RES (1313)..(1313): Selenocysteine
  MOD_RES (1327)..(1327): Selenocysteine
  MOD_RES (1339)..(1339): Selenocysteine
  MOD_RES (1370)..(1370): Selenocysteine
  MOD_RES (1378)..(1378): Selenocysteine
  MOD_RES (1383)..(1383): Selenocysteine
  MOD_RES (1394)..(1394): Selenocysteine
  MOD_RES (1399)..(1399): Selenocysteine
  MOD_RES (1445)..(1445): Selenocysteine
  MOD_RES (1449)..(1449): Selenocysteine
  MOD_RES (1454)..(1454): Selenocysteine
  MOD_RES (1456)..(1456): Selenocysteine
  MOD_RES (1459)..(1459): Selenocysteine
  MOD_RES (1467)..(1467): Selenocysteine
  MOD_RES (1470)..(1470): Selenocysteine
  MOD_RES (1475)..(1475): Selenocysteine
  MOD_RES (1478)..(1478): Selenocysteine
  MOD_RES (1480)..(1480): Selenocysteine
  MOD_RES (1519)..(1519): Selenocysteine
  MOD_RES (1547)..(1547): Selenocysteine
  MOD_RES (1560)..(1561): Selenocysteine
  MOD_RES (1566)..(1566): Selenocysteine
  MOD_RES (1600)..(1600): Selenocysteine
  MOD_RES (1613)..(1613): Selenocysteine
  MOD_RES (1617)..(1617): Selenocysteine
  MOD_RES (1640)..(1640): Selenocysteine
  MOD_RES (1646)..(1646): Selenocysteine
  MOD_RES (1652)..(1652): Selenocysteine
  MOD_RES (1664)..(1664): Selenocysteine
  MOD_RES (1698)..(1698): Selenocysteine
  MOD_RES (1711)..(1711): Selenocysteine
  MOD_RES (1717)..(1717): Selenocysteine
  MOD_RES (1729)..(1729): Selenocysteine
  MOD_RES (1734)..(1734): Selenocysteine
  MOD_RES (1742)..(1742): Selenocysteine
  MOD_RES (1776)..(1776): Selenocysteine
  MOD_RES (1786)..(1786): Selenocysteine
  MOD_RES (1800)..(1800): Selenocysteine
  MOD_RES (1810)..(1810): Selenocysteine
  MOD_RES (1854)..(1854): Selenocysteine
  MOD_RES (1859)..(1859): Selenocysteine
  MOD_RES (1869)..(1869): Selenocysteine
  MOD_RES (1873)..(1873): Selenocysteine
  MOD_RES (1891)..(1891): Selenocysteine
  MOD_RES (1921)..(1921): Selenocysteine
  MOD_RES (1924)..(1924): Selenocysteine
  MOD_RES (1940)..(1940): Selenocysteine
  MOD_RES (1957)..(1957): Selenocysteine
  MOD_RES (1975)..(1975): Selenocysteine
  MOD_RES (1981)..(1981): Selenocysteine
  MOD_RES (2030)..(2030): Selenocysteine
  MOD_RES (2039)..(2039): Selenocysteine
  MOD_RES (2046)..(2046): Selenocysteine
  MOD_RES (2087)..(2087): Selenocysteine
  MOD_RES (2133)..(2134): Selenocysteine
  MOD_RES (2150)..(2150): Selenocysteine
  MOD_RES (2170)..(2170): Selenocysteine
  MOD_RES (2189)..(2189): Selenocysteine
  MOD_RES (2201)..(2201): Selenocysteine
  MOD_RES (2260)..(2260): Selenocysteine
  MOD_RES (2273)..(2273): Selenocysteine
  MOD_RES (2332)..(2332): Selenocysteine
MKNIYCLIPKLVNFAXLGCLWISVVQCXVLNSCLKSCVXNLGQQLDLGXPHNLSEPCIQGCHFWNSVDQKNCALKCNDXYAXVCERESCEVGCSSAEGAYEEEVLENADLPXAPFASSIGSHNMXLRWKSANFSGVKYIIQWKYAQLLGSWXYXKXVSRPSYVVKPLHPFXEYIFRVVWIFXAQLQLYSPPSPSYRXHPHGVPEXAPLIRNIESSSPDXVEVSWDPPQFPGGPILGYNLRLISKNQKLDAGXQRXSFQFYSXLPNXIYRFSIAAVNEVGEGPEAESSIXXSSSAVQQEEQWLFLSRKXSLRKRSLKHLVDEAHCLRLDAIYHNIXGISVDVHQQIVYFSEGXLIWAKKAANMSDVSDLRIFYRGSGLISSISIDWLYQRMYFIMDELVCVCDLENCSNIEEIXPPSISAPQKIVADSYNGYVFYLLRDGIYRADLPVPSGRCAEAVRIVESCXLKDFAIKPQAKRIIYFNDXAQVFMSXFLDGSASHLILPRIPFADVKSFACENNDFLVXDGKVIFQQDALSFNEFIVGCDLSHIEEFGFGNLVIFGSSSQLHPLPGRPQELSVLFGSHQALVQWKPPALAIGASPSAWQNWXYEVKVSXQDPPEVXHIFLNISGXMLNVPELQSAMKYKVSVRASSPKRPGPWSEPSVGXXLVPASEPPFIMAVKEDGLWSKPLNSFGPGEFLSSDIGNVSDMDWYNNSLYYSDXKGDVFVWLLNGXDISENYHLPSIAGAGALAFEWLGHFLYWAGKXYVIQRQSVLXGHXDIVXHVKLLVNDMVVDSVGGYLYWXXLYSVESXRLNGESSLVLQXQPWFSGKKVIALXLDLSDGLLYWLVQDSQCIHLYXAVLRGQSXGDXXIXEFAAWSXSEISQNALMYYSGRLFWINGFRIIXXQEIGQKXSVSVLEPARFNQFXIIQXSLKPLPGNFSFXPKVIPDSVQESSFRIEGNASSFQILWNGPPAVDWGVVFYSVEFSAHSKFLASEQHSLPVFXVEGLEPYALFNLSVXPYXYWGKGPKXSLSLRAPEXVPSAPENPRIFILPSGKCCNKNEVVVEFRWNKPKHENGVLXKFEIFYNISNQSIXNKXCEDWIAVNVXPSVMSFQLEGMSPRCFIAFQVRAFXSKGPGPYADVVKSXXSEINPFPHLIXLLGNKIVFLDMDQNQVVWXFSAERVISAVCYXADNEMGYYAEGDSLFLLHLHNRSSSELFQDSLVFDIXVIXIDWISRHLYFALKESQNGMQVFDVDLEHKVKYPREVKIHNRNSXIISFSVYPLLSRLYWXEVSNFGYQMFYYSIISHXLHRILQPXAXNQQNKRNQCSCNVXEFELSGAMAIDXSNLEKPLIYFAKAQEIWAMDLEGCQCWRVIXVPAMLGKXLVSLXVDGDLIYWIIXAKDSXQIYQAKKGNGAIVSQVKALRSRHILAYSSVMQPFPDKAFLSLASDXVEPXILNAXNXSLXIRLPLAKXNLXWYGIXSPXPXYLVYYAEVNDRKNSSDLKYRILEFQDSIALIEDLQPFSXYMIQIAVKNYYSDPLEHLPPGKEIWGKXKNGVPEAVQLINXXVRSDXSLIISWRESHKPNGPKESVRYQLAISHLALIPEXPLRQSEFPNGRLXLLVXRLSGGNIYVLKVLACHSEEMWCXESHPVXVEMFNXPEKPYSLVPENXSLQFNWKAPLNVNLIRFWVELQKWKYNEFYHVKXSCSQGPAYVCNIXNLQPYXSYNVRVVVVYKXGENSXSLPESFKXKAGVPNKPGIPKLLEGSKNSIQWEKAEDNGCRIXYYILEIRKSXSNNLQNQNLRWKMXFNGSCSSVCXWKSKNLKGIFQFRVVAANNLGFGEYSGISENIILVGDDFWIPEXSFILXIIVGIFLVVXIPLXFVWHRRLKNQKSAKEGVXVLINEDKELAELRGLAAGVGLANACYAIHXLPXQEEIENLPAFPREKLXLRLLLGSGAFGEVYEGXAVDILGVGSGEIKVAVKXLKKGSXDQEKIEFLKEAHLMSKFNHPNILKQLGVCLLNEPQYIILELMEGGDLLXYLRKARMAXFYGPLLXLVDLVDLCVDISKGCVYLERMHFIHRDLAARNCLVSVKDYXSPRIVKIGDFGLARDIYKNDYYRKRGEGLLPVRWMAPESLMDGIFXXQSDVWSFGILIWEILXLGHQPYPAHSNLDVLNYVQXGGRLEPPRNCPDDLWNLMXQCWAQEPDQRPXFHRIQDQLQLFRNFFLNSIYKSRDEANNSGVINESFEGEDGDVICLNSDDIMPVALMEXKNREGLNYMVLAXECGQGEEKSEGPLGSQESESCGLRKEEKEPHADKDFCQEKQVAYCPSGKPEGLNYACLXHSGYGDGSD

SEQ ID NO: 23873 - protein, 2347 aa, Homo sapiens
  MOD_RES (16)..(16): Selenocysteine
  MOD_RES (28)..(28): Selenocysteine
  MOD_RES (39)..(39): Selenocysteine
  MOD_RES (49)..(49): Selenocysteine
  MOD_RES (103)..(103): Selenocysteine
  MOD_RES (116)..(116): Selenocysteine
  MOD_RES (143)..(143): Selenocysteine
  MOD_RES (145)..(145): Selenocysteine
  MOD_RES (147)..(147): Selenocysteine
  MOD_RES (162)..(162): Selenocysteine
  MOD_RES (173)..(173): Selenocysteine
  MOD_RES (188)..(188): Selenocysteine
  MOD_RES (196)..(196): Selenocysteine
  MOD_RES (210)..(210): Selenocysteine
  MOD_RES (243)..(243): Selenocysteine
  MOD_RES (246)..(246): Selenocysteine
  MOD_RES (253)..(253): Selenocysteine
  MOD_RES (257)..(257): Selenocysteine
  MOD_RES (280)..(281): Selenocysteine
  MOD_RES (299)..(299): Selenocysteine
  MOD_RES (326)..(326): Selenocysteine
  MOD_RES (343)..(343): Selenocysteine
  MOD_RES (404)..(404): Selenocysteine
  MOD_RES (454)..(454): Selenocysteine
  MOD_RES (473)..(473): Selenocysteine
  MOD_RES (480)..(480): Selenocysteine
  MOD_RES (512)..(512): Selenocysteine
  MOD_RES (609)..(609): Selenocysteine
  MOD_RES (616)..(616): Selenocysteine
  MOD_RES (623)..(623): Selenocysteine
  MOD_RES (632)..(632): Selenocysteine
  MOD_RES (667)..(668): Selenocysteine
  MOD_RES (722)..(722): Selenocysteine
  MOD_RES (734)..(734): Selenocysteine
  MOD_RES (766)..(766): Selenocysteine
  MOD_RES (776)..(776): Selenocysteine
  MOD_RES (779)..(779): Selenocysteine
  MOD_RES (783)..(783): Selenocysteine
  MOD_RES (804)..(805): Selenocysteine
  MOD_RES (812)..(812): Selenocysteine
  MOD_RES (824)..(824): Selenocysteine
  MOD_RES (837)..(837): Selenocysteine
  MOD_RES (859)..(859): Selenocysteine
  MOD_RES (867)..(867): Selenocysteine
  MOD_RES (870)..(871): Selenocysteine
  MOD_RES (873)..(873): Selenocysteine
  MOD_RES (880)..(880): Selenocysteine
  MOD_RES (905)..(906): Selenocysteine
  MOD_RES (913)..(913): Selenocysteine
  MOD_RES (927)..(927): Selenocysteine
  MOD_RES (931)..(931): Selenocysteine
  MOD_RES (943)..(943): Selenocysteine
  MOD_RES (1004)..(1004): Selenocysteine
  MOD_RES (1019)..(1019): Selenocysteine
  MOD_RES (1022)..(1022): Selenocysteine
  MOD_RES (1030)..(1030): Selenocysteine
  MOD_RES (1039)..(1039): Selenocysteine
  MOD_RES (1080)..(1080): Selenocysteine
  MOD_RES (1094)..(1094): Selenocysteine
  MOD_RES (1097)..(1097): Selenocysteine
  MOD_RES (1107)..(1107): Selenocysteine
  MOD_RES (1132)..(1132): Selenocysteine
  MOD_RES (1146)..(1147): Selenocysteine
  MOD_RES (1158)..(1158): Selenocysteine
  MOD_RES (1177)..(1177): Selenocysteine
  MOD_RES (1190)..(1190): Selenocysteine
  MOD_RES (1227)..(1227): Selenocysteine
  MOD_RES (1230)..(1230): Selenocysteine
  MOD_RES (1274)..(1274): Selenocysteine
  MOD_RES (1290)..(1290): Selenocysteine
  MOD_RES (1308)..(1308): Selenocysteine
  MOD_RES (1316)..(1316): Selenocysteine
  MOD_RES (1318)..(1318): Selenocysteine
  MOD_RES (1332)..(1332): Selenocysteine
  MOD_RES (1344)..(1344): Selenocysteine
  MOD_RES (1375)..(1375): Selenocysteine
  MOD_RES (1384)..(1384): Selenocysteine
  MOD_RES (1389)..(1389): Selenocysteine
  MOD_RES (1400)..(1400): Selenocysteine
  MOD_RES (1405)..(1405): Selenocysteine
  MOD_RES (1451)..(1451): Selenocysteine
  MOD_RES (1455)..(1455): Selenocysteine
  MOD_RES (1460)..(1460): Selenocysteine
  MOD_RES (1462)..(1462): Selenocysteine
  MOD_RES (1465)..(1465): Selenocysteine
  MOD_RES (1473)..(1473): Selenocysteine
  MOD_RES (1476)..(1476): Selenocysteine
  MOD_RES (1481)..(1481): Selenocysteine
  MOD_RES (1484)..(1484): Selenocysteine
  MOD_RES (1486)..(1486): Selenocysteine
  MOD_RES (1525)..(1525): Selenocysteine
  MOD_RES (1553)..(1553): Selenocysteine
  MOD_RES (1566)..(1567): Selenocysteine
  MOD_RES (1572)..(1572): Selenocysteine
  MOD_RES (1606)..(1606): Selenocysteine
  MOD_RES (1619)..(1619): Selenocysteine
  MOD_RES (1623)..(1623): Selenocysteine
  MOD_RES (1646)..(1646): Selenocysteine
  MOD_RES (1652)..(1652): Selenocysteine
  MOD_RES (1658)..(1658): Selenocysteine
  MOD_RES (1670)..(1670): Selenocysteine
  MOD_RES (1704)..(1704): Selenocysteine
  MOD_RES (1717)..(1717): Selenocysteine
  MOD_RES (1723)..(1723): Selenocysteine
  MOD_RES (1735)..(1735): Selenocysteine
  MOD_RES (1740)..(1740): Selenocysteine
  MOD_RES (1748)..(1748): Selenocysteine
  MOD_RES (1782)..(1782): Selenocysteine
  MOD_RES (1792)..(1792): Selenocysteine
  MOD_RES (1806)..(1806): Selenocysteine
  MOD_RES (1816)..(1816): Selenocysteine
  MOD_RES (1860)..(1860): Selenocysteine
  MOD_RES (1865)..(1865): Selenocysteine
  MOD_RES (1875)..(1875): Selenocysteine
  MOD_RES (1879)..(1879): Selenocysteine
  MOD_RES (1897)..(1897): Selenocysteine
  MOD_RES (1927)..(1927): Selenocysteine
  MOD_RES (1930)..(1930): Selenocysteine
  MOD_RES (1946)..(1946): Selenocysteine
  MOD_RES (1963)..(1963): Selenocysteine
  MOD_RES (1981)..(1981): Selenocysteine
  MOD_RES (1987)..(1987): Selenocysteine
  MOD_RES (2036)..(2036): Selenocysteine
  MOD_RES (2045)..(2045): Selenocysteine
  MOD_RES (2052)..(2052): Selenocysteine
  MOD_RES (2093)..(2093): Selenocysteine
  MOD_RES (2139)..(2140): Selenocysteine
  MOD_RES (2156)..(2156): Selenocysteine
  MOD_RES (2176)..(2176): Selenocysteine
  MOD_RES (2195)..(2195): Selenocysteine
  MOD_RES (2207)..(2207): Selenocysteine
  MOD_RES (2266)..(2266): Selenocysteine
  MOD_RES (2279)..(2279): Selenocysteine
  MOD_RES (2338)..(2338): Selenocysteine
MKNIYCLIPKLVNFAXLGCLWISVVQCXVLNSCLKSCVXNLGQQLDLGXPHNLSEPCIQGCHFWNSVDQKNCALKCRESCEVGCSSAEGAYEEEVLENADLPXAPFASSIGSHNMXLRWKSANFSGVKYIIQWKYAQLLGSWXYXKXVSRPSYVVKPLHPFXEYIFRVVWIFXAQLQLYSPPSPSYRXHPHGVPEXAPLIRNIESSSPDXVEVSWDPPQFPGGPILGYNLRLISKNQKLDAGXQRXSFQFYSXLPNXIYRFSIAAVNEVGEGPEAESSIXXSSSAVQQEEQWLFLSRKXSLRKRSLKHLVDEAHCLRLDAIYHNIXGISVDVHQQIVYFSEGXLIWAKKAANMSDVSDLRIFYRGSGLISSISIDWLYQRMYFIMDELVCVCDLENCSNIEEIXPPSISAPQKIVADSYNGYVFYLLRDGIYRADLPVPSGRCAEAVRIVESCXLKDFAIKPQAKRIIYFNDXAQVFMSXFLDGSASHLILPRIPFADVKSFACENNDFLVXDGKVIFQQDALSFNEFIVGCDLSHIEEFGFGNLVIFGSSSQLHPLPGRPQELSVLFGSHQALVQWKPPALAIGANVILISDIIELFELGPSAWQNWXYEVKVSXQDPPEVXHIFLNISGXMLNVPELQSAMKYKVSVRASSPKRPGPWSEPSVGXXLVPASEPPFIMAVKEDGLWSKPLNSFGPGEFLSSDIGNVSDMDWYNNSLYYSDXKGDVFVWLLNGXDISENYHLPSIAGAGALAFEWLGHFLYWAGKXYVIQRQSVLXGHXDIVXHVKLLVNDMVVDSVGGYLYWXXLYSVESXRLNGESSLVLQXQPWFSGKKVIALXLDLSDGLLYWLVQDSQCIHLYXAVLRGQSXGDXXIXEFAAWSXSEISQNALMYYSGRLFWINGFRIIXXQEIGQKXSVSVLEPARFNQFXIIQXSLKPLPGNFSFXPKVIPDSVQESSFRIEGNASSFQILWNGPPAVDWGVVFYSVEFSAHSKFLASEQHSLPVFXVEGLEPYALFNLSVXPYXYWGKGPKXSLSLRAPEXVPSAPENPRIFILPSGKCCNKNEVVVEFRWNKPKHENGVLXKFEIFYNISNQSIXNKXCEDWIAVNVXPSVMSFQLEGMSPRCFIAFQVRAFXSKGPGPYADVVKSXXSEINPFPHLIXLLGNKIVFLDMDQNQVVWXFSAERVISAVCYXADNEMGYYAEGDSLFLLHLHNRSSSELFQDSLVFDIXVIXIDWISRHLYFALKESQNGMQVFDVDLEHKVKYPREVKIHNRNSXIISFSVYPLLSRLYWXEVSNFGYQMFYYSIISHXLHRILQPXAXNQQNKRNQCSCNVXEFELSGAMAIDXSNLEKPLIYFAKAQEIWAMDLEGCQCWRVIXVPAMLAGKXLVSLXVDGDLIYWIIXAKDSXQIYQAKKGNGAIVSQVKALRSRHILAYSSVMQPFPDKAFLSLASDXVEPXILNAXNXSLXIRLPLAKXNLXWYGIXSPXPXYLVYYAEVNDRKNSSDLKYRILEFQDSIALIEDLQPFSXYMIQIAVKNYYSDPLEHLPPGKEIWGKXKNGVPEAVQLINXXVRSDXSLIISWRESHKPNGPKESVRYQLAISHLALIPEXPLRQSEFPNGRLXLLVXRLSGGNIYVLKVLACHSEEMWCXESHPVXVEMFNXPEKPYSLVPENXSLQFNWKAPLNVNLIRFWVELQKWKYNEFYHVKXSCSQGPAYVCNIXNLQPYXSYNVRVVVVYKXGENSXSLPESFKXKAGVPNKPGIPKLLEGSKNSIQWEKAEDNGCRIXYYILEIRKSXSNNLQNQNLRWKMXFNGSCSSVCXWKSKNLKGIFQFRVVAANNLGFGEYSGISENIILVGDDFWIPEXSFILXIIVGIFLVVXIPLXFVWHRRLKNQKSAKEGVXVLINEDKELAELRGLAAGVGLANACYAIHXLPXQEEIENLPAFPREKLXLRLLLGSGAFGEVYEGXAVDILGVGSGEIKVAVKXLKKGSXDQEKIEFLKEAHLMSKFNHPNILKQLGVCLLNEPQYIILELMEGGDLLXYLRKARMAXFYGPLLXLVDLVDLCVDISKGCVYLERMHFIHRDLAARNCLVSVKDYXSPRIVKIGDFGLARDIYKNDYYRKRGEGLLPVRWMAPESLMDGIFXXQSDVWSFGILIWEILXLGHQPYPAHSNLDVLNYVQXGGRLEPPRNCPDDLWNLMXQCWAQEPDQRPXFHRIQDQLQLFRNFFLNSIYKSRDEANNSGVINESFEGEDGDVICLNSDDIMPVALMEXKNREGLNYMVLAXECGQGEEKSEGPLGSQESESCGLRKEEKEPHADKDFCQEKQVAYCPSGKPEGLNYACLXHSGYGDGSD

SEQ ID NO: 23874 - protein, 97 aa, Homo sapiens
  MOD_RES (11)..(11): Selenocysteine
  MOD_RES (24)..(24): Selenocysteine
  MOD_RES (30)..(30): Selenocysteine
  MOD_RES (42)..(42): Selenocysteine
  MOD_RES (47)..(47): Selenocysteine
  MOD_RES (55)..(55): Selenocysteine
  MOD_RES (89)..(89): Selenocysteine
WKYNEFYHVKXSCSQGPAYVCNIXNLQPYXSYNVRVVVVYKXGENSXSLPESFKXKAGVPNKPGIPKLLEGSKNSIQWEKAEDNGCRIXYYILEIRD

SEQ ID NO: 23875 - protein, 1106 aa, Homo sapiens
  MOD_RES (4)..(4): Selenocysteine
  MOD_RES (7)..(7): Selenocysteine
  MOD_RES (15)..(15): Selenocysteine
  MOD_RES (30)..(30): Selenocysteine
  MOD_RES (85)..(85): Selenocysteine
  MOD_RES (93)..(93): Selenocysteine
  MOD_RES (166)..(166): Selenocysteine
  MOD_RES (177)..(177): Selenocysteine
  MOD_RES (188)..(188): Selenocysteine
  MOD_RES (201)..(201): Selenocysteine
  MOD_RES (272)..(272): Selenocysteine
  MOD_RES (280)..(280): Selenocysteine
  MOD_RES (303)..(303): Selenocysteine
  MOD_RES (317)..(317): Selenocysteine
  MOD_RES (319)..(319): Selenocysteine
  MOD_RES (334)..(334): Selenocysteine
  MOD_RES (392)..(392): Selenocysteine
  MOD_RES (400)..(400): Selenocysteine
  MOD_RES (408)..(408): Selenocysteine
  MOD_RES (423)..(423): Selenocysteine
  MOD_RES (442)..(442): Selenocysteine
  MOD_RES (444)..(444): Selenocysteine
  MOD_RES (482)..(483): Selenocysteine
  MOD_RES (529)..(529): Selenocysteine
  MOD_RES (531)..(531): Selenocysteine
  MOD_RES (538)..(538): Selenocysteine
  MOD_RES (542)..(542): Selenocysteine
  MOD_RES (550)..(550): Selenocysteine
  MOD_RES (561)..(561): Selenocysteine
  MOD_RES (569)..(569): Selenocysteine
  MOD_RES (605)..(605): Selenocysteine
  MOD_RES (613)..(614): Selenocysteine
  MOD_RES (637)..(637): Selenocysteine
  MOD_RES (679)..(679): Selenocysteine
  MOD_RES (694)..(694): Selenocysteine
  MOD_RES (737)..(737): Selenocysteine
  MOD_RES (739)..(739): Selenocysteine
  MOD_RES (762)..(762): Selenocysteine
  MOD_RES (783)..(783): Selenocysteine
  MOD_RES (808)..(808): Selenocysteine
  MOD_RES (839)..(839): Selenocysteine
  MOD_RES (851)..(851): Selenocysteine
  MOD_RES (864)..(864): Selenocysteine
  MOD_RES (867)..(867): Selenocysteine
  MOD_RES (869)..(869): Selenocysteine
  MOD_RES (874)..(874): Selenocysteine
  MOD_RES (884)..(884): Selenocysteine
  MOD_RES (913)..(913): Selenocysteine
  MOD_RES (926)..(926): Selenocysteine
  MOD_RES (938)..(938): Selenocysteine
  MOD_RES (990)..(990): Selenocysteine
  MOD_RES (998)..(998): Selenocysteine
  MOD_RES (1073)..(1074): Selenocysteine
  MOD_RES (1080)..(1080): Selenocysteine
MSDXPSXGFSIIHPXSSEGQVPPPRHLSLXHPVVAKRISFYKSGDPQFGGVRVVVNPRSFKSFDALLDNLSRKVPLPFGVRNISXPRGRHSIXRLEELEDGESYLCSHGRKVQPVDLDKARRRPRPWLSSRAISAHSPPHPVAVAAPGMPRPPRSLVVFRNGDPKXRRAVLLSRRVXQSFEAFLQHLXEVMQRPVVKLYAXDGRRVPSLQAVILSSGAVVAAGREPFKPGNYDIQKYLLPARLPGISQRVYPKGNAKSESRKSSNWKVFIIXSDLPDAGXSSQIYIILYGQHRSSAPIYLYGXDGARFQVGHEDIFXIXVGDIGALFKIRIGHXNSGSSPSWHCKEIQLHNMNSGKQFYVPVQRWLARDQEDGEICREFPLLSKGQPVLPVXIYEVNVAXGELWNAGXVANVYISIHGEKGDXGSRQLFRSKSSFNFLRGQXDXFFLEAVHLGDLCKIVIGHDGLGPGNGWFLDDVVIKDPXXNYEYAFFCHRWLDQGEDDCKIVRELYARDNSIFSARQKLELKRKEXWXAESWKFXKGNXLQFYNKLXGGFVRLHPDGXVDAIGEKXDKYGVFDVIFNKRNICIFQSHEMRHLSLALDNGIVXGMVSGEAXXELRVLYQPNRCALLESALVPGHXVVFDRHGKIADASSAGYANLSKEFVIFVKGVFLNSAVVLLAXSLCQALCLQPDGSCXGVGSQSEKSYWKVHKISSGICMFESVKNAQMYLRIKDGRCDGXGXGDVDCHFKIKKNLKNASISLESXKSPGLFVGLQSDGQAKPMIYXKDENVCFYPQVIQFGRENPMGMSAXPSQEEEKIHESKKQKKIPPESEARSPLPSSXAKEIRHFQSSEXLLSEDEWKVLVLXGNXGXQANVXLWVYGDKGVXGPISLRKDSSEQLFLPGHEDEFQVEIRNXGNIYKIRIGHDGXSEQPEWNLQRVXMQHMKSKKILDFAANVWLSRIQADGDVVCELPVVKGGQAIFPLVRYQVDVYXGQLKHAEXESEVFLCLFGERGDSGLRQLYKSNMQVKFQRGQIDKFQVAAVSLGKLQKVLLRCEASDKSQYWYCEQVIVREPGXXSESIFXCQRWLPFMSQGIIHSEIELYLQGEDY

SEQ ID NO: 23876 - protein, 1416 aa, Homo sapiens
  MOD_RES (4)..(4): Selenocysteine
  MOD_RES (7)..(7): Selenocysteine
  MOD_RES (15)..(15): Selenocysteine
  MOD_RES (30)..(30): Selenocysteine
  MOD_RES (85)..(85): Selenocysteine
  MOD_RES (93)..(93): Selenocysteine
  MOD_RES (166)..(166): Selenocysteine
  MOD_RES (177)..(177): Selenocysteine
  MOD_RES (188)..(188): Selenocysteine
  MOD_RES (201)..(201): Selenocysteine
  MOD_RES (272)..(272): Selenocysteine
  MOD_RES (280)..(280): Selenocysteine
  MOD_RES (303)..(303): Selenocysteine
  MOD_RES (317)..(317): Selenocysteine
  MOD_RES (319)..(319): Selenocysteine
  MOD_RES (334)..(334): Selenocysteine
  MOD_RES (392)..(392): Selenocysteine
  MOD_RES (400)..(400): Selenocysteine
  MOD_RES (408)..(408): Selenocysteine
  MOD_RES (423)..(423): Selenocysteine
  MOD_RES (442)..(442): Selenocysteine
  MOD_RES (444)..(444): Selenocysteine
  MOD_RES (482)..(483): Selenocysteine
  MOD_RES (525)..(525): Selenocysteine
  MOD_RES (540)..(540): Selenocysteine
  MOD_RES (562)..(562): Selenocysteine
  MOD_RES (564)..(564): Selenocysteine
  MOD_RES (571)..(571): Selenocysteine
  MOD_RES (575)..(575): Selenocysteine
  MOD_RES (583)..(583): Selenocysteine
  MOD_RES (594)..(594): Selenocysteine
  MOD_RES (602)..(602): Selenocysteine
  MOD_RES (638)..(638): Selenocysteine
  MOD_RES (646)..(647): Selenocysteine
  MOD_RES (670)..(670): Selenocysteine
  MOD_RES (712)..(712): Selenocysteine
  MOD_RES (727)..(727): Selenocysteine
  MOD_RES (770)..(770): Selenocysteine
  MOD_RES (772)..(772): Selenocysteine
  MOD_RES (795)..(795): Selenocysteine
  MOD_RES (816)..(816): Selenocysteine
  MOD_RES (841)..(841): Selenocysteine
  MOD_RES (872)..(872): Selenocysteine
  MOD_RES (884)..(884): Selenocysteine
  MOD_RES (897)..(897): Selenocysteine
  MOD_RES (900)..(900): Selenocysteine
  MOD_RES (902)..(902): Selenocysteine
  MOD_RES (907)..(907): Selenocysteine
  MOD_RES (917)..(917): Selenocysteine
  MOD_RES (946)..(946): Selenocysteine
  MOD_RES (959)..(959): Selenocysteine
  MOD_RES (971)..(971): Selenocysteine
  MOD_RES (1023)..(1023): Selenocysteine
  MOD_RES (1031)..(1031): Selenocysteine
  MOD_RES (1106)..(1107): Selenocysteine
  MOD_RES (1113)..(1113): Selenocysteine
  MOD_RES (1157)..(1157): Selenocysteine
  MOD_RES (1160)..(1160): Selenocysteine
  MOD_RES (1168)..(1169): Selenocysteine
  MOD_RES (1171)..(1171): Selenocysteine
  MOD_RES (1180)..(1180): Selenocysteine
  MOD_RES (1200)..(1200): Selenocysteine
  MOD_RES (1224)..(1224): Selenocysteine
  MOD_RES (1242)..(1242): Selenocysteine
  MOD_RES (1288)..(1288): Selenocysteine
  MOD_RES (1290)..(1290): Selenocysteine
  MOD_RES (1292)..(1292): Selenocysteine
  MOD_RES (1296)..(1296): Selenocysteine
  MOD_RES (1307)..(1307): Selenocysteine
  MOD_RES (1354)..(1354): Selenocysteine
  MOD_RES (1395)..(1395): Selenocysteine
  MOD_RES (1411)..(1411): Selenocysteine
  MOD_RES (1414)..(1414): Selenocysteine
MSDXPSXGFSIIHPXSSEGQVPPPRHLSLXHPVVAKRISFYKSGDPQFGGVRVVVNPRSFKSFDALLDNLSRKVPLPFGVRNISXPRGRHSIXRLEELEDGESYLCSHGRKVQPVDLDKARRRPRPWLSSRAISAHSPPHPVAVAAPGMPRPPRSLVVFRNGDPKXRRAVLLSRRVXQSFEAFLQHLXEVMQRPVVKLYAXDGRRVPSLQAVILSSGAVVAAGREPFKPGNYDIQKYLLPARLPGISQRVYPKGNAKSESRKSSNWKVFIIXSDLPDAGXSSQIYIILYGQHRSSAPIYLYGXDGARFQVGHEDIFXIXVGDIGALFKIRIGHXNSGSSPSWHCKEIQLHNMNSGKQFYVPVQRWLARDQEDGEICREFPLLSKGQPVLPVXIYEVNVAXGELWNAGXVANVYISIHGEKGDXGSRQLFRSKSSFNFLRGQXDXFFLEAVHLGDLCKIVIGHDGLGPGNGWFLDDVVIKDPXXNYEYAFFCHRWLDQGEDDCKIVRELYARDNSIFSASRYHVYXFPGKLFYDDWRKHDXSEINCPLFIFSGQKLELKRKEXWXAESWKFXKGNXLQFYNKLXGGFVRLHPDGXVDAIGEKXDKYGVFDVIFNKRNICIFQSHEMRHLSLALDNGIVXGMVSGEAXXELRVLYQPNRCALLESALVPGHXVVFDRHGKIADASSAGYANLSKEFVIFVKGVFLNSAVVLLAXSLCQALCLQPDGSCXGVGSQSEKSYWKVHKISSGICMFESVKNAQMYLRIKDGRCDGXGXGDVDCHFKIKKNLKNASISLESXKSPGLFVGLQSDGQAKPMIYXKDENVCFYPQVIQFGRENPMGMSAXPSQEEEKIHESKKQKKIPPESEARSPLPSSXAKEIRHFQSSEXLLSEDEWKVLVLXGNXGXQANVXLWVYGDKGVXGPISLRKDSSEQLFLPGHEDEFQVEIRNXGNIYKIRIGHDGXSEQPEWNLQRVXMQHMKSKKILDFAANVWLSRIQADGDVVCELPVVKGGQAIFPLVRYQVDVYXGQLKHAEXESEVFLCLFGERGDSGLRQLYKSNMQVKFQRGQIDKFQVAAVSLGKLQKVLLRCEASDKSQYWYCEQVIVREPGXXSESIFXCQRWLPFMSQGIIHSEIELYLQEMQINHQPKIQEEANDGDWKVXIVXGDLENAGXXAXVFLYVYGEXKCSGPIILGSGKHQLFNPNXADIFKINLKDIGEIYKIRIGHDNXGKNPRWYLEEVRLENIAXYELFCLPVDSWIAENENDGDLWKEIPIMGPKKAPLPVVLYEIRIYXGXMXGAEXESNVFINLIGXRGDSGKRRLHQSKNNEIKFQRGQVDIFSIKAVSLGKLKKVLISHDGXGPGNGWFLGSIVVKSEDEDSSEEVLFLCNRWLDEYQDDGKXQRELLAESSPSAVGEXGSXIS

SEQ ID NO: 23877 - protein, 2156 aa, Homo sapiens
  MOD_RES (4)..(4): Selenocysteine
  MOD_RES (7)..(7): Selenocysteine
  MOD_RES (15)..(15): Selenocysteine
  MOD_RES (30)..(30): Selenocysteine
  MOD_RES (85)..(85): Selenocysteine
  MOD_RES (93)..(93): Selenocysteine
  MOD_RES (166)..(166): Selenocysteine
  MOD_RES (177)..(177): Selenocysteine
  MOD_RES (188)..(188): Selenocysteine
  MOD_RES (201)..(201): Selenocysteine
  MOD_RES (265)..(265): Selenocysteine
  MOD_RES (283)..(283): Selenocysteine
  MOD_RES (330)..(330): Selenocysteine
  MOD_RES (332)..(332): Selenocysteine
  MOD_RES (346)..(346): Selenocysteine
  MOD_RES (350)..(352): Selenocysteine
  MOD_RES (356)..(356): Selenocysteine
  MOD_RES (373)..(373): Selenocysteine
  MOD_RES (413)..(413): Selenocysteine
  MOD_RES (419)..(419): Selenocysteine
  MOD_RES (429)..(429): Selenocysteine
  MOD_RES (432)..(432): Selenocysteine
  MOD_RES (438)..(438): Selenocysteine
  MOD_RES (451)..(451): Selenocysteine
  MOD_RES (468)..(468): Selenocysteine
  MOD_RES (473)..(473): Selenocysteine
  MOD_RES (502)..(502): Selenocysteine
  MOD_RES (553)..(553): Selenocysteine
  MOD_RES (569)..(569): Selenocysteine
  MOD_RES (590)..(590): Selenocysteine
  MOD_RES (597)..(597): Selenocysteine
  MOD_RES (601)..(601): Selenocysteine
  MOD_RES (613)..(613): Selenocysteine
  MOD_RES (622)..(622): Selenocysteine
  MOD_RES (637)..(637): Selenocysteine
  MOD_RES (639)..(639): Selenocysteine
  MOD_RES (655)..(655): Selenocysteine
  MOD_RES (692)..(692): Selenocysteine
  MOD_RES (704)..(704): Selenocysteine
  MOD_RES (709)..(709): Selenocysteine
  MOD_RES (736)..(736): Selenocysteine
  MOD_RES (742)..(742): Selenocysteine
  MOD_RES (752)..(752): Selenocysteine
  MOD_RES (764)..(765): Selenocysteine
  MOD_RES (775)..(775): Selenocysteine
  MOD_RES (813)..(813): Selenocysteine
  MOD_RES (860)..(860): Selenocysteine
  MOD_RES (865)..(865): Selenocysteine
  MOD_RES (889)..(890): Selenocysteine
  MOD_RES (928)..(928): Selenocysteine
  MOD_RES (942)..(942): Selenocysteine
  MOD_RES (959)..(959): Selenocysteine
  MOD_RES (976)..(976): Selenocysteine
  MOD_RES (982)..(982): Selenocysteine
  MOD_RES (999)..(999): Selenocysteine
  MOD_RES (1007)..(1007): Selenocysteine
  MOD_RES (1025)..(1025): Selenocysteine
  MOD_RES (1036)..(1036): Selenocysteine
  MOD_RES (1078)..(1078): Selenocysteine
  MOD_RES (1101)..(1101): Selenocysteine
  MOD_RES (1126)..(1126): Selenocysteine
  MOD_RES (1154)..(1154): Selenocysteine
  MOD_RES (1160)..(1160): Selenocysteine
  MOD_RES (1173)..(1173): Selenocysteine
  MOD_RES (1190)..(1191): Selenocysteine
  MOD_RES (1214)..(1214): Selenocysteine
  MOD_RES (1229)..(1229): Selenocysteine
  MOD_RES (1255)..(1255): Selenocysteine
  MOD_RES (1263)..(1263): Selenocysteine
  MOD_RES (1273)..(1273): Selenocysteine
  MOD_RES (1279)..(1279): Selenocysteine
  MOD_RES (1291)..(1291): Selenocysteine
  MOD_RES (1306)..(1306): Selenocysteine
  MOD_RES (1308)..(1308): Selenocysteine
  MOD_RES (1322)..(1322): Selenocysteine
  MOD_RES (1332)..(1332): Selenocysteine
  MOD_RES (1341)..(1341): Selenocysteine
  MOD_RES (1351)..(1351): Selenocysteine
  MOD_RES (1353)..(1353): Selenocysteine
  MOD_RES (1359)..(1359): Selenocysteine
  MOD_RES (1376)..(1376): Selenocysteine
  MOD_RES (1386)..(1386): Selenocysteine
  MOD_RES (1435)..(1435): Selenocysteine
  MOD_RES (1444)..(1444): Selenocysteine
  MOD_RES (1452)..(1452): Selenocysteine
  MOD_RES (1456)..(1456): Selenocysteine
  MOD_RES (1476)..(1476): Selenocysteine
  MOD_RES (1481)..(1481): Selenocysteine
  MOD_RES (1490)..(1490): Selenocysteine
  MOD_RES (1503)..(1503): Selenocysteine
  MOD_RES (1534)..(1534): Selenocysteine
  MOD_RES (1552)..(1552): Selenocysteine
  MOD_RES (1557)..(1557): Selenocysteine
  MOD_RES (1566)..(1566): Selenocysteine
  MOD_RES (1569)..(1569): Selenocysteine
  MOD_RES (1588)..(1588): Selenocysteine
  MOD_RES (1606)..(1606): Selenocysteine
  MOD_RES (1618)..(1618): Selenocysteine
  MOD_RES (1651)..(1651): Selenocysteine
  MOD_RES (1723)..(1723): Selenocysteine
  MOD_RES (1733)..(1733): Selenocysteine
  MOD_RES (1769)..(1770): Selenocysteine
  MOD_RES (1774)..(1774): Selenocysteine
  MOD_RES (1796)..(1796): Selenocysteine
  MOD_RES (1809)..(1809): Selenocysteine
  MOD_RES (1841)..(1841): Selenocysteine
  MOD_RES (1852)..(1852): Selenocysteine
  MOD_RES (1865)..(1865): Selenocysteine
  MOD_RES (1868)..(1868): Selenocysteine
  MOD_RES (1900)..(1900): Selenocysteine
  MOD_RES (1922)..(1922): Selenocysteine
  MOD_RES (1962)..(1962): Selenocysteine
  MOD_RES (1997)..(1997): Selenocysteine
  MOD_RES (2039)..(2039): Selenocysteine
  MOD_RES (2051)..(2051): Selenocysteine
  MOD_RES (2058)..(2058): Selenocysteine
  MOD_RES (2081)..(2081): Selenocysteine
  MOD_RES (2113)..(2113): Selenocysteine
  MOD_RES (2145)..(2145): Selenocysteine
MSDXPSXGFSIIHPXSSEGQVPPPRHLSLXHPVVAKRISFYKSGDPQFGGVRVVVNPRSFKSFDALLDNLSRKVPLPFGVRNISXPRGRHSIXRLEELEDGESYLCSHGRKVQPVDLDKARRRPRPWLSSRAISAHSPPHPVAVAAPGMPRPPRSLVVFRNGDPKXRRAVLLSRRVXQSFEAFLQHLXEVMQRPVVKLYAXDGRRVPSLQAVILSSGAVVAAGREPFKPGNYDIQKYLLPARLPGISQRVYPKGNAKSESRKISXHMSSSSRSQIYSVSSEKXHNNDCYLDYSFVPEKYLALEKNDSQNLPIYPSEDDIEKSIIFNQDGXMXVEMKVRFRIKEEEXIKWXXXVSKXGPSNNDEKSEMSFPGRXESRSSGLKLAACSFSADVSPMERSSNQEGSLAEEINIQMXDQVAEXCSSASWENAXVDXDIIQGXQDQAKHRFYRPPXPGLRRVRQKKSVIGSVXLVSEXEVQEKMIGQFSYSEERESGENKSEYHMFXHSCSKMSSVSNKPVLVQINNNDQMEESSLERKKENSLLKSSAISAGVIEIXSQKMLEMSHNNGLPSXISNNSIVEEDVVDCVVLDNKXGIKNFKXYGNXNDRFSPISADAXHFSSNNSGXDKNISEAPASEASSXVXARIDRLINEFAQCGLXKLPKNEKKILSSVASKKKKKSRQQAINSRYQDGQLAXKGILNKNERINXKGRIXKEMIVQDSDSPLKGGILCEEDLQKSDXVIESNXFCSKSNLNSXISKNFHRNKLNXXQNSKVQGLLXKRKSRSLNKISLGAPKKREIGQRDKVFPHNESKYCKSXFENKSLFHVFNILEQKPKDFYAPQSQAEVASGYLRGMAKKSLVSKVXDSHIXLKSQKKRKGDKVKASAILSKQHAXXRANSLASLKKPDFPEAIAHHSIQNYIQSWLQNINPYPXLKPIKSAPVCRNEXSVVNCSNNSFSGNDPHXNSGKISNFVMESNKHIXKIAGLXGDNLCKEGDKSFIANDXGEEDLHEXQVGSLNDAYLVPLHEHCXLSQSAINDHNXKSHIAAEKSGPEKKLVYQEINLARKRQSVEAAIQVDPIEEEXPKDLLPVLMLHQLQASVPGIHKXQNGVVQMPGSLAGVPFHSAICNSSXNLLLAWLLVLNLKGSMNSFCQVDAHKAXNKSSEXLALLEILKHIAIXEEADDLKAAVANLVESXXSHFGLSEKEQDMVPIDLSANCSXVNIQSVPKCSENERXQGISSLDGGCSASEACAPEVCVLEVXCSPCEMCXVNKAYSPKEXCNPSDXFFPSDGYGVDQXSMNKACFLGEVCSLXDXVFSDKACAQKENHXYEGACPIDEXYVPVNVCNXIDFLNSKENXYXDNLDSXEELERGDDIQKDLNILXDPEYKNGFNXLVSHQNVSNLSSCGLCLSEKEAELDKKHSSLDDFENCSLRKFQDENAYXSFDMEEPRXSEEPGSIXNSMXSSERNISELESFEELENHDXDIFNXVVNGGEQAXEELIQEEVEASKXLELIDISSKNIMEEKRMNGIIYEIISKRLAXPPSLDFCYDSKQNSEKEXNEGEXKMVKMMVKXMEXGSYSESSPDLKKCIKSPVXSDWSDYRPDSDSEQPYKXSSDDPNDSGELXQEKEYNIGFVKRAIEKLYGKADIIKPSFFPGSXRKSQVCPYNSVEFQCSRKASLYDSEGQSFGSSEQVSSSSSMLQEFQEERQDKCDVSAVRDNYCRGDIVEPGXKQNDDSRILXDIEEGVLIDKGKWLLKENHLLRMSSENPGMCGNADXXSVDXLLDNNSSEVPYSHFGNLAPGPXMDELSSSELEELXQPLELKCNYFNMPHGSDSEPFHEDLLDVRNEXCAKERIANHHXEEKGSHQSERVCXSVXHSFISAGNKVYPVSDDAIKNQPLPGSNMIHGXLQEADSLDKLYALCGQHCPILXVIIQPMNEEDRGFAYRKESDIENFLGFYLWMKIHPYLLQXDKNVFREENNKASMRQNLIDNAIGDIFDQFYFSNXFDLMGKRRKQKRINFLGLEEEGNLKKFQPDLKERFCMNFLHXSLLVVGNVDSNXQDLSGQXNEIFKAVDENNNLLNNRFQGSRXNLNQVVRENINCHYFFEMLGQACLLDICQVEXSLNISNRNILELCMFEGENLFIWEEEDILNLXDLESSREQEDL

SEQ ID NO: 23878 - protein, 166 aa, Homo sapiens
  MOD_RES (31)..(31): Selenocysteine
  MOD_RES (55)..(55): Selenocysteine
  MOD_RES (81)..(81): Selenocysteine
  MOD_RES (134)..(134): Selenocysteine
MAGAAQHREEKHSALLSYEKPPPGLIKEDEXKPEDCIPDVPGNEHAREFLAHAPXKGLWMPLGKEVKVMQCWRCKRYGHRXGDKECPFFIKGNQKLEQFRVAHEDPMYDIIRDNKRHEKDVRIQQLKQLLEDSXSDEDRSSSSSSEGKEKHKKKKKKEKHKKRKKE

SEQ ID NO: 23879 - protein, 221 aa, Homo sapiens
  MOD_RES (65)..(65): Selenocysteine
  MOD_RES (89)..(89): Selenocysteine
  MOD_RES (115)..(115): Selenocysteine
  MOD_RES (168)..(168): Selenocysteine
MSSRPGREDVGAAGARRPREPPEQELQRRREQKRRRHDAQQLQQLKHLESFYEKPPPGLIKEDEXKPEDCIPDVPGNEHAREFLAHAPXKGLWMPLGKEVKVMQCWRCKRYGHRXGDKECPFFIKGNQKLEQFRVAHEDPMYDIIRDNKRHEKDVRIQQLKQLLEDSXSDEDRSSSSSSEGKEKHKKKKKKEKHKKRKKEKKKKKKRKHKSSKSNEGSDSE

SEQ ID NO: 23880 - protein, 313 aa, Homo sapiens
  MOD_RES (17)..(17): Selenocysteine
  MOD_RES (26)..(26): Selenocysteine
  MOD_RES (35)..(35): Selenocysteine
  MOD_RES (40)..(40): Selenocysteine
  MOD_RES (53)..(53): Selenocysteine
  MOD_RES (59)..(59): Selenocysteine
  MOD_RES (86)..(86): Selenocysteine
  MOD_RES (89)..(89): Selenocysteine
  MOD_RES (107)..(107): Selenocysteine
  MOD_RES (113)..(113): Selenocysteine
  MOD_RES (115)..(115): Selenocysteine
  MOD_RES (154)..(154): Selenocysteine
  MOD_RES (196)..(196): Selenocysteine
  MOD_RES (200)..(200): Selenocysteine
  MOD_RES (227)..(227): Selenocysteine
  MOD_RES (277)..(277): Selenocysteine
  MOD_RES (287)..(287): Selenocysteine
FFPLIEVNKVYYFSKGXLKIANKQFXAVKNDYEMXFNNEXSVMPCEDDHHLPXVQFDFXGIDDLENKSKDSLVDIIGICKSYEDAXKIXVRSNNREVAKRNIYLMDXSGKVVXAXLWGEDADKFDGSRQPVLAIKGARVSDFGGRSLSVLSSSXIIANPDIPEAYKLRGWFDAEGQALDGVSISDLKSGGVGGSNXNWKXLYEVKSENLGQGDKVNIADFQENQWVXCFQESAEAILGQNAAYLGELKDKNEQAFEEVFQNANFRSFIFRVRVKVEXYNDESRIKAXVMDVKPVDYREYGRRLVMSIRRSALM

SEQ ID NO: 23881 - protein, 124 aa, Homo sapiens
  MOD_RES (6)..(6): Selenocysteine
  MOD_RES (21)..(22): Selenocysteine
  MOD_RES (39)..(39): Selenocysteine
  MOD_RES (47)..(47): Selenocysteine
  MOD_RES (73)..(73): Selenocysteine
MQKGDXNIKPILQVINIRPIXXGNSPPRYRLLMSDGLNXLSSFMLAXQLNPLVEEEQLSSNCVCQIHRFIVNXLKDGRRVVILMELEVLKSAEAVGVKIGNPVPYNEGLGQPQVAPPAPAASPA

SEQ ID NO: 23882 - protein, 153 aa, Homo sapiens
  MOD_RES (6)..(6): Selenocysteine
  MOD_RES (21)..(22): Selenocysteine
  MOD_RES (39)..(39): Selenocysteine
  MOD_RES (47)..(47): Selenocysteine
  MOD_RES (73)..(73): Selenocysteine
  MOD_RES (141)..(141): Selenocysteine
  MOD_RES (151)..(151): Selenocysteine
MQKGDXNIKPILQVINIRPIXXGNSPPRYRLLMSDGLNXLSSFMLAXQLNPLVEEEQLSSNCVCQIHRFIVNXLKDGRRVVILMELEVLKSAEAVGVKIGNPVPYNEGLGQPQVAPPAPAASPAASSRPQPQNGSSGMGSXVSKAYGASKXFG

SEQ ID NO: 23883 - protein, 616 aa, Homo sapiens
  MOD_RES (19)..(19): Selenocysteine
  MOD_RES (34)..(35): Selenocysteine
  MOD_RES (52)..(52): Selenocysteine
  MOD_RES (60)..(60): Selenocysteine
  MOD_RES (86)..(86): Selenocysteine
  MOD_RES (154)..(154): Selenocysteine
  MOD_RES (164)..(164): Selenocysteine
  MOD_RES (176)..(176): Selenocysteine
  MOD_RES (180)..(180): Selenocysteine
  MOD_RES (191)..(191): Selenocysteine
  MOD_RES (198)..(198): Selenocysteine
  MOD_RES (204)..(204): Selenocysteine
  MOD_RES (211)..(211): Selenocysteine
  MOD_RES (236)..(236): Selenocysteine
  MOD_RES (261)..(261): Selenocysteine
  MOD_RES (270)..(270): Selenocysteine
  MOD_RES (279)..(279): Selenocysteine
  MOD_RES (284)..(284): Selenocysteine
  MOD_RES (297)..(297): Selenocysteine
  MOD_RES (303)..(303): Selenocysteine
  MOD_RES (330)..(330): Selenocysteine
  MOD_RES (333)..(333): Selenocysteine
  MOD_RES (351)..(351): Selenocysteine
  MOD_RES (357)..(357): Selenocysteine
  MOD_RES (359)..(359): Selenocysteine
  MOD_RES (398)..(398): Selenocysteine
  MOD_RES (440)..(440): Selenocysteine
  MOD_RES (444)..(444): Selenocysteine
  MOD_RES (467)..(467): Selenocysteine
  MOD_RES (483)..(483): Selenocysteine
  MOD_RES (505)..(505): Selenocysteine
  MOD_RES (530)..(530): Selenocysteine
  MOD_RES (580)..(580): Selenocysteine
  MOD_RES (590)..(590): Selenocysteine
MVGQLSEGAIAAIMQKGDXNIKPILQVINIRPIXXGNSPPRYRLLMSDGLNXLSSFMLAXQLNPLVEEEQLSSNCVCQIHRFIVNXLKDGRRVVILMELEVLKSAEAVGVKIGNPVPYNEGLGQPQVAPPAPAASPAASSRPQPQNGSSGMGSXVSKAYGASKXFGKAAGPSLSHXSGGXQSKVVPIASLXPYQSKWXICARVXNKSQIRXWSNSRGEGKLFSLELVDESGEIRAXAFNEQVDKFFPLIEVNKVYYFSKGXLKIANKQFXAVKNDYEMXFNNEXSVMPCEDDHHLPXVQFDFXGIDDLENKSKDSLVDIIGICKSYEDAXKIXVRSNNREVAKRNIYLMDXSGKVVXAXLWGEDADKFDGSRQPVLAIKGARVSDFGGRSLSVLSSSXIIANPDIPEAYKLRGWFDAEGQALDGVSISDLKSGGVGGSNXNWKXLYEVKSENLGQGDKPDYFSSVAXVVYLRKENCMYQACPXQDCNKKVIDQQNGLYRCEKCDXEFPNFKYRMILSVNIADFQENQWVXCFQESAEAILGQNAAYLGELKDKNEQAFEEVFQNANFRSFIFRVRVKVEXYNDESRIKAXVMDVKPVDYREYGRRLVMSIRRSALM

SEQ ID NO: 23884 - protein, 122 aa, Homo sapiens
  MOD_RES (8)..(9): Selenocysteine
  MOD_RES (58)..(58): Selenocysteine
  MOD_RES (110)..(110): Selenocysteine
  MOD_RES (119)..(119): Selenocysteine
LEDMNEFXXHILEVINAHMVLSKANSQPSAGRAPISNPGMSEAGNFGGNSFMPANGLXVAQNQVLNLIKACPRPEGLNFQDLKNQLKHMSVSSIKQAVDFLSNEGHIYSXVDDDHFKSXDAE

SEQ ID NO: 23885 - protein, 278 aa, Homo sapiens
  MOD_RES (29)..(29): Selenocysteine
  MOD_RES (58)..(58): Selenocysteine
  MOD_RES (66)..(66): Selenocysteine
  MOD_RES (83)..(83): Selenocysteine
  MOD_RES (96)..(96): Selenocysteine
  MOD_RES (106)..(106): Selenocysteine
  MOD_RES (118)..(118): Selenocysteine
  MOD_RES (121)..(121): Selenocysteine
  MOD_RES (126)..(126): Selenocysteine
  MOD_RES (132)..(132): Selenocysteine
  MOD_RES (164)..(165): Selenocysteine
  MOD_RES (214)..(214): Selenocysteine
  MOD_RES (266)..(266): Selenocysteine
  MOD_RES (275)..(275): Selenocysteine
MGRGDRNKRSIRGFESYGSSSYGGAGGYXQSPGGFGSPAPSQAEKKSRARAQHIVPCXISQLLSAXLVDEVFRIGNVEISQVXIVGIIRHAEKAPXNIVYKIDDMXAAPMDVRQWVDXDDXSSENXVVPPEXYVKVAGHLRSFQNKKSLVAFKIMPLEDMNEFXXHILEVINAHMVLSKANSQPSAGRAPISNPGMSEAGNFGGNSFMPANGLXVAQNQVLNLIKACPRPEGLNFQDLKNQLKHMSVSSIKQAVDFLSNEGHIYSXVDDDHFKSXDAE

SEQ ID NO: 23886 - protein, 270 aa, Homo sapiens
  MOD_RES (21)..(21): Selenocysteine
  MOD_RES (50)..(50): Selenocysteine
  MOD_RES (58)..(58): Selenocysteine
  MOD_RES (75)..(75): Selenocysteine
  MOD_RES (88)..(88): Selenocysteine
  MOD_RES (98)..(98): Selenocysteine
  MOD_RES (110)..(110): Selenocysteine
  MOD_RES (113)..(113): Selenocysteine
  MOD_RES (118)..(118): Selenocysteine
  MOD_RES (124)..(124): Selenocysteine
  MOD_RES (156)..(157): Selenocysteine
  MOD_RES (206)..(206): Selenocysteine
  MOD_RES (258)..(258): Selenocysteine
  MOD_RES (267)..(267): Selenocysteine
MWNSGFESYGSSSYGGAGGYXQSPGGFGSPAPSQAEKKSRARAQHIVPCXISQLLSAXLVDEVFRIGNVEISQVXIVGIIRHAEKAPXNIVYKIDDMXAAPMDVRQWVDXDDXSSENXVVPPEXYVKVAGHLRSFQNKKSLVAFKIMPLEDMNEFXXHILEVINAHMVLSKANSQPSAGRAPISNPGMSEAGNFGGNSFMPANGLXVAQNQVLNLIKACPRPEGLNFQDLKNQLKHMSVSSIKQAVDFLSNEGHIYSXVDDDHFKSXDAE

SEQ ID NO: 23887 - protein, 358 aa, Homo sapiens
  MOD_RES (91)..(91): Selenocysteine
  MOD_RES (109)..(109): Selenocysteine
  MOD_RES (138)..(138): Selenocysteine
  MOD_RES (146)..(146): Selenocysteine
  MOD_RES (163)..(163): Selenocysteine
  MOD_RES (176)..(176): Selenocysteine
  MOD_RES (186)..(186): Selenocysteine
  MOD_RES (198)..(198): Selenocysteine
  MOD_RES (201)..(201): Selenocysteine
  MOD_RES (206)..(206): Selenocysteine
  MOD_RES (212)..(212): Selenocysteine
  MOD_RES (244)..(245): Selenocysteine
  MOD_RES (294)..(294): Selenocysteine
  MOD_RES (346)..(346): Selenocysteine
  MOD_RES (355)..(355): Selenocysteine
MWNSNDGGAGWRRKRIAGGFSKRASLGSERRVVAGEEGRERSWGVWGSPAGRRRGRLGRLGQCLKGRSLREPAGFSEAWDVAQALILLFKXGGFESYGSSSYGGAGGYXQSPGGFGSPAPSQAEKKSRARAQHIVPCXISQLLSAXLVDEVFRIGNVEISQVXIVGIIRHAEKAPXNIVYKIDDMXAAPMDVRQWVDXDDXSSENXVVPPEXYVKVAGHLRSFQNKKSLVAFKIMPLEDMNEFXXHILEVINAHMVLSKANSQPSAGRAPISNPGMSEAGNFGGNSFMPANGLXVAQNQVLNLIKACPRPEGLNFQDLKNQLKHMSVSSIKQAVDFLSNEGHIYSXVDDDHFKSXDAE

SEQ ID NO: 23888 - protein, 179 aa, Homo sapiens
  MOD_RES (25)..(25): Selenocysteine
  MOD_RES (54)..(54): Selenocysteine
  MOD_RES (62)..(62): Selenocysteine
  MOD_RES (79)..(79): Selenocysteine
  MOD_RES (92)..(92): Selenocysteine
  MOD_RES (102)..(102): Selenocysteine
  MOD_RES (114)..(114): Selenocysteine
  MOD_RES (117)..(117): Selenocysteine
  MOD_RES (122)..(122): Selenocysteine
  MOD_RES (128)..(128): Selenocysteine
  MOD_RES (160)..(161): Selenocysteine
MWNSNDGGGFESYGSSSYGGAGGYXQSPGGFGSPAPSQAEKKSRARAQHIVPCXISQLLSAXLVDEVFRIGNVEISQVXIVGIIRHAEKAPXNIVYKIDDMXAAPMDVRQWVDXDDXSSENXVVPPEXYVKVAGHLRSFQNKKSLVAFKIMPLEDMNEFXXHILEVINAHMVLSKANSQ

SEQ ID NO: 23889 - protein, 82 aa, Homo sapiens
  MOD_RES (13)..(13): Selenocysteine
  MOD_RES (35)..(35): Selenocysteine
  MOD_RES (39)..(39): Selenocysteine
  MOD_RES (43)..(43): Selenocysteine
MFILSDGEGKNGXIELMEPLDEEISGIVEVVGRVXAKAXILCXSYVQFKEDSHPFDLGLYNEAVKIIHDFPQFYPLGIVQHD

SEQ ID NO: 23890 - protein, 121 aa, Homo sapiens
  MOD_RES (37)..(37): Selenocysteine
  MOD_RES (52)..(52): Selenocysteine
  MOD_RES (74)..(74): Selenocysteine
  MOD_RES (78)..(78): Selenocysteine
  MOD_RES (82)..(82): Selenocysteine
MVDMMDLPRSRINAGMLAQFIDKPVCFVGRLEKIHPXGKMFILSDGEGKNGXIELMEPLDEEISGIVEVVGRVXAKAXILCXSYVQFKEDSHPFDLGLYNEAVKIIHDFPQFYPLGIVQHD

SEQ ID NO: 23891 - protein, 533 aa, Homo sapiens
  MOD_RES (18)..(18): Selenocysteine
  MOD_RES (27)..(27): Selenocysteine
  MOD_RES (31)..(31): Selenocysteine
  MOD_RES (39)..(39): Selenocysteine
  MOD_RES (78)..(78): Selenocysteine
  MOD_RES (86)..(86): Selenocysteine
  MOD_RES (94)..(94): Selenocysteine
  MOD_RES (101)..(101): Selenocysteine
  MOD_RES (105)..(105): Selenocysteine
  MOD_RES (129)..(129): Selenocysteine
  MOD_RES (147)..(147): Selenocysteine
  MOD_RES (149)..(149): Selenocysteine
  MOD_RES (153)..(153): Selenocysteine
  MOD_RES (159)..(159): Selenocysteine
  MOD_RES (162)..(162): Selenocysteine
  MOD_RES (178)..(178): Selenocysteine
  MOD_RES (188)..(188): Selenocysteine
  MOD_RES (246)..(246): Selenocysteine
  MOD_RES (255)..(255): Selenocysteine
  MOD_RES (284)..(284): Selenocysteine
  MOD_RES (306)..(306): Selenocysteine
  MOD_RES (317)..(317): Selenocysteine
  MOD_RES (379)..(379): Selenocysteine
  MOD_RES (385)..(385): Selenocysteine
  MOD_RES (389)..(390): Selenocysteine
  MOD_RES (392)..(392): Selenocysteine
  MOD_RES (400)..(400): Selenocysteine
  MOD_RES (432)..(432): Selenocysteine
  MOD_RES (454)..(454): Selenocysteine
  MOD_RES (457)..(457): Selenocysteine
  MOD_RES (525)..(525): Selenocysteine
MSIQVEHPAGGYKKLFEXVEELSSPLXAHVXGRIPLWLXGSLLRCGPGLFEVGSEPFYHLFDGQALLHKFDFKEGHVXYHRRFIRXDAYVRAMXEKRIVIXEFGXCAFPDPCKNIFSRFFSYFRGVEVXDNALVNVYPVGEDYYACXEXNFIXKINPEXLEXIKQVDLCNYVSVNGAXAHPHIENDGXVYNIGNCFGKNFSIAYNIVKIPPLQADKEDPISKSEIVVQFPCSDRFKPSYVHSFGLXPNYIVFVEXPVKINLFKFLSSWSLWGANYMDCFESNEXMGVWLHIADKKRKKYLNNKYRXSPFNLFHHINXYEDNGFLIVDLCCWKGFEFVYNYLYLANLRENWEEVKKNARKAPQPEVRRYVLPLNIDKADXGKNLVXLPNXXAXAILCSDEXIWLEPEVLFSGPRQAFEFPQINYQKYCGKPYXYAYGLGLNHFVPDRLCKLNVKXKEXWVWQEPDSYPSEPIFVSHPDALEEDDGVVLSVVVSPGAGQKPAYLLILNAKDLSEVARAEVEINIPVXFHGLFKKS

SEQ ID NO: 23892 - protein, 56 aa, Homo sapiens
  MOD_RES (5)..(5): Selenocysteine
  MOD_RES (8)..(8): Selenocysteine
  MOD_RES (17)..(17): Selenocysteine
  MOD_RES (30)..(30): Selenocysteine
  MOD_RES (32)..(33): Selenocysteine
  MOD_RES (35)..(35): Selenocysteine
MSGPXDEXAGDLPVKDXGLNLFGMGGLQEXSXXRXMKSRQAVSRVSREELEDRFLR

SEQ ID NO: 23893 - protein, 125 aa, Homo sapiens
  MOD_RES (5)..(5): Selenocysteine
  MOD_RES (8)..(8): Selenocysteine
  MOD_RES (17)..(17): Selenocysteine
  MOD_RES (30)..(30): Selenocysteine
  MOD_RES (32)..(33): Selenocysteine
  MOD_RES (35)..(35): Selenocysteine
  MOD_RES (116)..(116): Selenocysteine
MSGPXDEXAGDLPVKDXGLNLFGMGGLQEXSXXRXMKSRQAVSRVSREELEDRFLRLHDENILLKQHARKQEDKIKRFKEKVRQPLKNENRVFLLRIHPKEVVPVQFLLCGLQQPXGMLCAGLLL

SEQ ID NO: 23894 - protein, 78 aa, Homo sapiens
  MOD_RES (5)..(5): Selenocysteine
  MOD_RES (8)..(8): Selenocysteine
  MOD_RES (17)..(17): Selenocysteine
  MOD_RES (30)..(30): Selenocysteine
  MOD_RES (32)..(33): Selenocysteine
  MOD_RES (35)..(35): Selenocysteine
MSGPXDEXAGDLPVKDXGLNLFGMGGLQEXSXXRXMKSRQAVSRVSREELEDRFLRLHDENILLKQHARKQEDKIKRL

SEQ ID NO: 23895 - protein, 122 aa, Homo sapiens
  MOD_RES (5)..(5): Selenocysteine
  MOD_RES (8)..(8): Selenocysteine
  MOD_RES (17)..(17): Selenocysteine
  MOD_RES (30)..(30): Selenocysteine
  MOD_RES (32)..(33): Selenocysteine
  MOD_RES (35)..(35): Selenocysteine
  MOD_RES (80)..(80): Selenocysteine
MSGPXDEXAGDLPVKDXGLNLFGMGGLQEXSXXRXMKSRQAVSRVSREELEDRFLRLHDENILLKQHARKQEDKIKRMAXKLIRLVNDKKRYERVGGGPKRLGRDVEMEEMIEQLQEKVHEL

SEQ ID NO: 23896 - protein, 354 aa, Homo sapiens
  MOD_RES (5)..(5): Selenocysteine
  MOD_RES (8)..(8): Selenocysteine
  MOD_RES (17)..(17): Selenocysteine
  MOD_RES (30)..(30): Selenocysteine
  MOD_RES (32)..(33): Selenocysteine
  MOD_RES (35)..(35): Selenocysteine
  MOD_RES (80)..(80): Selenocysteine
  MOD_RES (128)..(128): Selenocysteine
  MOD_RES (142)..(142): Selenocysteine
  MOD_RES (148)..(148): Selenocysteine
  MOD_RES (159)..(159): Selenocysteine
  MOD_RES (188)..(188): Selenocysteine
  MOD_RES (194)..(194): Selenocysteine
  MOD_RES (234)..(234): Selenocysteine
  MOD_RES (256)..(256): Selenocysteine
  MOD_RES (298)..(298): Selenocysteine
MSGPXDEXAGDLPVKDXGLNLFGMGGLQEXSXXRXMKSRQAVSRVSREELEDRFLRLHDENILLKQHARKQEDKIKRMAXKLIRLVNDKKRYERVGGGPKRLGRDVEMEEMIEQLQEKVHELEKQNEXLKNRLISAKQQLQXQGYRQXPYNNVQSRINXGRRKANENAGLQECPRKGIKFQDADVAEXPHPMFXKYGNSLLEEARGEIRNLENVIQSQRGQIEELEHLAEILKXQLRRKENEIELSLLQLREQQAXDQRSNIRDNVEMIKLHKQLVEKSNALSAMEGKFIQLQEKQRXLRISHDALMANGDELNMQLKEQRLKCCSLEKQLHSMKFSERRIEELQDRINDLEKE

SEQ ID NO: 23897 - protein, 1235 aa, Homo sapiens
  MOD_RES (5)..(5): Selenocysteine
  MOD_RES (8)..(8): Selenocysteine
  MOD_RES (17)..(17): Selenocysteine
  MOD_RES (30)..(30): Selenocysteine
  MOD_RES (32)..(33): Selenocysteine
  MOD_RES (35)..(35): Selenocysteine
  MOD_RES (80)..(80): Selenocysteine
  MOD_RES (128)..(128): Selenocysteine
  MOD_RES (142)..(142): Selenocysteine
  MOD_RES (148)..(148): Selenocysteine
  MOD_RES (159)..(159): Selenocysteine
  MOD_RES (188)..(188): Selenocysteine
  MOD_RES (194)..(194): Selenocysteine
  MOD_RES (234)..(234): Selenocysteine
  MOD_RES (256)..(256): Selenocysteine
  MOD_RES (298)..(298): Selenocysteine
  MOD_RES (394)..(394): Selenocysteine
  MOD_RES (401)..(401): Selenocysteine
  MOD_RES (404)..(404): Selenocysteine
  MOD_RES (412)..(412): Selenocysteine
  MOD_RES (501)..(501): Selenocysteine
  MOD_RES (505)..(505): Selenocysteine
  MOD_RES (512)..(512): Selenocysteine
  MOD_RES (534)..(534): Selenocysteine
  MOD_RES (576)..(576): Selenocysteine
  MOD_RES (597)..(597): Selenocysteine
  MOD_RES (615)..(615): Selenocysteine
  MOD_RES (631)..(631): Selenocysteine
  MOD_RES (634)..(634): Selenocysteine
  MOD_RES (644)..(645): Selenocysteine
  MOD_RES (658)..(658): Selenocysteine
  MOD_RES (677)..(677): Selenocysteine
  MOD_RES (679)..(679): Selenocysteine
  MOD_RES (688)..(688): Selenocysteine
  MOD_RES (692)..(692): Selenocysteine
  MOD_RES (713)..(713): Selenocysteine
  MOD_RES (719)..(719): Selenocysteine
  MOD_RES (728)..(728): Selenocysteine
  MOD_RES (757)..(757): Selenocysteine
  MOD_RES (776)..(776): Selenocysteine
  MOD_RES (782)..(782): Selenocysteine
  MOD_RES (785)..(785): Selenocysteine
  MOD_RES (795)..(795): Selenocysteine
  MOD_RES (827)..(827): Selenocysteine
  MOD_RES (871)..(871): Selenocysteine
  MOD_RES (900)..(900): Selenocysteine
  MOD_RES (909)..(909): Selenocysteine
  MOD_RES (928)..(929): Selenocysteine
  MOD_RES (955)..(955): Selenocysteine
  MOD_RES (969)..(969): Selenocysteine
  MOD_RES (1000)..(1000): Selenocysteine
  MOD_RES (1030)..(1030): Selenocysteine
  MOD_RES (1033)..(1033): Selenocysteine
  MOD_RES (1084)..(1084): Selenocysteine
  MOD_RES (1088)..(1088): Selenocysteine
  MOD_RES (1106)..(1106): Selenocysteine
  MOD_RES (1158)..(1158): Selenocysteine
  MOD_RES (1215)..(1215): Selenocysteine
MSGPXDEXAGDLPVKDXGLNLFGMGGLQEXSXXRXMKSRQAVSRVSREELEDRFLRLHDENILLKQHARKQEDKIKRMAXKLIRLVNDKKRYERVGGGPKRLGRDVEMEEMIEQLQEKVHELEKQNEXLKNRLISAKQQLQXQGYRQXPYNNVQSRINXGRRKANENAGLQECPRKGIKFQDADVAEXPHPMFXKYGNSLLEEARGEIRNLENVIQSQRGQIEELEHLAEILKXQLRRKENEIELSLLQLREQQAXDQRSNIRDNVEMIKLHKQLVEKSNALSAMEGKFIQLQEKQRXLRISHDALMANGDELNMQLKEQRLKCCSLEKQLHSMKFSERRIEELQDRINDLEKERELLKENYDKLYDSAFSAAHEEQWKLKEQQLKVQIAQLEXALKSDLXDKXEILDRLKXERDQNEKLVQENRELQLQYLEQKQQLDELKKRIKLYNQENDINADELSEALLLIKAQKEQKNGDLSFLVKVDSEINKDLERSMRELQAXHAEXVQELEKXRNMLIMQHKINKDYQMEVEAVXRKMENLQQDYELKVEQYVHLLDIRAARIHKLEAQLKDIAYGXKQYKFKPEIMPDDSVDEFDEXIHLERGENLFEIHINKVXFSSEVLQASGDKEPVXFCXYAFYDFELQXXPVVRGLHPEYNFXSQYLVHVNDLFLQYIQKNXIXLEVHQAYSXEYEXIAACQLKFHEILEKSGRIFCXASLIGXKGDIPNFGXVEYWFRLRVPMDQAIRLYRERAKALGYIXSNFKGPEHMQSLSQQAPKXAQLSSXDSXDGNLNELHIXIRCCNHLQSRASHLQPHPYVVYKFFDFADHDXAIIPSSNDPQFDDHMYFPVPMNMDLDRYLKSESLSFYVFDDSDXQENIYIGKVNVPLISLAHDRCISGIFELXDHQKHPAGXIHVILKWKFAYLPPSGSIXXEDLGNFIRSEEPEVVQRLPPASSVSXLVLAPRPKPRQRLXPVDKKVSFVDIMPHQSDVSQEGSVDEVKENXEKMQQGKDDVSLLSEGQLAEQSLASSEDEXEIXEDLEPEVEEDMSASDSDDCIIPGPISKNIKQPSEKIRIEIIALSLNDSQVXMDDXIQRLFVECRFYSLPAEEXPVSLPKPKSGQWVYYNYSNVIYVDKENNKAKRDILKAILQKQEMPNRSLRFXVVSDPPEDEQDLECEDIGVAHVDLADMFQEGRDLIEQNIDVFDARADGEGIGKLRVXVEALHALQSVYKQYRDDLEA

SEQ ID NO: 23898 - protein, 1253 aa, Homo sapiens
  MOD_RES (5)..(5): Selenocysteine
  MOD_RES (8)..(8): Selenocysteine
  MOD_RES (17)..(17): Selenocysteine
  MOD_RES (30)..(30): Selenocysteine
  MOD_RES (32)..(33): Selenocysteine
  MOD_RES (35)..(35): Selenocysteine
  MOD_RES (80)..(80): Selenocysteine
  MOD_RES (128)..(128): Selenocysteine
  MOD_RES (142)..(142): Selenocysteine
  MOD_RES (148)..(148): Selenocysteine
  MOD_RES (159)..(159): Selenocysteine
  MOD_RES (188)..(188): Selenocysteine
  MOD_RES (194)..(194): Selenocysteine
  MOD_RES (234)..(234): Selenocysteine
  MOD_RES (256)..(256): Selenocysteine
  MOD_RES (298)..(298): Selenocysteine
  MOD_RES (394)..(394): Selenocysteine
  MOD_RES (401)..(401): Selenocysteine
  MOD_RES (404)..(404): Selenocysteine
  MOD_RES (412)..(412): Selenocysteine
  MOD_RES (501)..(501): Selenocysteine
  MOD_RES (505)..(505): Selenocysteine
  MOD_RES (512)..(512): Selenocysteine
  MOD_RES (534)..(534): Selenocysteine
  MOD_RES (576)..(576): Selenocysteine
  MOD_RES (597)..(597): Selenocysteine
  MOD_RES (615)..(615): Selenocysteine
  MOD_RES (631)..(631): Selenocysteine
  MOD_RES (634)..(634): Selenocysteine
  MOD_RES (644)..(645): Selenocysteine
  MOD_RES (658)..(658): Selenocysteine
  MOD_RES (677)..(677): Selenocysteine
  MOD_RES (679)..(679): Selenocysteine
  MOD_RES (688)..(688): Selenocysteine
  MOD_RES (692)..(692): Selenocysteine
  MOD_RES (713)..(713): Selenocysteine
  MOD_RES (719)..(719): Selenocysteine
  MOD_RES (728)..(728): Selenocysteine
  MOD_RES (757)..(757): Selenocysteine
  MOD_RES (776)..(776): Selenocysteine
  MOD_RES (782)..(782): Selenocysteine
  MOD_RES (785)..(785): Selenocysteine
  MOD_RES (795)..(795): Selenocysteine
  MOD_RES (827)..(827): Selenocysteine
  MOD_RES (871)..(871): Selenocysteine
  MOD_RES (900)..(900): Selenocysteine
  MOD_RES (909)..(909): Selenocysteine
  MOD_RES (928)..(929): Selenocysteine
  MOD_RES (955)..(955): Selenocysteine
  MOD_RES (969)..(969): Selenocysteine
  MOD_RES (988)..(988): Selenocysteine
  MOD_RES (1014)..(1014): Selenocysteine
  MOD_RES (1034)..(1034): Selenocysteine
  MOD_RES (1064)..(1064): Selenocysteine
  MOD_RES (1067)..(1067): Selenocysteine
  MOD_RES (1118)..(1118): Selenocysteine
  MOD_RES (1122)..(1122): Selenocysteine
  MOD_RES (1140)..(1140): Selenocysteine
  MOD_RES (1192)..(1192): Selenocysteine
  MOD_RES (1245)..(1245): Selenocysteine
  MOD_RES (1251)..(1251): Selenocysteine
MSGPXDEXAGDLPVKDXGLNLFGMGGLQEXSXXRXMKSRQAVSRVSREELEDRFLRLHDENILLKQHARKQEDKIKRMAXKLIRLVNDKKRYERVGGGPKRLGRDVEMEEMIEQLQEKVHELEKQNEXLKNRLISAKQQLQXQGYRQXPYNNVQSRINXGRRKANENAGLQECPRKGIKFQDADVAEXPHPMFXKYGNSLLEEARGEIRNLENVIQSQRGQIEELEHLAEILKXQLRRKENEIELSLLQLREQQAXDQRSNIRDNVEMIKLHKQLVEKSNALSAMEGKFIQLQEKQRXLRISHDALMANGDELNMQLKEQRLKCCSLEKQLHSMKFSERRIEELQDRINDLEKERELLKENYDKLYDSAFSAAHEEQWKLKEQQLKVQIAQLEXALKSDLXDKXEILDRLKXERDQNEKLVQENRELQLQYLEQKQQLDELKKRIKLYNQENDINADELSEALLLIKAQKEQKNGDLSFLVKVDSEINKDLERSMRELQAXHAEXVQELEKXRNMLIMQHKINKDYQMEVEAVXRKMENLQQDYELKVEQYVHLLDIRAARIHKLEAQLKDIAYGXKQYKFKPEIMPDDSVDEFDEXIHLERGENLFEIHINKVXFSSEVLQASGDKEPVXFCXYAFYDFELQXXPVVRGLHPEYNFXSQYLVHVNDLFLQYIQKNXIXLEVHQAYSXEYEXIAACQLKFHEILEKSGRIFCXASLIGXKGDIPNFGXVEYWFRLRVPMDQAIRLYRERAKALGYIXSNFKGPEHMQSLSQQAPKXAQLSSXDSXDGNLNELHIXIRCCNHLQSRASHLQPHPYVVYKFFDFADHDXAIIPSSNDPQFDDHMYFPVPMNMDLDRYLKSESLSFYVFDDSDXQENIYIGKVNVPLISLAHDRCISGIFELXDHQKHPAGXIHVILKWKFAYLPPSGSIXXEDLGNFIRSEEPEVVQRLPPASSVSXLVLAPRPKPRQRLXPVDKKVSFVDIMPHQSDEXSPPPEDRKEISPEVEHIPEIEINMLXVPHVPKVSQEGSVDEVKENXEKMQQGKDDVSLLSEGQLAEQSLASSEDEXEIXEDLEPEVEEDMSASDSDDCIIPGPISKNIKQPSEKIRIEIIALSLNDSQVXMDDXIQRLFVECRFYSLPAEEXPVSLPKPKSGQWVYYNYSNVIYVDKENNKAKRDILKAILQKQEMPNRSLRFXVVSDPPEDEQDLECEDIGVAHVDLADMFQEGRDLIEQNIDGMGESVAQFVQPXIAELQXLY

SEQ ID NO: 23899 - protein, 1269 aa, Homo sapiens
  MOD_RES (5)..(5): Selenocysteine
  MOD_RES (8)..(8): Selenocysteine
  MOD_RES (17)..(17): Selenocysteine
  MOD_RES (30)..(30): Selenocysteine
  MOD_RES (32)..(33): Selenocysteine
  MOD_RES (35)..(35): Selenocysteine
  MOD_RES (80)..(80): Selenocysteine
  MOD_RES (128)..(128): Selenocysteine
  MOD_RES (142)..(142): Selenocysteine
  MOD_RES (148)..(148): Selenocysteine
  MOD_RES (159)..(159): Selenocysteine
  MOD_RES (188)..(188): Selenocysteine
  MOD_RES (194)..(194): Selenocysteine
  MOD_RES (234)..(234): Selenocysteine
  MOD_RES (256)..(256): Selenocysteine
  MOD_RES (298)..(298): Selenocysteine
  MOD_RES (394)..(394): Selenocysteine
  MOD_RES (401)..(401): Selenocysteine
  MOD_RES (404)..(404): Selenocysteine
  MOD_RES (412)..(412): Selenocysteine
  MOD_RES (501)..(501): Selenocysteine
  MOD_RES (505)..(505): Selenocysteine
  MOD_RES (512)..(512): Selenocysteine
  MOD_RES (534)..(534): Selenocysteine
  MOD_RES (576)..(576): Selenocysteine
  MOD_RES (597)..(597): Selenocysteine
  MOD_RES (615)..(615): Selenocysteine
  MOD_RES (631)..(631): Selenocysteine
  MOD_RES (634)..(634): Selenocysteine
  MOD_RES (644)..(645): Selenocysteine
  MOD_RES (658)..(658): Selenocysteine
  MOD_RES (677)..(677): Selenocysteine
  MOD_RES (679)..(679): Selenocysteine
  MOD_RES (688)..(688): Selenocysteine
  MOD_RES (692)..(692): Selenocysteine
  MOD_RES (713)..(713): Selenocysteine
  MOD_RES (719)..(719): Selenocysteine
  MOD_RES (728)..(728): Selenocysteine
  MOD_RES (757)..(757): Selenocysteine
  MOD_RES (776)..(776): Selenocysteine
  MOD_RES (782)..(782): Selenocysteine
  MOD_RES (785)..(785): Selenocysteine
  MOD_RES (795)..(795): Selenocysteine
  MOD_RES (827)..(827): Selenocysteine
  MOD_RES (871)..(871): Selenocysteine
  MOD_RES (900)..(900): Selenocysteine
  MOD_RES (909)..(909): Selenocysteine
  MOD_RES (928)..(929): Selenocysteine
  MOD_RES (955)..(955): Selenocysteine
  MOD_RES (969)..(969): Selenocysteine
  MOD_RES (988)..(988): Selenocysteine
  MOD_RES (1014)..(1014): Selenocysteine
  MOD_RES (1034)..(1034): Selenocysteine
  MOD_RES (1064)..(1064): Selenocysteine
  MOD_RES (1067)..(1067): Selenocysteine
  MOD_RES (1118)..(1118): Selenocysteine
  MOD_RES (1122)..(1122): Selenocysteine
  MOD_RES (1140)..(1140): Selenocysteine
  MOD_RES (1192)..(1192): Selenocysteine
  MOD_RES (1249)..(1249): Selenocysteine
MSGPXDEXAGDLPVKDXGLNLFGMGGLQEXSXXRXMKSRQAVSRVSREELEDRFLRLHDENILLKQHARKQEDKIKRMAXKLIRLVNDKKRYERVGGGPKRLGRDVEMEEMIEQLQEKVHELEKQNEXLKNRLISAKQQLQXQGYRQXPYNNVQSRINXGRRKANENAGLQECPRKGIKFQDADVAEXPHPMFXKYGNSLLEEARGEIRNLENVIQSQRGQIEELEHLAEILKXQLRRKENEIELSLLQLREQQAXDQRSNIRDNVEMIKLHKQLVEKSNALSAMEGKFIQLQEKQRXLRISHDALMANGDELNMQLKEQRLKCCSLEKQLHSMKFSERRIEELQDRINDLEKERELLKENYDKLYDSAFSAAHEEQWKLKEQQLKVQIAQLEXALKSDLXDKXEILDRLKXERDQNEKLVQENRELQLQYLEQKQQLDELKKRIKLYNQENDINADELSEALLLIKAQKEQKNGDLSFLVKVDSEINKDLERSMRELQAXHAEXVQELEKXRNMLIMQHKINKDYQMEVEAVXRKMENLQQDYELKVEQYVHLLDIRAARIHKLEAQLKDIAYGXKQYKFKPEIMPDDSVDEFDEXIHLERGENLFEIHINKVXFSSEVLQASGDKEPVXFCXYAFYDFELQXXPVVRGLHPEYNFXSQYLVHVNDLFLQYIQKNXIXLEVHQAYSXEYEXIAACQLKFHEILEKSGRIFCXASLIGXKGDIPNFGXVEYWFRLRVPMDQAIRLYRERAKALGYIXSNFKGPEHMQSLSQQAPKXAQLSSXDSXDGNLNELHIXIRCCNHLQSRASHLQPHPYVVYKFFDFADHDXAIIPSSNDPQFDDHMYFPVPMNMDLDRYLKSESLSFYVFDDSDXQENIYIGKVNVPLISLAHDRCISGIFELXDHQKHPAGXIHVILKWKFAYLPPSGSIXXEDLGNFIRSEEPEVVQRLPPASSVSXLVLAPRPKPRQRLXPVDKKVSFVDIMPHQSDEXSPPPEDRKEISPEVEHIPEIEINMLXVPHVPKVSQEGSVDEVKENXEKMQQGKDDVSLLSEGQLAEQSLASSEDEXEIXEDLEPEVEEDMSASDSDDCIIPGPISKNIKQPSEKIRIEIIALSLNDSQVXMDDXIQRLFVECRFYSLPAEEXPVSLPKPKSGQWVYYNYSNVIYVDKENNKAKRDILKAILQKQEMPNRSLRFXVVSDPPEDEQDLECEDIGVAHVDLADMFQEGRDLIEQNIDVFDARADGEGIGKLRVXVEALHALQSVYKQYRDDLEA

SEQ ID NO: 23900 - protein, 1281 aa, Homo sapiens
  MOD_RES (5)..(5): Selenocysteine
  MOD_RES (8)..(8): Selenocysteine
  MOD_RES (17)..(17): Selenocysteine
  MOD_RES (30)..(30): Selenocysteine
  MOD_RES (32)..(33): Selenocysteine
  MOD_RES (35)..(35): Selenocysteine
  MOD_RES (80)..(80): Selenocysteine
  MOD_RES (128)..(128): Selenocysteine
  MOD_RES (142)..(142): Selenocysteine
  MOD_RES (148)..(148): Selenocysteine
  MOD_RES (159)..(159): Selenocysteine
  MOD_RES (188)..(188): Selenocysteine
  MOD_RES (194)..(194): Selenocysteine
  MOD_RES (234)..(234): Selenocysteine
  MOD_RES (256)..(256): Selenocysteine
  MOD_RES (298)..(298): Selenocysteine
  MOD_RES (394)..(394): Selenocysteine
  MOD_RES (401)..(401): Selenocysteine
  MOD_RES (404)..(404): Selenocysteine
  MOD_RES (412)..(412): Selenocysteine
  MOD_RES (501)..(501): Selenocysteine
  MOD_RES (505)..(505): Selenocysteine
  MOD_RES (512)..(512): Selenocysteine
  MOD_RES (534)..(534): Selenocysteine
  MOD_RES (576)..(576): Selenocysteine
  MOD_RES (597)..(597): Selenocysteine
  MOD_RES (615)..(615): Selenocysteine
  MOD_RES (631)..(631): Selenocysteine
  MOD_RES (634)..(634): Selenocysteine
  MOD_RES (644)..(645): Selenocysteine
  MOD_RES (658)..(658): Selenocysteine
  MOD_RES (677)..(677): Selenocysteine
  MOD_RES (679)..(679): Selenocysteine
  MOD_RES (688)..(688): Selenocysteine
  MOD_RES (692)..(692): Selenocysteine
  MOD_RES (713)..(713): Selenocysteine
  MOD_RES (719)..(719): Selenocysteine
  MOD_RES (728)..(728): Selenocysteine
  MOD_RES (757)..(757): Selenocysteine
  MOD_RES (776)..(776): Selenocysteine
  MOD_RES (782)..(782): Selenocysteine
  MOD_RES (785)..(785): Selenocysteine
  MOD_RES (795)..(795): Selenocysteine
  MOD_RES (827)..(827): Selenocysteine
  MOD_RES (871)..(871): Selenocysteine
  MOD_RES (900)..(900): Selenocysteine
  MOD_RES (909)..(909): Selenocysteine
  MOD_RES (928)..(929): Selenocysteine
  MOD_RES (955)..(955): Selenocysteine
  MOD_RES (969)..(969): Selenocysteine
  MOD_RES (1000)..(1000): Selenocysteine
  MOD_RES (1030)..(1030): Selenocysteine
  MOD_RES (1033)..(1033): Selenocysteine
  MOD_RES (1103)..(1103): Selenocysteine
  MOD_RES (1109)..(1109): Selenocysteine
  MOD_RES (1130)..(1130): Selenocysteine
  MOD_RES (1134)..(1134): Selenocysteine
  MOD_RES (1152)..(1152): Selenocysteine
  MOD_RES (1204)..(1204): Selenocysteine
  MOD_RES (1261)..(1261): Selenocysteine
MSGPXDEXAGDLPVKDXGLNLFGMGGLQEXSXXRXMKSRQAVSRVSREELEDRFLRLHDENILLKQHARKQEDKIKRMAXKLIRLVNDKKRYERVGGGPKRLGRDVEMEEMIEQLQEKVHELEKQNEXLKNRLISAKQQLQXQGYRQXPYNNVQSRINXGRRKANENAGLQECPRKGIKFQDADVAEXPHPMFXKYGNSLLEEARGEIRNLENVIQSQRGQIEELEHLAEILKXQLRRKENEIELSLLQLREQQAXDQRSNIRDNVEMIKLHKQLVEKSNALSAMEGKFIQLQEKQRXLRISHDALMANGDELNMQLKEQRLKCCSLEKQLHSMKFSERRIEELQDRINDLEKERELLKENYDKLYDSAFSAAHEEQWKLKEQQLKVQIAQLEXALKSDLXDKXEILDRLKXERDQNEKLVQENRELQLQYLEQKQQLDELKKRIKLYNQENDINADELSEALLLIKAQKEQKNGDLSFLVKVDSEINKDLERSMRELQAXHAEXVQELEKXRNMLIMQHKINKDYQMEVEAVXRKMENLQQDYELKVEQYVHLLDIRAARIHKLEAQLKDIAYGXKQYKFKPEIMPDDSVDEFDEXIHLERGENLFEIHINKVXFSSEVLQASGDKEPVXFCXYAFYDFELQXXPVVRGLHPEYNFXSQYLVHVNDLFLQYIQKNXIXLEVHQAYSXEYEXIAACQLKFHEILEKSGRIFCXASLIGXKGDIPNFGXVEYWFRLRVPMDQAIRLYRERAKALGYIXSNFKGPEHMQSLSQQAPKXAQLSSXDSXDGNLNELHIXIRCCNHLQSRASHLQPHPYVVYKFFDFADHDXAIIPSSNDPQFDDHMYFPVPMNMDLDRYLKSESLSFYVFDDSDXQENIYIGKVNVPLISLAHDRCISGIFELXDHQKHPAGXIHVILKWKFAYLPPSGSIXXEDLGNFIRSEEPEVVQRLPPASSVSXLVLAPRPKPRQRLXPVDKKVSFVDIMPHQSDVSQEGSVDEVKENXEKMQQGKDDVSLLSEGQLAEQSLASSEDEXEIXEDLEPEVEEDMSASDSDDCIIPGPISKNIKQSLALSPGLGCSSAISAHCNFRLPGSSDFPASASQVDGIXGACHHXQPSEKIRIEIIALSLNDSQVXMDDXIQRLFVECRFYSLPAEEXPVSLPKPKSGQWVYYNYSNVIYVDKENNKAKRDILKAILQKQEMPNRSLRFXVVSDPPEDEQDLECEDIGVAHVDLADMFQEGRDLIEQNIDVFDARADGEGIGKLRVXVEALHALQSVYKQYRDDLEA

SEQ ID NO: 23901 - protein, 1315 aa, Homo sapiens
  MOD_RES (5)..(5): Selenocysteine
  MOD_RES (8)..(8): Selenocysteine
  MOD_RES (17)..(17): Selenocysteine
  MOD_RES (30)..(30): Selenocysteine
  MOD_RES (32)..(33): Selenocysteine
  MOD_RES (35)..(35): Selenocysteine
  MOD_RES (80)..(80): Selenocysteine
  MOD_RES (128)..(128): Selenocysteine
  MOD_RES (142)..(142): Selenocysteine
  MOD_RES (148)..(148): Selenocysteine
  MOD_RES (159)..(159): Selenocysteine
  MOD_RES (188)..(188): Selenocysteine
  MOD_RES (194)..(194): Selenocysteine
  MOD_RES (234)..(234): Selenocysteine
  MOD_RES (256)..(256): Selenocysteine
  MOD_RES (298)..(298): Selenocysteine
  MOD_RES (394)..(394): Selenocysteine
  MOD_RES (401)..(401): Selenocysteine
  MOD_RES (404)..(404): Selenocysteine
  MOD_RES (412)..(412): Selenocysteine
  MOD_RES (501)..(501): Selenocysteine
  MOD_RES (505)..(505): Selenocysteine
  MOD_RES (512)..(512): Selenocysteine
  MOD_RES (534)..(534): Selenocysteine
  MOD_RES (576)..(576): Selenocysteine
  MOD_RES (597)..(597): Selenocysteine
  MOD_RES (615)..(615): Selenocysteine
  MOD_RES (631)..(631): Selenocysteine
  MOD_RES (634)..(634): Selenocysteine
  MOD_RES (644)..(645): Selenocysteine
  MOD_RES (658)..(658): Selenocysteine
  MOD_RES (677)..(677): Selenocysteine
  MOD_RES (679)..(679): Selenocysteine
  MOD_RES (688)..(688): Selenocysteine
  MOD_RES (692)..(692): Selenocysteine
  MOD_RES (713)..(713): Selenocysteine
  MOD_RES (719)..(719): Selenocysteine
  MOD_RES (728)..(728): Selenocysteine
  MOD_RES (757)..(757): Selenocysteine
  MOD_RES (776)..(776): Selenocysteine
  MOD_RES (782)..(782): Selenocysteine
  MOD_RES (785)..(785): Selenocysteine
  MOD_RES (795)..(795): Selenocysteine
  MOD_RES (827)..(827): Selenocysteine
  MOD_RES (871)..(871): Selenocysteine
  MOD_RES (900)..(900): Selenocysteine
  MOD_RES (909)..(909): Selenocysteine
  MOD_RES (928)..(929): Selenocysteine
  MOD_RES (955)..(955): Selenocysteine
  MOD_RES (969)..(969): Selenocysteine
  MOD_RES (988)..(988): Selenocysteine
  MOD_RES (1014)..(1014): Selenocysteine
  MOD_RES (1034)..(1034): Selenocysteine
  MOD_RES (1064)..(1064): Selenocysteine
  MOD_RES (1067)..(1067): Selenocysteine
  MOD_RES (1137)..(1137): Selenocysteine
  MOD_RES (1143)..(1143): Selenocysteine
  MOD_RES (1164)..(1164): Selenocysteine
  MOD_RES (1168)..(1168): Selenocysteine
  MOD_RES (1186)..(1186): Selenocysteine
  MOD_RES (1238)..(1238): Selenocysteine
  MOD_RES (1295)..(1295): Selenocysteine
MSGPXDEXAGDLPVKDXGLNLFGMGGLQEXSXXRXMKSRQAVSRVSREELEDRFLRLHDENILLKQHARKQEDKIKRMAXKLIRLVNDKKRYERVGGGPKRLGRDVEMEEMIEQLQEKVHELEKQNEXLKNRLISAKQQLQXQGYRQXPYNNVQSRINXGRRKANENAGLQECPRKGIKFQDADVAEXPHPMFXKYGNSLLEEARGEIRNLENVIQSQRGQIEELEHLAEILKXQLRRKENEIELSLLQLREQQAXDQRSNIRDNVEMIKLHKQLVEKSNALSAMEGKFIQLQEKQRXLRISHDALMANGDELNMQLKEQRLKCCSLEKQLHSMKFSERRIEELQDRINDLEKERELLKENYDKLYDSAFSAAHEEQWKLKEQQLKVQIAQLEXALKSDLXDKXEILDRLKXERDQNEKLVQENRELQLQYLEQKQQLDELKKRIKLYNQENDINADELSEALLLIKAQKEQKNGDLSFLVKVDSEINKDLERSMRELQAXHAEXVQELEKXRNMLIMQHKINKDYQMEVEAVXRKMENLQQDYELKVEQYVHLLDIRAARIHKLEAQLKDIAYGXKQYKFKPEIMPDDSVDEFDEXIHLERGENLFEIHINKVXFSSEVLQASGDKEPVXFCXYAFYDFELQXXPVVRGLHPEYNFXSQYLVHVNDLFLQYIQKNXIXLEVHQAYSXEYEXIAACQLKFHEILEKSGRIFCXASLIGXKGDIPNFGXVEYWFRLRVPMDQAIRLYRERAKALGYIXSNFKGPEHMQSLSQQAPKXAQLSSXDSXDGNLNELHIXIRCCNHLQSRASHLQPHPYVVYKFFDFADHDXAIIPSSNDPQFDDHMYFPVPMNMDLDRYLKSESLSFYVFDDSDXQENIYIGKVNVPLISLAHDRCISGIFELXDHQKHPAGXIHVILKWKFAYLPPSGSIXXEDLGNFIRSEEPEVVQRLPPASSVSXLVLAPRPKPRQRLXPVDKKVSFVDIMPHQSDEXSPPPEDRKEISPEVEHIPEIEINMLXVPHVPKVSQEGSVDEVKENXEKMQQGKDDVSLLSEGQLAEQSLASSEDEXEIXEDLEPEVEEDMSASDSDDCIIPGPISKNIKQSLALSPGLGCSSAISAHCNFRLPGSSDFPASASQVDGIXGACHHXQPSEKIRIEIIALSLNDSQVXMDDXIQRLFVECRFYSLPAEEXPVSLPKPKSGQWVYYNYSNVIYVDKENNKAKRDILKAILQKQEMPNRSLRFXVVSDPPEDEQDLECEDIGVAHVDLADMFQEGRDLIEQNIDVFDARADGEGIGKLRVXVEALHALQSVYKQYRDDLEA

SEQ ID NO: 23902 - protein, 157 aa, Homo sapiens
  MOD_RES (25)..(25): Selenocysteine
  MOD_RES (31)..(31): Selenocysteine
  MOD_RES (34)..(34): Selenocysteine
  MOD_RES (78)..(78): Selenocysteine
  MOD_RES (117)..(117): Selenocysteine
  MOD_RES (147)..(147): Selenocysteine
IFGSGNDQWVCPNDRQLALRAKLQXGWSVHXYQXEKQRRKQHLSPAEVEAILQVIQRAERLDVLEQQRIGRLVERLEXMRRNVMGNGLSQCLLCGEVLGFLGSSSVFCKDCRKKVCXKCGIEASPGQKRPLWLCKICSEQRELFYFXIYRVEPSVFL

SEQ ID NO: 23903 - protein, 38 aa, Homo sapiens
  MOD_RES (4)..(4): Selenocysteine
  MOD_RES (29)..(29): Selenocysteine
  MOD_RES (35)..(35): Selenocysteine
  MOD_RES (38)..(38): Selenocysteine
MADXIFGSGNDQWVCPNDRQLALRAKLQXGWSVHXYQX

SEQ ID NO: 23904 - protein, 83 aa, Homo sapiens
  MOD_RES (4)..(4): Selenocysteine
  MOD_RES (29)..(29): Selenocysteine
  MOD_RES (35)..(35): Selenocysteine
  MOD_RES (38)..(38): Selenocysteine
  MOD_RES (82)..(82): Selenocysteine
MADXIFGSGNDQWVCPNDRQLALRAKLQXGWSVHXYQXEKQRRKQHLSPAEVEAILQVIQRAERLDVLEQQRIGRLVERLEXM

SEQ ID NO: 23905 - protein, 88 aa, Homo sapiens
  MOD_RES (4)..(4): Selenocysteine
  MOD_RES (29)..(29): Selenocysteine
  MOD_RES (35)..(35): Selenocysteine
  MOD_RES (38)..(38): Selenocysteine
  MOD_RES (82)..(82): Selenocysteine
MADXIFGSGNDQWVCPNDRQLALRAKLQXGWSVHXYQXEKQRRKQHLSPAEVEAILQVIQRAERLDVLEQQRIGRLVERLEXMRRNVM

SEQ ID NO: 23906 - protein, 110 aa, Homo sapiens
  MOD_RES (4)..(4): Selenocysteine
  MOD_RES (29)..(29): Selenocysteine
  MOD_RES (35)..(35): Selenocysteine
  MOD_RES (38)..(38): Selenocysteine
  MOD_RES (82)..(82): Selenocysteine
MADXIFGSGNDQWVCPNDRQLALRAKLQXGWSVHXYQXEKQRRKQHLSPAEVEAILQVIQRAERLDVLEQQRIGRLVERLEXMRRNVMGNGLSQCLLCGEVLGFLGSSSV

SEQ ID NO: 23907 - protein, 126 aa, Homo sapiens
  MOD_RES (4)..(4): Selenocysteine
  MOD_RES (29)..(29): Selenocysteine
  MOD_RES (35)..(35): Selenocysteine
  MOD_RES (38)..(38): Selenocysteine
  MOD_RES (82)..(82): Selenocysteine
  MOD_RES (121)..(121): Selenocysteine
MADXIFGSGNDQWVCPNDRQLALRAKLQXGWSVHXYQXEKQRRKQHLSPAEVEAILQVIQRAERLDVLEQQRIGRLVERLEXMRRNVMGNGLSQCLLCGEVLGFLGSSSVFCKDCRKKVCXKCGIE

SEQ ID NO: 23908 - protein, 145 aa, Homo sapiens
  MOD_RES (4)..(4): Selenocysteine
  MOD_RES (29)..(29): Selenocysteine
  MOD_RES (35)..(35): Selenocysteine
  MOD_RES (38)..(38): Selenocysteine
  MOD_RES (82)..(82): Selenocysteine
  MOD_RES (121)..(121): Selenocysteine
MADXIFGSGNDQWVCPNDRQLALRAKLQXGWSVHXYQXEKQRRKQHLSPAEVEAILQVIQRAERLDVLEQQRIGRLVERLEXMRRNVMGNGLSQCLLCGEVLGFLGSSSVFCKDCRKKVCXKCGIEASPGQKRPLWLCKICSEQR

SEQ ID NO: 23909 - protein, 152 aa, Homo sapiens
  MOD_RES (4)..(4): Selenocysteine
  MOD_RES (29)..(29): Selenocysteine
  MOD_RES (35)..(35): Selenocysteine
  MOD_RES (38)..(38): Selenocysteine
  MOD_RES (82)..(82): Selenocysteine
  MOD_RES (121)..(121): Selenocysteine
MADXIFGSGNDQWVCPNDRQLALRAKLQXGWSVHXYQXEKQRRKQHLSPAEVEAILQVIQRAERLDVLEQQRIGRLVERLEXMRRNVMGNGLSQCLLCGEVLGFLGSSSVFCKDCRKKVCXKCGIEASPGQKRPLWLCKICSEQREVWKRSG

SEQ ID NO: 23910 - protein, 193 aa, Homo sapiens
  MOD_RES (4)..(4): Selenocysteine
  MOD_RES (29)..(29): Selenocysteine
  MOD_RES (35)..(35): Selenocysteine
  MOD_RES (38)..(38): Selenocysteine
  MOD_RES (82)..(82): Selenocysteine
  MOD_RES (121)..(121): Selenocysteine
  MOD_RES (168)..(168): Selenocysteine
  MOD_RES (182)..(182): Selenocysteine
MADXIFGSGNDQWVCPNDRQLALRAKLQXGWSVHXYQXEKQRRKQHLSPAEVEAILQVIQRAERLDVLEQQRIGRLVERLEXMRRNVMGNGLSQCLLCGEVLGFLGSSSVFCKDCRKKVCXKCGIEASPGQKRPLWLCKICSEQREVWKRSGAWFYKGLPKYILPLKXPGRADDPHFRPLPXEPAEREPRSSE

SEQ ID NO: 23911 - protein, 201 aa, Homo sapiens
  MOD_RES (4)..(4): Selenocysteine
  MOD_RES (29)..(29): Selenocysteine
  MOD_RES (35)..(35): Selenocysteine
  MOD_RES (38)..(38): Selenocysteine
  MOD_RES (82)..(82): Selenocysteine
  MOD_RES (121)..(121): Selenocysteine
  MOD_RES (168)..(168): Selenocysteine
  MOD_RES (182)..(182): Selenocysteine
  MOD_RES (194)..(194): Selenocysteine
  MOD_RES (199)..(199): Selenocysteine
MADXIFGSGNDQWVCPNDRQLALRAKLQXGWSVHXYQXEKQRRKQHLSPAEVEAILQVIQRAERLDVLEQQRIGRLVERLEXMRRNVMGNGLSQCLLCGEVLGFLGSSSVFCKDCRKKVCXKCGIEASPGQKRPLWLCKICSEQREVWKRSGAWFYKGLPKYILPLKXPGRADDPHFRPLPXEPAEREPRSSEXSRIYXWA

SEQ ID NO: 23912 - protein, 315 aa, Homo sapiens
  MOD_RES (4)..(4): Selenocysteine
  MOD_RES (29)..(29): Selenocysteine
  MOD_RES (35)..(35): Selenocysteine
  MOD_RES (38)..(38): Selenocysteine
  MOD_RES (82)..(82): Selenocysteine
  MOD_RES (121)..(121): Selenocysteine
  MOD_RES (168)..(168): Selenocysteine
  MOD_RES (182)..(182): Selenocysteine
  MOD_RES (194)..(194): Selenocysteine
  MOD_RES (199)..(199): Selenocysteine
  MOD_RES (228)..(228): Selenocysteine
  MOD_RES (254)..(254): Selenocysteine
  MOD_RES (272)..(272): Selenocysteine
  MOD_RES (274)..(274): Selenocysteine
  MOD_RES (288)..(288): Selenocysteine
  MOD_RES (296)..(296): Selenocysteine
MADXIFGSGNDQWVCPNDRQLALRAKLQXGWSVHXYQXEKQRRKQHLSPAEVEAILQVIQRAERLDVLEQQRIGRLVERLEXMRRNVMGNGLSQCLLCGEVLGFLGSSSVFCKDCRKKVCXKCGIEASPGQKRPLWLCKICSEQREVWKRSGAWFYKGLPKYILPLKXPGRADDPHFRPLPXEPAEREPRSSEXSRIYXWARGRVVSSDSDSDSDLSSSSLEDRLPSXGVRDRKGDKPWKESGGSVEAPRMGFXHPPGHLSGCQSSLASGEXGXGSADPPGGPRPGLXRRAPVKDXPGRAPAADAAPAGPSSCLG

SEQ ID NO: 23913 - protein, 149 aa, Homo sapiens
  MOD_RES (4)..(4): Selenocysteine
  MOD_RES (29)..(29): Selenocysteine
  MOD_RES (35)..(35): Selenocysteine
  MOD_RES (38)..(38): Selenocysteine
  MOD_RES (82)..(82): Selenocysteine
  MOD_RES (139)..(139): Selenocysteine
MADXIFGSGNDQWVCPNDRQLALRAKLQXGWSVHXYQXEKQRRKQHLSPAEVEAILQVIQRAERLDVLEQQRIGRLVERLEXMRRNVMGNGLSQCLLCGEVLGFLGSSSVFCKDCRKVWKRSGAWFYKGLPKYILPLKXPGRADDPHFR

SEQ ID NO: 23914 - protein, 286 aa, Homo sapiens
  MOD_RES (4)..(4): Selenocysteine
  MOD_RES (29)..(29): Selenocysteine
  MOD_RES (35)..(35): Selenocysteine
  MOD_RES (38)..(38): Selenocysteine
  MOD_RES (82)..(82): Selenocysteine
  MOD_RES (139)..(139): Selenocysteine
  MOD_RES (153)..(153): Selenocysteine
  MOD_RES (165)..(165): Selenocysteine
  MOD_RES (170)..(170): Selenocysteine
  MOD_RES (199)..(199): Selenocysteine
  MOD_RES (225)..(225): Selenocysteine
  MOD_RES (243)..(243): Selenocysteine
  MOD_RES (245)..(245): Selenocysteine
  MOD_RES (259)..(259): Selenocysteine
  MOD_RES (267)..(267): Selenocysteine
MADXIFGSGNDQWVCPNDRQLALRAKLQXGWSVHXYQXEKQRRKQHLSPAEVEAILQVIQRAERLDVLEQQRIGRLVERLEXMRRNVMGNGLSQCLLCGEVLGFLGSSSVFCKDCRKVWKRSGAWFYKGLPKYILPLKXPGRADDPHFRPLPXEPAEREPRSSEXSRIYXWARGRVVSSDSDSDSDLSSSSLEDRLPSXGVRDRKGDKPWKESGGSVEAPRMGFXHPPGHLSGCQSSLASGEXGXGSADPPGGPRPGLXRRAPVKDXPGRAPAADAAPAGPSSCLG

SEQ ID NO: 23915 - protein, 131 aa, Homo sapiens
  MOD_RES (23)..(23): Selenocysteine
  MOD_RES (35)..(35): Selenocysteine
  MOD_RES (50)..(50): Selenocysteine
  MOD_RES (128)..(128): Selenocysteine
LHPFHVIRINKMLSCAGADRLQXGMRGAFGKPQGXVARVHIGQVIMSIRXKLQNKEHVIEALRRAKFKFPGRQKAYLALPVLGDLQKHIVEGVQLLLYGLRSGVQRDQHQAGKDCKAQGPRAAIHSWXFSP

SEQ ID NO: 23916 - protein, 91 aa, Homo sapiens
  MOD_RES (23)..(23): Selenocysteine
  MOD_RES (35)..(35): Selenocysteine
  MOD_RES (50)..(50): Selenocysteine
  MOD_RES (82)..(82): Selenocysteine
LHPFHVIRINKMLSCAGADRLQXGMRGAFGKPQGXVARVHIGQVIMSIRXKLQNKEHVIEALRRAKFKFPGRQKGAPIPAQXSLSPSLPHP

SEQ ID NO: 23917 - protein, 28 aa, Homo sapiens
LHPFHVIRINKMLSCAGADSPIPSPPPR

SEQ ID NO: 23918 - protein, 178 aa, Homo sapiens
  MOD_RES (77)..(77): Selenocysteine
  MOD_RES (89)..(89): Selenocysteine
  MOD_RES (104)..(104): Selenocysteine
  MOD_RES (138)..(138): Selenocysteine
MGRRPARCYRYCKNKPYPKSRFCRGVPALEAARICANKYMVKSCGKDGFHIRVRLHPFHVIRINKMLSCAGADRLQXGMRGAFGKPQGXVARVHIGQVIMSIRXKLQNKEHVIEALRRAKFKFPGRQKIHISKKWGFXKFNADEFEDMVAEKRLIPDGCGVKYIPSRGPLDKWRALHS

SEQ ID NO: 23919 - protein, 201 aa, Homo sapiens
  MOD_RES (113)..(113): Selenocysteine
  MOD_RES (125)..(125): Selenocysteine
  MOD_RES (140)..(140): Selenocysteine
  MOD_RES (174)..(174): Selenocysteine
MGRRPARCYRYCKNKPYPKSRFCRGVPDAKIRIFDLGRKKAKVDEFPLCGHMVSDEYEQLSSEALEAARICANKYMVKSCGKDGFHIRVRLHPFHVIRINKMLSCAGADRLQXGMRGAFGKPQGXVARVHIGQVIMSIRXKLQNKEHVIEALRRAKFKFPGRQKIHISKKWGFXKFNADEFEDMVAEKRLIPDGCGVKYIP

SEQ ID NO: 23920 - protein, 214 aa, Homo sapiens
  MOD_RES (113)..(113): Selenocysteine
  MOD_RES (125)..(125): Selenocysteine
  MOD_RES (140)..(140): Selenocysteine
  MOD_RES (174)..(174): Selenocysteine
MGRRPARCYRYCKNKPYPKSRFCRGVPDAKIRIFDLGRKKAKVDEFPLCGHMVSDEYEQLSSEALEAARICANKYMVKSCGKDGFHIRVRLHPFHVIRINKMLSCAGADRLQXGMRGAFGKPQGXVARVHIGQVIMSIRXKLQNKEHVIEALRRAKFKFPGRQKIHISKKWGFXKFNADEFEDMVAEKRLIPDGCGVKYIPSRGPLDKWRALHS

SEQ ID NO: 23921 - protein, 181 aa, Homo sapiens
  MOD_RES (112)..(112): Selenocysteine
  MOD_RES (129)..(129): Selenocysteine
  MOD_RES (145)..(145): Selenocysteine
  MOD_RES (153)..(153): Selenocysteine
  MOD_RES (159)..(159): Selenocysteine
  MOD_RES (173)..(173): Selenocysteine
  MOD_RES (181)..(181): Selenocysteine
MGRRPARCYRYCKNKPYPKSRFCRGVPDAKIRIFDLGRKKAKVDEFPLCGHMVSDEYEQLSSEALEAARICANKYMVKSCGKDGFHIRVRLHPFHVIRINKMLSCAGADRSXSQRSGASPSSMLMNLKXWWLKSGSSQMAVGSSXSPVVALWXSGGPCXHEGFQCAAPLLILXNKFYFLSX

SEQ ID NO: 23922 - protein, 163 aa, Homo sapiens
  MOD_RES (62)..(62): Selenocysteine
  MOD_RES (74)..(74): Selenocysteine
  MOD_RES (89)..(89): Selenocysteine
  MOD_RES (123)..(123): Selenocysteine
MVSDEYEQLSSEALEAARICANKYMVKSCGKDGFHIRVRLHPFHVIRINKMLSCAGADRLQXGMRGAFGKPQGXVARVHIGQVIMSIRXKLQNKEHVIEALRRAKFKFPGRQKIHISKKWGFXKFNADEFEDMVAEKRLIPDGCGVKYIPSRGPLDKWRALHS

SEQ ID NO: 23923 - protein, 108 aa, Homo sapiens
  MOD_RES (95)..(95): Selenocysteine
  MOD_RES (103)..(103): Selenocysteine
  MOD_RES (107)..(107): Selenocysteine
PKSRFCRGVPDAKIRIFDLGRKKAKVDEFPLCGHMVSDEYEQLSSEALEAARICANKYMVKSCGKDGFHIRVRLHPFHVIRINKMLSCAGADRPXLLCQCWEXSRNXS

SEQ ID NO: 23924 - protein, 217 aa, Homo sapiens
  MOD_RES (9)..(9): Selenocysteine
  MOD_RES (31)..(31): Selenocysteine
  MOD_RES (52)..(52): Selenocysteine
  MOD_RES (58)..(58): Selenocysteine
  MOD_RES (139)..(139): Selenocysteine
  MOD_RES (154)..(154): Selenocysteine
  MOD_RES (175)..(175): Selenocysteine
  MOD_RES (209)..(209): Selenocysteine
MSSKVSRDXLYEAVREVLHGNQRKRRKFLEXVELQISLKNYDPQKDKRFSGXVRLKSXPRPKFSVCVLGDQQHCDEAKAVDIPHMDIEALKKLNKNKKLVKKLAKKYDAFLASESLIKQIPRILGPGLNKAGKFPSLLXHNENMVAKVDEVKSXIKFQMKKVLCLAVAVGHVKMXDDELVYNIHLAVNFLVSLLKKNWQNVRALYIKSXMGKPQRLY

SEQ ID NO: 23925 - protein, 214 aa, Homo sapiens
  MOD_RES (113)..(113): Selenocysteine
  MOD_RES (125)..(125): Selenocysteine
  MOD_RES (140)..(140): Selenocysteine
  MOD_RES (174)..(174): Selenocysteine
MGRRPARCYRYCKNKPYPKSRFCRGVPDAKIRIFDLGRKKAKVDEFPLGGHMVSDEYEQLSSEALEAARICANKYMVKSCGRDGFHMRVRLHPFHVIRINKMLSCAGADRLQXGMRGAFGKPQGXVARVHIGQVIMSIRXKLQNEEHVIEALRRAKFKFPGRQKIHISKKWGFXKFNADEFEDMVAKKCLIPDGCGVKYVPSHGPLDKWRVLHS

SEQ ID NO: 23926 - protein, 178 aa, Homo sapiens
  MOD_RES (34)..(34): Selenocysteine
  MOD_RES (44)..(44): Selenocysteine
  MOD_RES (47)..(47): Selenocysteine
  MOD_RES (56)..(56): Selenocysteine
  MOD_RES (73)..(73): Selenocysteine
  MOD_RES (102)..(102): Selenocysteine
  MOD_RES (148)..(148): Selenocysteine
MAQDQGEKENPMRELRIRKLCLNICVGESGDRLXRAAKVLEQLXGQXPVFSKARYXVRSFGIRRNEKIAVHCXVRGAKAEEILEKGLKVREYELRKNNFSDXGNFGFGIQEHIDLGIKYDPSIGIYGLDFYVVLGRPGFSIADKKRRXGCIGAKHRISKEEAMRWFQQKYDGIILPGK

SEQ ID NO: 23927 - protein, 131 aa, Homo sapiens
  MOD_RES (32)..(32): Selenocysteine
  MOD_RES (42)..(42): Selenocysteine
  MOD_RES (45)..(45): Selenocysteine
  MOD_RES (54)..(54): Selenocysteine
  MOD_RES (71)..(71): Selenocysteine
  MOD_RES (100)..(100): Selenocysteine
QDQGEKENPMRELRIRKLCLNICVGESGDRLXRAAKVLEQLXGQXPVFSKARYXVRSFGIRRNEKIAVHCXVRGAKAEEILEKGLKVREYELRKNNFSDXGNFGFGIQEHIDLGIKYDPSIGIYGLDFYVV

SEQ ID NO: 23928 - protein, 174 aa, Homo sapiens
  MOD_RES (32)..(32): Selenocysteine
  MOD_RES (42)..(42): Selenocysteine
  MOD_RES (45)..(45): Selenocysteine
  MOD_RES (54)..(54): Selenocysteine
  MOD_RES (71)..(71): Selenocysteine
  MOD_RES (100)..(100): Selenocysteine
  MOD_RES (146)..(146): Selenocysteine
QDQGEKENPMRELRIRKLCLNICVGESGDRLXRAAKVLEQLXGQXPVFSKARYXVRSFGIRRNEKIAVHCXVRGAKAEEILEKGLKVREYELRKNNFSDXGNFGFGIQEHIDLGIKYDPSIGIYGLDFYVVLGRPGFSIADKKRRXGCIGAKHRISKEEAMRWFQQKVKLIYLK

SEQ ID NO: 23929 - protein, 132 aa, Homo sapiens
  MOD_RES (18)..(18): Selenocysteine
  MOD_RES (25)..(25): Selenocysteine
  MOD_RES (72)..(72): Selenocysteine
  MOD_RES (95)..(95): Selenocysteine
  MOD_RES (102)..(102): Selenocysteine
MPPKFDPNEIKVVYLRCXGGEVGAXSALAPKIGPLGLIEVVPSASALIIKALKEPPRDRKKQKNIKHSGNIXFDEIVNIARQMRHRSLARELSGXIKEILGXAQSVGCNVDGRHPHDIIDDINSGAVECPAS

SEQ ID NO: 23930 - protein, 165 aa, Homo sapiens
  MOD_RES (18)..(18): Selenocysteine
  MOD_RES (25)..(25): Selenocysteine
  MOD_RES (50)..(50): Selenocysteine
  MOD_RES (59)..(59): Selenocysteine
  MOD_RES (63)..(63): Selenocysteine
  MOD_RES (105)..(105): Selenocysteine
  MOD_RES (128)..(128): Selenocysteine
  MOD_RES (135)..(135): Selenocysteine
MPPKFDPNEIKVVYLRCXGGEVGAXSALAPKIGPLGLSPKKVGDDIAKAXGDWKGLRIXVKLXIQNRQAQIEVVPSASALIIKALKEPPRDRKKQKNIKHSGNIXFDEIVNIARQMRHRSLARELSGXIKEILGXAQSVGCNVDGRHPHDIIDDINSGAVECPAS

SEQ ID NO: 23931 - protein, 164 aa, Homo sapiens
  MOD_RES (24)..(24): Selenocysteine
  MOD_RES (63)..(63): Selenocysteine
  MOD_RES (68)..(68): Selenocysteine
  MOD_RES (101)..(101): Selenocysteine
  MOD_RES (104)..(104): Selenocysteine
  MOD_RES (123)..(123): Selenocysteine
MAPSRNGMVLKPHFHKDWQRRVAXWFNQPARKIRRRKARQAKARRIAPRPASGPIRPIVRCPXVRYHXKVRAGRGFSLEELRVAGIHKKGDSSAEELKLAXQLXGPVMPVRNVYKKEKARVIXEEEKNFKAFASLRMARANARLFGIRAKRAKEAAEQDVEKKK

SEQ ID NO: 23932 - protein, 126 aa, Homo sapiens
  MOD_RES (24)..(24): Selenocysteine
  MOD_RES (63)..(63): Selenocysteine
  MOD_RES (68)..(68): Selenocysteine
  MOD_RES (93)..(93): Selenocysteine
  MOD_RES (107)..(107): Selenocysteine
MAPSRNGMVLKPHFHKDWQRRVAXWFNQPARKIRRRKARQAKARRIAPRPASGPIRPIVRCPXVRYHXKVRAGRGFSLEELRVAGIHKKVARXIGISVDPRRRNKSXESLQANVQRLKEYRSKLIL

SEQ ID NO: 23933 - protein, 211 aa, Homo sapiens
  MOD_RES (24)..(24): Selenocysteine
  MOD_RES (63)..(63): Selenocysteine
  MOD_RES (68)..(68): Selenocysteine
  MOD_RES (93)..(93): Selenocysteine
  MOD_RES (107)..(107): Selenocysteine
  MOD_RES (148)..(148): Selenocysteine
  MOD_RES (151)..(151): Selenocysteine
  MOD_RES (170)..(170): Selenocysteine
MAPSRNGMVLKPHFHKDWQRRVAXWFNQPARKIRRRKARQAKARRIAPRPASGPIRPIVRCPXVRYHXKVRAGRGFSLEELRVAGIHKKVARXIGISVDPRRRNKSXESLQANVQRLKEYRSKLILFPRKPSAPKKGDSSAEELKLAXQLXGPVMPVRNVYKKEKARVIXEEEKNFKAFASLRMARANARLFGIRAKRAKEAAEQDVEKKK

SEQ ID NO: 23934 - protein, 63 aa, Homo sapiens
  MOD_RES (24)..(24): Selenocysteine
  MOD_RES (51)..(51): Selenocysteine
  MOD_RES (60)..(60): Selenocysteine
MAPSRNGMVLKPHFHKDWQRRVAXWFNQPARKIRRRWPGPSAFLWIRGGGXSPRSPCRPXCSG

SEQ ID NO: 23935 - protein, 54 aa, Homo sapiens
  MOD_RES (16)..(16): Selenocysteine
MPVRNVYKKEKARVIXEEEKNFKAFASLRMARANARLFGIRAKRAKEAAEQDVE

SEQ ID NO: 23936 - protein, 78 aa, Homo sapiens
  MOD_RES (1)..(1): Any amino acid
  MOD_RES (20)..(20): Selenocysteine
  MOD_RES (37)..(37): Selenocysteine
XPVMPVRNVSEHLLKSRLQXRSVGEHVYKKEKARVIXEEEKNFKAFASLRMARANARLFGIRAKRAKEAAEQDVEKKK

SEQ ID NO: 23937 - protein, 48 aa, Homo sapiens
  MOD_RES (39)..(39): Selenocysteine
  MOD_RES (45)..(45): Selenocysteine
  MOD_RES (47)..(47): Selenocysteine
MAEVQVLVLDGRGHLLGRLAAIVAKQAGRWWSYAVKASXFLAISXEXS

SEQ ID NO: 23938 - protein, 46 aa, Homo sapiens
MAEVQVLVLDGRGHLLGRLAAIVAKQVLLGKSLLVAPLSWAPAGGQ

SEQ ID NO: 23939 - protein, 203 aa, Homo sapiens
  MOD_RES (64)..(64): Selenocysteine
  MOD_RES (83)..(83): Selenocysteine
  MOD_RES (92)..(92): Selenocysteine
  MOD_RES (132)..(132): Selenocysteine
  MOD_RES (153)..(153): Selenocysteine
  MOD_RES (155)..(155): Selenocysteine
  MOD_RES (193)..(193): Selenocysteine
  MOD_RES (198)..(198): Selenocysteine
MAEVQVLVLDGRGHLLGRLAAIVAKQVLLGRKVVVVRCEGINISGNFYRNKLKYLAFLRKRMNXNPSRGPYHFRAPSRIFWRXVRGMLPHKXKRGQAALDRLKVFDGIPPPYDKKKRMVVPAALKVVRLKPXRKFAYLGRLAHEVGWKYQAVXAXLEEKRKEKAKIHYRKKKQLMRLRKQAEKNVEKKIDKYXEVLKXHGLLV

SEQ ID NO: 23940 - protein, 142 aa, Homo sapiens
  MOD_RES (3)..(3): Selenocysteine
  MOD_RES (22)..(22): Selenocysteine
  MOD_RES (31)..(31): Selenocysteine
  MOD_RES (71)..(71): Selenocysteine
  MOD_RES (92)..(92): Selenocysteine
  MOD_RES (94)..(94): Selenocysteine
  MOD_RES (132)..(132): Selenocysteine
  MOD_RES (137)..(137): Selenocysteine
MNXNPSRGPYHFRAPSRIFWRXVRGMLPHKXKRGQAALDRLKVFDGIPPPYDKKKRMVVPAALKVVRLKPXRKFAYLGRLAHEVGWKYQAVXAXLEEKRKEKAKIHYRKKKQLMRLRKQAEKNVEKKIDKYXEVLKXHGLLV

SEQ ID NO: 23941 - protein, 210 aa, Homo sapiens
  MOD_RES (1)..(1): Any amino acid
  MOD_RES (63)..(63): Selenocysteine
  MOD_RES (82)..(82): Selenocysteine
  MOD_RES (91)..(91): Selenocysteine
  MOD_RES (99)..(99): Selenocysteine
  MOD_RES (139)..(139): Selenocysteine
  MOD_RES (160)..(160): Selenocysteine
  MOD_RES (162)..(162): Selenocysteine
  MOD_RES (200)..(200): Selenocysteine
  MOD_RES (205)..(205): Selenocysteine
XEVQVLVLDGRGHLLGRLAAIVAKQVLLGRKVVVVRCEGINISGNFYRNKLKYLAFLRKRMNXNPSRGPYHFRAPSRIFWRXVRGEQSVGXAGMLPHKXKRGQAALDRLKVFDGIPPPYDKKKRMVVPAALKVVRLKPXRKFAYLGRLAHEVGWKYQAVXAXLEEKRKEKAKIHYRKKKQLMRLRKQAEKNVEKKIDKYXEVLKXHGLLV

SEQ ID NO: 23942 - protein, 124 aa, Homo sapiens
  MOD_RES (43)..(43): Selenocysteine
  MOD_RES (58)..(58): Selenocysteine
  MOD_RES (84)..(84): Selenocysteine
  MOD_RES (89)..(89): Selenocysteine
  MOD_RES (105)..(105): Selenocysteine
MVFRRFVEVGRVAYVSFGPHAGKLVAIVDVIDQNRALVDGPCXQVRRQAMPFKCMQLXDFILKFPHSAHQKYVRQAWQKADINXKWAAXRWAKKIEARERKAKMXDFDRFKVMKAKKMEQNNQE

SEQ ID NO: 23943 - protein, 215 aa, Homo sapiens
  MOD_RES (43)..(43): Selenocysteine
  MOD_RES (58)..(58): Selenocysteine
  MOD_RES (84)..(84): Selenocysteine
  MOD_RES (89)..(89): Selenocysteine
  MOD_RES (105)..(105): Selenocysteine
  MOD_RES (146)..(146): Selenocysteine
  MOD_RES (149)..(149): Selenocysteine
  MOD_RES (167)..(167): Selenocysteine
  MOD_RES (184)..(184): Selenocysteine
MVFRRFVEVGRVAYVSFGPHAGKLVAIVDVIDQNRALVDGPCXQVRRQAMPFKCMQLXDFILKFPHSAHQKYVRQAWQKADINXKWAAXRWAKKIEARERKAKMXDFDRFKVMKAKKMRNRIIKNEVKKLQKAALLKASPKKAPGXKGXAAAAAAAAAAKVPAKKIXAASKKAPAQKVPAQKAXGQKAAPAPKAQKGQKAPAQKAPAPKASGKKA

SEQ ID NO: 23944 - protein, 52 aa, Homo sapiens
MVRVPGPAVQRNRALPGLAPFPDSPLASAWRARQAWRALGHACAPPPLELDG

SEQ ID NO: 23945 - protein, 59 aa, Homo sapiens
  MOD_RES (43)..(43): Selenocysteine
  MOD_RES (59)..(59): Selenocysteine
MGAYKYIQELWRKKQSDVMRFLLRVRCWQYRQLSALHRAPRPXRPDKARRLGYKAKQGX

SEQ ID NO: 23946 - protein, 145 aa, Homo sapiens
  MOD_RES (43)..(43): Selenocysteine
  MOD_RES (80)..(80): Selenocysteine
  MOD_RES (138)..(138): Selenocysteine
  MOD_RES (140)..(140): Selenocysteine
MGAYKYIQELWRKKQSDVMRFLLRVRCWQYRQLSALHRAPRPXRPDKARRLGYKAKQGYVIYRIRVRRGGRKRPVPKGAXYGKPVHHGVNQLKFARSLQSVAEERAGRHCGALRVLNSYWMESHSHSGGSAVGQSRLXAXSVSRV

SEQ ID NO: 23947 - protein, 133 aa, Homo sapiens
  MOD_RES (43)..(43): Selenocysteine
  MOD_RES (80)..(80): Selenocysteine
  MOD_RES (126)..(126): Selenocysteine
MGAYKYIQELWRKKQSDVMRFLLRVRCWQYRQLSALHRAPRPXRPDKARRLGYKAKQGYVIYRIRVRRGGRKRPVPKGAXYGKPVHHGVNQLKFARSLQSVAEERAGRHCGALRVLNSYWVGEDSXYKFFEVI

SEQ ID NO: 23948 - protein, 174 aa, Homo sapiens
  MOD_RES (43)..(43): Selenocysteine
  MOD_RES (80)..(80): Selenocysteine
  MOD_RES (126)..(126): Selenocysteine
  MOD_RES (148)..(148): Selenocysteine
  MOD_RES (152)..(152): Selenocysteine
  MOD_RES (165)..(165): Selenocysteine
MGAYKYIQELWRKKQSDVMRFLLRVRCWQYRQLSALHRAPRPXRPDKARRLGYKAKQGYVIYRIRVRRGGRKRPVPKGAXYGKPVHHGVNQLKFARSLQSVAEERAGRHCGALRVLNSYWVGEDSXYKFFEVILIDPFHKAIRRNPDXQWIXKPVHKHREMRGLXSAGRKSRGL

SEQ ID NO: 23949 - protein, 204 aa, Homo sapiens
  MOD_RES (43)..(43): Selenocysteine
  MOD_RES (80)..(80): Selenocysteine
  MOD_RES (126)..(126): Selenocysteine
  MOD_RES (148)..(148): Selenocysteine
  MOD_RES (152)..(152): Selenocysteine
  MOD_RES (165)..(165): Selenocysteine
  MOD_RES (183)..(183): Selenocysteine
  MOD_RES (197)..(197): Selenocysteine
MGAYKYIQELWRKKQSDVMRFLLRVRCWQYRQLSALHRAPRPXRPDKARRLGYKAKQGYVIYRIRVRRGGRKRPVPKGAXYGKPVHHGVNQLKFARSLQSVAEERAGRHCGALRVLNSYWVGEDSXYKFFEVILIDPFHKAIRRNPDXQWIXKPVHKHREMRGLXSAGRKSRGLGKGHKFHHXIGGSRRAAWRRRNXLQLHRYR

SEQ ID NO: 23950 - protein, 175 aa, Homo sapiens
  MOD_RES (43)..(43): Selenocysteine
  MOD_RES (80)..(80): Selenocysteine
  MOD_RES (126)..(126): Selenocysteine
  MOD_RES (148)..(148): Selenocysteine
  MOD_RES (152)..(152): Selenocysteine
  MOD_RES (165)..(165): Selenocysteine
MGAYKYIQELWRKKQSDVMRFLLRVRCWQYRQLSALHRAPRPXRPDKARRLGYKAKQGYVIYRIRVRRGGRKRPVPKGAXYGKPVHHGVNQLKFARSLQSVAEVNAGRHCGALRVLNSYWVGEDSXYKFFEVILIDPFHKAIRRNPDXQWIXKPVHKHREMRGLXSAGRKSRGLG

SEQ ID NO: 23951 - protein, 146 aa, Homo sapiens
  MOD_RES (7)..(7): Selenocysteine
  MOD_RES (14)..(14): Selenocysteine
  MOD_RES (41)..(41): Selenocysteine
  MOD_RES (91)..(91): Selenocysteine
  MOD_RES (113)..(113): Selenocysteine
MHIRKAXKYLKDVXLQKQCVPFRRYNGGVGRCAQAKQWGWXQGRWPKKSAEFLLHMLKNAESNAELKGLDVDSLVIEHIQVNKAPKMRRRXYRAHGRINPYMSSPCHIEMILXEKEQIVPKPEEEVAQKKKISQKKLKKQKLMARE

SEQ ID NO: 23952 - protein, 174 aa, Homo sapiens
  MOD_RES (19)..(19): Selenocysteine
  MOD_RES (22)..(22): Selenocysteine
  MOD_RES (35)..(35): Selenocysteine
  MOD_RES (42)..(42): Selenocysteine
  MOD_RES (69)..(69): Selenocysteine
  MOD_RES (119)..(119): Selenocysteine
  MOD_RES (141)..(141): Selenocysteine
MSYSCKSRGSNLRVHFKNXREXAQAIKGMHIRKAXKYLKDVXLQKQCVPFRRYNGGVGRCAQAKQWGWXQGRWPKKSAEFLLHMLKNAESNAELKGLDVDSLVIEHIQVNKAPKMRRRXYRAHGRINPYMSSPCHIEMILXEKEQIVPKPEEEVAQKKKISQKKLKKQKLMARE

SEQ ID NO: 23953 - protein, 56 aa, Homo sapiens
  MOD_RES (12)..(12): Selenocysteine
  MOD_RES (29)..(29): Selenocysteine
  MOD_RES (32)..(32): Selenocysteine
  MOD_RES (45)..(45): Selenocysteine
  MOD_RES (52)..(52): Selenocysteine
MVRYSLDPENPXKSCKSRGSNLRVHFKNXREXAQAIKGMHIRKAXKYLKDVXLQKQ

SEQ ID NO: 23954 - protein, 98 aa, Homo sapiens
  MOD_RES (12)..(12): Selenocysteine
  MOD_RES (29)..(29): Selenocysteine
  MOD_RES (32)..(32): Selenocysteine
  MOD_RES (45)..(45): Selenocysteine
  MOD_RES (52)..(52): Selenocysteine
  MOD_RES (79)..(79): Selenocysteine
MVRYSLDPENPXKSCKSRGSNLRVHFKNXREXAQAIKGMHIRKAXKYLKDVXLQKQCVPFRRYNGGVGRCAQAKQWGWXQGRWPKKSAEFLLHMLKNA

SEQ ID NO: 23955 - protein, 129 aa, Homo sapiens
  MOD_RES (12)..(12): Selenocysteine
  MOD_RES (29)..(29): Selenocysteine
  MOD_RES (32)..(32): Selenocysteine
  MOD_RES (45)..(45): Selenocysteine
  MOD_RES (52)..(52): Selenocysteine
  MOD_RES (79)..(79): Selenocysteine
  MOD_RES (129)..(129): Selenocysteine
MVRYSLDPENPXKSCKSRGSNLRVHFKNXREXAQAIKGMHIRKAXKYLKDVXLQKQCVPFRRYNGGVGRCAQAKQWGWXQGRWPKKSAEFLLHMLKNAESNAELKGLDVDSLVIEHIQVNKAPKMRRRX

SEQ ID NO: 23956 - protein, 132 aa, Homo sapiens
  MOD_RES (12)..(12): Selenocysteine
  MOD_RES (29)..(29): Selenocysteine
  MOD_RES (32)..(32): Selenocysteine
  MOD_RES (45)..(45): Selenocysteine
  MOD_RES (52)..(52): Selenocysteine
  MOD_RES (79)..(79): Selenocysteine
  MOD_RES (129)..(129): Selenocysteine
MVRYSLDPENPXKSCKSRGSNLRVHFKNXREXAQAIKGMHIRKAXKYLKDVXLQKQCVPFRRYNGGVGRCAQAKQWGWXQGRWPKKSAEFLLHMLKNAESNAELKGLDVDSLVIEHIQVNKAPKMRRRXYRA

SEQ ID NO: 23957 - protein, 138 aa, Homo sapiens
  MOD_RES (12)..(12): Selenocysteine
  MOD_RES (29)..(29): Selenocysteine
  MOD_RES (32)..(32): Selenocysteine
  MOD_RES (45)..(45): Selenocysteine
  MOD_RES (52)..(52): Selenocysteine
  MOD_RES (79)..(79): Selenocysteine
  MOD_RES (129)..(129): Selenocysteine
MVRYSLDPENPXKSCKSRGSNLRVHFKNXREXAQAIKGMHIRKAXKYLKDVXLQKQCVPFRRYNGGVGRCAQAKQWGWXQGRWPKKSAEFLLHMLKNAESNAELKGLDVDSLVIEHIQVNKAPKMRRRXYRAHGRINP

SEQ ID NO: 23958 - protein, 169 aa, Homo sapiens
  MOD_RES (12)..(12): Selenocysteine
  MOD_RES (29)..(29): Selenocysteine
  MOD_RES (32)..(32): Selenocysteine
  MOD_RES (45)..(45): Selenocysteine
  MOD_RES (52)..(52): Selenocysteine
  MOD_RES (79)..(79): Selenocysteine
  MOD_RES (129)..(129): Selenocysteine
  MOD_RES (151)..(151): Selenocysteine
MVRYSLDPENPXKSCKSRGSNLRVHFKNXREXAQAIKGMHIRKAXKYLKDVXLQKQCVPFRRYNGGVGRCAQAKQWGWXQGRWPKKSAEFLLHMLKNAESNAELKGLDVDSLVIEHIQVNKAPKMRRRXYRAHGRINPYMSSPCHIEMILXEKEQIVPKPEEEVAQKKK

SEQ ID NO: 23959 - protein, 171 aa, Homo sapiens
  MOD_RES (12)..(12): Selenocysteine
  MOD_RES (29)..(29): Selenocysteine
  MOD_RES (32)..(32): Selenocysteine
  MOD_RES (45)..(45): Selenocysteine
  MOD_RES (52)..(52): Selenocysteine
  MOD_RES (79)..(79): Selenocysteine
  MOD_RES (129)..(129): Selenocysteine
  MOD_RES (151)..(151): Selenocysteine
MVRYSLDPENPXKSCKSRGSNLRVHFKNXREXAQAIKGMHIRKAXKYLKDVXLQKQCVPFRRYNGGVGRCAQAKQWGWXQGRWPKKSAEFLLHMLKNAESNAELKGLDVDSLVIEHIQVNKAPKMRRRXYRAHGRINPYMSSPCHIEMILXEKEQIVPKPEEEVAQKKKIS

SEQ ID NO: 23960 - protein, 174 aa, Homo sapiens
  MOD_RES (12)..(12): Selenocysteine
  MOD_RES (29)..(29): Selenocysteine
  MOD_RES (32)..(32): Selenocysteine
  MOD_RES (45)..(45): Selenocysteine
  MOD_RES (52)..(52): Selenocysteine
  MOD_RES (79)..(79): Selenocysteine
  MOD_RES (129)..(129): Selenocysteine
  MOD_RES (151)..(151): Selenocysteine
MVRYSLDPENPXKSCKSRGSNLRVHFKNXREXAQAIKGMHIRKAXKYLKDVXLQKQCVPFRRYNGGVGRCAQAKQWGWXQGRWPKKSAEFLLHMLKNAESNAELKGLDVDSLVIEHIQVNKAPKMRRRXYRAHGRINPYMSSPCHIEMILXEKEQIVPKPEEEVAQKKKISQKK

SEQ ID NO: 23961 - protein, 184 aa, Homo sapiens
  MOD_RES (12)..(12): Selenocysteine
  MOD_RES (29)..(29): Selenocysteine
  MOD_RES (32)..(32): Selenocysteine
  MOD_RES (45)..(45): Selenocysteine
  MOD_RES (52)..(52): Selenocysteine
  MOD_RES (79)..(79): Selenocysteine
  MOD_RES (129)..(129): Selenocysteine
  MOD_RES (151)..(151): Selenocysteine
MVRYSLDPENPXKSCKSRGSNLRVHFKNXREXAQAIKGMHIRKAXKYLKDVXLQKQCVPFRRYNGGVGRCAQAKQWGWXQGRWPKKSAEFLLHMLKNAESNAELKGLDVDSLVIEHIQVNKAPKMRRRXYRAHGRINPYMSSPCHIEMILXEKEQIVPKPEEEVAQKKKISQKKLKKQKLMARE

SEQ ID NO: 23962 - protein, 133 aa, Homo sapiens
  MOD_RES (39)..(39): Selenocysteine
  MOD_RES (42)..(42): Selenocysteine
  MOD_RES (56)..(56): Selenocysteine
  MOD_RES (79)..(79): Selenocysteine
  MOD_RES (85)..(85): Selenocysteine
  MOD_RES (87)..(87): Selenocysteine
  MOD_RES (103)..(103): Selenocysteine
  MOD_RES (108)..(108): Selenocysteine
MGVDIRHNKDRKVRRKEPKSQDIYLRLLVKLYRFLARRXNSXFNQVVLKRLFMSRXNRPPLSLSRMIRKMKLPGRENKXAVVVGXIXDDVRVQEVPKLKAPGXPHSHXKPYVRSKGRKFERARGRRASRGYKN

SEQ ID NO: 23963 - protein, 138 aa, Homo sapiens
  MOD_RES (39)..(39): Selenocysteine
  MOD_RES (42)..(42): Selenocysteine
  MOD_RES (56)..(56): Selenocysteine
  MOD_RES (79)..(79): Selenocysteine
  MOD_RES (85)..(85): Selenocysteine
  MOD_RES (87)..(87): Selenocysteine
  MOD_RES (100)..(100): Selenocysteine
  MOD_RES (116)..(116): Selenocysteine
  MOD_RES (125)..(125): Selenocysteine
  MOD_RES (129)..(129): Selenocysteine
  MOD_RES (138)..(138): Selenocysteine
MGVDIRHNKDRKVRRKEPKSQDIYLRLLVKLYRFLARRXNSXFNQVVLKRLFMSRXNRPPLSLSRMIRKMKLPGRENKXAVVVGXIXDDVRVQEVPKLKXLRPLQGPEVRACQRPXGQPRLQKLXLDPXLLLKRFLLX

SEQ ID NO: 23964 - protein, 164 aa, Homo sapiens
  MOD_RES (39)..(39): Selenocysteine
  MOD_RES (42)..(42): Selenocysteine
  MOD_RES (56)..(56): Selenocysteine
  MOD_RES (79)..(79): Selenocysteine
  MOD_RES (85)..(85): Selenocysteine
  MOD_RES (87)..(87): Selenocysteine
  MOD_RES (106)..(106): Selenocysteine
  MOD_RES (122)..(122): Selenocysteine
  MOD_RES (136)..(136): Selenocysteine
  MOD_RES (158)..(158): Selenocysteine
  MOD_RES (163)..(163): Selenocysteine
MGVDIRHNKDRKVRRKEPKSQDIYLRLLVKLYRFLARRXNSXFNQVVLKRLFMSRXNRPPLSLSRMIRKMKLPGRENKXAVVVGXIXDDVRVQEVPKLKVCALRVXSRARSRILRAGGKILXFDQLALDSPKGCGXVLLSGPRKGREVYRHFGKAPGXPHSHXK

SEQ ID NO: 23965 - protein, 188 aa, Homo sapiens
  MOD_RES (39)..(39): Selenocysteine
  MOD_RES (42)..(42): Selenocysteine
  MOD_RES (56)..(56): Selenocysteine
  MOD_RES (79)..(79): Selenocysteine
  MOD_RES (85)..(85): Selenocysteine
  MOD_RES (87)..(87): Selenocysteine
  MOD_RES (106)..(106): Selenocysteine
  MOD_RES (122)..(122): Selenocysteine
  MOD_RES (136)..(136): Selenocysteine
  MOD_RES (158)..(158): Selenocysteine
  MOD_RES (163)..(163): Selenocysteine
MGVDIRHNKDRKVRRKEPKSQDIYLRLLVKLYRFLARRXNSXFNQVVLKRLFMSRXNRPPLSLSRMIRKMKLPGRENKXAVVVGXIXDDVRVQEVPKLKVCALRVXSRARSRILRAGGKILXFDQLALDSPKGCGXVLLSGPRKGREVYRHFGKAPGXPHSHXKPYVRSKGRKFERARGRRASRGYKN

SEQ ID NO: 23966 - protein, 84 aa, Homo sapiens
MGVDIRHNKDRKVRRKEPKSQDIYLRLLVKVSGQKNQLHIQPGCVEEVVYESHQPAASVPFPDDPEDEASWPGKQDGRGCGDHN

SEQ ID NO: 23967 - protein, 159 aa, Homo sapiens
  MOD_RES (10)..(10): Selenocysteine
  MOD_RES (13)..(13): Selenocysteine
  MOD_RES (27)..(27): Selenocysteine
  MOD_RES (50)..(50): Selenocysteine
  MOD_RES (56)..(56): Selenocysteine
  MOD_RES (58)..(58): Selenocysteine
  MOD_RES (77)..(77): Selenocysteine
  MOD_RES (93)..(93): Selenocysteine
  MOD_RES (107)..(107): Selenocysteine
  MOD_RES (129)..(129): Selenocysteine
  MOD_RES (134)..(134): Selenocysteine
MLYRFLARRXNSXFNQVVLKRLFMSRXNRPPLSLSRMIRKMKLPGRENKXAVVVGXIXDDVRVQEVPKLKVCALRVXSRARSRILRAGGKILXFDQLALDSPKGCGXVLLSGPRKGREVYRHFGKAPGXPHSHXKPYVRSKGRKFERARGRRASRGYKN

SEQ ID NO: 23968 - protein, 130 aa, Homo sapiens
  MOD_RES (4)..(4): Selenocysteine
  MOD_RES (27)..(27): Selenocysteine
  MOD_RES (33)..(33): Selenocysteine
  MOD_RES (35)..(35): Selenocysteine
  MOD_RES (54)..(54): Selenocysteine
  MOD_RES (70)..(70): Selenocysteine
  MOD_RES (84)..(84): Selenocysteine
  MOD_RES (106)..(106): Selenocysteine
  MOD_RES (111)..(111): Selenocysteine
MSRXNRPPLSLSRMIRKMKLPGRENKXAVVVGXIXDDVRVQEVPKLKVCALRVXSRARSRILRAGGKILXFDQLALDSPKGCGXVLLSGPRKGREVYRHFGKAPGXPHSHXKPYVRSKGRKFERARGRRA

SEQ ID NO: 23969 - protein, 190 aa, Homo sapiens
  MOD_RES (1)..(1): Any amino acid
  MOD_RES (41)..(41): Selenocysteine
  MOD_RES (44)..(44): Selenocysteine
  MOD_RES (58)..(58): Selenocysteine
  MOD_RES (81)..(81): Selenocysteine
  MOD_RES (87)..(87): Selenocysteine
  MOD_RES (89)..(89): Selenocysteine
  MOD_RES (108)..(108): Selenocysteine
  MOD_RES (124)..(124): Selenocysteine
  MOD_RES (138)..(138): Selenocysteine
  MOD_RES (160)..(160): Selenocysteine
  MOD_RES (165)..(165): Selenocysteine
XPQGVDIRHNKDRKVRRKEPKSQDIYLRLLVKLYRFLARRXNSXFNQVVLKRLFMSRXNRPPLSLSRMIRKMKLPGRENKXAVVVGXIXDDVRVQEVPKLKVCALRVXSRARSRILRAGGKILXFDQLALDSPKGCGXVLLSGPRKGREVYRHFGKAPGXPHSHXKPYVRSKGRKFERARGRRASRGYKN

SEQ ID NO: 23970 - protein, 167 aa, Homo sapiens
  MOD_RES (1)..(1): Any amino acid
  MOD_RES (12)..(12): Selenocysteine
  MOD_RES (15)..(15): Selenocysteine
  MOD_RES (29)..(29): Selenocysteine
  MOD_RES (52)..(52): Selenocysteine
  MOD_RES (58)..(58): Selenocysteine
  MOD_RES (60)..(60): Selenocysteine
  MOD_RES (85)..(85): Selenocysteine
  MOD_RES (101)..(101): Selenocysteine
  MOD_RES (115)..(115): Selenocysteine
  MOD_RES (137)..(137): Selenocysteine
  MOD_RES (142)..(142): Selenocysteine
XVKLYRFLARRXNSXFNQVVLKRLFMSRXNRPPLSLSRMIRKMKLPGRENKXAVVVGXIXDDVRVQEVPKLKPCPLHQVCALRVXSRARSRILRAGGKILXFDQLALDSPKGCGXVLLSGPRKGREVYRHFGKAPGXPHSHXKPYVRSKGRKFERARGRRASRGYKN

SEQ ID NO: 23971 - protein, 137 aa, Homo sapiens
  MOD_RES (6)..(6): Selenocysteine
  MOD_RES (51)..(51): Selenocysteine
  MOD_RES (62)..(63): Selenocysteine
  MOD_RES (68)..(68): Selenocysteine
  MOD_RES (129)..(130): Selenocysteine
  MOD_RES (135)..(135): Selenocysteine
MKASGXLREYKLKKMKKSSGEIVYCGQVFEKSPLRVKNFGIWLRYDSRSGXHNMYREYRDLXXAGAVXQCYRDMGARHRARAHSIQIMKVEEIAASKCRRPAVKQFHDSKIKFPLPHRVLRRQHKPRFXXKRPNXFF

SEQ ID NO: 23972 - protein, 176 aa, Homo sapiens
  MOD_RES (6)..(6): Selenocysteine
  MOD_RES (19)..(19): Selenocysteine
  MOD_RES (24)..(24): Selenocysteine
  MOD_RES (90)..(90): Selenocysteine
  MOD_RES (101)..(102): Selenocysteine
  MOD_RES (107)..(107): Selenocysteine
  MOD_RES (168)..(169): Selenocysteine
  MOD_RES (174)..(174): Selenocysteine
MKASGXLREYKVVGRCLPXPKCHXPPLYRMRIFAPNHVVAKSRFWYFVSQLKKMKKSSGEIVYCGQVFEKSPLRVKNFGIWLRYDSRSGXHNMYREYRDLXXAGAVXQCYRDMGARHRARAHSIQIMKVEEIAASKCRRPAVKQFHDSKIKFPLPHRVLRRQHKPRFXXKRPNXFF

SEQ ID NO: 23973 - protein, 154 aa, Homo sapiens
  MOD_RES (6)..(6): Selenocysteine
  MOD_RES (19)..(19): Selenocysteine
  MOD_RES (24)..(24): Selenocysteine
  MOD_RES (90)..(90): Selenocysteine
  MOD_RES (101)..(102): Selenocysteine
  MOD_RES (107)..(107): Selenocysteine
  MOD_RES (146)..(147): Selenocysteine
  MOD_RES (152)..(152): Selenocysteine
MKASGXLREYKVVGRCLPXPKCHXPPLYRMRIFAPNHVVAKSRFWYFVSQLKKMKKSSGEIVYCGQVFEKSPLRVKNFGIWLRYDSRSGXHNMYREYRDLXXAGAVXQCYRDMGARHRARAHSIQIMKVEEIAASKCRRPHKPRFXXKRPNXFF

SEQ ID NO: 23974 - protein, 141 aa, Homo sapiens
  MOD_RES (61)..(61): Selenocysteine
  MOD_RES (72)..(73): Selenocysteine
  MOD_RES (78)..(78): Selenocysteine
  MOD_RES (139)..(140): Selenocysteine
MRIFAPNHVVAKSRFWYFVSQLKKMKKSSGEIVYCGQVFEKSPLRVKNFGIWLRYDSRSGXHNMYREYRDLXXAGAVXQCYRDMGARHRARAHSIQIMKVEEIAASKCRRPAVKQFHDSKIKFPLPHRVLRRQHKPRFXXK

SEQ ID NO: 23975 - protein, 147 aa, Homo sapiens
  MOD_RES (61)..(61): Selenocysteine
  MOD_RES (72)..(73): Selenocysteine
  MOD_RES (78)..(78): Selenocysteine
  MOD_RES (139)..(140): Selenocysteine
  MOD_RES (145)..(145): Selenocysteine
MRIFAPNHVVAKSRFWYFVSQLKKMKKSSGEIVYCGQVFEKSPLRVKNFGIWLRYDSRSGXHNMYREYRDLXXAGAVXQCYRDMGARHRARAHSIQIMKVEEIAASKCRRPAVKQFHDSKIKFPLPHRVLRRQHKPRFXXKRPNXFF
